United States Patent Application Publication US 2013/0034624 A1 - sequence listing, part 20

SEQ ID NO: 57688 - DNA, 718 bp, Bovine  19866880664813
  misc_feature (1)..(1): n is a, c, g, or t
nattttgaaacaaattctcctcttacacagtaatcaaaaaatctctacgaacaacgaagatgaccgagtcaagtggcaggaaatgccgtggattccacgtgcaagaactcagacagagctgaaatcaaaggcgcggatggatcatcagaacgacctgcttcatttgcaggctgaaatgtacatgggcatgagcatctgtgaatacagtccacgtggggaggccttagagggagacatctcccttaggacaggagggacgcccatgaaagagaaacctcgtcattctcatcagtgtgaaaacaccttcctaaataactctctccctgccgggcagacgcaaccctacgaggcagagacaaataatgagaataatcaaagtgggaagacatttgtccctgttccaagttccgattcgcacaggagaacttcgatgggagggaagagctataagtgcagggaatgtgggaaggccttcgtgtatcagtcgttccttaagaaacacatggaaattcacacgggagagaagccctacacatgtgagaattgtgggaaaaccttcagatacatcttacaccttaataaacatttgagaaatcacaacctgaagacctttgaatgtccggaatgtgggaaaagtttcaacaagtcctcaaagcttaaggaacatattaggattcacactggagagaaaccctatagatgtcaggaatgtgggaaa

SEQ ID NO: 57689 - DNA, 1488 bp, Bovine  19866880687048
  misc_feature (1)..(1): n is a, c, g, or t
ntgagcccaaggggcagtgtgtgcattggacttccctgacctcctctgctcccccaccccagcatctcccctggaaacatctggacccctctgtgggaagagctggcggcctcaacacctgaccccactgctacaatccgagagggcactctggcccaggtaggagtggggcccgggtcgaggtggtgttgggcgttggaggtcaggtgggggctcctcgtgactctcctttcccccttgtctctccccagcccctgggccgcatgggccagccagctgaggtggcggctgctgctgtgttcttggcctccgaagccaccttctgcacggggactgagctgctcgtgaccgggggtgcggagctggggtatgggcgcaaggcaggccaggccgccccggcggaggcccccaccaccccttcctgatctcccacatttccacctgggcctccttgatgagggttctcccaccccaaactctgtctcccaaatcccagtttccaccctctgcctctgaagtgcagcactccacccaccccagccccgactgtagacattcagaccactcaccaatgtgccaaaccaccccacagtttcccataaaagcactttgcaaccaggaggaggagggcatcactgcatttatttccgaccctttatgagtcctaccatgccaggaccgggtcccccgaccccgccccacccagctcccacgcattcccacgcgtggcttagacccgagggactacaactcccggcaggccttgcggcaggagactgcaacccagggctcctgggaaaagtattgcaggttggcttcaccggcgagctaattaaaaaggcccgcaagggagagtcaattaagctctaattaggagataatggagggggttaagcaaacaggcctccactttattcttggcccttaggggaaaggagctttgacttcgcttgcagcggagtaggaggctgcccagcaccaaaaataatgagggaagagaaagctaggcggttgacattcccgggtcagagggagaaagggctgggatctggactccagggtttgaggaggagggaactaggcggtgtggactccctggctgggagggagcggagtctggccgccccctccagatggggcgaggggccccatcgggggtaagtcccccgggtgcggaggtggggctgcatcgctgctgcgggattggccgaggcgggggtgtgtgcggcaatccttgattggccgcggcggaggcggggagccgcctgggcgccgcacccttgcggctccagcctaggtggtaggggagaaggactgggcaggtgggaagaaaaacaaggagacgtcctgcggggaaggactcagaatctgactgcccgggcctgtggcttttcgtactggggaaccagaaattgggaacaaaatgtctcagggttgaattacgcagacacagtgacctaaggagcggagtttgaggatacaacagga

SEQ ID NO: 57690 - DNA, 1264 bp, Bovine  19866880789987
  misc_feature (1)..(1): n is a, c, g, or t
nccctgttgctgctgctcttcgctgctttcatgggcctgcgggcccgccaaaggtacgtgacccccccaaccaagcctgccctttgatggtcagctagaagggtcaggccaccctgtcagtttgtttctttttttttgtggatgattcctgcttcgggttggcctttctttcccttccttattcactcaacacaaccttgggagggtttcttgatctccctgagcctcagttttctcatctggaaaatgggcttaataaatagcgagaccctcctaggagggctattgtgaggaagagatgagtgaatctgtaatgagcactgggtgcagggcttgcacatggccagtgtgacacaagtgttcacagccactcactgggcacttggtgatgtgaagggtgtgttttagaacaagactgcctgggtttgaatctatttctaccatcttctagctgtgtgacctattcttttagcgtgtgtgtatgagagagagagagagagagagaaccatgtcatgtggcatgtgggatcttcgttccccaagcagggatcgaacccatgccccctgcagtggaagtgcggagtcttaaccactggagtgccagcgaagtcctaagctatgtaaccttgaacaagctgcttaaacctctctgtgcatctcagaagcagagatgacagtgagttgtggtggtgattaaatgcattaatgcgctgaacatggaaaacagaggctggtgcacagtacagacgtgtcatatgagagttcaccgttacctttattcctattattactgactgggctcttgtccgctgagtctgggcttccccaccgccaagctctgggaccagggcctgtgttttgaacaagctgctttcctgatcctgctacgtgtgagtgcagggctgccccatccagttgtacaggttgttcatcatccaaggattcatggccgaagggacaggtgggcgctggaatccagcttgtgctttgcttgctgaacctcaagctctgccttgaggcggctaccttttactgattctccctggggttggcactggccccaagagtgcgaactggcgcgaattgtccattgtacctgatcattcacttgctggttcattgattttcaagctgttttcagccatcccaacgggctcttaggaagcctggtaataaatcccacagataataaccaggctgcgctggctgagcagggagcacttcctgctgaggaccaagggtccggggtgtcatttgagggaag

SEQ ID NO: 57691 - DNA, 1455 bp, Bovine  19866880802881
  misc_feature (1)..(1): n is a, c, g, or t
ngacttaaaggaggtgctgctgataatacgccaggactgagccggcaagcaggggaggatgttgctctatgtggacatcatgtggccaaactaggatcctcagccaggcctgatcgatccttctggaataggaccctgggttcaattccagatattccccctgacccagatcaagtctcatcatctccctgggcctcagttcccaactctgccaaaggagcaccgtggaggctacacagtgtaaagcccagagtcacagctctaactcctcaagcactgaggtccagagaagggcagtgagcaggtcaaggtcacacagcaaagtcaggggctcaatgaggatttgcccccaggtgtctggactctttgggaatgtggtaatgatgaaacaaatgcaggtaaagtccttgcttggcaccgtgcctggcacacagagaccacccacccccctggcatcctaggtctgagaggtggaaaatgaatgggctgtattctcacagaccccagtttgagtccctgcctcttactgtgtgaccttagccaacactgtccattggaactttctgccatgatggaaatgttctagatcctcactgtccaatatgagagctgccagtcatgtgtggctattgggcacctgaaatgtggccactgtgactggggaattaaaaaattttttttctggctgcaccatgcagattgtgggatgttagttcctagaccagggaacgaactctggcctcctgcactggaagcacggagtcttaaccactggactgtcagggaagtccctgaatattttattttcattaatttagattagaatagccacatgtggcttatggttacccccctggacagcacagccttcaaaaaattatttaactttctctgatcctcagttttcttctctcaaaagtggggctcctgagcacccactttgcggggttctttcttcccaggagagttgataagtgctcagaatactgcagggcctatagttaagatgctcagtagagggtgacttcatttacaagttccttttggctttgttcccccaagctggcccttcctttcctcccaccaccctgtgcactgggtctgagagctgagaagccctatttcatgtcacccacagggcagctggcccacagaagggcctcacccctgcaaagatccgtgtgatcgcctttggcctcttgagaaactgcacggcttcactgtcggccaggtcctggaggctctccgggatgtgcatggcggctgctctgctgctcgggctctgggaagccagagcagggatgctgggttctgccggctgggcgctgctgtctgcaggttccaggcccacgctggggctcggctgttgcaagacaacaggaatggtggggggtggttagaatccaaggtgcagggtaaaggggctgccaggggtcccaggaggagggggtatgg

SEQ ID NO: 57692 - DNA, 1548 bp, Bovine  19866880853518
  misc_feature (1)..(1): n is a, c, g, or t
ntggaggacgggggcccgcctgtccctctggccccgctccctcgccctagcactccctcgtgagctctgccttcaccctaccctttcccgggaagcccccaccccacactttgctattaaatccatgctttcccatggcaccttgcccttttcccaaccctgcctagtctccctgactttgcccttgttcctctacccatcccagtcctggtggactctccccggcaaggagtccctgaatctctggtacgactgcacatggaatagtgacaacaaaacgtgggcctgcagtaacgtcagtgagaacggtgaggcgtgaggggcgctggagatgggtctgcagaagggagggataaccccaagtctcctcctgggaccaaggattgggaaccccccaaggtttgagtgggcaggttatgggtccccatgctgagtgactgaagctgacgtatgatggcccacctttctggatgggacgcggaagtatgctcatgttctagagtgaagtgaagtgaaagtcgctcagtcgtgtccgactcttggcaaccccatggactatatagtccatggaattctccaggccataatactggagtgggtagcctttcccttttccaagggatcttcccaacccagggattgaacccaggtctcctgccctgcaggaagattatttacctgctgaggttaaaaaccccactcctgatgatttaggagtggaggccacaacgctataggtttaaggaattgggggaaagctttcaagattctgagaagacaagaacatgttcccaaagtcctaaagaggcaggacaggtgttctgaatggatggctgggaccacactatccaagttccaatggggtggaccacattgaggttctaaagaggtgagactgaatccttgcaaggttcaaaagaagtggggtcagatgcatctgagttctaaaggggcagagctgcatccgcttaaatttctaagtcaaagaaggtgaaagattaaatgctttttccctaagagcaaaggaagaatttctgctctcacaattcgataccacatcatactggaggtagccaatgcaacaaggcaagaaaaagaaataaaaggcataaaagatgggaaaagaagaagtaaaactgtctcgattcccagtgagcatgtttatatagaaaatcctaaagaatctgcaaatggcttctagaattcctcagggaatttaggaaagttatagggatcaaagttgatataagtgataactactgagtatctgaggttgaatgactctaaatggaagaacagttggtgggagcaatgatgagcaagcaggtggagctgaactctggacctgctgtaacttccacccctgtctccttattgcaggctggctgaaggcagtacaagtcctcatggtgctttccctcatcctctgctgtctgtccttcatcctgttcatgttccagctctacaccatgcggcgaggagggctattctatgccactggcttctgccagctttgcaccagtgagcacgggttcccagggaactgaa

SEQ ID NO: 57693 - DNA, 1576 bp, Bovine  19866881357271
  misc_feature (1)..(1): n is a, c, g, or t
ntgtcacagtccagttgcaaggctgatctatcagggcctctcctcagcaaaagctgggtgcaaggggcagagaggagatgcccagcaggtgctgggtgcagggggcgcggttctcacctcttcccccaaggtagtccccaatggccgtcttgttcaggccctcgcccttgtacaggaagcgggctatctcctcaggtgtgttctgcaaaagttcgttctccaccaggaactggatccccctggtgggaagggctgagtctcagtgctggtgtgctcagaaagacaccccccagaaaccttagcctccaaacccacacccatcctcaacagagcagggcctgagtttcactttcaggctcttcccaggcccctaaacactgcctctccggtggcctagactttgcatctactgctccctctgcctttgcctggttaattccagtccccctggagcaggacctggcaaggaacaggagctctatgaatgtctgctaaatgactttacaaactaccattgcttctggcaagaagaataaagtgggaaactgttagaagacatcacacgaggagctgtgagggtcaagactcaggctggaggagggatttctcatgctctcttgatgtcttgaggaccatgaactgaggacccctaactttggatcctggtatctgagtctaggggctccctgagggcaaggcagcatcaaaccctacactgggtcctatgcattccctggcggagcagcaggccagagggaggcccgaggaaatggtgtaaaaagaatgaatgaatgaacgaacgaacatcttttctccacctggtaaacactaagtcatccttcacctgacccaaatatcctcctgagggaagccctccttgatgccaccaggctcactcctctgagtgtccacagcccagtacctctctttctctctgtcttggcacttctctgtccatattccctaccagactcaatcaagctcctcctggtgactcaagagtgacaagagaaatgggttctaaaatatgagcaaaaaggagaggaggaccactcaggcaggagttccagcatacacaaagatcaggaggctgaagcacttggttagtgttcagggaacaaatactgccaatatctggatccagggatcaggaccaactctgtcctgtctaaggcagacctttaaccacaacacttctggaacccggagatgccagaatcctatctggatgtcagcttggccgaccccagccctgtggccccaagcacctttttggggtccatattgaacttcttcctgcccattgccatcttccggttccgttgcaaggttttgctgcaggggcagagagcagagggtggaaggtcaatgcctgggtatccctggcccccgcctggccccatgacccctaggctccctgccctagccctcacctgccctcattggcctccagaccctccacctcgctcatggcttcgctgagctcctcccgcaggcgctggatctccaccagcagctcctgcttccgccgtcgaatgttctccagctccatccgctcctccggagtcaggtccgg

SEQ ID NO: 57694 - DNA, 982 bp, Bovine  19866881396772
  misc_feature (1)..(1): n is a, c, g, or t
nggcctgacccaagcagctcctcaggcaagtccccgccctcgttgatgccccggttcatggccacgaagcgctccagtcccggcttgtcccggacgttggggttgtggaggctggtgttcagcatgatcacagcgaaggacaatacgtagcacgtgtctgcaccagacagtcatggggtgatgactggggcatgcaagcctccgggacccaggagctcaagtcccccccactcccagctccctccttccccaggaccctagggcctgggcccctacctgtggactggaaaaccccagggttgcacaagcagtagcgctgggcaaaggcctccatcatgcggtcgatcttctgggcttctccagggaggcggaagctccagaggaactgcctgcggcagagacgagccaagggtagatgccaggactggcggggccaccccccacccactctcagtgcccatgggaggaactggccaatgagggcgccacacctgtggccaacctgaccactgagcgtcggccaggagactctagatgatgtatatggaaatgccctttctttctaccaaggttgctgcatggaacagatggttgcttggggcctctgctgtcatgtgggaggagggtctaccgtgagcagcacccaccctgtggcgaacacaatcaaaagctgtctttcccattccattcaagcgtctggatacggctatgcctgaaggaagctctactgtggactttggcaacactcacgtgcaatccatcccctaagttttgggttctgtttttgccttcaggagggggtgatcatcactggtaaagaaagccctgacaggtcccttcctgccctttcaatcccatccttctcacctgagggcctgcaccaggttgaggtcagtgaactcatgcagatccacgaaggcatgaagcactgccagattcagctcttccctgggaggacagggacaaggtcacgggcaggaag

SEQ ID NO: 57695 - DNA, 1373 bp, Bovine  19866881410362
  misc_feature (1)..(1): n is a, c, g, or t
ntttatgaatcaggccctgttctgtaagttgttagggtgttgacacatcaagtccacactgaaagcgtgatacagatcatgataccctgttacccataaggaaactaggcacaggatcccagggtcccaaactgggaaggtgagctaaatctaccttgaatggtccggggacaaggtcttcccaagaacttatgacaaggatggtggggagagaacactgttctcctcagatgcagccagtggcagggtccctgccttgtggaggaagtctgctccagaatgaagtcaagacactgggccagagtcctgaagacaactctgaggtcctggatccagctataccagaagctgacactacctttagcctttcagtttaccaggatcaaaaatttccccatggaggcctgcgacattctgagccgagtttgttaacacttgcagccaacagagtcctgactgatgaacagattcaccacctcccagccccagaacatacttcggaggggactctgtttctctgatgctcttggctgtctccttctctggcttctttgctttgccctctttcttgggctggaaaaatgacctggaggagcagaagagggggaaaagaagtgaatgataacagtacccataacccctctaacacatgccacatccctcagcttccgatgcccgtccccatttctggcacacagcaaaagactttgaacaatccccttggatggatgaggaaacaggcttggacagaggaggcagcactatgtgcttttctgcctcagctcacctctcatgtgagagccaggatgcatcccagtttccctcctgcaagtattaactgcgcacttactgtgtggcaggccctgtcctgggaacccaggggcacaggagcggccccgacacatcaagtccctgccctcaaggggctgacgctccaggagcaggcagacattaagcaatgtgttcactgcttagttgtgtctggctctttgcaaccccatggactgcggcccaccaggctcctttgtccatgggattctccaggcaagaatactggagtgggttgtcatgccctcctccaggggatcttcccaacccagggtctgggtctcttgcattgcaggcagattctttactgtttgagccaccagggaagccaatagctaatatgaaatgtttggaagcgttatctgctctagaaaaggtcaagtaatgggctctcccttccacccaggcattaccggccctttaggctggatcacactttgttgtggggggctatctggggcactgtaggatgttaacagcctgccccacctttacccaccagattctaagggaagccccctctccctccaagggtacaaccaaga

SEQ ID NO: 57696 - DNA, 1445 bp, Bovine  19866881416476
  misc_feature (1)..(1): n is a, c, g, or t
nccccactgccggctgaggtggagctggggaccgaagccgggcagtgtgtggggtcgggggcgccgcacctgtaggatcctgagatgacccgctcgccgtccagcagcacaaacttttcccgcacgttgccgctcacctgccgacgccagcggctctggaaactgcagccccgcacgactcggatgtctaggttctgcggtgggagggcatgcccttgctcaggccgaccctcccctcccccctgacctccacccagtgccctccctccaggcagctcctacctgggcggcccatgggagggtctatcccagcttccccaggggtctcttgtggatagtcttaactttgacagctcaccccagctgccccacccccatgccatgggcatcagatctcaggggacactctcagccagcatccaccttgatgacccagcacctcctggaagggtctgccccccgctgcttcccccgccagtgccagggaattggggtgttaccctccagccacctggcccctacctcagtggcccagggattgacccccagctgctgggccagcgtcagaaaggcgggcagctgctgacggtccaggagcaggtagacgggcacccagcggcatgtggcagcctccaccaggtccgaaagcaggtctgggtcagtgaagacgtccatgaccacggccaccagctgaggggtggggagaggggctgtgggtggagcctggggcttggggggcacattctgggggtgaggttctccagggcgtttaatggtccaggctccgtgggacattcagggaagctgagggggataccctgagacacatactacagttcattcagcgcctatgtgtgaactgactcaagggacaggagtttgagcaaaccccaggagacagtggaggacaaaggagcctggcgtgccttagtccacggggtcgcagagttggacacaaccgagagactgaataacaacgatgtgtgaatgagaagcaaacaggctttctggagcccctccacctctaactgctagaaaactgtcattataaagcacacgtctgcagcagtaccccatgggctttgacactacgtggctgccaggctccagggcttggtgggctggaggcccttcactgtgggcagctgcacacctggtcctcgggtgggataacctgccaggccaccaaggtgagctctggggacagggaaatgctgaggagcctggagctggcaggcagaaaaaggtggtggtggtgaaccctgagtcactggccagaaggccttggttcaaagccccactcggccacttaaaagacaagggacaacctaccatgcctcactttccctgtctcctcaatgggtacatgaagcccaacctcataggaccctccttgggattagggggggttaacccataaaaaaacacttagcatggggagtaga

SEQ ID NO: 57697 - DNA, 1518 bp, Bovine  19866881540094
  misc_feature (1)..(1): n is a, c, g, or t
nctccctgccccctttctgcctctgatcacacccctctctttcctcacctttccttttttccccttagatcttgtttcacatttcccactcttctcagttttcatgcttgaaggctggcctctcagtcaacactgccagccagtcaaatccgtcttgttgttcaaggagatagactgattaaatcaccgcaggtaagataaaaatctttggttctttgactcttcttggctgcttggtgtggctctgcactccaggtttgaggtttctaaagggctgaatgtgatgactaacctccttgcaccttcagtcgtgtccacctctttgcaacatggccaggctcctctgtccatgggattttccaggcaagaatactggagtgggttgtcatttccttctccaggaacctccgtgcactgtagtaaagtctgactgttcagtttggttgagtctgtgctgaagacagagagtgagccagtgacctgtgtatagcttagaaaagcagagaggtgtgactctaaggacagtgagaaatcttgaaaagcgtatgtacaaaacttgtaaatttttatattttggaactttgcttctttggggttgaggcgcactggtcacccctctgcctgtgagagctctctacagtctgtgggctagcagtgtgctgatcttttaaagtttctttccctacccaatcccccttttttgatgaggtttcagtgaggtctgttaggtgtgcatcctgcagcttaattggcttaaaatgttctcacctttggtgtggtctctctagggaccaactaggagaaaaaaaaaccaatagtgtaactttttgatactgaaaattgataaatgtctttttgaaataaagaaccagtccctccaaaaaaataaataaatacacatttcttgtatcctctcagtctgtgcctccattcattttctgagattgtggatcatctttatcattgttgctttgaattcttttcaaggttgattgcctatattcactttacttggtggttcttctggggtttatcttgttccttcatctggaatatattttcctgcaatctcattttatctaactttctatgtctgtggtctgtgttcctcagaacttacagttccttgcagaactgtaatttttcttgtttctggtgtctgtctcctggtgggtaaacttggttcagggcttgtgcaggcttcctggtgggaaggacgagtacttgctattggtgggtggggctgtgttttgtcctgctggttgggagggccatgtcaagggatgtgtttataggcagttattggctcaggatgactttaggcaacacgtttgctgatgagtgggacttttcccaattattttccagtttgtttgttgcccaccttgtgggtatggggttatttgattttattgtgaaacaggcatcctagcactggagcctgcaggctgttgagtaaggccaggtcttggtgcccagatggcaacctccaggaggtctcacactgatgagcattcc

SEQ ID NO: 57698 - DNA, 936 bp, Bovine  19866881646860
  misc_feature (1)..(1): n is a, c, g, or t
ntcccccagcccagcacccctgctctccccccaggtcaggcctgctgcactgcccgctctcctccggctctgcaggtgtctcggaggtccccgcccccaggctccccgggacccgctccccctacaccctgtggactccggtttcccagccgccatctttctggcctcgtggtttccccttgcatcctcctcgcccctcctgcttcctctcccagcctggcccttgccctacactggccttgccccctctccctccatctgtctgtctgcgcccctatctgtccctgtctctgttgctttgtcactgagtgttcatctgtctgtaactccgtctgccctgccttgctctccccccttatcccccttgtccttgctggaagtttccccatctgtcccccagccccgccctctccccagggccccctgcccctcaacactgactgatagcgctggggtgttaagctacggattagttcaggcaaaattctcgattttgcttgcgttctttcccctttggcttatgtaaacagtaattctccccagatggaactattttcctcgctcagaagcagccgggagaggtctggggcagggccaggggtggaatgccagggttcctcagggagcctggagagcggggtggaggctgacctcggggggcagcccgaggcccccagcctggccactcctctcctctgcaggtacttgcctctgctggaaccatgcccgtgacctttgccctctggctcctcctgagccaggccagcgcggacccatgttaccaccccgggggccgcccccgcttctgcctcccacccgtgacccagctggctggcatggccgcctcctgtccccaggcctgtggcccctccccgggcgtggatctcggcccacgggccccctgcaatggcagtctgaccctgggcctggggggcc

SEQ ID NO: 57699 - DNA, 1072 bp, Bovine  19866882110430
  misc_feature (1)..(1): n is a, c, g, or t
nataaaatttaaaaccaagacatgcaaaattccaaaccacattttatttcttaggcacaaaattattctctgagataacttgaaacactcactctctcagtttctgtacttacctcaccacggatcacagtttgttcaggggacaggtggtccgcacagcgcactctgagactaacgtggttaactgggcgtcatgacccactccataaattatgacaaacttttttttttaaaggaatggaatagactagaaaatatgtttgactgtattttctgtaatcagggtgagtatggttgtagggagcttctgttttagtcatatatacacccgacatcaagccagcacaccagtgtgttgttaaaacagtgcaccattgggacttccctggcaggccaggggttgagactctgcacttccacttccgggcatgtgggtttgatcccccgtcagggaactaagatcccatgtaccatgtggtaaggcaaaaaaaaaaaaatatatagtgaactatttctgaacagattggtaactcttagcaactgcccctagcctgcgccatgccagcccctaccccgggacctcccatgatccagcaagttaagggttaatgcctgacccagcaggggccttttctaattagggggtcttttctaattagaccatgatcaggccatactggggattaaatatttcaacataactcctgattgtgtatgcgcacgtgtatgtatacctacttgcgggcacgtgtactgataactgtgaacgtatgtgatgggtgaagagtagtgcttcctgctgggggtcacagtgagccagtgtgagaaccacttctggactggggcatctaccagtggcccccagaatggagaggctggttgaggacatccttgacccagatggcccctggtgggggcgctctaatatctccccattctgccccagttccagcggccccaggagcagtacccgcccctgaagtttgggacggtgcccaacgggtccacggagaagaacatccgcagcaactaccctgacatgcacagttacatcgtgcgctacaaccagccc

SEQ ID NO: 57700 - DNA, 902 bp, Bovine  19866880124554
  misc_feature (1)..(1): n is a, c, g, or t
nctttaaataagatgcaagtcttttgattaaaggatagtggtgatggttgacagggggaggacctgggctcaaccttggcctgaagagatgcctcagaactgtacagcagtgtggtccaaccttaagtcctactcagagcgcctatataattatgcattatctaccagccagtgtgaaattatttatttaatatgtttctttaaattgactcattttttccttaaataaatccagcatcatactatgtaatatagatttaatgtcctaagcatatttttctaattcatattaaaatacatccacaactattgaaatttaagatttatttttgatagcacttaaaattgtctctgaatggtctagtggttttccctactttcttcaatttcagtctgaatttggcaataaggagttcatggtctgagccacagtcagctcctggtcttgtttttgctgactgtatagagctcctccatctttggctgcaaagtatataatcaatctgatttcggtgttgaccatctggtgatgtccatgtatagagtcttctcttgtgttgttggaagagggtgtttgttataaccagtgcattttcttggcaaaactctattagtctttgccctacttcattccatgttccaaggccaaatttgcctgttactccaggtgtttcttgacttcctacttttgcattccagtcccctataatgaaaaggacatcttttttgcgtgttagttctaaaacgtcttgtaggtcttcatagaaccgttcaacttcagcttcttcagcgtgactggttggggcatagacttggattactgtgatactgagtggtttgccttggaaacgaacagagatcattctgtcgtttttgagatggcatccaagtactgcatttcg

SEQ ID NO: 57701 - DNA, 2275 bp, Bovine  19866881274165
  misc_feature (1)..(1): n is a, c, g, or t
ntttaatattctacaagcagaatctgaaaaggaatatgtgtgtgtgtgtgtgtgtgtgtgtgtgtgtatgtgtgttagtctgtcatgtccaactctttgcgaccccatggactgtagcccaccaggttcctctgtccatgggattctcctggcaagaatactggagtgggttgccatttcctcctccacgggatcttcccgacccaaggatcaaacccaggtctcttgcattgcacgtggattctttactgtctgagccagcagggaagccccatttatataatatacacacacatatacataatatgtctgaatcactgtgctgtatacctgaaactaacacaatattgtaaatcaattataattccataacaacaccactcactacctttaaaaccactgcatctgatacctcctatacagctacttcaagtaagagccttagctctgtatatatttaaatagatgaaatttcatacaaaaattattttcttaagaatatgctacttttctaacattttaataggcaattgtaaggcttaaacctattgacaactatactaagcacttctacaaacatcaattaactcattagctataatgattctggaaaggaagacgttaaaactatataagtaagctgcaggcttttcatcaggtcttctgactctgttagtcctcttacatcaaaccacagttacttctctagtacaaacatatcagtacaaaataatcctcctatttcattcatggtatatacactaatggtaaagaaggtaaaatttagagagctcttcttagagaatcatgagattatttgcaataactttcattctctcttcatactgtttaaattagtaagatgggggaaatacaatgacaaacaatgatcactaaatgtacactatggcacatctatcactgttttcagaagttccttgcactgacacaggacactacacagagcagagggtcattttctctcaagtacaagaatgacttccaaagtatggtctctgaactgcctgtagtttcctccttacctttagtggaagtgataaactaacataatcatctatcaaggaagggcaatcacgaccaaatgccagaatagctactgttagtagcaagaggtttttttactttttttccttggtgggagggggacttttataagtttattctaaagaaacaactttttaaagtgtacaaaagtatttttacaactgatgtctcagtttttattaattgaaaaactgtaaatgatatgaaaaggccgttgatagggtactagttaaaaaaatgacagtggagccaagaacagactctgatttagccactgaaggtgatgacgtgcatggagtgactgacacgctcactccagagcacagggacttttggtcgggtaatgcagtcgtcggtggagcacacacagtcctggcctaaaccacaatcagggtcccggctctgcgagacagtcgcaaaaattttgagatcaattcctatggaaaatattaaaggcctctccttggatgaggccatggtgtgtccctacctgactgctgtagacaaatggatttgaattacaaatactactttcccaagctcttcctgagagcttttcgttgtgggagatctgctgctaggacctcagggatgggacccagtccgtgtttgagagggacattgggtgggggagtgaattcctctgctttgagatgccacttgggagctctgcagaatgaaggacaatcaacttcaagagtgtttggtttctaccaactgctggaaaaaatccacaggatgaattcctgtacctcttgaggatgccagttaaacacaccttccttgaggactctactgtgagggagaacccagctgggaaagtggagccagctctgagctgttcatggggcaggtggcctggaaggctgacgggcacagagggagggggtccacaaccctcagccacctgccagatggcaacagagaatttttagagtaaagcatgtcgccatcctcagaagcagtttcagatgattgagttaggttatcaaggtcattcacataattaatttgttctttgacctacacataaataatacgggttcacaaagtcctcaaaatatgtataaaatataccaagtgtacaaaggtgataaatatcttcatcaaagcaaaagcagagccttcttaaaagaacaggtttttatcaacaggataactttatcaacagagtttctaaattatgttttcaaagtaaatgtctcttcag

SEQ ID NO: 57702 - DNA, 1980 bp, Bovine  19866880512933
  misc_feature (1)..(1): n is a, c, g, or t
nttttatatatgtgtgtgtgattttcatcatcttggggataaagtggcactttttaaaacttgatagtaaaaataaaaaaacctgaaggaaacagattttactataaaacagctggaaaaaactatatgtaactgagagttatttgactgtatattaaataatcttaatacatgaatgggcttctctggtagctcagctggcaaaaaatctgcctgcattgcaggagaccctggtttgcttcctgggtcgggaagatcccctggagaagggataggccacccactccagcattcttgggcttccctggtgtctcagacagtaacgaatcctcctgaaatgtgggagacctgggtttgatctgtgggttaggatggtggactacagtccatggggttgctaaacacacataaaaaagatagactacatattaaaaattggaaaaatttatatgtaactgacagttatttgactatatgttaaataatcttaatatgtaaatagatcttagaaaccattgagaaagataaactttccaatggtccaaaggccatgaacaatttattcaaagagaaatgatatatcctccccttttgaattgacaagtattgataatttccatattggcaagactatggagatagtcatttatatacaatgttgatataagtagaaatgggtaaaatatttttgtagaaaagtattaccatacacataccaaaatttgtgtgtgtgtgtgttttttacttagtttatcttaggagaacttatctggaggaagtaatcaggcaagtgttgaaatatctacctacaacactgtgattcaaaatattgtttataacagtgaaaaaatgataggaacctaaatatccaacaatagaagatgtgagaacaaactctagtatattgaaatggtggaacaccctgtaaccattaaaacacattctgcagagatacgcttacgaactttgaaaagctaatagacttttaatagagaaaaatatgctaccaaatatcaggagcaatatgacaacacatatatttataaatatatatgtgtgtagcctgtatgtatgtatatcatcattttaataatcagtttgttagcagaggtggacaacccaaataatgtttctgctttcatggagtgtgtgttctgcaaaggaaaggctaacaacaaacgctgcatacaaattaacaaaataaattctaatttgatgattattctgaggcaaagaaaggaataattcctgcattagggaaaatgatggcactttaataagggaactctggaaagaggccttccaggtagtaatgtttgaatggagatttaaatgaaaagaaagagctaattatgagagatctgaggaacactgccttcttggaagaaggaacagctaggacgaggattctcagacggaataagcttgcagggagggctgcagcagaaaaaagccctccataataggggtccctgcaccccgagaagtgtgtgagagaaagtctgagatcctggcagtataatggccctactgggtcccgagtatttaaaagaaaaagtgtactttaatcttagtgcagtctatgaattttttatagttacaaaaacaatgaaacaattttatttttaaaatttccttgccttggcaagtaaaaattcacatagaatcttcagcattgccctcttaagacaacactgttttgtgttccccaacagtttaacaggggatcaggttcactgaatcgcagctaattgtaaagctttcaaaattagcagaaatcttccattaagggcccagtgattatgtgtactggtttttctggcctgaatggttactaggtaaaagatgccattacagtgtaatctcatacattttaaaagctgtgttattcctgatcatttgaagaagctgactgagtctcttatattagcagagattccctaaacagtaaatactaacaatccattttattttaaggca

SEQ ID NO: 57703 - DNA, 959 bp, Bovine  19866880557964
  misc_feature (1)..(1): n is a, c, g, or t
ntaaagtacctttactcattttcaaagatctaaaatgaaagtgtagtggtagccctctgtttaaagctgtcatataatgactacattttaatgcattttccttttacaataattaaattgtaaagtgcatggccagattagctcctgatgtgaacagtttgcactacagtgatatcacttaggaattgatttatcttagaaaactgacagtgtaatggatataacatcattaaccttgaaaccaagatctataattagccaaagttgaaaggaacaaaggtcaccatctgaaggttatcctcaatatcttgatctaatttctaaaggacaaactacttcatctaacacccattgtctaactgatcagaaaacaatcattgtaaattagtctaaactaaatcaccttgtccatctgtagatttcctttgtcccataataggtaaatgacaaaggaagggaatattggattactcttgttgatgtccacctggtgcctgccccataaacatatgcagcctattaagccctttggtgttttattaatcttggccagattggccagtgtggttgctcctttctaaaagatgttcttccttcatcaagtatagatttttctgaagtttttcaagaaaatgacatcattgcaaccctggagtcttgaatagttttctcacttgaataagtttaagcaatcttgaaatgcagccttcaatttacatggtaaatacatcattccagtaaaagacaagaaaataagtacaactattatttcagaaaatcttcatgtaatgtataacatgggtttataagataatataaaggaagatataaacgtaaatgggcttcccaggtggtgctaaagaacccgcctgtcaatgccagaaacataagagccacaggttccacccctgggtcaggaagatcccgtggaggagggcatggtgacccactctagtatt

SEQ ID NO: 57704 - DNA, 2107 bp, Bovine  19866880609384
  misc_feature (1)..(1): n is a, c, g, or t
nttcttgttaaactccaaggcttgtaaaaaaataaagatcctcatgttaaaaggtagtactccttttggagtgataattccatgggatttatgccttttattaacttaagctgttttataattatttaagtagtagagaattgaaaataatgcaagtatttccttttttattattttctttttttaaatttatttattttaattagaggctaatactttacaatattgtattggttttgccatacatcaacatgaatccgccacaggtgtacacatgttccctgggagaaatatctgtaacctcagatatgcagatgacaccactcttatggcagaaagtgaagaggaattaaagtgaaattggagagtgaaaaagttggcttaaaactcaacattcaaaaaacaagtatcaaggcatacagtcctatcacttcatggcaaatagatgaggaaacaatgaaaacagtcacagactttacattcttgggcttcaaaatcactgcagatggtgactgcaaccatgaaatcaagagacacttgctccttggaagaaaagctatgatcaacctagacagtgtattaaaaagcagaaacattactttgccaacaaaggtatatctaatcaaagctatagtttttccagtagtcacgtatggatgtgagatttggactataaagaaagttgactgctaaagaattgatgcttttgatctgtggtgttggaaacgtctcttgagagtcccttcgactgcatagagatccaaccagtccatcctaaaggaaatgagtcctgaacattcattgaaaggattgatgctgaagctgaagctccgatattttggccacctgatgcaaagaactgacacactgaaaaataccttgattctgggaaagactgaaggcaggaggtgaaggggacaacagaggatgagatgattggatggcatcatcgacttgatggacatgagtttgagcaagctctgggaattggtgatggacgtggaagcttggcgtgctgcagtccatggggttgcaaagagttagacatgactgagctgaactgtactgaattgacaggaagtaagggaagtgcccaaattcagcctcctctgtccttcatgttctacctaaacgtagggaaaagagaataaactgagaaacacttatgaaggccccagccttgggcaacaactcactaaaagactgagaccttatcataggattatagaaaaatttccctctttcccttccacctcttcaccactccatcaatagggctaccatataacatcaggggaataaaactggaagaacagaaagtctcatgatattgtttaagaagaagtctctagggaaacccaaagacaacggaggagataaaagtaggacaccaggggaagctttagcctttgacacccacagccacagcaaatagtaaacacagtctaacctttagcctgataaacataaaacctcatactaatggactgtttatatcagttccttttacttaatagaggatgcccaactttcaacaacaatagaaaagaatgagaaaagggaaaagcttgctaaaaagcaaagcacaccctctgaagagacagagcaagcatcagaaccagactcaaatatggcagattttggaattaatcaaccaggaagctaaaataactatgattaatacgttaacagctctaaaggaaaaagtggaccacatgtaagaacagatgggccgcgtaagcagagagatggaaactcttaagaaagaatcaaaaggaaatgctagaaatcaacaacacagtaaaagaaatgaagaatgcctttgatgggatcctcagtagactggacacagctaaggagagactcagtgatcttgaatatattccaccagaaacttcccaaatggaaagataaaatattaaaaaggaaaaaaaaaaaacaagaacagaataagcccagaactatggggagacaattacctaaagtataacatatgcatgatgagaatgccaggagaagaaacagagaaaggaacagaagacatacacctccacaaatacaaaacaacatatgaacatggccactcactgaagcactatatgtagca

SEQ ID NO: 57705 - DNA, 1720 bp, Bovine  19866880693090
  misc_feature (1)..(1): n is a, c, g, or t
naagaaccgttcctccgttgcacaaaacactgagtgcccgggtagtttccttcgtttagatcatatattcattgctgaactgatacctagatagccaaggggaggcccctgtcacagaccaagcgggggtcatgctcccacacctgcagttggaggatgggttcggttgtcccactataaccacaggaactgagaatagaggagaggaggttccccaagataaaagcagtatattgttaccagaagagatggtagatgctgcagaggcaccatcaggatacctgccacactaagggatagccagttattcttgatacgttttgagatccaagtttgtgaaagacagtttctaaacccataaatataaaagtgcttaaaaatataagcacttaaatgtatcttgtttatcacaatatagaagactgcaaattcttggtcattgatttcattgctgtagtgtaaatttccttctcctctgtccttaatataaataggaaaaataaccatacttctacagttgaaatagagtacttgacataatacatgacacataggtaactgctcaaaaatatcatggttgttattatgattattactattattaaatactcaacttgacacatattaatgtagagtctgttatatacaagatactactaggtttaggacgcaaagatgaataagaaagtgttctgtgttaaggaacacagagactagtgtagaggataaaatatgcacaaagctctaccaggcaggatgttacaagttttccataataggaatcagtgctatgcatatattatatgtttatgtttttatatattaagtccctacttaatctcttcttcaggcaatacaaaaacagaaaataaaggaatgcattttcaaacagctttttcttaaaagattagtcattctacacacttaacctttcagatataaattggatgtcacattaaccagcaactgaatagagtgaagaacaattgactttattgttactaatatattagatagaaagacttaaagatcacaacaagtaatctagtcagaatgttatttttcagcatttaatgttatagctcttcatgcatgacaaaagacctctgcatttttttcccctatacatgaagaaaatcatattatttgatttgtttgacagaaagctttgtgatttagaaaccacttttgaactaaatgaccagactgttgctaagcaactgtgtaaaacacttcttaagtacaaaagacacagctaaaatacagcattgtaaggtctatagtagtatgtctgacatttttgtacaatcagtctaatattttcaatattctctttcataaatcaattatatatgtgtgtgagtgtgtgtattcagagaaagtaaatagattgaatgtgaaattgaaagcaaaatctcaacccaattgtgtgaatttacaataataatttttcaggtctgtttggccctgttagcctgccacgacataaaatttttctaaatatttttagaaactcttgaagcttctacacagagtattattcagatgttctggatcaatgattgctctgcaaatagattttacatttcacagatcttatttctggaaaaataccaaaacaagaaagtattacctgacttgacaacatatattccaatttagaaataattatataattaatgtaattttattgtgagagtagttagtaaaaattcagcaa

SEQ ID NO: 57706 - DNA, 817 bp, Bovine  19866881172000
  misc_feature (1)..(1): n is a, c, g, or t
nagttgtatattttttgaaatatactataacttattaagtgtacattttaggtgttaaaagcaattaaaaatctgtattcagtgtaacttgcatagtacagaaggctatgatcattcaacttatcttctatttcatcctcatattgccacttttaacttttagaatcattttcaatattgaaaacttcattgtatgacataattcctaataaactagagagagcatactaacaatttgctttgatatttgccttttcatcattcccttcccaaaatcaactggtacatgaattatgttatactcttcctaggtgttgatgccctggtcatttaattactgaaggtttcaagggctagttagagacattgtttatttttttgttgttaaaaaaaaaagaaaaatagctgttttaattatctcagtgctgaaatttagcttgaagaattttataccaggaaaaccaactcccttattcttagcacataaccttgactgtcttctaaatctctgatttcaaaataaaacttttgaatgcccactggagtcattacccaagggctttcaagatccagagtgtttcttagcaatatatgctattccaacagtatgtatccagatatgacagtactacaaaagcttttttttttttttctgtcaatgactcactttattcaaacagataattaggatttagagcctactggagacaaaaatctaattattctctgtagtcagtttcttctgcaaagatttagtctttagaacctacctatctccgcctcacttaatccacaaggaataattcgggaaagaaat

SEQ ID NO: 57707 - DNA, 2303 bp, Bovine  19866881419454
  misc_feature (1)..(1): n is a, c, g, or t
nttccgtacctcacagatagtacatgctcaataaatgttaaatgcagctattgatgttattattaccatagatattaccatcattatccttagccaatcttaatggcacaattttcctaggtaataatgaacaccagcacaaattgaacgcactaaaaaccctactctccacaatcattatcaaattttgtaagtttttgattgatcttattttaaaagaatcttaactgcattttctttaattgttttcccaatttcttcacttccttgatggccagtctcatgtctcttgattaagtcaaacaacagccttcctgttgtactaagaagatcacatctggattgagagctccttccttttcagtgagacttaatgccaccacaccacatacagaagggttttacccctcactcctgtcaaaaataaagatactattatctttttctatctctgattatggttattctatcttaaatgtgtttctctttcttccagttatttttcccccagccaaatgaaatggtatttaccctcagcccttattgcctgttatttatggccttttatttgtctttatttataactttttttgtgtgactgtgctgtgaggcatgcaggatcttagttccctgaccagggactgaacccatgcccactgcagtcgaaaggtggagacctaaccatcagactgccagggaagtccctctcttttcctttttagcgcttataatcaggcttctatcatcaccattctcctgaaaacacactcctgtgtgccaccgatgtgtgcacatttggcaaatccagtgatcctctttcattcttcatgttcatggcctctttgtgccaaaatgtgctattaattatctcatcttgaaattctcatgtccttaattcttcataaccattctcctcagagtctacaaggtgtggtgttctttagtactcactcttttcctacatattctcatatacttatttatatccatactcatctttatttacctatgttctccaaccttaagcactacccttcttgtttaatccttccctccaaatccccgatcccctcctttgtatctcttcctttgacttttttttttgtctcctgtatcttcaatttctccctctccttctcaactggctttttggtaacatattcaagtctattccttacaagtacagtgatggtaagtacaataacaacaaaaggcttccttaacaccatgtctccatttagctaccaatctcttttttcctttattccccaacttgtctattttcactgtctcagtgtcttcatcttctattcactttctgagcatctgcagttgggcttttcttctaaaaccttactaaaaattatgttaccagttaccaactgatgaatgtaggaggtttgttttattaaaattcactgcaaaatgtgacattgtgattaactgccttctcaaaaaatacctcccaaaataaacgaacaacaaaaaaaatttcactcttaactttcatgataccacattgtcttcattcctaaatctttcaaacttttttctcctaatacttttttctgtgagcaattcctcacttagccacttttaaaatactaaataataaatagaagatgactgacagtaatatctaacatttctgaacactccatctatgccaggtaatgtttcatttaagcatccagatattaaaatggggaggctgtctttctgtttgaggggaggctaaataagtgaggtgcaagactttattcgcaggaggtgctaagatataatccaactaattaatccaatattagcttaaactccattttaagactctacagaagttggtaaagctagaagagagacagagctgttttgcatggcagctggtctgctgtgcataatctaccacaccacgtatgaagcatggggtgatttctgttcaacttagtcaagtgagaagggcttcatgagcaatgttcagagagcttgatgtgcttcctccacaagttgaagaatatagaggctgaagtctagaagccacaggtgtggccggaaatgcccctttctctacagcaggttgaagagtcacctgtcagataaactgcaactcctccaatatcaacacaaaggttagttttttgaagagcaagaagttccctcgaaaggggatattacttagggtaatttctgtgtaaacccacaaagtagaatgttaaaaccccgagtttctaaatggtaagcaatgagagacaaattgggatactgacttcagagaagatactgagagcaagtcaataaaaccaaag

SEQ ID NO: 57708 - DNA, 1485 bp, Bovine  19866880154410
  misc_feature (1)..(1): n is a, c, g, or t
nctttattttccagggtccacttttatacacatagatgtaatacaaaagtcacgtggggtcagaagtcctgacttttatcaaaatcaggtgcttcatacagatgtatacaaaggtcttaggggtgttacatcatcttctggccagggggcctgctgacaatttatgaccctctccttgtgacagcggtcagtcaaccagaacacttatttctccaggagtgattattcttaaaacagacaccaccttccgaaggcaccagataaagttacattcctatagggtgaaggtgcagtgggttttaattaaggaaagaatctgcttagcctaaggtctaacatgattaatatcaaaggttaatacttatttcttctatatattcatcaatgtgtataagggcaggggatgtggagacttagcagcaaacattggctcaacaaatgaaaaacccttcaccaataaaatttttaatcagcccactatactacactaataatttcctaacttttcaaaagaatctgtttttagaaggtttaaagcatctcgtgcctctcatggttgggaggctgtgaacaatcacatgtggccgcacaaacctgtcaggcaggctagaaaaccttcagaggagtttgtagattgaaacactcctgtcatgcccaggaattactattaactggagctgtaagttaactctttgtcagagagaggtggtgggggacagcccccgtaaagtcagaggtgtaggtgagagcacaaagccgtaaaataggcagactctggttttgggggtagatgctcgagaatttccaggaggactcctgaggctcaatcccacctttgcgtgtgccgagcctcctttctcatgacctttgccacaggcggagttcctcatgctggctcctggcaaaaaagagcagtgaaaaggagctagaaaagtttgaccagttgtgtgtgcttcaaactttggggaagaaacccttggaaaagaatgggccaaagatgggaacagagaggagaggctgaaactgtcctcagaatcgcagggcacagtgagatccgactgatgaacacgctttccttctgagactgttgcctctgctctggatcaagttaaacatctattagtgcagaatgggaaaagtgctccagtttccaaggtcctgaacatgattcatcccaaaataagcagcctagtgtccttgacccaacaaatctctgcttttggtgatgactttcctgaagaaagacagatgattactcggcgcacagcaacatgtgtggtcctgtggacagactgaagtcgttctgggctcagggtctgctacaggtgtctgtgcatgctttcgttgtttcacttgatctacctacagaatttcaattagtttccatctgcaaaatacaaaatcgaatccttctgaatgccctgaactcgttctaagcaccaggctgtgttgccaaagtaacagtttgcatggaatctaggccat

SEQ ID NO: 57709 - DNA, 784 bp, Bovine  19866880388936
  misc_feature (1)..(1): n is a, c, g, or t
natggaaaagttgagggtgggccagtgaagcaggtctctcccgtgactgtttaagaagcatatttatcttttttctagttcgttctgagttgcaaaccaacttttgagggataaaagttagggaaactgacagtcattttccaagtcctgcctctaggttgattgctgcagaggttgttttttggctgcctatacttgcggctgcattatgtgtgggtcagtttcatcaccacccgtggtctcaccattgtctgtttatgcattatttctcagccctctgaggaacaggtaggactagttgaagaaggcagtggttctcaaactttagcttgatcatactgaattacaaacactaggagatagcacacacacacacacacacacacacacaccaagaaacaagttaaagctttacaactcatccttccccatttgtcttcacattttccctccaaggttattagtgctttgaaatttctcttactcattttctactatcagtttagtgactaacacatagagaattagtgcctgattagtatttacagttttgtctaggttcttttatctgtatcttcagattgactgtgactaatagaaaagatttggctccagagcctactctgttaattgttgaaagcagtgcggctcccactctgcagcagagacaaagcaaggaggaacgaggcattatgggtaatagggtgagggaactggaaagcataaaacaaagaaaggaccaaggggcccattgaacagctaaagtcagttgatgccgtcgagc

SEQ ID NO: 57710 - DNA, 1252 bp, Bovine  19866880472789
  misc_feature (1)..(1): n is a, c, g, or t
nttataacatggatattatcagatgtgaaatggatcaccagtccaggttcgatgcatgagacagggcgctcagggctggtgcactgggatgacccagagggatgggatggggagggaagtgggaggggagttcaggatggggaacacgtgtacacccgtggcggattcatgtcaatgtatggcaaaaccactgcaatattgtagagtaaatagcctccaattaaaataaataaatttatattaaaatatatcaaaaataaagaaaagaggtaacagtgaaaatcaaagaatggaagaaatattggattgtgagatatgaactaagagatacttagatacagttaaagtattcaggtttttccaggcaagttcaaatggcttaagtatttccagtttcagcttctcattgggttactgtgtaggttgacaggggagagctttctgaaaagcctatttgttgcaaaataaaggtattcttattcttacagctaataaatatggacttcctgtggtaaaactttattagtgaactgtgtgattaggaaaatgtccattaaaatacttatttcccaaatcccactcatttgaagaaaaacaagcttttaatgttacagtttagtgacaatcccttcaaaccacaaacacaaggtgcggcagtcaaagtactgagtaaattaattcagttaggatacagtactggatagagcagaaacgtaggtacaaattttttaaaaaatactaataaaataccttactcttcttcctttgaagtcaacttagaggattgatgttgtttgccaattttgcattagatgaattattttaagcatctaaaattgatcactccaagactgaataagtatactgtgcagagatcactttgctgttttcttctgttattataaagcataagaaatccctacctatggaatatttcttccccataccctgatcaaatgtaactacggagtctgaaaatctctaggactgttaatactttcattttcaaagggggtagaggttgaggaggatgtggaggacagagtgttatctgtacttgccgaagcaaagcctatttttttaaatatctcattttctagacttcttttggcagactgacctttctgtggagtagcttatcttgctgtgatgcactattcccaggcctcctggcattcacacagctatgaagaagtggagtcagaaaataaagggattgtaggaaaaaatgtatacaatcaaaataaagttt

SEQ ID NO: 57711 - DNA, 1517 bp, Bovine  19866880478605
  misc_feature (1)..(1): n is a, c, g, or t
nttggcactctgctttggtgttattcccatttttgtagcctctccttgatcattactttttgttaaatgagatgtcctgcataatgaacattttacaaagttacataaagattaagggtttcccaggcggctcaatggtaaagactgtgtttgccaaacaggaggtgctggtttgatccctgggtcaggaagactcctggaggaggaaagggaagacccccattacagtgttcttgcctgagaaatcctatgcacagaggagcgtggaggacttacagcccatggtgttgcaaagagtcagacatgactgagtgactaaacaacagtaaagctcattccaggctttggaggcctagaaattcatcatcgacctcaatctatatttataagagtatgctgaagaccacctaaacagacgtttctgttcctttggctcccatcacatatgccttgcataaccatctatgtttattgaaagaactcctggtctgtttttgttaaacactgaccttcaagtgtttgatttaataagctggggaattagaataaattgtattggcttgttccatcatctatattacaaagagctttaaggagtggctagaacaacataaaaactcagggctccaaacatctatcatagagatgaagagggaaagtcaagggaaaagattccagtcttagagatctgcatgtggaatgaagagaacagaagcccatgacttttaggatctttcccccgagtttaaaaaaaaaaaattgtcaaaggaaaaatcaacttagtacttgctttaaaagcaggcaatgtttcaaaacatgatgaagtatacttatgttaacaatttttataaataccacccaagaaagaaaagagcatttgtggcagtctttttccctctgctgctgctgaggctgctaagtcgcttcagtcacgtcggactctgtgcaaccccatagacggcagcccaacatgctcccccgtccctgggattctccaggcaggaacactggagtgggttgccatttccttctccaatgcatgaaagtggaaagtgaaagtgaagtcgctcagtcgtgtccgactctttgcgaccccatggactgcagcctactaggctcctccgtccatgggattttccaggcaagagtagtcgagtggggtgccatcgccttctccgtttttccctctaccaggtcatatagaaagctggatggaggataaagaccctatttcctgaaatgtcctgccctccaaagagactacagtgtactgaatatgggtatttccccaccccttctcatacacatgcctagaagtggacttggcacacagtaggtgcagacataatcattgacattgtttctgggagaaataattctcaccagccacattctcaaaccagtgtagcccatcttttgcttatatcatgatcagcaaggggcactatgactgagggctgttgtttacatatcctgttgcctccaaagaaacagagaatatgccatttcttgatata

SEQ ID NO: 57712 - DNA, 957 bp, Bovine  19866880567126
  misc_feature (1)..(1): n is a, c, g, or t
nattccattgtaccctctgatatggttataagtagttaatttgggagagagtatgaaatctaagtaagattttaaaactaagaataaatcaactttagtgaattcaaaaatttaacttacctgcactaatcctcaagaagaaagctctactacacatgacacatgattttcccctaggtttacatttttccttattttgtcgggtggggaaataagatgaatgaaattaaaattcttagtgatttcagtgacaaatttaagtaactttaaaatatcttagtgagaataacgtaaatttcttttctatgtacatgaatcacccaagaatcctaaggacttttaaaagctaaggaaaaattctacttggagtgcacatgtatatgaatgacaaatctagccccaaaatagcacgtgtcattgctgatcattacaaatctactctctgcctgcgatgctatgaaaactatccattttcgtgtttctttcctcctgaagagatacagagatcttgaaaaagtgaaataaaagcttcaagcttaattgggtgacagtgaaaagagcagagaattattgtttaaagctgggttttcaataaagccagtgggatagctgggagaaatgacatcgtgtaccttcccccaagctgacatttagttattaatgaatgttcagaacacctcttagttgtttacttaaattcactgccaaatctgtagacactgacacggcagatctcacccacagccccctttcactaccagtaaacaagagctttgaccctcagacttaaaggagcagaagagcaaacacaccgagcttgcatccaaagcttaagagggctgaggttagaacaggcgccttttgccaagtttatcaaatgcctctttctgcactgtaaaatcagtgggctgtccctccagccaatcaatgttatctggtatcagcaacaaaaacggg

SEQ ID NO: 57713 - DNA, 752 bp, Bovine  19866880660246
  misc_feature (1)..(1): n is a, c, g, or t
ngcctttttcccttaagtttctacaactggggaaatactcttaagattcccggattagaaaggtcaaggtagtatatttggagtaagtgcttttccagacatctatttgaatagaactaagtacatgagtgactttatatctcagtaaattcatggttattaatgacttggtaacagaaactctgtaatgaataaacaggagaatattgaagacctggcagcaatgagatatattggtgatgtgattccaaatttaaacaaattacaggggggaaatggataatgataaaataattagaaaccagaagcacctgaacaaacacccaaatcccacatctgtcttcactatattcagcaatccctaaatatcactggtgcattgaaggagaaattagcagagccttttaaacatcacctcagtgaaaagcagaattaactccttcctgttattgaaaatgttcacagagacagggggaatgacccgaatgccttcctttatgacaacaaaatttgcaaagctaaaatcttttagaaaatatatctccattacaaatttgtacataagctataggtccctaacaagattttagactaaaaatataatgatcagaatagtacactggcttcaatattgttatatatctctcctagaatacatcaatggtaaaatgaacgaatagcttagcactttattggtattttttaggtatattcaatgaagatgcagaatcagcaaagaaacttccgtagtt

SEQ ID NO: 57714 - DNA, 1771 bp, Bovine  19866880692590
  misc_feature (1)..(1): n is a, c, g, or t
ntaggatgtaatggaaagataggattttatattcagataattcttggcttactttcaattttctaatctataagtgagcttaacagtaataattatatcacaatattgaggtactagataaaaacccttaatatcttagatatattgattgttcagtaaaaggtatttggttatattatttcttatcctccttttctttcaaaagccttaggggatcccctcagttaactaaagagttgacattcatgtatatgatcaaaacttgccatagataatcctattctagctatcaaacacatatcctcctatcaaatcaaatccaaatcctatcaaacccataacctcctcccccatgtgccacatatcttcttatttaaaatctaggtccttgtatttcccaaaacccactttagtagcgtcattctattcttttctccttttccctcttagtcatctttcccctcctctgaagtcccatagcatttgaatggatcttttcttatagtggttgattataatttatgtttttctctcattatccaatttgagtaattttttttctgaatcttctttatggtagtttcttattaagtatttgattagtcaatgactgacagggccagctgttaatttggcattttgtaattttcattgccttttatatttaccatcccatttacttctcatcttaattctggggcatctgtaatgcaagtaaaagccctctcaatttggataaggtacagagaggttaagcaataggcctaaagtcacacagccaactagttacaaacctgaaataaatatatgatttttttcagattctttttccagtgtacatttcattatgtttttttgtcctatctggagacatgcttcaaacacaggaaactacaaagccctaggttgatagaagtcattatgagtttggatcagtatttaatataccaattctttctaccaatgaatacaaatatatttgtggcaaaacatatctgtctttaatagaatctaatgttgattagcactgtaaaaattacagcccttacaaaaaattattcctttgaagtgaaaactggttattttactatctgtattcattgaattaaacatagttaaaatcccaggcccacccaccaaagtaatattttaaaaatctagtaaaatctagctgacattgatgagaaattacaatttcaaatgcattacccttgtaagataaatcaaaggtaatggtaattaagataattgcaagatattttgggttctgtgtatttgcgcaagtgttgagaggtggaatataaatgtgagagtatttttgttcactttggtatcttgagcttgaaataattttttgactacaacattttttcttgctgaggtaaaatctgaaatttattgctgcaatctcatctatgcacatagtctaatattttcaaacaaaattctggttaaacttggtttgttgttattattcaccttgtataaaatatgaagttcaccaaatgcttttttaatattttctttttgtgtttgttagaaaaaattgtctcatttctattccatacacaataaacatgtaatccattattggttctgatattaagtcatcaagtcattattaaatctccaaatattacatgtcatttgattggaggagtttaagcatgaatgtttattagacataaacaatgaatgctctcttagtgaaaagtgaacccaaactatcccaagaagtggaggaatcatttggatataatgtgcacatatg

SEQ ID NO: 57715 - DNA, 1423 bp, Bovine  19866880729723
  misc_feature (1)..(1): n is a, c, g, or t
nacagcagtttctacaatgggaagaagtccagggcagagataagaaagcagaagaactccagcagagattagaatgagtagctgacatggctgagatcagaagcgatacaggcaaacaactaccaagcctaccaactttgcggaaatcaagtagtgaaacagaggtctaagatgttgtagctttgttccctaaaaagtactggtatgcaatttagtcaaacacccaatgactactgattaaatatttagtatgtgccaggtatgatctacacactagattgcaacaaagaacaaaatgaacaggatcctttgaaagaagttcacatcccatatctttagacaattataaataaatatttaagatcatggtcatttctgtggagatgacgaccatatattctgtttgtcaggaaccgccttggtttgtgcccatattcctgctgtggattattaaggtcgcctccttttaccctccaaagtgcccctgttttggtcatcttgtctataaaagaaatttcaaaaaggtgatataaaagaaagtcattataggaggggttattttggattggatgatcaggaaatgattgaataagataatgtttgagctgagaaagtcatcacacaggtcttcagaatgtgtctgagcttgaggagagagaactgtatagtgaaagagagatgcagtttgggttcttccaaatctaattttctatcttagtcccaccacatcctggatttggctaggtttcccatgggatgctcaagtggtatcatttaagtccaataatgtgagtcagaaaggaacacattaaattatatggggaaagaaactgatacttatttataatatcctgccacaaatctatatttttgaacagatatgcaataaacactgtgtaagggtaaatgctagataattaaatatctttatgtcacttagaagactcaggtctacttgaaatacaactcccaacaccagaatctataaaataatacaaggttgatgagtaattaaatgacgaacaatggaggatagacaacttgtactgctgctgctgctaagtcacttcaagtcgtgtccgactctgtgcgaccccatagacggcaggcccaccaggctcccccgtccctgggattctccaggcaagaacactggagtgggttgccatttacttctccaatgtgtgaaagtgaaagtgaagtcgctcagtcgtgtctgactcttagcgaccccatggactgcagcccaccaggctcctccgtccatgggattttccaggcaagagtactggagtgggtggccaattccttctccaataacttgtacaatgagagctcaaaggggaatgaaatcagtgcatatcagagagtgaagacagatctaagagagtggaggagaaataggatgtgaacaggtgcttaa

SEQ ID NO: 57716 - DNA, 2257 bp, Bovine  19866880753172
  misc_feature (1)..(1): n is a, c, g, or t
nacaaatttcttaagaggcagattaggtggtctggtattcccatctcttgaagaattttccacagtttcttgtgatccaccacagtcaaaggctttggcatagtcaataaagcagaaatagatgcttttctggaactctcttgctttttccatgatccagcggatgttggcaatttgatctctggttgctctgccttttctaaaaccagcttgaacatcaggaagttcacggttcacatattgctgaagcctggctaggagaattttaagcattactttactagcgtgtgagatgaatgcaattgtgcgggaccaattttctttgtaaatgtagttttactgatacagtagtccaaagatgttatgtagttcccttttctacaaaacaataaactaataacctcactagatgcattgaagagagccatatcctgttgggattacatattagtagaacttgaaagctatggcagaccatgcaatttaaggttgttttgaatttatgcatttctgtgtagtgcaacttgagtatatggccacataaattctcaaaaccttttctcttccatccctcttttctttccttcttttattttttctttccttccttaatatgggatgtttgtcaacagggccagcctcatggatatgcagtccttgtccaagcttagaagaggctagtacttgttttaatgtactgttgttgctgtctggaaattacaagtgctttttaaacatggttccctgcaatttcattctgtcatgggcccagcaagttctgtagctacttctgcttatcaaacaagtttgaaccctcctattgacaaacagctgtttacttggtagccattccttttctcccactccacccgtcagtgaaatacattagaacagggttttgtttctttccaagtagattgactacagttacttctcctttaactcatttggcacatggaacctgagcaaattcttaatatatatatatatattttttatcactttcatactcagaaaatctcagtaatattgagtttaaattttgcatgatcagcaaacagtaatctatctgttgctacattctgattaatcctttcttaattcctgctgctcttcctagttttatttctagtcagtggagcattatcaattcactaaaacatgaatatgttataaaatatcatacatttttataatttttaagaaatcaacttattaatttaatttgtcagttgtttaacaaatatttattaaacacacagactttgacaagtacttccctggtggccggtagagtctgcctgcaatacaggagacctgggttcaatccctaggtcagaaagatcccatggagaatggaaaggctacccactccagcattcttgcttggagaattccttggacagaagagcctggctggctatagtccatggggtctcaaagagtcagacactactgagtgaccaacatcatctaacattctagaaatggcagcaaagaaacagaggataaaacatccttggcccctatcctcatgtaattcacagtttagaacaggatagagatatttaataagtaattacctacttgttaaagaaatcttgacatgaaataattaggaattatggaagaaaattaaagggaacataattgccttctttccttcaatgattaaagtctcgtacatagttcaaaatccagataaatggctacttcttgcatgtagcttcttgttacttctctccctggcttactgtatgtacagtctgcttgtctagttcaatcccttttcattaatattttatttcttctttcctcaattagtgtgtggtttagattaagcctcatgtgcttcttggtccttcaagactcagaccagctattaccttctctggaacacttgcctagctttccttgccaccctgaatgctatatgtttgtgcattaattctactggagaccatttttagtctcattctcagtgctggcatagcactaaatccaacagctctgattggataaagagatgctcaacagcttctgcatggatgaaaaaatgattagttctattaagtcttctatgcttattatgaacttaaagtttaggaatattccaaattatgattgccaaattttgatatttcaggtatctggtactataacttacaaacaaaaagtaagagtatccccataagtataaaacatcatttttggctagatatttgacaatatttcctaggaactaggggagtttcaa

SEQ ID NO: 57717 - DNA, 1115 bp, Bovine  19866880974229
  misc_feature (1)..(1): n is a, c, g, or t
ntaaattttcagagagatgacagggcagaggaaagcagttttaggcttccaagagcagagacaaaggctagttagtaaaatgtgttttatacatacctctggtgcagtctcctggctggtagggtaaaaagttgtctccagtgattaacttttgttcttcctggtagagaaggacacttgaaaactgtatgtcctgcttttaggtaaataggaaaagggcagagatctttactgttgctgccgctgcttagtcgcttcagtcacgcccgaccctatacaaccctgtagactgcagccagccaggctcctctgtccatgggattctccaggcaagaatactggagtgggttgccattcccttctccagaggatcttcccagttcagggatcgagcccatgtgtcctgcattgcagacagattctttactgctgagccatcagggtaacctaagatcataactagtatctgcttattctcaactgccttcagctcaaaataatccttgtgccaaagtgggatatctgggggtagcatattctgctatcctcagctgcttctttgcagctcaatccaaaacttactagtttgaaaaatagaagaggatttctgtgtccctcaagaacacactatagcgctcttattcataaaggagcatgaagtaaaataaagtgctagtctcagaataaaactgaaagcaaaaattatgcatccccttcattggaaaatacataagacccaaaataaacaatgaggatgtcttatatttgtttaataacccttcaaaggcacttccaaatgcatgatttcatttatcctcaccaaaaacctggaaagtgtgggttgtgatgatcatcccaatgttttcaagatgaatattagccaggtcaaagagatgatggtcccatatctaatccttagctatgtaaggatcacttaacagtattgaggagtgggagaatacccagggcaagagaaatctacaaactcatcaaagtgacttagatgatagagaaaggtatgagcaagagggcagagaaaatgtcccagaaggaggacaagatgtatcctggcaagtgaatttggagataaatattggcagtttagggggttagag

SEQ ID NO: 57718 - DNA, 1358 bp, Bovine  19866881120168
  misc_feature (1)..(1): n is a, c, g, or t
naagctgctgggccccctctttacctttgtgacccatgacaagaaggtacactgaagctctcggaggatgacctatactctgttctcactgctttctcaattctgcgcaataaggagccttgtatgcttaggtagggacactccgggtagtatgtacaagttcactccataccctccacaaacaacacttggctattcttccaggctagaattacacatacttgtgtgcagtccatcattcagaagttagacttggtaaagtggttactgcaggccctgaaagctgacttgagccacttgggtaagagatgctgggaccctgggtacatagaatgtggaataaaagggcagaacatggagtacaagtggtcaggtctccttagccctgtggataagggcgtggctggaatagattcataataaacctctcaaaatcctattacccatgagtcttatgaaagtgggttctgactggactgttggcaggaaagaggaccatcgcgctaagtgggatcattccaagaatcgaagaaagagctataatcatcatttttatttttctctttggagttgctaattattcaccatttacaagacaacttcagcttactctactgtgattccaactgagaacagccaagttgcaatgcctcattaagaatgttatgattttttttctgcctgggtagacacacttctccagcttgctgaacctgagtaccagcccgagagctcctgcctctgcaaggcagactgctgccctgtccacacccttgctggctctcactctgtggggagtgggccctacttctacagggaagaaaggtaagtaatcatgcctcctcctaagaaccttatgtcagatagtctatccacgaatcaacctcatatatcatccttctgaatttccaaaagaatttttctatattttaataatgcaagtgagatgaagatagtaggagatgaaaaatggtgtactaatgtaaattttctaagatagatctcagtttttggtaggaaaaattatccaaagttcaatttcctgcaatatctggttctctttttcctattcttcacccctaacacccgctagatagaggaagatgttatttttctcatgaattaagtgaaggggaaacttgctttgtgctcatcctgtttgataagaggagaccataagaaatccttttgactctgactatcaccactcacttggttgggatacatttcattcttcgcattttttaaagtatctccatttttatgtaccttttctttagtggtccactggaaagaaaaaaagaagtgaattgaatctgaggaccctggattctctttcaactttatcattctcctga

SEQ ID NO: 57719 - DNA, 745 bp, Bovine  19866881132023
  misc_feature (1)..(1): n is a, c, g, or t
natgttcctgatttgggtgtgtaactctgactctttactaaatgactttttagtttgaacagggcccagaataagtgaaggttctgcaacaggtctgggcttctgcatagctgttctgacactcgggtcatatgataacatgatcaaaatattttcccctaaatgtaagtattagaaaagagacttctaagctgtatatgggtcttcacaaggattctgtcctggtttctaaaaaccaaaaaaatattggaagaactattgaacgctataatctttccatttcccagtatctccatgaactgaatctatgcaatgcaattaccatctacagagatccagggtcactatggattctagaatagtaaatacagaagcagaatgaacttctgcctgataaatcacaaatcaaatctaatattacttttggacaaaatggggttgacgaattctaatgggataaataaatatagaattcttatccaacccatgctatagaacatataatgagtaaactctgaaagatctaggcttatgggaagtgcagcttgttcaatgggaagggaggtatactgggagaagtgaggcctgggtttaagccaggtctgaacagcaaataaattatatgcttattagcaataagactgtccatttcttagccttcgttttcacatctgagagctgatgaggttgcagaacataaatccagtagagaatatccacattcaaagctgtacgtatacccaca

SEQ ID NO: 57720 - DNA, 1630 bp, Bovine  19866881180513
  misc_feature (1)..(1): n is a, c, g, or t
ntcttcctatcatcatctcagcaagtaggtactatgtacccattttacagaggacaagacaatctctgagaactgtaattttatagatagcctataaataaattttatagtttactataaaatgcccagagtgatacacctcctaacttgaactctcatcttctgtctccaaagttgtaatcattctcgggcaggctcctgattctatttgctcttcaagagcaaattgattattctacacctctaaagtatgaatgtatctgcctattatagaacttaacattttgcaatagctctgatttactgcaggctgcagtactggaggcactacactgtgaaaaacttaaagacagtggatctgcctgcaatgcaggggactcgggtttgatcccctgggtcagaaagagctgcttgagaaaggaatggctacccacttcagtgttctttcctggagaatcccatggacggaggagccttgtgggctttagtccatgggattgcaaagagctggacttgactgagcaattaatacgttcactttcatactgggtaaagttctggttactgagtaggggattaattattgaatagataatgaatacaatcattcatagctttttaatctatgtatttgattaactcaatcaacagaaggagcctggccttgggacccaggccttatttggtttattttaggcacatgtcacctgaggttgttacttttcttcttgttggtgttcatgatctgagcaaatccagacagaagtaacaagcagagctgcaatcagaatttggactgtctgattacatgtcttatgttgcatgcaatacaggttaacatctaggatatgatcaaagcatatgtaaataataaatagattatcgtttttctacttgctctaaatcagtggtactgccctgtttaccatttgtttatcaagcactaaatttttggaaatctttttctacattgaaatatttaactggatattaatttacaatttttctcttgtttttttaaaatgtggaggacatcattatcccagttttagtttctgatgttggaaatgactatccaagcaataaatgtagaatggatggtacagcagaaatagttctaggctaggtgaaagtgggcaggagagttagtgacggagatcagaggttagaagactgagccccagctctgctgttactcaacatctatttaaccctactgtgtgctgggcatcctaccagctgatggttgcacaaagatgaatgaagtgagatcctaagcagctcacaatttactagaggaagccttgaggtcatcgtgcagtctaaaaattgtgtagttgaacatgaggctctcctccaaggaaggaggacactaaaggcccttagcagaggtgtcactcgtgtgattatgttgcttcctttgtcagtacgttgaattttatagccctttcaatcaaaagagaaaacagatttgtatattatcaatgtttttagtttaaataaacagtcaccattactactactgaatttcaccacagtgaacaagtggtaataatatagaaaatgtataaattcatatatacagagacagaagtaaaagcagagggataagcagaggaaaaaaagagag

SEQ ID NO: 57721 - DNA, 980 bp, Bovine  19866881193504
  misc_feature (1)..(1): n is a, c, g, or t
ntttttttcttccaagtattcagtaaaaagggactcaatagtcagcagtttaattattctttgcaagcataataacttcctgagaaccaagagcactatcttgtgacaaagctggtttccacatttttttttaataaggaagggttcagagtggtgatttcttgatatccctgaaggttttttaggagcgatcttatccaagcagtacattttctaaagatataaagggagccgtaaactgttcagaaaggctgaagcatctcatttctttcttacatttcctttttctagggatagttctctgcaagaccacaggtagtcataaaagcatccagacaacctcctgctccaaatcccaggcctgttaagaaatattcatatctgcacaaaattgctgatgataataaaaataatgaaaataaattctacagacttggaaagtcccatgaaaattcctccctgtagttttagcactgtctttgcatattcagctttgaaacttccatctgcagtaatgctgagtgctctgcttgagtgaatacctaatccttccaataagttatagtcactaaaaagtgcctgtcccatgaagcagaaactgactattttgctgaattttattgctggttatcaggagcagtgtgcaggacaaaacaatttcatactgatctctctactgtatcaaatatatacaaatagatctgttccttatgatttttaaaagttagatttttacactgattagagactggaaagagacctttatgattttggctgatactcctataggatggagaatttaatctgtaattcagaattaattatttggttttaaaaagaaaaaaaaattatattcagggaacatcctaggagattctgatctagtagctactttatgctggggcttaaaaggctgtgtttctgtttttaatatcctcaggaaaaaaagaagcaatatatatctagcatatgttaaagta

SEQ ID NO: 57722 - DNA, 767 bp, Bovine  19866881215345
  misc_feature (1)..(1): n is a, c, g, or t
nacagcattgctgctatcaattaatattttatcctcctgaattttactaccaaaaatcagttctactacttcaaagattggcaagttaaaaaacgttgtaacttctttttaatagtgatatatatatatacttacatatgtatatattatttttcattgaaataatatgctttgaatgatttaaaacctaattattgatgtcagttctacatccaagccattctttattctcaagtgaaaaaatggtgttcctgagacatttgctaataccttccggataaggataagatcttttactgccgagttatttatgcatattcacttctcatattgtgtgtaatgtgggaagatgatgaaaatatttaagcctgcctgtgtttctaatcttcctgacggagttcaggagcttagctaagatgacagcatcccaaactacatccggtatacaggttgttgctgttaatatgttaataatggtcagtgtatcttatctttagaaagtctttccttctacaagtgggtccattagattctactgtttagaccagtgtaagaacatcagaagttctcatgcaattttcatatcttttttttttttttaagtcttctcaatctgtaacaagttctgctcaggcacacataagaataatattgtaataggattaaataaaccctcagaaaatagaaatttctggtttttttttctcatattacacagtaattttatttaactgtgggaataattttatttaaccctcacatttctc

SEQ ID NO: 57723 - DNA, 626 bp, Bovine  19866881267550
  misc_feature (1)..(1): n is a, c, g, or t
naattccatgtctaatgctcttagtagtatgatccatgatggctcagtggttaaagaatctgcctgcaatgctggagacaaaggagatgtgggtttgatccctgggttgggaagatcccctggaagggcgtggcaacccactctagtattcttgcctaaagaatcccatggacagagaagcctggcaggctacagtccaaaagatagcagaaagtaggacacgactgaagcaactgagcacacatgcatgcagtgtgacctgaggtgaactactctctgtttggcatctcaagtatgccatctctgaattgggaacaatagttagaaaccttgcaagtttgttctgaaggttaagagaaatcattaacagattttaatttctttacacagtacacatcataaggcaaagtaatcacaaggaagtgttagttcttttgttcctttgagtctgatggactttttctgttaaaatgattccaatcatcagaattttcaaatctctcttatttgctggtatcttagtaattaccacagagggaggatatcttgatttatgaatcaattctgtttttcattcccagcatttcactatccctagatgtttccccacttccagcagcagccag

SEQ ID NO: 57724 - DNA, 1702 bp, Bovine  19866881267674
  misc_feature (1)..(1): n is a, c, g, or t
nattatagacgtaaagtaatatcccagaatcaaatgactattaagaggtgaaacagtgattagaatccaagcaaaataattctatatcctctgagaaatctctgaacataataaatctcttcttctaatagtccctttgtagacattaatgtttttgaaatattaactataaaagatcctaaataagatcaaattgtctaagtattctctttattccactcctagataaaaaaattacttacactttctaatatctccataaatgattttatctttcttaaacatttcagtttagaaagacctttctgatagttcaaatacacacagctttaacattctattgcatttggagaagcaaaaatgctaagagaattttaaaagagtctgctttgtaaatttcaattaagctatttgagatagaaattataggtccttccctatcaagtcctcattaaagatcacagaatggtcacaaagtcagtagagttttccaactggcccaatttattgacagacccagcaaacctacacttctgtcaacaacaaaggaaaattaagaagttgggttctgaacattcatctttgagtatatggctaaagtcttgtttagctctcatgggaaagctgtattacagtatcatagatatctgctaaataaagtgagcaccagaagtgccaaagaaatcctagtgcatactctacaaagggcttagcagttggtttcctttttgtctttttatgaacaggattataaataaaagatactgtttttcaagtcatgtgtgttattgcacttttgtaaaattttgccttttatcaaggttagtagtaggaagaaggatgattctttcttaattcagtaactacttcaacatgatttaatacatatttgtgtgaaaagtggatattttcacagcccagtgttgcatacagagataatgaaatagctttgccattgaaattttgattcaatttctccttggaacctgttaacataaaaccactttcatttttatagctggaaaatagataatttactcttgtgaggttttaggaatattacagaccagcataactcttgagcttcccaaattcctcactatgtagagagaacctgtgaattcaaaaccctggccatgtgtgttatcctcaaaactttgctcaaggtaaaaatattatttgtatgcaccctgctcgtgctcgtgctcaattacttcagtcatgtccaattctttccaaccctatgcttgcatactcacctggtattaatatttctttttttaaaaaaagaaacactgaactttgaattgcaaaaaaaagaaaaagaaccggactatgaaacattaataaattataacatgatgtgtttatctgttgttgcaaacccatataagttttgagaaactctatcacaaggatgcctaaaatagcagccccaaatgtcaaattctaaagctacagggaaggacatttctctcttctcctgaaatgcaacgaaaatctccttgaggtttgatgaattagcccactatggaagagaaggaaagatgagccgagtagcagcactgtctgtcagtcccaaagtgggacattaatacccatttcctaagaaagaatacatgctatataaatgatcgaatctggattacctgacagacttatagaacttttgaaatggaaattcccgtgtagattatcaagt

SEQ ID NO: 57725 - DNA, 809 bp, Bovine  19866881314701
  misc_feature (1)..(1): n is a, c, g, or t
ntccaggggatcttcctgacccagggatcgaacctgggtctcctaccattgcaggcagattctttaccacctgatccaccacagaagccctaggatatgttatagaatgctcatatactaataatctagtgaagaggggaaatgatgatgtaagagagaataggtacttcctggagagctaaggggatccacagaatgagtagaagagtagctctaagatctgagcctggttgtgttttatctgaaactaaagagaaccctgcacaagtggatgcaggggagagactggcaggtgggactatgtgtgcatttcattatgaaggttccattgcagggctaaaaacttttagaaacagcagtaaaagaagaggaagagagttttgtttctgtctccaacgagctttgttaggaaaccagcataagaaggtagtcagcccacctaccaggaggcgctggaggattgacaaggcctattagccatttactgctttggttttccctatgaacagaattccatgatgagatattcctgtttgatatgaccatatcatattcatgactatggtaataagaagagacagagcagtagatgagaatttgctgtgattcatttacttttcagggaagaaataaccacatgtgcttccattgaagaaatatgaatttgcaaccatgagaaaactatcttttttgaataactctgctttcttaaaaaatgtagccttcagatttggggaaactgaagtaaacccagagaattcatctagccagtgaacatgacgatgacgaatctttttttcctcctcatt

SEQ ID NO: 57726 - DNA, 812 bp, Bovine  19866881349939
  misc_feature (1)..(1): n is a, c, g, or t
naaatggggagagaatccagcattatattgctgagagctgcacatcaacacttccaactatttgctatgtgagttttaggacaaaacaatgtaacccaaatgtgaaggtgtgagtgcacaatgaatatgcaaagctgtaaactaagtgataatttttgccttgattgtgtgagctaactactaaggtcataattagggtgcatttcttatagtaccaacaagcatcttaatcaacctctatagcattaactccaattaccattagtaaactatgaggattctgttttaaattgcaatgagtcagtaaattccagatggcattttgggagtaaatgttaacaaaaccttatcattttcctgagcggtcctttaagacatgggtgggggctgcattgaggccgaagcaataatgggaggctgaagagttattcgatttcacaagtggtatttgtactctgatgtgaaacacacagttatccttaagaactgttaatgattattttatagatgaattttagctttatagctttaaagaaagacattttgtttagctgaacaaactaatagactaataaactcaaaataaagtctgataaacagggtcctttgaaactctcatcattaaattacaatatttgcataaatttgaacaaagatggatggctttaaatgactgtcagtaattaagagaccgaaacaaacaaaaaaaactaataaaacattatatacaaagacaggcacattagcatattctatccatatctccattgcagtgacatgaagacaaatattcctgattacacctgaagcaa

SEQ ID NO: 57727 - DNA, 1009 bp, Bovine  19866881413122
  misc_feature (1)..(1): n is a, c, g, or t
nttctctttgatattcttctgcatcttcttacatacagttctgaattctttgcccttcctttctttgaatttactgggtatcgtggctcttatcctctgttctttaatatatttcattaaagagatgctcatggaaagttgacaacaatctgcctcatccttcacatttccttacatctaatgaggttgttcttgtaagaagtaaacaccagaagcacattccattccatcttttacattgctttgatgctttgtttaaatttattctgtaaataatatcttaaatcaatgcctttcttttgaaggtctttgaatctatttggaatagcatgactatttttatctttgactccacttatatttcatgatccaatttagaagcagtatggtgtattataaagagctggatatactcagtctaaggttttgaatcctaggtcagccacttaactatgtgaccttgggtaacttgccttctagtttcttttgcattgcctttaaccctcacaggctgttgtgaggataaagaaaaatacctgacaaatggtataccctttgtaaacaatggttaaatgatgctgacatctgcttgaaagatactcagaaaattctgagtcattacccacagaattaatctgggggtaaattgatttaattgatgctctctttaacgtctttgcactatgctgctaatgatgatgtggcacgcttccctgaaagtaaaagcaagacctccttcataccatggctgatctctttctatttccataatagaatattgctgatagccttttccctattgagctcttctggataccttccctttaaagaaaagccattcataagagcctttaccactttgaaatatttgtgcaaatcattaaaatatatgctactaaggatgcattgtgatgcaagaagtggctactatgaagtcatttttacttaagttcattaggataaaacatgtttcaaaagggagataattgtactaagtaaaaaaggaagc

SEQ ID NO: 57728 - DNA, 853 bp, Bovine  19866881419661
  misc_feature (1)..(1): n is a, c, g, or t
ntccttctaatgctgaaagcccctttctatccccctttccctttcaacctgcccccagaattaaataatttgtacctaggttttctcgtgaatggtgcccactctgatgcaggcaaggtgctgtttgagaaagaaaatgattgaagctcagaagtcaaggaagccaagaactgccaagaaggagacaatttccctctgtactctccttcctcaccccacactttcctcacatatcacactcccaggctgatttttcctttcagaggaaatgaagcaaaacacataaatggagtgaaatggtttattcctcagagtcgtaaaaccacagttccttgtaaaaggtgaagaaaatgagctcctcttatagataagtgaggcttttaggtaaaatgtcaatatcccaggcccttgataacttcctaacatatgactttctatagagacagatttttgtcaaccaccatggaaactgtttgacttgaagcagaaaaatgacttcaaattatgaaaatctgaccttcaagtatggagatgcttcctctgaatgattttattttgaagataaacaaacatagacctgctcaattttaaatatgtgttctggatcaaaaaaaagtttttcattttttaaattgataaatgactatgtttcaatgggtactgcattttctcctattggaaaaaatactgtgcatttcatattaatattcttttccttttaaaagtaacctctaagatgttgtataaacacatgccaaaaatggacaagttcaaaggagaaatgaaaaatgctggtgtttgttctccctgcacttctgtgtgtactttttaaaatgggatcatcattttgcat

SEQ ID NO: 57729 - DNA, 761 bp, Bovine  19866881641670
  misc_feature (1)..(1): n is a, c, g, or t
ntatgtaatccagtgccatcattttacacagcagggcattgaaacctgaagcaactcactcaactctgggctttgagaaatccagaatgcctgctaactctcagtctggtgcttgtctcacaacctccctctcttgctgcatgagctctggagttaaacatggagcagggggtcagctgtggatggatctgaatatgaatttgcagcatgcattaaaaaggcttttagtgtgactactgcagtgaaaattgaatagtacagttactgtcctggagagtttgttacatgaaaactgcattaggtggttttcggttacagcgcacggttagtgtcacccattgtcatgcatttgttcccagactgattttcctgcagaaggtcagagtcctgtgttactctgacaccactgtgacaggatcctgaatatttaattgcgctgctctgatgagaggggggtctggcagcaagttccaggggagtctgtgcagtgtgattctcttctgactgctgtttggaaatgaatccgtggagcacactcaaggacattcaagaggcacagcagattctgaggcattcttttccttcagctagtcaaaactgaacttagaactgaagtcctaaagaaatcttttttagaaaatgttattttattgtggtaaaagtcacataatatcatccatctcctgaatttttcattgtcctaaactgatatcccatccccattaaacactaacttcctccccagtctccagccctctgcc

SEQ ID NO: 57730 - DNA, 1433 bp, Bovine  19866881735001
  misc_feature (1)..(1): n is a, c, g, or t
ncaatttaaaatgtacagctgttccactaacagttttggcaatgggaatcccaagagttctctgagccgagtccctacacctcagatcaagcataaatttccaaatgttttgaagccaaagctctcgacattaacactgggctgtcagtctgccaaatgggaagtggtttgtaattgcacagacgttccccttggtatttaggtaaacaggagcacatcaatagagtttgttttgcggaatataatatattgatcaattctctttagaagcagagaactgcaatacattcagacctaaacaaacaaaacaaagagtttgagggagaaaaacgaacaaacaaacttgctttgaacagcaggagacgacgttttggcagctgagcagggcaagagcttcatgagccgctctttaatgctgcgcttggtgctgttctgagtgtagaggaaacctagaagatatgggatgggttctgttaatgccagctgcagagagaaacctggggcatgctgctctgggtgtcagcagatgccatggcaggcaggatctgggtgcagccatatttgctcaggcaatcacaggcagagggttggcatcccagaggaaaaaaacaaaaacaaaaaaaacgaaactaactaaatcctggttttcccttttaggtttattttatgttgcattagatcatgattaccccatgagcaaagaatcatgcaaataaatcttttgagtagcaaaaataagatttgctgacttttggaggtcttaaattgggaatatagcaaatagtataaaaagagtgaactggatttgaagtttcaacattcaaagcagtgttaatgcccacgtgacattttctgcactcatcactcccgtctttgcttccaggggaggtgggtgctctgcataaatcattcacaccgcaatcacctgttagtacctttttgccttccctgaaagtgagaaaattgatgtccttgatttgcagcttcattagcataagctgatgtgcccagagatgggacatccttcaaatgtggacattaatggatggggcttattcaagcagagtgattctaaaagacacaaggagtattcacaaaatgttaacccaggagtagatggagcagcatctgtgacttcaagtagttagtgaggactcaaggaaaatcagtagtgacccaatgggccagctagcaagtgcttgaaaacctgctggtgccaggagccatatctgtccagcttagcatcaacttgcccattctgagtgaccagaagcctgaatcttcacgtcactatatagattaccgccccaaatcagtttggaaagtgtagaatacaaagcaaaagcaaaaggaccaatttaaatcaaagttagaccacccttaaaatatgaacttggcacatggaccccttgttgcttttctactttgtaatt

SEQ ID NO: 57731 - DNA, 618 bp, Bovine  19866881887434
  misc_feature (1)..(1): n is a, c, g, or t
nagaaaaaaaaaaaaaacatacacacacacacacaaagaaaaaggagcctgatatgctagctccatttcagagctcaggaaactgaggtttagagaatatgagaaacttgctcaaggtctaataattagtaactgacagaactttgataaaaccagatccatgatgtcccattccactatcagaaacaaaaaacagcatttataaatcgatgtccaagtgaaaatgtgcattatctaaattgcctgagtttactttttaagagtaatatggtatcaatgatatcatcaggtgaagtacaaaggccctgttttaagtcatatgaaaatatatttgcttatctttgaagtgcacacatttttattaagtacattttaaataaagccttcttcttggaagtgaaaggaaactctaagctaatttaaaagttagggatccatggagttcttttgaagcacaggttttcagagccaaaattcattaacattaattcaatgggaaaatcaagtcaaataatttaatgctgaattttttcatggtgtgagacagatggttgccattcttaaatacaagtgaaatttctaatccagtggcaatggaaaaaacaaacaaatgcagta

SEQ ID NO: 57732 - DNA, 1472 bp, Bovine  19866880404959
  misc_feature (1)..(1): n is a, c, g, or t
ntgcgcgagaggtgagcccgggcccacccgccccgccccgcccgcgccgcccgagcccgagtgtcctgtgcctctgccctttgcaggaacgcgctgatgttcaacaacgagctcatggccgacgtgcacttcgtcgtggggcccccgggcgcggcccggagggtgcctgcccacaaggttggtagaggttcggccctgtgcgctcccaaaggcgaccggccgccctcggaggatggacggtcgtcttctgggtgtggcagccgctgggggcagggagggcccagggctcagggccgcgctctgcctctctcgtccacagtatgtcttggccgtgggtagctctgtcttctatgccatgttttacggcgacctggcagaagtcaagtcagaaatccacatccccgacgtggaacctgcagcttttctcatcttgttgaagtaagtctaccgcatgagggtgggaggatggggcggttccttgctgtctggttcttccagccagctgcctggagcttcctgaaagtccacaaggacagatgggctcctctgctgggccctcggtgcccagagtgcccggtgctgcccatgactctgcccccatcctgcctaggtacatgtacagtgacgagattgacctggaagctgacacggtgctggctaccctctacgctgccaagaagtacattgtccccgccttagcaaaagcctgtgtcaactttctggagacgagtctggaagccaaaaatgcctgtgtcctgctatcgcagagccgactgtttgaggagcccgagctgacccagcgctgctgggaggtcatcgacgcgcaggctgagatggccctgaggtccgaaggcttctgtgagattgactggcagacgctggagatcatcgtcacacgggaggccctcaacaccaaggaggccgtggttttcgaagcggtcctgagctgggcggaggccgagtgcaagaggcagggcctgcccgccacccctcgcaacaagaggcatgtgctggggcccgccctctacctggtccgtattccgaccatgaccctggaggagtttgctaatggcgccgcccagtcagacatcctgacactggaagagacccacaacatcttcctgtggtacacagcagccaacaagcccctcctcgagttccccctgaccaagaggaagggcctcgcgccccagaggtgccaccgcttccagtcctctgcctaccgcagcaaccagtggcgctaccgcgggcgctgcgacagcatccagtttgccgtggacaggagagtctttgtcgctgggctgggcttatacggctctagctctgggaaagccgagtacagcgtgaagatcgaactcaagcggctggggggtggtcctagcgcagaacctgaccaagtttgtctctgacggctccagcaacaccttctcagtctggtttgaacaccccgtgcaggtggagcaggacacgtt

SEQ ID NO: 57733 - DNA, 674 bp, Bovine  19866880677804
  misc_feature (1)..(1): n is a, c, g, or t
ntgcatctgagatgtgcctgcaggccggggctcacctgtggaacccatttgggagacacgaagctggtggcttctaccacagggagtcctgcttcggaaagcatgtctattagcttgattttcactggagtaggtacaatattctgtaatgcaaagagaaaacaccagaaaaagacaggctggccaagtgagtcacgaaatggtctcagaatgcagtcagttcaaagctttttctacagcacccgcttcactgtctccactgtcagacactaacctgaattcacatgtaatcctgccaataggtgcagtacaggcttgtcttccagttccacagagagcattttgcagtgaaagcagtttctcacttgaaaaggagttaatacttacaatggaaacagtatttgcccgtcatacgggcttttaaactaaagctctgttactttatgaccccatcaaaaacagattgagaccagtgagccatggcctgaaagggcggagatgactaaccctctggatcctatgagacatggcctccaacaggccacaccttcctccttccgtctcaggtggcacaggatctcatcctcacatgctccactacttctttctccccccgccacaccctgtctggctgctcaccagcctctgtggattcctatttccaaatctactat

SEQ ID NO: 57734 - DNA, 1501 bp, Bovine  19866880780616
  misc_feature (1)..(1): n is a, c, g, or t
naatctggtgaaatgaaattaatttcacagtaataagtagtactaagaacaatagaggaaagggagaaaaaaaccttgtattacttggtggtgaggaggggaagattttctatagaagactatgtacagggcagactttatacagaggcgactccaggccgttgttttaatatcttcaaatgctgaaggtttcatctcctctcagactcactccccttgtcaccacccaccctgtgatcataacagagcagagcctcttccatccctgccaccccacatagtccaagacgacttctctccacacttggcagttgtcctcctctggggcagctgtgccccgggtgtgtgtgctaagtcacttcagtcgtggccgactccgtgcgaccctgtggactgtagctcaccaggctcctctgtccacgggattctccaggcaagagtactggagtgggctgccgtttccttctccagcagattttcctgacccagggatcgaaccacgtcttttaggtctcctgcattgattggcagggttcttaaccacaggaagggttcagtaccacctgggaaggttcaagtcaaactaggctttaggagaaatcagttctgtttggggacttctaagtttgagaagtacaaataggtttgtttaaagaacagtctaaatgcccagttgccaggcggttggaaatgagtctggatttcaggggagttgcaaatggtccatactgcaagcatgaatctcttactctgttcttaagtgaaatgttctttttgttcttgattctaaaacagagcaaatatggattaaagggtgagaaatactgcttctagtctcagtattgaggatggatacattctttctgatttgtccccatggagaactgtgacactctcttcctgttactttttgttccctcttttaaaccacaggtcagcacctcatctgtgggtacgttcccaaagcaagtgaaaattgtggaagttggtcctcgagacggactacaaaatgaaaaggtaaacgtggaaatcaaccaaaagatatttcacaggtactgagcgctccatgtcacggatgccgagctgtgcctgactttgggcccgtctgggaggccaggcaggcacctgtgacagttcagccccaagtgttgtgatcctgggtccctctcaagggcctgtggggcggggtggatggtgagagctgcaggagtgagggggaaaggtgagggcgtgcctcatccagcagcgacacgtcaggggattcggccagaggaagttatgaaggtcacatgccaagatttagcttgggaatgtcccttacaaccctggtgtaagagcaggacagttgcaaataaccaacacgttcagtatgaggaaaagtagatcaaatacattaatgacttcataaaatgtaatactgtgaagctgttaatgatataggagtatattaagtgatgtaagcagattatacaatactgtatatataattacatacgtattt

SEQ ID NO: 57735 - DNA, 1716 bp, Bovine  19866881007698
  misc_feature (1)..(1): n is a, c, g, or t
nttaagcccctttggtaggaatccagcctccctgataatgtaaaacatgggtatcctgggatcttcaaaagcatggggctgaatccttgctggagctgatggactgtgggacatgagccctatgcttggcacatggtaagggaatttccccttcctcccacttgctctgtttattatttattatagggttcaggtggaagaggagacaaaggggctgaattgagggatggctgggaacaattcggggatttataaaacctttgtgtatatcttcctttttcttggagttggattagactggcacactgcctgcttccagtggtaccaccaaaaaggacttagcaagaccaacagaattctctgaagattctgcatgccaagtgatcccagcctcctctgtattccccaggtccctaggagacactgtgattgtggatggggattatcagggtgtcagagagggccactgccctaataataagatgctctgaactggagacttgtcagttacctttgcaagagggggatcgacatccttgatcctcatcgaattttagttcttggccctctgtgggaagggtgaccttcaggtagggcctttcatagctctagaaccaaggaggcccctaacagttaaacaggaagaagggctgtccagccatcccatctgatatcctgagatcccaggagaatgattcattcttcccagatctcctccaggtccctcattgctgagcgtgaaagctccacctggctcctggggtctctggagaattcaggcactaatctgttttattgggaaggttgttctgacctgcactgagcctgtcccaagccgcctgcctcctgcccaccttgccgcccctcacagggcctgactacccaatagactgtgatcaggtcatgcagacaggcatgaccaggctaccttccagggggtcagtaccaacactcagtggaaagggctaagtgtccaggcctctgggggctggttcaagtcagatgagaggaccaaggccactcttcctccttcggggagtgaaatgacttctgacttggctgatttcataatgtgaaagtgatcacatcagtgatcagagctcatcaggccaggatagctctctggaatctagcccgggggtggttttcacatcagcctctgtctcagtgactgaggacctggggatctctccttttccttctggcccaaggcccctcacgcacttcttccagcgggcgaggcggtgatgggcagaggaccggatctccccgctccgcagggcatagataatggggttgaccatggagttgacaaggcagagcaaggagcagaaggcaaagaccttcttgacctggtcgcttagcctggcacccaggctgtagaccatgagggccagtaccgggaaccagaatatgaagagcacagccaggagcatccccagggtcttagccaaccgcacatctagccgcatccgggctattccagacaggtgtctgtcccggtgctcagccaagctggctacgtgctgatgggccttccagaggacatgcgcgtaggtgtagatgatgccggcgaagagggcggcgataaacaggagccagcccagcagatagtcattgggggatcagggggaaaagctcagagcagggcctggggcagcaggtccatcccatgaggggcagggtaggacaccaatgcggcgagcacccacatga

SEQ ID NO: 57736 - DNA, 1879 bp, Bovine  19866881094634
  misc_feature (1)..(1): n is a, c, g, or t
nttggggtgcacgccccctcggcccacaagttttttttttttttagttaaaatttctttgcagtagaataacgggatcggggcgagggggagtgtggcgtagcgtttgctaccctttttgctgtgttatatttgtcccttttttattttttcttttggtattggagatgtttggagaaaagggatgttgagattagagataaaaataaaattctcccagcgagacggtacgaaatagtccttccccttttccgggaaatgcccatcaccctttgaaaacagaggtttaggaagcttctaccattagggcgttgatagctaaattggattaatctggaccgcccctttgttctcgccaattcccttaattgcatggagttgcggtcagaattttttggaagaaatgttaccagatttactgtttcacaagtaaccactctacacacacaccattttggtagccttgtgtgatttttctgtcttaacttttaagtagggaaagtaagcaatagtaatatactctagcttctaggaaattttcccctttatgtcatattgacatttattgagaaattttatatatttgttttttaattttcagaccgtatttacctgttattaagtgtgtaaccctttcgctaaaatttggggctaaaaaaagtgcttgatatttttcagaatactggagttgctttaaaacttttttttttaattaacaatacttatatacaatttaatgttaactactttttatgaaaagttatgaaggctgtggataaaagcagtgaagattaagttgtaatcaggtttccttaaatgtcttgttttcttattgatgtaaaacactagtaggttttattaccagctcgtttattatgttccaaaatcatggattctggctgtcctttctcaaaaagataaatgttgtgtatttttacagttggctctccctgtttgtttcaggtcacccaggaacatagcacagtccctttcattatttaaaatagtacagaaagaaacctatttcttacaaagaaactattaaaagagtgaacataaaaatttggcgtctttttatgatgtttttaggtctgaagatttacgtcgggaatttggtcgttatggtcctatagttgatgtgtatgttccacttgatttctacactcgccgtccaagaggatttgcatatgttcaatttgaggatgttcgtgatgctgaagatgctttacataatttggacagaaagtgcatttgtggacgccaaattgaaatacagtttgcacagggggatcgaaagactccaaatcagatgaaagccaaggaagggaggaatgtgtatagttcttcgcgctatgatgattatgacagatacagacgttctagaagccaaagttatgacagaagaagatccaggagtcgctcctttgattacaactatagaagatcttatagtcctagaaacagtagaccgactggaagaccacggcgtagcagaagccattccgacaatgatagattcaaacaccgaaatcgatctttttcaagatctaaatccaattcaagatcacggtccaagtcccagcccaagaaagaaatgaaggctaaatcacgttctaggtctgcatctcacaccaaaactagaggcacctctaaaacagattccaaaacacattataagtctggctcaagatatgaaaaggaatcaaggaaaaaagaaccacctagatccaaatctcagtcaagatcacagtctaggtctaggtcaaaatctaggtcaaggtcttggactagtcctaagtccagtggccactgatagtataaaccatgatatttttaggcatgtatcattcatttactcatggtttggtttacttaaatta

SEQ ID NO: 57737 - DNA, 2093 bp, Bovine  19866880364917
  misc_feature (1)..(1): n is a, c, g, or t
nctcccccggcatgggacacaaactcctgatggcttccttcctgcccctcaacgcactcctgacactggagcacagatctcctcaaccccacttccccagtgcaggtgactctggtcctgtcaaggccttgggtcaggcggtattgcctgcaaagccttccctggccagcccacgacctcccaggtcagggacactgtggtccttggtctgcctctctctgagggttcctttccctagcctgcctctgtttccctgccccctgagtttctagggcccacactggggcctttccctctgcagatgcccgcaagaccatggcatctgacacaccaggttaatgctggctgggtgggataatgaagtttgtgagtgatcccttcttagcagcctcttagcagctctgggaaactatctggtaggggatcaatttatgattattggctatctggtgaatggagatgtcaagaatgattatattcgattttggtaacttgtgacaattagccttttctacatctgggactgaattttagagccaagaaacatcttagagattattttgctcaagtgagatgttgaagtcaagggcgccaaaactcaggcaagtgtctgtccagtgtcacacagcctggccctagtcccaacttgacgccttcctaccagcacggattgtcgcagagccagctggcagaaacctttgtggctgttggttcctggcatcattacaaatggatcaagcacctaaaggtccaggcacaaccttgcaggaggctggtgtgactaagagttccatgcctgagtaacagggtgctgaggaggggctctggttggtctctcccatgcctgccatgccccagcacagagccactgaaaggccaggctgcccagcgcagggtttacccagagaagccccaagcgcacacacacacactttctgctatcaactgcaatctcatccagcaggccttgcccatcatttgcacaagacaggtttgtcccaaaaaggcaaagaaaagggtgagaggagggagagggtgagtggggagagatggtgaagagggctgtgagttacagggagatggaaaagggggctgcagaggggagagaggaagggaggggacgggctttgagtcagtggagcaggtcaggattcagggcaggcagaaagcgccagctgtgccccaggcaaaggtccccaacaatgctcgcggatgcccggacatcccatctctggcccggctctccgacttacacggtggcctcatcccagacctagtcctggtcccctgcacctctcggccgtcgcggtccacacaccagcagtagccagtgctgctgtggcactgggtgggcacgtactgcccgtgctcatcacattcggggacaaagagtccagggggccggggccgcgaggagtccgccgtccccaggatgtgctcccgctcatgctggcatcgggttttctccactactgttagagagaggggcaaaaagagggtcgtcagttcaagcccctgcacccaactcggaacctggggagctgcctggtcattgccccgttttgttttattaattaaaaaaaaattttttgttcacctttattgaaggatgttggcttacaatattctattagtttcaggtacatgacaatgattcaaaatttttatagattatactccttttaaacctattataaaatactgattttattctctatgttgttgctattgttgttcagtcgctcagtcgtgtctgactctttgtgacaccatggactgtagccggacagggtcctctgtccatggcgtttcccaggcaagaatactggagtgggttgccatttcctcctccaggggatcttcctgacccagggatcgaacttgagtatccttcttggcaggcagattccttaccactgagccacctcaaaagctctatattccctatgtcatgcaatatatccttagagcttatttaaaatttttttaatttaatttttactttatattggagtacagttgatttacactgttgtgttagtttcaagtctacagctaagtgaattcccgttatacatatacatatatgtact

SEQ ID NO: 57738 - DNA, 2533 bp, Bovine  19866880451341
  misc_feature (1)..(1): n is a, c, g, or t
ngcacccactccagtactcttgcctgggaaaatcccatggacggaggagcctggtgggctgcagtccatggggtcgctgagggtcggacacgactgagggacttccctttcacttttcactttcatgcattggagaaggaaatggcaacccactccagtgttcttgcctggagaatcccagggacgggggagcctggtgggctgccgtctatggggtcacacagagtcggacacgactgaaatgacttagcaagcaagcaagttacacatgtgtaatacagtatagcaactaaactgccatggtttaatggtctttagctcagtacaggccaattacttgagaactgacaatgcctcaaaattgtctgaggtgctttttttccaagtatactcagttggtcccattggagacacaccaaattagaatctctggggcttgagtctaaatctgcacatgccccaaaagtcattttcttgcaaactcttatttaagatctactattctaatatgtaaagaagaagttgatttttctttttaaaaaaagatggtgcatcttgtgttgctggaatgagaaaccagggacagttactgagttcttaccacatgccaggcctcgtggtaaaatctgggaagtcctgaggcttatctagagaggagcatatatgtaacaaggctatcctaatttctgtattgcaaaactgatgcccacatttggaattatactcaacaaaacaaaaagaaatctgtgaactacattttcaatgtgctcttgattcattcaacaaatatttatttgttttgttgctttatattatattgtgctacattttatgctatatattatgctgagtactcacattctatatattatagatacagctatatattaagcgaggtactcacactctccttaaggaactcaaagcttcttagttgtacaggcagcaccagctacctacagcttttatgctgcattagccctagtcagtgtgccaacaaggcatagattatgagaaacactggaaaaggatgtcaggatgtccagatctttatcccaaaaggacataatattatgttgagagtagaacaagaaaagagcagaacctcgttatatgaagttcccccgtataaaatccttgcagttgcaggattaaattattcttctcaggattgcttctgctccaacagtggtccctttctagcattagtagttctccatattgattttttagtatggggtatctagaaagttatttaaacattatctagttcacatttattattagaagaaaaagcatcacagaacataaatagaggaagcttaattatcattgtcttttataaaaatttcttaacagaaattttagttctaagtcaaataaatccctaccaaaataacacaggagaaaaagaatatagttccaaccttagaattctattagccttaaagaaatgaaactaacataaatcggtccatttatggctataaagatgattttgtactggaatgaccatgttctgctatgtgaacttcaggccttacaggccagaatggtctttaacctgccatttcagtgggctgtccaatgataactgatcagtggcaactaatacttttatttctctttcttgaggtgtgagaagcatgaacagtactgacattcagtggtcagccatcctgagctggggatatgctgataacatttttgaggttgaagagtaaacaaagtgagcctccaataaactttatacaaagttcacagcaatatcaggtaaacatttttatgaagtactttataataataattgaacataatgctttaaaagggagtcagactgatgacagctaggctttaatatcctgtagttagttgagaagctgatgacgctagacatatgccttgtttacagtgctgacagccttcctaactgctgctgtactgactgtgtccccagagtttgttctctaccccagcagtccccagcctttttggcaccagggattggctttacagaagactcttgtcccacagagcagggaatagggggatggtttcaggatgattctcctaaggagcccacaacctagatcccttgcatatgtagttcacagtagcattcgtgttcctatgagaatcaagtgccactgatctgacaggaggcggagctcaggcagtaatatgagtgatggggagtggatgtaaatacagatgaagcttcgctcacttgccagccactcacctgcttctgtgtggcccgcttcctaacaggccacggactgctactggtctgtggcccagaagtgggggacccctgctctccccatctcttgttgagactgtatcataatctcctactcagcattagctcacagcagtgttggaacaaaatcacaattgatttttttctcagtgttaatttgccttttgttactatgtcattttcaataaccagagcatcatctactgtacctggctttttttaaatggaccgggaattcaggcatcaccgcatggtagaaagagccttggg

SEQ ID NO: 57739 - DNA, 965 bp, Bovine  19866880467898
  misc_feature (1)..(1): n is a, c, g, or t
ngaggcagaattattcttttagaaagcgttcccactgtttctgttaacctattctaggaacagtagaaaaatctgtgtactccacagcgaacttacacatgataaagacagaattcctgaaccctgcaatagtctgtttctatcaggatagtacttgggatgctgctttattggctttgaaaacactgtaaaataagctcagtaatgttaccatgagataaaaaaatatattcctggataagaataacttgcgtgtttgttatggaaatttaattcatatagtgtttacagaagtacttttgtaacttccagactttctaaaacattctgcttaaaaactgtataatatacaattccaaagtctctgctgtcaagataaacacgagaggaagcaagtggccacgtgtgctggtaaccttccgttgcattcataggtaagaacactccacggctacattcagatcatggtttgcacagaccagctattaattctgaggtccaattaggtgcagagatgaaattactcctattcacgttgaagtgatttgctttgtttaaaaaaaaatgcagctattgtctagcattcatttttctactgagaactttaaattagttccttattagaacagattgctactcagtctttttttttttaagctgaatttcatcatttatctgaagagaaaatatgcaaaataactggtcttgttaagagtgcaatattatatttttatgtaaaaataaaaaaataaattgggggggattatttattcagcatgaatttaatatgtatatgtttgaaacacgtcataatgtgcatgctgtagcaaatatttctgtaaattatcacaagctctgttacctttgtatacactgccacttcaaattgggaataaatttcataaaaatagatttaaggacctgttcttaacccaatttaaatattatgaccacatctcaaattg

SEQ ID NO: 57740 - DNA, 955 bp, Bovine  19866880525990
  misc_feature (1)..(1): n is a, c, g, or t
ncagcagcccaccaggctcctccatccctgggactctccaggcaagaacactggagtgggttgccatttccttctccaatgcatgaaagtgaaaagtgaaaatgaagtcgctgagtcttgtccgactcttagcgaccccatggactgcagcccaccaggctcctccgtccatgggattttccaggcaagagtgctggggtggggtgccgtgagttgaacagaaaaatacatcctgcccatttgggggtgctgggttgtgactcagctatttcagagaaactaaataatacaatgtgtcctttgaggccaaaaatgaccaggagatcatttgagtctgggctacagtatccttgctcaagtgctgagcttgttttttctctcatgaacaaagttaataagagatgagtttagaaaacagtgttttgtggcaaaatttggctcattcccaaagtaaattaaactgttcttatcaaaatttctgaaggctgatcacaataagtcattctttcatcctcagatcttaattttgttaaaaaaaaaaaacctttagaataccatttcaagcattaagaaaaaagactactttttctgagatttttaggaaaaaaaaaaaagaattttcatacttgttgatataacctaaatacaaatggttacttagctaatttcatcttcatttcaagacttctgttttcttcttagaggattagttaattatctatgggctttctatagataatattgtacactcagggttttattacaaccaagtaaaatccactcatgtgtactctagttagataggagttagacatactggacacaaatatttataagaaattttgaagaaaaaagaaacttactagatttggaccagggtagaaggaaaccagggagaaggcaatggcaccccactccagtactcttgcctggaaaatcctatggacggaggagc

SEQ ID NO: 57741 - DNA, 2609 bp, Bovine  19866880593864
  misc_feature (1)..(1): n is a, c, g, or t
ncaaccgtttcaggaaaggcaggataaaagcttaattcttttccttagcggtcaaatcttaaaagtagagaactgttaccccatccaacagcaaccaatgagtttagttttgctttgttttgggggcctttaaagagtattattattaacttaagtattttctttttacttaaatgtgtttcaatcagttatggcctttatactttttgatgctgtgagagcatctttggcagtgagagccacttcaagttggctcctaagtcctttatttttctataattatagtaaaaacaacacacatcactgaacttagcatctagccaccctccagtacctagctcagtagtgttaactaattcacactgttgtgcaatagatctttaaagctttctcactttgtaaaactgaaactctacacctactggagcaacaactccgcaagtccccatccgctctccttccccaccccccaacaaacaccatttaactgagtctgactaccctaaacaaccgacgtaagtggaatcacatggtgtttgttatcttgtggctgacttattccatttagtacaatatccccaaagttcttccatgtgacaggacttccctccttcataatgttaaataatgttccatattacatatgtaccaaattttccacaactatttatccacagataggcacctgggctgcctccacctcttggctatgtgaatagagctgcagtgaacatgggtgtgcaaatatggctcccactcttttgacaagactatattaattttcttgctctctgatacaacaaaatgtcccaggctcatcttacgtgctttcttctaataaacgtacaagaaatgagaaaataggaaatcaccattcggtaacccccagtgaaatcacagactcaagaaataatcatcaatgaaacaaacaagttcaatgggaggctgaacccacggatcaacctgagcatccttaacagtgggatatcacatgcctcctgatagttcacaccaccacctctagagagttcttgcttaaaaaaaagttgaacctgaggctaagcaagcctttagaagtaatttccagtccctaggaacagtggctagaggaaaaaagctaaatgctaatgtggaacgggggacattctacaagataaatgaccttttttccttaaaaaaagccaatgttaggaataagaagaaaaatacatacataaaaataagggctgttctaagatttatgtctttagagacaaagcaaccaaaggtgatactgagcctgattcaaacaaatcaactataaaaagacatcttttatataatcaggggacatttaaaaataggctggctattagatgataccatgaaattaattgtttttattttctttgatatgataatggcactgaagttatgtaacaaaatgttttacttttttcttaagagatgtatactatagaacatacgagtgacataaatgtgtgtgatttgtcttaagaaaaaaaagatgatgcaagtttggcaaaaattttcataattattgagttggggtgataaccatatgggggtttattacacattcattctgttttttgcacgtttgaaaattttcatgagaagaactttaatgacataaattcagcacactgacaaagccaataggtgatgatgtcttcagttacctgtagactgatgggtcgctgaggtcaagggtctcactaacatagtctgccagtatgaacgggaacactggatactgcatgagatcattgaaagatcggccggcgtgtttgtttaggtgagtcaaatactcaaaattagtaatttgcccagtataccacaaatgtgtcagagcggtgatattgccatattccagaagattagggaggttatttgttagtatactgtggtatacatcattgcgaacctagaacagaaggagaaaaaaacagcccagattttcagtcttgacactttcctccaaagaatccatgatatcataggcatgttactaatctcaagtccttaaagaaaacactttttgcccaataacactgactggtggggaattaaggttcaactaggtcttcctctaaaggttgtgctatatatatttatttattgaagtacagttgatttactatattatattagcttcaggtgtacaacatagtgattcaatatttttataaattacactccatttaaatgttatgcaatactgactacagtccttgtgctgtacagtatatccttatggctcatttcctacatagtagtttgcactctgtaaccccctctgcctgctctcccccactcacaccactagtttagtcccctcctctttgaatctgtctctgctctgttgcactcatttacttttggctcttaaccactatgttttgcagctggagaaatcagtaagagactaagaagtctgttcagaaaaatcacttacatacagaccctaaaggaaaaaaatcaataaaagaaaatgaagagtcttcatctacatacatgaaacacgctgtagtagaaagagtagggttttctgaattagacagaccaggtcttttttcttgcttaaaccctttgtgctgtagttccca

SEQ ID NO: 57742 - DNA, 1097 bp, Bovine  19866880787421
  misc_feature (1)..(1): n is a, c, g, or t
ncccatgaccttgaaagttcagtcattagctgcccatacaatggagccactgctttcaccttgttatttaatataattctttttttttaaatgacatatattacttcaaacaattttttaaaaaatattttaacacgtatttcaacagaattgatttccttgacaatcctatggattttatctcgcacatttaaaaacctaagagggagttttctaggctacaggagactgcccaaggagttcagggcggtggggatagcaaggggacaccctctgtgggtggagacttcaaggactcattctttttctgcaaagccgacaagctccacgtgggtgttgtcccgggcgcagtctgccgggatcagaccagcagagccatttcaggggcaggacaggctccagccgctgttggagctgttcccccgcccctcttctggaatgcacacagctttatatgaaatccacatggtgcgcggcagcgacaggaggcggcacgaaaggactttaccaagttgacagcgtccccgcgcccagccagtccggagaacgctccagagagccaaaggtccctccctgtccctctccccatctggctccccaccccccatggtgacaatggtcggctacaggaaattggatcaccgaggcactctgctttcccagccctgaactctggacacagagcagaatcattgccaagatgtatccggaatccgcacacacaaatgcaggggctgtcgactgcattcccggggccgagagctgggcttggcggtctttttctgccccggcacctacagtaatcccagggcccgcgagacggccgctacccagctctggccttcgtccggcgcctggtcccaagcggaccgggtcctgtcccccaaaagcaggggacaatggctagatgcggacagacttcccggcccactgccgcgggagaggaaactccgcccgggtcccggggtcccgggtcacagagtcccggagcctggcactgcgcgcgcggggcggcgcagacggggcgaactccccagaacccagtgaccctcctcgagcgaccgtgaccaggcggcggggaggcgtcggctggccgg

SEQ ID NO: 57743 - DNA, 1179 bp, Bovine  19866880789703
  misc_feature (1)..(1): n is a, c, g, or t
nctgtatgttcttctagaacattcatggttttatttttttagatctaaattttgattccttgtagtgtatcctggtataaagtgcaaattaagtatccaacctatttttcccccaagtgattacccagttattccagcaccatgcatcttttcctcactagtttgagatgctatgtgtaatcatatctaaaattctaggttctctattccattggtctgttactcctgtacctgtttcacattgttttaattactcagggcctcggttttaatagctattacagtggtcccctcagtctttccccacacccctttaaaataactttttaaagctgttcttatttgttccattaacgcttcaaagaaaaaaaaaatcctttaacatatgaatgatgctaaaactctgaccacctcaagtgtttggagggttgcacttttaaccacaatatgtcactgtcctttttatacttcacttgataaaaaatctactttttactacctgctgtggtaatcacatcagtattctatttgccagtgcccaaacaggtaaggacaaagagacagaacatgcagttgagactcagcttctaagaatgatttcagaatgatcttgctatacaatccttactttcttttttattccattatggattctttgtacaaaagttagatatctgtcaaagattcatgaaaaaacagggaggggcccttaaatgagtattaaacttataaaatctatatgcagtggataaaaatgcaagtgtaaaaagtcaccttaaaaaaccccaataacttgtcagaataacaggatctgagtatttgctcgctcttgtaggagctggacatatagcagtgaacaaaacaaatatccctgccttcaggtaacttaagaattccgtaacctcactgggttatatctagtttatcataagaatacacccagagaaagaatacagttgacccctgaacaacatgggttggaactgcatgagtccacttggaaacacgtgggttttcttcattatatacacaggggctacagcactgcctaatgtgcggttggctgaatctacagatttggaactacagctagagagctgattataaagttatacatggatttgactccctgggcctcagcccccactaaccttcataatgttcagtaatcaactgtat

SEQ ID NO: 57744 - DNA, 1606 bp, Bovine  19866880823203
  misc_feature (1)..(1): n is a, c, g, or t
ntccccccgcgagcaccgccccggagacaaagcccgcgcgtgagccgcgccctcggcccgggtaagtgggcgcccgccggcgggtcggtcggggcgtgtcggtggggaacggatggcacagcccttgctcctgtgagctcgggacgagccggagacaaaagggaaactcgggctggaccgtctctgcaactggagagactggtctggtgcctgcgtcgtcctacagctgtcggaggaagctcgcgaaacgcacacctgtgataatcttggccgcgcacggcgagcctggccctcgcggcgccggcacaggtgggtatcagcggcccggcgggggctcctcaaatccgggaccctccgcaaagcccttgggaaacccgagcgcaggtttggacagacaactcggaacgttgaaggggtctcctggggatcgcggtcgccccatttgtccggcttgaagcagaggaagctcctggggagcctgtttccgtaagtaggtcatggcagggacgtcccccattgaagaagtggaagggctagtagtggcggaagagatggagtggctagttggtcattttattgggggaaatttctttgggcccgaagaagccctcttgattcctcgtcaccgggacacctgctttgggagcagttccggcggcgtcagtggaccatgggggccccttatggcgtctgtcctccagtctggtgctgaaatgggctgcgctcgccgcgcgcaaaccagcagcgttggggaggctttgatttactgttttaaattaccttaggaataataacaaaaagatgggatggggcggcgggcagaggtgtgactggagaagacttcgtaatttaaaaataaggaggacttgcttatttctgtgtgtcttgggctaggatgctcagaaatgcaaaaatgttaaagtttcatcaagtgataaagtggatcgtggacacgcgttctcccacgctctccccagctccccgccgacactggttttcttctctttctgtcgcctcccaggactgtaaaaggctggcacggggctggctggttcagtccgagcgaagggcctgctgggctgcgctggtgtttcccattaaaacgtgccagtcttatcatctgctcatgagccctcacgggtggtgcttccttctcatagaaaattcagtggcagacacctcagagaggcagggaagggactcgggctctttggctggcttcttgattctttggggaaatccttttcctgatttttgcatggggtgggggaagggaggcacccagcttctgatctggccctgttccctgcaggaggctactgtgggagcaaccgaggtgataaatggaaagtctgtttcagtcctgagaaacaagacagggtacattgtaaactggcaattatttttgaagtgtgaggttggctcagttatcagctgtgatgagacatggataccgcacgtcgtaactagttcatgtaaatacaaggtttattgtggtgcttccctagttaatgagtagcctcatgttgaggttattgggctgaaatgactatttaggacaaccagcttcctgttttctccatccacacatggctcaaatcctcag

SEQ ID NO: 57745 - DNA, 1211 bp, Bovine  19866880845784
  misc_feature (1)..(1): n is a, c, g, or t
naggaagatggtgacggtccccctgaggtgttttcgtttttatctttccgatgtttaagcggttccgagtgtggcgggagatgggacggggatgaaaacctctgcggctgttctgggatgagagcacgcagagaaaaggggaagccctcctcgcggggaactcaggggatgggtggggggcaggtggggagtagggttgcagacccagcggccctgcagaagccaagtcgatcgcgagggggacaagtctgaacttccttgacttttggactagagagtccctcgcctctctcaggaccgttgtatttttacccagcttgtactccgtctgctgagtggcgtcgccaggtgagctcaagtaccagaggggggcccgtgtctgaccttgtggctccctcagcagtgagtgatggccgataaattagagtttgggggttctttgtgaggcgtagcttacagaagggttctcaatacgctggttctcaatagcttcccagggtcttttgccttaataaaggcttctttttttttatacagtagaatttgaataggcttctgccaggtgctgtctagtctgcacctgctgcagagtggcaaaactactaagagctaaaaaaaacccaaaaaaacaagaaaaggtgtctcatgtggccagatgatgaggggagacatggtttgaagcaattagtgctgatggttaagtcaaattgaaggtaactcttgcctggaaaatcccatgggcagagcagcctgctagtttgcagtccacggggtcgctaagagtcggacacgactgagcgacttcccttttcacttttcactttcatgcattggagaaggaaacgacaacccactccagtgttcttacctggagaatcccagggacgggggagcctggtaggctgccgtctacggggtcgcacagagtcggacatgactgaagcgacttatcagcagcagcagcagcagcacatgctagtaaagtaatgctcaaaattctccaagccaggcttcagcaatacatgaaccgtgaacttccagatgttcgagctggttttagaaaaggcagaggaaccagaaatcaaattgccaacatccgttggatcatcaaaaaagcaagagagttccagaaaaacactatttctgcttcattgactatgccaaagcctttgactgcgtggatcacaataaactgtggaaaattctgaaag

SEQ ID NO: 57746 - DNA, 748 bp, Bovine  19866880859861
  misc_feature (1)..(1): n is a, c, g, or t
nttgcaggaatgctcaggaatgctcttattaggtctgtgttcctctaactggggccgtcctttccccctggaacagtcaccgtgttcgtgggctgagctttattcaccttcaagtagaattaacagattagactaatatggagaaattatatgtaataattatgctataaacaatttaaatctgagtcgtatattctctaaactcagcagtcgggagttattaacccatcactaaccaccctgtgaacaaggaaagccagtctacctaaaccctttgaaaggacaagattatccatattcacaaataaaagagcaaactgtcgatcgacattataaatgtccatttagtgtctgttttcaatacataaacaagaaaaggcaagtttttattctaaaataaagataacatttattatcacaagttgcataaagacacagcttttacaaaaatgtttgatagaaaaatatttttctgaatacatgtgatatctgtaggaacaccacactattgctgtacttccagctaaagcttcagaaaaactatttctcataatcagaatttccaatatttaccacagcccatctttggaaagaagttcatagtgttttctgaacgagccaaagcatgtcctcattcggttatgcccctgggcccagtggtcccctgcatgtgtgtgctgcacacacacacaccacagcgattagactgggagcacgtggggcagtagtctacacacctcactttaca

SEQ ID NO: 57747 - DNA, 772 bp, Bovine  19866880922592
  misc_feature (1)..(1): n is a, c, g, or t
ncccaaattatgataacttaaaataggaatactgaatttaaaaacttgttactttgaagcattctacttcatcatcatttactcttatttttcataagaccatatatgaggtttagaaattttgtatttgtcttttctgcctgtcttttcttgcgtagaattaaatctttatacacacacacacacacacacacacacacactaattctctactaaagacattggttccatgtttaaattatagttattgtaccagataagaactaatttgataattatattgaatcaatgttctctatatatttttaagtatcagatgttaacttctttatacagcttgaagaaaattatttttacctaagaagaatagatcatcattttattgttagtttaatttacagtatgactcccccagttcctagcactaaggaaatattttaatgcctcctcttgaaacatttgcttccactgttttcactttgaaaacataacttaaaaatagcagttccgatgtatggcagaaaccaacacaatattgtaaagcaattatcctccaattaagaataaataaattttaaaaatcacagctcctttttacatggcattacttaaagtcacacacacagaatcacacacccataggtacaacgtacaatacttttttaaaaagagttaagtattcatccttgatattgccagaaaaaaattctctctaatggaaatactgcagaaaagaagaaaaaaaaataatgttaactagaatcattctatt

SEQ ID NO: 57748 - DNA, 2244 bp, Bovine  19866880929377
  misc_feature (1)..(1): n is a, c, g, or t
ncccttaactgggtaagacctgcttttcctagtgcttggcaaggcaaagatttggattaaaaaacaatggggattcaaactgaacaacagggaagacatgctggtggtcagtctggaggttgctttggaagggtctcggtgtaagcctttgctgccagtctttgtagtcctcatgtcatatccctttccgatgagtttggatgaaagtctcaggtgaacttgaccatatgacaaggccagttcaggatgaagatggagttctgcagaatttattaactcagcagtcacacccacgtgggatatctgaatgacagaccttggctgctagccttgatttctgccagcaggtctaccctactggggactggtatctactggtgggcatgcgcaaacagcaaggctgtactgcatagcacaggaaactatattcaatactttgtgatgaactataatggaaaagaatacaaaaatgaatgtatatatatacacatatgtgtataactgagtcactttgctgtgcagcagaaattaacagaacattgtaaatcaactatatgtcaataaaattgaaaaaagaaaagaggccatcatgactctcagtctaggctatgccacaggcagggtgagggtcttgcagtgtgttccaggattccctaaggacacacgctgtcttaggaggctgagcctggaaaggtccaggactccgctaggatagccagtcagttccttccagcagttcaggtagtgattcgtagttcaagatctgcgcttagaatgtaacagagaagaacttttgtattctattacaaggtaatctctaaagggatgttgcctataagcttaaattatatacaattgcccatctctggccggagaaggcaatggcaacccactccagtgttcttgcctggaaaatcccatggatggaggagcctggtaggctgcagtccatggggtcgcacagagttggacacgactgaagcgacttagcagcagcagcccatctatgggaaccctgcttcccaggtaatgagcattaagataaaatacctttgtttatctcacaagaaacaacttgaccaagcccacctgtgaatgactacagggaggaagaaattaacacattccctccagagacagacaagaaccagaaaatgtttgactttactccctctccttttagtataaaaggagcctgaattctaacccaggcaagatggttctttgggatgagtctaccatcttctccatctgcatttatttctgaataaagttccttgccccaacaactcatctctcaatttatcagcctgtcatggggcgagcagtatgagcttggactcagtaacagaaggatgactttctcagcttcacagccccctcgtgagcccctgctggagtctcctactcagtgggaaggatgaagtggtccctgaagggatgatcaccctttagaagtcctcactgccctgaggctgttctgatgtaaaatgcactgtcccctcagattcctgttgtgatggctattttcttatttgagtttttggacaaatgacttcattgttctccaacctgtgactttcagtaaagcacccagtcttttattcggatcattaaaatcaaaatgaaaaatttagttttcatttaaaaatttaaatgaaatttcattgaatatggaaaagtattcatatttacttttgtaaaagttcagcacagttgtgagactgtagtcctgacttgcttcccccactgtactccccccatacataaccctgcctgaataccaccctggtgctccagtaatagaatctgtgccaggtcatgtctccagggctggagcttatggccaccccatcacatggtgtggcaactcatgcttcttaatcagagcatcagatgacttagtgcagtcgtgctcttattttgacaaagcttctctgcagccacgcctgctcttagatcgcgggcctttccttggcaccacttcaacaactcaactaatttcctgtgccaagggccctttctccaagatttcttctcacatgagtcaccccattagagcccagattgacttcagggcattcactggaggggaggggccattccattggtttggctgctgtgaacaaagagctgtggaattggagacagagtgaagactaggtttgacttctgcttttgccccttggtagctgtgtgactttaaaaaattacttaacttctctgggctccccatttctacat

SEQ ID NO: 57749 - DNA, 741 bp, Bovine  19866881120252
  misc_feature (1)..(1): n is a, c, g, or t
ntggtatctagcttaaataggtattcagaagatgaaggatgcttttgtgaacatccattatgcccaagaaaccgggagaatttctgtgagtgacaagtaaattgtctccatctctaatgagaaaatgcaggatcacatgtcttctagctttggggttttggggcaattagtcaatgtcatggttcaccttttctgtttttattttaatgttgttttgcccagaacccagcacatgtttgctgaaggaagagtgttggctgattttcagaagtcaagtggggcaggagcaggtgggaagaagccatcgcctgtatttccacacctcaatggggcacagcagaagtgcaccctgggtctgtctctaccattttaagagctgtgtactttggcatctgtttcttctcacctcggtggccagaatggcttttctcctctaaggctctcacctggtccagtggagggatgagaagatgggcagcaaatccagttgttctgggcggcctcatggtaatggagtcactacattctgtctggcctcatacaggtcattcctctttcaattctgtgtctataaaatgcatgactcacctctcagatgccaagaaactcaaagactttgtgttcctgtcattaaagggtacaatttaaatttttaaaagctgctgtaggcatacgtaccagactatcattagacgaaagctcatgtcaaggccaaagccagacttgattttatttcaaagc

SEQ ID NO: 57750 - DNA, 1444 bp, Bovine  19866881229395
  misc_feature (1)..(1): n is a, c, g, or t
nacatttatgttcacggcagcataattcacaatagccaaaatgtggaagcaacctaagtgtccatgacagatgaacagataaagaaaatgtggaaaacacatacaatggaatagtgtaagaaagaaaacagtcttgtcatatgttataacacagattatccttgaggacacaatgctaagtcaaataagccaatcacaaaaaggcaaactctgaatgatttcacttgtattaaatatctaatacaatcaaaccaaagaaacagaatgtagaatggtggctgccagggactcgggggaagggaaatggggagctgttgtccactgggtagtcaaaccaaatgaaaaagttctagagatctgccatatgacaaagtgtatatggttagtactgtacatgtaaaaattgctaagagggtaaattcataacaaacgctttttagccacataaagtacatgcctctgctttattccatatcttccagtctagcaatagttcctctaacagtttaacatcctggattatagcattagactctacatccaacttaagttctccattctcattgatatgaatgatatcttcaccacagcaaccttcaagaagggtctacagaaaaacagcattaatacaagatgcatcaataatcaatccaaaaattcaacagaaatattaagctttcaatcttagcagtcataacattaaattcaaaagaaaactactgaataactcagcaattcacaaggtatctttaccttgttttgtaaaacaattgaagtaataagaaaacccccaaatttcaaatatttataaatgactatttagtttcaaatatggagtaaaataaactataccctatatttaaaattcaatgaatctgttgaattttaaactttttctaagaagtattcatgccacaagtgtatggatcttgctcactttaagagttggagtctgggggcatgggaacaggcattggtcttttgccttaatactagaaccctcgggaagaaatactttcacaacgttaccaagtgcttttaattggaaaggtatttaaaaatgtgattacagctgaatcacagtaaaaagctaatacggctttaagataataactctacagcagcactgcctcttgagaacggcacagcactaggtgtctggagaactgggttcgcccccatacctgtggggtctgaagcaagcagcagtctatatgagtcactatcaccagtctacagaaggaggggccagcccaggaggtatcactggcttatcaagatctaaaaatcttaattttttcttatattcttctaaaatgttttaaaggaaatgaaaatgtaattatttaaatgacgaaaaacccagaagagccttcgtttgattaaacacatactatcaagtttccttaattttcttcagaaataactgaaacacgaaactcta

SEQ ID NO: 57751 - DNA, 1699 bp, Bovine  19866881259284
  misc_feature (1)..(1): n is a, c, g, or t
nctgtgtagcccagcagaatttggagtatgggaatgatgcctgtggtctggaatccactgaattgaatccactgaatgcctccaattaatggcagctttagtgtgctgatttagtgtgaaggttagctgatcatgctgcatttgcttcagagtgaaatttacgaatggtgttcactggaacgcatgaaaggatgaagaacagaaactaggcttacgggaacagcttgtacgattgttcagccagcttgctgatatctttgtctgtgtgacagaattcagtctgagacttgtttcccttgtaacataccactgtgtaggggacatagttcctactcacctctgatcttcagagtttcccagtatttccccagagagcccaccagtcttgaatggctgaattggctcaggccggtttagagcagcatgatcccgtgtgtgtgtgagcagagccctgccagacaacacatagagatggggcgaccccatttctctagcagaagcctccaactctgtagtctttatgcagcccagcttcagcttcctaagcaaattgaacagtaataaaacatggagccatcttctccaactgctaaagccatacgtgcatgaatgcttagtcgctctagacgtgtccaactctttgaaaccttatggactgtagcccaccaggctcctctgtccaagggagtctccaggcaggaatactggagtgggttgccatgcccgccttgctgaagccataaccttgggctaatccttctttggctggctgcttcatctcccaaggcacaaccagccatgctttatggattgatgtgttgctgtcctggaaacccttcttatgtcctcgcccacgaagacatgttcatgtgtacctggttttgccctatggttagccctcagcgtggcagatttgccccatggaatctacacgtgggtctgttcccagtcctgctactttttgttctgagtcacgagaataagcctcgtagtattaatgcattgagacaccaggctgttggtatgaaattgcattaagcagatcacttcacatattattttgacctggaaagtgcctcagaagagaagaatgaggatgagcctttgtcattcagcgtgtgtcgcattgatataatgatagatgacatccagaacaaggatggggttggttggatactgcaaggtgactgttcagggtaatttggagaagatttccagttgaatcagagctctggtgcctggtaggacggcttccctgtatttctcagttgggaggctgtaagagagagttttggacaatctctcattgagtaattttgagtgcactcaaggcatttaacaaatctgtcctgagacgagtctcctcccagagcctggcatttatgaggaggacacactggagaaactattatttgttggagtttttgaaaatatgtgaaaagtagccactcagaaaaaaagtcaaaacggaagcagtgattacaagaataattcaggatcttcctgttgggttagggaatggtttatttgagaggaaatctcttcctagagaaaatgttgtccagatattgaccagtaagaacagtaatgaacttccaggtgcttcagtggtaaggaacccgcctgccaatgcaggagacagaagagacgcagagtcaggaagatcccctggagtaggaaatggcaacccactccagtt

SEQ ID NO: 57752 - DNA, 690 bp, Bovine  19866881263015
  misc_feature (1)..(1): n is a, c, g, or t
ncctggtgggctgccgtctatggggttgcacagagtcggacacgactgaagcaacttagcagcagactagatcagaaactgtgtctgaaaagattataaggttaggtaccaatgcccaataatttaaagtcagtcttcaattaaaaacaaatagcaacaaaaacacatattaatagttttatacaacatttttatttttctaatcttttatgtaatatttattttatagctcggtcatgagcactgacagtaactcattggcacgtgagtttctgactgatgtcaaccggctttgcaatgcagtggtccagagagtggaggccagggaggaagaagaggaggaaacccacatggcaaccctcggacaataccttgtccatggccgaggatttctgttacttacgaagctaaattctatcattgatcaggtaacattttcatatcaaatcattttttttaatcagtaaattttaattatagataagtaatttctaggttgcataatttctgatagtctttttgagataaagtcctgtctctcacatcactcagacaaggaaaagtaactccatttatgaacatactgtttatttgaatactttccaaaatgtctaaaatatcttacagttataaacaaccttttttctaaaatgctttcatatacactagctttttaattttaatatcagt

SEQ ID NO: 57753 - DNA, 1001 bp, Bovine  19866881310244
  misc_feature (1)..(1): n is a, c, g, or t
nggggaaaataggtattgccgagaaataatatatgcaagaaatccagctgttattactttcatacaagtgttaagagtacaaagaaggggtatcagtgattgcaaataacaccccagaagtctttactaggctctaagtaactgattttcaagccaggggttaccacagtataagctgactgcaatggaagcctttagcacccaccaaacctaatcaggagttcaagattgcaatggtttcctgactataaatacaaccaaagggttttactggggtcaccttggactcttcccctctgctgattatggaggtgaaggtcatttagtatggctggaagtggtaacaggaaggggaagagccaaggatgaagctaccctgccccagggacttggtatgaaaccagccctgcaacactgtgttctttcatcaatagcgaagcagtcccaaccctcagccccctccgtatcagctttcactaaactcctacgatgatcatgactatgaatgatggaaacatccaagcccccctgaaggactcccaccagagaaagcttattaagagttagaaacaattgtttctaattctaaacaaggtctttattattccaacccaaagcaaagatttataaagtataacaaactggttccaaatggggaaaggacaacatcaaggatgtatattgtcaccctgtttatttaaacttatatatgcagagaacatcatgagaaatgccgggctggatgaagcacaggctggaatcaagattgccaggagaaatagcaataacctgagatatgcagatgacaccacccttatggcagaaagcgaagaagaactaaagagcctcttaatgaaagaagagagtgaaaatgctggtttaaaactcaacattcagaaaacaaagatcatggcatctggtcccatcacttcatggcaagtagatgggggaaacaatggaaacagtgacagactttattttgtggggctccaaaatccctg

SEQ ID NO: 57754 - DNA, 715 bp, Bovine  19866881399839
  misc_feature (1)..(1): n is a, c, g, or t
ntagctttcttgccttaggagaactgaccataaagttacttttagatcttacattcttgtcttctgtgttttcagaatgtctgtgctgttgattctccagaagagaaggcaggataaggcaagactgctgatctatttttttcatgtagaatagtaaattgattgaatgggatatattcttcctcttccatttctccttcttctctccctgaaactaaagaagtgaccagtaaacagaatgcatgtttggaacaattatagaattcaagtgacataatcaatcacttatatatacaagacaaaaggcacagtgttatatatgtaatagcaataaaatagaaggaaaacaatgagacagcagttcttctaaagactgagatctttttcagggctactggtttatatagatctatatttctctattctagagcattcagagacagcctggaaaagacaaagaactttagtatggaataaagtgacatttctaatgagagggggaaagatgagtataatgtatggtattgaaacaagagactgtccctttggaggaaaatgtctttccctgttttctttccctttaaatggtgtctttcagcctagtcctcaggcgtctggctaggaagcccagaaacacaggtggcacttggagtacatagtgttggcactcacccattcaccatcttgtactcctccttgtgaaccagtctcctgt

SEQ ID NO: 57755 - DNA, 1497 bp, Bovine  19866881420489
  misc_feature (1)..(1): n is a, c, g, or t
nggctgaagtccttaattagatataaccaggatttcagttgctttctaacaacttttacatccttcttcaaacactgcatatataattccagtagcatttgaaaacaacagattacatgtccctcaagtgaaacaaagcaattcagggaagaatatttttccgcaaatggcaaatttctctatataaattctccatgccccaatcacctccatatttgtgatggacactctgaaagcagggaggcctttgcatgcccattcatttggctacttggtggttcactcaggacttttgtttattttaaatctgtatgtcatcaagggaaagaaactaaactacagatctgaagtttttcagctctgtctcaggtaaaactcatgagtctggatcactggaatctgagaaataattttagtataaaccagctcagcaaagatccaggctgtccacaaacacgccacagagttataaaactttcagatcaaagacagttctatttaaacaatgtcagaatgtcaggattttttttaatggttgtgaaaataatgatcacagatatgttatactttactgtaagtttttaaaatggtatacgcattaatttcaaaggccaactacctatcagaagcaagcttcatttacaaaattattttttaagtatgaaagttgacaatcacaaaatctgcaaaactcactggtgggattcaaagtatcttaattttcttcattttgcttacctatattttctagtttttctacatacaggtaataaatgtaaatatggtattcaaaaaataataatttcattaatttcactgttttgataattatcatgcacatacacactttatgtactatatatatattttacatagctctaaataaatgggtgactttttattttttgtatgctacttataaaatattataagcattttctcatgtcccaatagatcctagctaacattatttttggctaataatattacatccagtaaatataattaatttaactttgcccctgctgttggggtatctgcgttttatccatttttttctcagatatagatttaaaactttacttttttttcagagaaattaaaatcaatggctctgtcctcttctctataaacaccccagtaaaacaaacaaataaataaatgttaaaaaaaaatccgacatgggatgggaaatttttttgttgttaaactaaaattaaatcctaggaaaaaataaataataaagatattcaaacatctttgaacatgatttttcaacaatgagaaaaagtatctacacacatatataacaaaccttgatttaagcagggtaggcagagtttttaaataaatctgaagtacttcctggggcaaacactggttatgatggctacatacatgagtctgagctgaagaaatgctaagctgctgacaatgatgtgctaattcaactcctctttgcagcacaggattaaatatgcagttatacagtttcca

SEQ ID NO: 57756 - DNA, 664 bp, Bovine  19866881485729
  misc_feature (1)..(1): n is a, c, g, or t
natgagtgtaaaataaaacagtggtgagaatgggttcctcaattattataactatgtactttatttgaaaggcaagaagaacattagttcataaaatgcattcattgttacgttttctgaatattcgttcattgaagtgcaaaaatcagtgtatcctggccaatggtaagaggaaattttgctggtgtgacttgtagggcagctgtttatatttgtcagctcactcttacactactttttgatatttacttatctgaacctttaatacactatgacttttcttttagtctattaaagattaaaatcctttgccattttctggatttcctattaacgatgattccaaagacagtaatgctgataactgttcctgcttttctctgttagctttatttaaaaattttggagtctatttctaaagtcatacattccatattactgaaatgtatttattttctctacatcttattttttttttaatagaatctctggttttgacaaaacctaatgatgcgcagtttaaagaaacatttagaatgtgtaattttaatcttaatcttgatgcttacagttactatatgactattcagttcagttcagttgctcagtcgtgtccagttctttgcgaccccatgaattgcagcacgccaggcctccctgtccg

SEQ ID NO: 57757 - DNA, 789 bp, Bovine  19866881717554
  misc_feature (1)..(1): n is a, c, g, or t
ntcatgccagagatattacacttgattgttaagtgtacactatatattatttagacattaactttgccaacaagttaaacatgcgtaattttattttttaacaatttgcactcatacaaatatcactgtatttggctttatgatattttaaactgtgaatagtcaacaaatggatttggaaactattacattttaggtgatatttaaattcacatgctgaatcacatcatgtcgtttcccaaaagcataagatgaacatatgcaatgatgaaaatagcaaagcacattttaatgtaacattttaaattagtcaggagacagctgttacctgaccaaaagagaaaaatgaacagatgctctgcaagtaaaaggcctgaagagttggcaaataaagaggaatggtaaacgactagaatattttcatatgtgcatcttaaaggtaataatcttgatagaactctaaaaatatttcagtttagtattcggtgatattttaaaatcatcttgaaaaactatcagaaatgttttattttttcattctgaatgtccaaagaaacatgattttcctagacactgaagctgtttctaatagctcattttaacatcttctgatcaatcatttattgactgtagtttctgggactagaaaagttgtttttggagacatgcacacatagaaatcttatttcctgctctcaggaaactgatttaaggaattgaatttaaacacaaattcttagaaaataacaaaatgtgtaaaaataaaattttcaatgaagtttcttccag

SEQ ID NO: 57758 - DNA, 1721 bp, Bovine  19866880362865
  misc_feature (1)..(1): n is a, c, g, or t
ncatgttattgagctaactacttacatccactatcaaatcttcagccttcagttcagctttctagctctacatcactgggtttagcactggcgacctcatttggaaggtgttcatagttttcctggaaaagacaaggctcctcatgttagaactccagttcttcatcctacagtgtttgtgccaccaagagggttcttctctaaaaatggcactttaccaagacacatagatagagatttccccaacaaatatatacccatgctaccttttaatcaaatcacaatagtgtgattttcataacagaatttcacattgaaaaaaatgaggcattaacctattagtagaacaagaagaagtaaagtgtgacctaaggcagtattgtgaggcagggtgtggttatcagcatagcttgtgttacaggttttttgacaaagataagacccttcaacaagcaggagagagaactaatgactgaactaaggcaggcaggcaagcactgtctgggacaaagtgataaaccgtgaaagaaggaagtagttaaaaagcaggtccttagagtctcaaagaagctcctgcagaggccttattttgaggccccttttccattacattcattttctggtctttggatctaggtaaaacgaggccccctctcacttccgagttgagaaagtaaaggtttggagtaaatgagacttgactttgaatcctagcttactaagtgtgcttctgtaggcaagttatttaatctttcccaagcttcagtttgtctgcaagatacgtctcaagagattgatgtgaagattaaatgagaacgtattaattataaaggacttagaatacagctgtggtattgtgatgggtatggtttcctcttgtggggacagaggacctttcaacttacctttttaattctttgtatcatgggctgagtctcacccacaaacttgtatagattacgggattcaattttctttaaaatcattcgtgcatcattcaggttgggatcagtggagtataagatctccagaaaaatgttatctgccaatttgatgaaatttcagttatattagaatgaaaaaaaaacaaaaaaaaccaatatttaaagagactcatattgctgtacttctgaaatgatttcaagcagaggtttacatacatagacacactatgattataaagatgtgaaaaaacttttgtaaaaagtgctccaatcagtgtcttggatttgtttcaggataacctaatgagtgggaaaggggagagatgagataagactgcactggagatgatgacttgagactgagtttgggggtacaaaagggtatattagtttattgcttttttaaaaaaaagagaatgaaacttgaggaataacaaaattatgtctgagatctgcttcaaaatggctcagggtctgatggggtgaagggatgaaataaaactgcaatgctaattattgcagctaactcatgaaactaagtgatgtaaatttccttaataaaaagtttttaagggagttccctgaaggtacagtagttaggactcagtaatttcattgctggggcttgggttcgatccctggtaggggaactaagatcctgcaaagaaaggcacagtcaaaaaaaagaaaaagcttttaaaggtttcattccatgatgatagaaggtagcttaatttccttcttcctttttcttcaaactttttatttcagaaattt

SEQ ID NO: 57759 - DNA, 2313 bp, Bovine  19866880476791
  misc_feature (1)..(1): n is a, c, g, or t
nacttaacaagaaaggtagtgccagtggctccccgaccctgggtcctgcacatttctacctcacgttctaggtcttgctgcatctgagctatgggcagggagatccagggccccaggattccaagcagatacctgactgtggctactgccctatcatatcccctagagctgcagcaatccagagcagcagggctggaaggaggaggcggtggcggagggaagagagggatggggtgacgcccagctcagctcaccagacaccccacgttgagccctagagcaaagcctgttcttctcattggtgtttcctccccatgaatagggatgtggttggccaggaacatctctgtgagcccttttccctgaggcgcatggctggaagtagatcctttcctcggctcttctgagaagtgggtgtgggtggaaccaggcaaggctctcccaacttacgacccaggaatcagctctcaaaggatctctctggagacgcttctgaaacccagttttggtctttctcccactcactgccttcccctgggaagtcagagatcaccacccagcagtcagcaggagaccccgctttacctggctgggaaagcgcttccatggcagagatgcagccctccagggcgagagatgcagggagcttgcgggccccaagcatcttctcctctccactggttccctttggctgtccagagacgggggctggtcgacatgaggagctctgctactctatcactcgctgggcggggctgcccgctcctccccaccccagccagactctgaagggtggagcctgcacttggatggagagtggcggatggcagagcgggatggccgggcgaagcaggaggcgagagactgggtgctgcagtcacacactgcatcctgtggggggagagagagaagtcaggaggagcctggaggcactgactgaccgcccaccccgggactgggtggccagccaggcaaggaatctggactcagctgtgccccaggaccagttcctaggagctgtagcccctctctgaaccaattttaaaaacgtattttcttccattagagcagtaatgaacgctcataaataaaacagtaatgagtgttcataaataacatttcagggacttccctggtggtccagtggttaagaatccaccttccaatgcaggggactcgggttcgacccctggccgaggaactaagatcctatatgccatggggcaactaagctgatgcactgcagctagagagacgcctgcacactgcaactagcaaaagcctgtgtgccgcaaaaaagacccagtacagacaaaaaagcaaaacaaaaaaacccaaacattccagaatataataaactctggaatatacataaataaattctggaacatacctttaccaaaatgatctcaactcctatagtttactttgtaatcgcaaagacatgaatacttttttgtcattatgtatgtccagatctctttctttttaatggccacacagtatcccactgagtggaaatagcttaatttattcatccaactcattttttatgtgttttaagtagtttctaattttttttactactaccaacacacagggataatggttaaaagtgctgctatacattatttacaattgccaagatatggaaacctaagtgtccatcaatagatgaatggatagaatgctactcaactattaaaaaaaaaaagtaattttgccatttgcattaccgtggatagactcggagggcatcacactaggtaaagttaagttagacaggggaagacaaatactgaatgacatcacttatatgtggaatctaaaaaatacaacaaacttgtgaatataacaaaaaagcatcagacccacagatatagggaacaaactcatggttaccaatggtgagagggaaggaagaagaggcaatatagaggtaggggattaagaggtacaaattattaggaataaaaataagctgctgctgctgctaagtcgcttcagtcgtgtccgactctgtgcgaccccatagacggcagccaaccaggctcccctgtccccgggattctccaggcaagaacactggagtgggttgccatttccttctccaatgcatgaaagtgaaaaatgaaagtgaagtcgctcagtcgtgtccgactcttcgagatcccatggactgcagcccaccaggctcctctgcccgtgggattttccaggcaagagtactggagtggggtgccattgccttctctgaaaaataagctactaggatatattttacagcacagggaatatagtcaatattaataa

SEQ ID NO: 57760 - DNA, 1499 bp, Bovine  19866880562961
  misc_feature (1)..(1): n is a, c, g, or t
ncagggaagactcagggggaaaaaacttggccttaaggcataagaaagacttgaagagggttttgaatactcaacaggtacagttgggaggggggagttcctccagaaggactagggaaactaagctgggctggtaagacagaaagggggaaaagaatctctctccatatgggctactggcaagtcccttcccctctgatacgtggttcccactcatgggaaagtgaggaggctgggagagttccttccagactgatatcctacgatatgcctttactttgtctcatttaatattaaaggaggcaaggagggtccccagcttagcacatggccacagggctccacatctgtgcagactgtaatcaaatatttggaggtggcagaaaattcaggccaggatcttaggtacggccacccttgggcgacttccatccccctggggagaagcagatggccttctgtagagatgccctccctcaccttcttgttaataattaagtcattaccaaagacctcctttgtcactcttgaagttcagtttgtggagacttgctgtcttggcttgctttatcatgacgctccaggttgaaggctcacaggctacaacaatttaggtgttaagcctcatgcccaaattccagggctctgcagtggaaagagcccagggtggggggaaggagcactggggtggatccttgctagaccctgaaggttcggtggactctgggaggtcagaagctaagtctctagatggctctcctggtcactgtatccccaggcccagctcatcacctggcacacagcaggcacttaataaatatttgttgaagaagtgaacaacagctcagtcagtaaatcccagagtgaccttggtcaagtcactttctggaaaatgaggatgacaagaacagtagtgatctcctagggctggataagaatctgagataaggtgggtaagttctctgcaaatcaaaaacgggctacacaaacattaaggatccaaaactatgtgatgtgaacaaaataaaaagaatgaatatacctgagaatgatcacatttaccacaaagcacctggcaagtggtaaagcactgaccaaatgaatgactacaatcgaaagggacagcacaggggcgctctagttcactcctccaatgtctgcataatttctcaggcttctcaggctcagtctgttccaaaggagcacaaaaacccctcatcgaaactcttaccctgctttctgatatgaaaattgtgggagcagttacaattgtaccctgtaaaccccaaggctcagagagtacatgccaatgtattccctggtggctcagtgggaaagaattagcctgtaatacaggagccgtgggttcgacttggggggttggggaagatcccctggaggaggaaatggcaaacaactccagtgttcttgcctgaagaatcccatgggcagaggagcctggtgggctgcaacccatggggttgcaagagtcggataag

SEQ ID NO: 57761 - DNA, 1831 bp, Bovine  19866880641395
  misc_feature (1)..(1): n is a, c, g, or t
ncagagcactgatatactggggagtgggggtggaatggggtagaaggctttgtttgagaatgacaccatctgaggagggcctactgccaatctacttctataaagcttggctggagcagggggaatgctcatgaatagtgatgggctaggagcacttcccagggagagagaggcatgagatggagtgtgggaagtgggtaggaacagcacgggcacatcaaagaagagctaccagatgttaggaagtgagacaatgcctggtatcttagactgctcaggctgcgtgaatggcttttacaacaaaaatttatcttctcacagttctggagcctggaagtccaagatcaaggttccagcagggttttgttttaggtgagagctcccttcttggcttgcagacggctgccatccatgtttcctcatctgtccaggggtggaggtagagggtgtatctctctctccctctccctcactcttcttataaggccatcaattctatcagattagggctctaccacatgacctcatttaaccttagtcacctccttaaagcccttatctccagtatagtcacataggaggctagtgcttcaacatatgaattttaggggagcagacataattctgttcatagcattcgggcacacatcagacacagccagggaatcactatagcctcagagatgaggacccaaacattaatccaacgcttttctgtggttacagttgccaaatctttcttttccagctgccttctctatgagacatccaggcaattaactcctggagttcttcatgtagctgcctcaggcatcctgtggacttccaaggtcaggaaacactcctcttcttacctgggccccaatcctcaaatgtctgagatccatcaggtcataggcttccaacgctggctagtcagaatcactttaggcatggttctcaatttttggatgcttttgtaaacgttcaccccagatcaattcaatcataatctctggaggtaagacctaggcatcagttatttttaaatctccccaagtaattgcaataagcagcgaaggctgaggaccactgatcatagagaggtgtgcgtgccctgtccccatcccctccgattccaatttagttgttctagagtggggacccaggaatctatatttttaaacaagttcctagctgactttggtgaccactcaggtttaggatatgtttctagttcctgaagctaaactgcctacccgcacctgccttgtaactattcatttctgtggctgtatgtaagcattacagatgtagattctacttccttcctcctcttcatggcccatcatttgggtacagcccttcatatgcaccaaaattcagtgcttaacagagagttttctgaaaacatgaagggaagcaacaaaagaaacaaaaaagggtttaaaaagtgtgcagcttgccaagggggagagcaagagatctggtgaaagataaaggaaggggtgggaataggggtagagatgaggtcacagggacaagaatggggttgaagggtttcaatagcaaattagtgaacacagtaagtcaatagccctagaagctgtaggtgaagggccctgccttgggcaaaaaaagattaacaaggcaacaggcatcttctggtatagcccccgttggcatcctgaccctacccaactttaccctttccatcaatacttccccaggaaaggatgccatgagctcatccacaccaagctagaagagtaatttaataggggacaatgacaatacatcaaaagaacagggcctaaaagaaggaatttcacacacttactgaatggagagg

SEQ ID NO: 57762 - DNA, 1584 bp, Bovine  19866880864919
  misc_feature (1)..(1): n is a, c, g, or t
ngcaggaacacacatttaggtaatttcactcaggtgggtaagtctccagagaaatttggaaggggtttacaagacaaaaaaaatgatgaggaatatgctcaggaatataatttggatcatatatttaaaaatttgcttcctccttgcctcagtggtaaagaatctgcctgacaatgcatgagatacaggtttgatccctaggtcgagtagataccctggagaaggaaatggcaccccactccagtattcttgcctgggaaatcccatggacagaggagcctggtggactatagtccacggggttgcaaagagtcagacatgactcagcaactaagcaacaactacaacaaacattaaaggatttacgtggactggtgttcagttcagttcattctctgagtcatgtcgaactctttgtgactccgtggactgcagcatgccaggcttccctgtctatcaccatgtcctgaagcttgctcaaactcatgtccatcgactcagtgatgccatccaaccatctcatctgttgtccccttctcctcctcctatagtagtacagtaccagcatcagggtctcatgagttgactcttcgtatcgggtggacaaagtattggagtttcagcttcagcatcagtccttccaatgaatattcaggactgatttcctttagaatggactggttggatctcctttgcagtccaagggactctcaagagtcttctccaacaccacagttcaaaagcatcaattctttggtgcttagctttctgtatggtccaactctcatatccatacataactactggaaaaaccatagctttgactagatgaacctttgttggcaaagtaacgtctctgctttttaatatgctgtctaggttggtcatagcttttttcctaaggagcaaaagtctttaaataaatcattatttccttttaatttttctttaaaatttttagtgtatgttttcttattgcaaaggaaatacatgttcattgtgtggaaaatttagacaatacatgtatgtaagcactagaagacggagaaagcgatggcacctcactccagtactcttgcctggaaaatccaatggacagtggagcctggaaggctgcagtccatggggtcgctgagggtcggacactactgagcgacttcactttcacttttcactttcatgcattggagaaggaaatggcaacccactccagtgttcttgcctggagaatcccagggacaggggagcctggtgggctgccgtctatggggtcacacagagttggacacgactgaagcaacttagcagcaagcacctagaagaaaatcaaagtcacttaaaatcctcctgtcagagaaaaccaccgttaacttttttggtctatttccattcattcatttacactggtatgtttctgttttttgtccagatggaaccataatatacatattatctaatcattgcttattttatttagtaatattgcatcatcatttatctaagtcatttaaacattttcctacaatatttttcctggccaaatatatgattctacaatatggataaactctacttaactaattt

SEQ ID NO: 57763 - DNA, 1152 bp, Bovine  19866880865342
  misc_feature (1)..(1): n is a, c, g, or t
naatttcccttagtgttttttagtctttttttccttaaaacacacaaatctacttgtaaggtataagataaataggaggattttacagcaaatatcctatctccaaaaaacagagttcctaggaattccctggtgatccagtggctgggactctggcgctttcactgccaagggcccaggttccatccctggttggggaactaggatccccaggatcactcagcgcagccagaaaaaaaacacagagctccaagaattttcactcctgaatttaagcattagaatataagaaacattcttactagtttataaatagatcttaatattttaaaaaatcttttaaaccaagaaaacaagaaagcttgttggttatctaagtgtaatagaattaggatccttccaaaggcactaggtttagtattaacaggatatcatattttagcatttctagcatttctttcccttttctactaatttgggaattaagtgaaggaaaaaagagtagaaccttctcacttacctaacattcgcattcaaatatctgtttataattttcgggttaatacacttgctttgcttataaatagatttatctcctgttctataactttcagtgggttttcttctcttccagtggctctataaagggcgtcctaaagaaaaaagcttcctttatgagatagtggccaataaaagaaatggcattgatgtggacaaatgggattattttgccaggtatgcactgaacacttcagaaaaattgattagaaatcttgtatactttaaatagatacaatttttatttaagtaaataagcaagcaaaataaaaccgttatataaatttagtattgatatttaaggtatggtttcctttgctgaaaaatttcatctctctgcttgggaatctctccagggactgccatcatcttggaatccaaaatagctttgattacaagcgctttcttaagtttgcccgtgtctgtgaagtagataatatgaagcatattttgtactagagaaaaggtaagctatgtcagaggacaataaggaaggtgtgattcttagcttgaagtctagaaataccctttcagtaaattggaaaaatcactacctggtaaattatctatctctttacttcgtgcttagcattt

SEQ ID NO: 57764 - DNA, 901 bp, Bovine  19866880880239
  misc_feature (1)..(1): n is a, c, g, or t
ntatttgcagagtacttgggaaaaaatcttttaaattaattatttatatagaaagcctatgcaaccgtctactgcctcccaaacagccctttgaatatttattgttataagtactatgaagatttatagtaaaaattgtgactactctgataacactggggcagtcagccacataaggcaaaagaaggtaaaactgaaacttactgtatttgcgctagtcactcagtcgtgtccaactctttacaaccccatgaactctaaccctccagactcctctgttcatgggattctcccggcaagtatactggagtgggttgccagttccctctcctacatgtatttagggacagactaaaaacctataagcctgaggctcccttagggcaacatgcaaataaaaattgccctgtacacttaagcgacatataccaattccactcttggggataaacagccttcttgacttaggacctttttctgcaaattttcagacacaagaggtggactagagacctctgagtggtcagtgatgaccagaagttgaatctaaagagaaggccagcgaaaagaaattgaagggcagaatgaaggaacagaagggcagcaggaaaacatcactctttgagtaatacaaaggaactgtggaaattcactgattctttcccagggcctactgtgagccaagcacttggggctgcaaagatgctccctgacctcaacgggctaatagtcctaagagtaagactgaagcctctaccctacctatctacctaacacacacacacacaagcgcgcatgcacgcatgtatgtgtgtgtatataattctaattgggaaaatcaagcaaggaaggtttcacagaaaaggtggtaagttaatggtgctttaagaacgcaggagaa

SEQ ID NO: 57765 - DNA, 3116 bp, Bovine  19866880911715
  misc_feature (1)..(1): n is a, c, g, or t
ntgatacagtgaagatcctgtgcattgcaactgaaacctgatgcagccaagtcaataaataaatgaatttaacaacaacaacaaaaatctttaaaaaaatgaaagagcttcggggaaccactgaagtggaaggacactactgctttggcattttagaagtatcattccagttgcagtttgcagcctggattgcaggggtcttagagtgaacatagagagaccagggaggaggctggtatgattttccaggtgagcggtggaagtgacatagacagaggatacagagaggggatggcatccaaaaatataactgaggtggagtccctgggactgtcacagttggggttcctcagaagcatgaccaagataaggattcaggtgcaagtactttattggggaataggcggcacagtgtgggagcggggaggtaaggcagggaagggaggtggccaatgaagggagtgttatcaagcaagtgaccacccaactggagctcactgaggactgtagagcccactcctctgtagttccagccaaggggaaagagccagggtatttatacaccaaccacacagtcgtagctgagagctgcagccagaagatgcggtggggagggggttgttaattctcccgcagttcctgccagccacatgtgagcagagcgcactccagctgctagagaaagcccccgctccctccagcagggatgcaggtgctgacagttggaagtcagtctgttgggcatcacagcgagatacaggtggggtacccatagccactgccgtagtgaccaattggacatgagttcagtaacaggctcttattgaaagacacagaaacgcaactcagacttaagcaaaaaggctcttaacgctcatatctaagatgtcaggcaagatcttgacaaagaactgcaggttgacactcagatagcagcctgaggatgcctctttcccaagagttcagccataatcccagggctgactctcactggctaataaggatcctgtttctatctcagagccaatcagtactcggggatgcaggactccgattggccaggcctggatcacgtgtctacccctgcagctctggaataaggctgattccacctagaccacaggaaggaagtctgaatcattttttaggcacagtgggaactgtcattaggggaaagataagaaaagtcgggagagaagtgctcagggctgagaggacgagtgtagtgtgcacttctggggcaggactgcagctgtcttctgctcctggtgaccagcccactccacctctggtatttagagggagtcagacccctgctgagccagcgagcaagcggactatgtttgcaaactcttctgcattttcagtatcattggctttacttgagtgggcaccaaggacagattcctacacacacagttctccagctggagagccgaggaggctggcccctgagcccaaggacactgcagccctgaggagctgtaaggaagcttggccaggagcaagagggatccgggggtggttttgtgcccagagggagctgctgctggctggagtggaggaggatacttgattttctgggacactgatggggtggctgaagtctgagttacttacttcactttggctagaattgcttctcccagcctcagtttccccatctgtaaaatggagacaatggtcctccacctcatgtggctgctgtaatgaagataaagacgcacatcagcagaattcctctccaggctggggataaaggctctgacaagtcacctggtagaagcagagatgcttccgggagtgctgttcagtcacagcgaccatcattaaaatgctctggacttcagaagtggggtccctcaggcttctagaggcaaggagaggttctggcaaagaatggggagaattccacctggtggactctgagcaagtctcaggctgaggaaggcttgaggcaccgttggtcatgaaaatagccaggtccaaggatggcaggcctgcttccagggccagcacggatcttcccatggtggtctacactgccagtgggaccagccctagggatgaggggtggctgtttgaggggcatgtggagtgagcttgcatgtatggggctccttgtggtgaggaacagttatgccgccatggaatctggaggagaccctggtggctcagtgctaaagaatgcctgcaatgcaggagacctgggttcagtccctgggtagggaagatcccatggagaagggaatggctacccactccagtattcttgcctggagaattccatgaacagaggagcctgatgggctacagtccatggggtcacaaagagttggacacgaatgagtgactaacacacacaagaagtctgagtttgaacctgggtttccagtttattgtgaaaatatattcatcaaggtaggaaagtagaacatattttaacagtttgctagcctgagctgtcacttttatttacatacatggtgagtgggtctccattctactcttttatttttaatgctatcatttgtatttggaatttaaaaaatgatatgaatgaactttaaaaaattccttgtgtttccatataaattttagaataagcttgtcaatgaagaatatatataaattttttttttggctgtgttgggttttcattgtccattttactcttgatctcaacgcacaatgctaagggcaggccaggagtcttcagaaatcttcccaaccttgagatctgtggggcgtctgggctagccttctcctccaaatccagctgatgcctatctgtcttctctccccagatcagctgctgcccgggagaggcaacccgggcgccccgctagggcgacggcccctgccctgagggccgggatcatgaaaggcctcggtgacagccgcccccgccacctctctgacagcctggacccaccacacgagcccctgtttgccggccctgaccgcaacccctacctgctatcgcccacagaggcctttgcccgcgaggcccgcttccccgggcagaatgccctgccaggggacgggctcttcccactcaacaaccagctgccaccgccgagcagcaccttcccccgaatccactacaactccca

SEQ ID NO: 57766 - DNA, 1273 bp, Bovine  19866881046656
  misc_feature (1)..(1): n is a, c, g, or t
ntccatggggtcgcaaagagttggacacgactgagcgactttcactttccaagaactctgtactttttctaattgttctagtaattgggaattgtgagtgcattccaattcaggaggtatccttctggatttcaggtaccagtacccaaccatggatgagctggccgaaatgctgcctcctgttctcacccacttaaagtgagttcattctgtagttcttccatgtggtttttgtttttcaaaaaaacacttttttttgctatgtgtctgatctgggtgctatgatggtaatcaaaacagtatggtcactacccttatggagtgtgaagcttacattttgatatggaaaataattaacaacagggaaacaaacaaatagtcacggcttacattgctgtagaagaaatcagtagggatgtgtgatagagaataaaagcaggctctaccaaatatggctaactgaggaatacctctctaaggagtcctttaggttaagacctggaggataaaaaggagttacctaaatagagagccaggacaagaggattccagatggaaggaatatgtccaaaaggcctgacccaagtgaacaagtgggagaaaagcataaggtgatatttgagaactaaaacaagaaccagattacacagatctgacagatcaggtgagacttcgggattttattcaaaaggcaaagaaaaacactgaagagttttatgcaggggagtgtatctgatttagtcttttaaaatgatcactctagatatgtaaactgcacatcaataaagctgtttgcatttttcttttaattactctaaagacttccctagcaatccagtggttaagattccatgcttccaacactaggggcatgggttcgatccctcgtcatgaaacttaagatcctgcgtgctgcatggcacagccaaagataaataaattaaacactgccaaaaggaacctttaaaaaaaaaaaaaaagattagctgtggagagaatctccacaggtttaaagaggggtaaaagagaaaaagcaggggaccagttaaactattacaacaatcaggcaagtgatgttgatagcttggcactagatgcctcccagaggatggaatggaggagaaggcagatggaaggactgtgaaggtgactataggacttgctgatgggttgggtgttgggaggtgataggagagtgagcctgtcaaggatgactcccatgttttagtcatacttcacataatctttaaaatcaacttaaaagtcatcatat

SEQ ID NO: 57767 - DNA, 632 bp, Bovine  19866881142579
  misc_feature (1)..(1): n is a, c, g, or t
nctgaggttgtgggaacttgagtctatgaaaccttgggagttactgttgtgaaatcagatggcaattctgaagaatcgagcctcagagaggaaaacctcttatagattggattccagatggattctgggaagctcatgatcatggttggcctaggataagccgttcttctgaaccctcttcctctggatttctaggcatctggctgagttgtggagaactctggaggtggagctgcccaaaacgacctggattctctggagactcctgaggaagctgcagaaatgccatgattctgactcccaggacaagatggcctatgtggctgttgctgtaagcccttgagctttgcccctccaactttagcccaccatggccctcctggataattggcccagcaccatctggagagtgttccttttggttcctctcaaagtttgtttccctcatccatttataaatccaccagtgtcaccaccaagggatggatgtggaggaggctgagatgagtgaaggagtcagtatggtttcatctgttttaagcattctttttctcatcttttaaaaaatgcatatcatcatagtcaagagagtacaaacatttcaaagaatatagaagaatataaaatagaaa

SEQ ID NO: 57768 - DNA, 1667 bp, Bovine  19866881211840
  misc_feature (1)..(1): n is a, c, g, or t
ntgcctccatcctcatcccagccaccgtgacctctcaggggctggtccaacagctcccatgccccatcttctagcatcttcttgccatcagctagagtgatctatttaaaacacagattacatctcaccctggcttactccaaagtccccagtggcttgtcactgcatcaggaataaaggcctgcaagggctgctgtgactccctctgtccactccagctctgtccatcagccgtcaagtgctggtcacatggcccttctcactttcttgaacatctgtcagatgggttctctctgcctggaattctcttattctggatctctgaataactcactttaaatgtcacctccaaagagaggctgacctgactactctttttaaagcaggttcccctactaattcctctaactcttcttcagccagtggtttgtataagggacaaaaactttgggacttccctggtggcccggtggttaagacttcacaatttttaaaggttatactccatctatagttattgtaaaatagcagctatattccctgtgttgtacaataagtctttgtagcttatcattattattattatggggggtgtgctagggcatgggttccatcccttgttggggaactaagatcccatatgctgcatggtgtggccaaaaaataaaagcacttttaataaaggaataaaaatttcagtttttaaaaaatcacctcctcttgggagccttccaggatttagtctctattcagtttccatcatgttggtcagttcagctgcttgaatgggagaacataaattgtttttccactgggtgatcagcatcttcatttcttacaatctgatttatttcttataatcatttaattcttcatgacttctagagtagaactttatacagtgtgtgcctgagctgaacactacccagcagtgcagcacaacacggtcaaaagctagatggccctcggttcaaatctaccccagccctgccacttccaagttatatgaccttgaacaagcattccagttattcattgctgcataacaaactaccccaaaaattagtgtctcagaacaacaatatttattttgcagtttgggacagctcatttctgctctgcttagcatcagcgggcacagctccaaggctagaggctatatcatctgaaaattccttctcttacatgtccagggcttggtggggaccagagctggagttgttcattggaacaccttcatgtggcctctcccatgagggaggccttgcttcctcccaacgtggtggctgggatccaagggaaagtggattgagagagagagagactcagagacacagagacacagagagattgagttttcagtcatattgccttttaggacctagctttggaagtcacactgtcacctctgccattctctgttggttgaggcagtcacaaaagctgctcaggttctaggcgagggaatacaaacctcgtcactcaattggaagagggtcagtgccacactataaaaaagaataattgggggacttccctgatggtctagtggttgagaacccaccttgcaatgcagaggacgtgggttctagccctggtcggggaactaagaagccttgagccctgtacctcaccactagagcatctgtgtgctgcagccgaaagat

SEQ ID NO: 57769 - DNA, 731 bp, Bovine  19866881276940
  misc_feature (1)..(1): n is a, c, g, or t
nctggaaactggaaaggaggagagagctcagccgtttgctttctgttaagtcgacactgatggatctgcagagctctaacataaaatattaccacattcaaagagctggacatttatacagttagcaaagtaaaaaacaaaaaaaaaacctgaaaaattccctccctcttgatgcagcccaaattaaggtaaaaaaaacccaagaagtcttctctaatctgtcttcttacatctaatttgttcaagatcaccagagaatgaaatttacctatctgtgcatcctaagtttaaaaagttaaaagaaccttttatgtattaccttaaaatcttgtcttgctaaataaaacagatttaaaaaaataatttaacttctctttgtgttttatattcaccatttgaagaaaggagatgggaatatttcagaatttttgtgatagccattgtagtgtgctttaaatgagttcctctttacagatggggaaactgaagctcagaggggagacacttgtctgaagccagagacaataacattaatagtaagtttgttgaacacagactatctaacaggaattttattaaattctaaccgtcaccctcacttgaggcaagtgacttatcagcctaaccatttaacaaagcttaggtgctgggcaacttgcccaaggtcacacagtgcatcagcctgaactaaacaggcattttacataattatgccactgaatcctcagcta

SEQ ID NO: 57770 - DNA, 1480 bp, Bovine  19866881337886
  misc_feature (1)..(1): n is a, c, g, or t
ncccacaactaagacccagtgcaaccaaaaaataaataaatatttaaaaagaaaaaagtagtaaaaacagtgctagaatgaacatctttaaacacaaaggatttttcaggttgcttacttaaattagaatttatcctatgtaatagcatctgctggatatattgtatctacacatgtagatagaacactggatagaacactggcccttctctcaagcaggaggttccagaattatttccacagttgaaatctgaggcaccaaatgcacatgcagtctaatggtatttttcttttgcttcctaatcagcttccagtgcaattccaaagacttggacacctggtggctctgatggctctgctgtgtggggacccactgaaagaggtggccgaggaggctgcggagggcatgcactacctgctgcacatcaccctgaggctgaagtgtaaggcactgctggaggcagtgaggccctgagtcagttctccagcacagcacaaaaagcaccaggcctccttgggcactcactgcccacattctagaaagacttttaccctggttcatagagagaagggtagcctgtccctaggcaaagatagagccacactgacttaataattagaaggataacactgggtcagacccatcagtgtcagccatgtgcatgcccatggagttggagcagaaaacatgtggccctgtggaaaagctggagtagttagtttagctgcaagtagaagaagttcttgccatcccttgggcctgcctttatgtgtttatcccagaaacgtttactaagtccttactcagatctaacagtaaccagaaaatatgtggtccgatccttatatgggcttcacagggggcgcagtggtaaagaatctgcctgccaatgtaggagatgcaagagacatgggtttgatctccaggttgggaagatcccttggagaaggaaatggcaacccactccagtatttccgcccagaaaatgccatggacagaggagcctggtgggctacggtctgtggggttgcaaagagtcggatacaactaagcgcacacacacacacaatccttagatgtaacacatgatctagtgggggcatcagagaatcagggggtcaacaaataactcttcttataaacacttgactgctatgaagggagattacagaggccatgagtaaggatcaaatctagttgtggggttcagaaacggcctctctgaagataacctaaaaaataacatttagtcaggtgaagtgataagaagagtgtattaggcagaaggaacagcgtgagcaaggacactcagcaaatatgaacgtggggaatttgaataacaaagagagggccatggtggtcaaggagtgaatcaccgatccccacagttggaagaaacttcagaagatatctaacccagacttccccagtgctgagtctgagtctgttctatccctacccagcagttgcccagcctgg

SEQ ID NO: 57771 - DNA, 764 bp, Bovine  19866881420550
  misc_feature (1)..(1): n is a, c, g, or t
nctgatgatactatagaactaaattttatagtaatattcattaaaatggtattctactgggaatttcctggcagtccagtggttagggtttggcgcttgcactgcaagggcctatgtttgatctctggtcaggtaactaagattctgcaaaccatgaagctcaccaaaaacaaacaaacaaaaaggtgttctatccttaaaatctggtagtattcagctgtgctctataatacatacgtattataaatcttatatctcattaaatatatttatcaaataatgatgcacctggattataaggttttgtagactggtaaaatatagacaaatttgacagatattttttaaatatctggaggactgtagttgaaaactaggtcattaacgtgcattagaactttatctctgaattaccagggagccaagagtaatttgaataatcaggggtccctgatggactagagtctgtaacaaaccatactgctgccttttcctagcatgaacagggctcagttatgatgtttgagcacctcatcaattctaacggactccaagatgtcatgaaatactatggtctcatccctgaagaagatattttgtttatcaaggaacaaattacaggaccacctgaatcacccatcaaagatgcttcaaaggtaaatttgtgtacaaccctaatttaaaccgactggttcttttcatctcgtcttcttcttggttccttcagatttgtatttgaaaggggtgacattttgctattttag

SEQ ID NO: 57772 - DNA, 1823 bp, Bovine  19866880459433
  misc_feature (1)..(1): n is a, c, g, or t
naatattcgggattgatttcctttaggattaactggtttgatctccttgcaatccaagggactctcaagagtcttctccaacatcacagtttaaaagcatcaattcttcagtgctcagacatctttatggtccacctctcacatccatacgtgactactggaaaaaccatatctttgactatatggacctttgttggcaaagtaatgtctctgctttttaacatgtgatctagatttgtcatagtttttcttccaaggagcaggtgtcttttaatttctcgcctgcagtcaccatccacagtgattttggagccagagaaaataaagtgtgtcactatttctattgtttctcaaaatataacgatcatattttgcatctatttggttaaataaaaatacttaaattaatttaactatttatatgtctttattccctggtgattcagacagtaaagcatctaccaacaatgcaggagacccgggtttgatccctgggttgggaagatcccctggagaaggaaatggcaacccactccaatactcttgcctagaaaattccatggatggaggaacctggtgggctacagtccatgggatcgcagagagtcagacacgattgagcaacttcacttcacttcacttcaatgtggctactagaaaattttaagtgacatatgtggctttctttagttttctgttggacaggactgaactaaaagtctcactgagttaggaaaatgtttcaagtggaagtattagaataggagaggacatatgggtcaaaaagggggaaacttgaaactcacatttaagagactgtacagttaccatcaacaacaaggcgatgggaaggccaagcaaaggggacattaaaaggttggatgatatctgtgtaaatgctgaaatcaccaaaaatgatgagaacagggtgggaataagatagtggctctttaggcactagagtctctaatgattgagaagaaagcagataaccactttcaggagaagcagctggcactataatctgatggcttcacttgaaagattctgggcatttttggaaagggaaaatgtttggggattggcaaaggggagccctggggttcatgagttaagagagaaaagcaacctaacttgggaagtattcccaggaggcttgcagaactctggcttaaggcaaggcaagaaacaaacaaaaaaaatgtttgggggagaacttgaaaatatagggatgcctcctggttacaaactggggattctagggagctcagaggaaatgtttggagagggaagtgatgggagagaggagaagctggtgcaatcagtatgaagaaagcagtgtgggtctatgatgctgggtgatggcagatgcccttgaagacttagagttctgagggtgagtgatgcaatcagggccctgctgtcagggctctggtcctgaggacatctgagaagcaagtggatgatcagctgaagctgtgtcctgaatacttagcctgacggtttagaagctaagtgacagtcgtcaggcaactgacaaccctcactggttctgagagatgttttaaaggaccagtaattagtactgataaaaaagaataattatcataatgagaggtaccagaaataattagaatttgcaatgatgctgttctgaagacaagttagaaagggcttttgattaaactagatcaatgagggaagatattggagacaatgagtgagagtgtctgcaaatgtatcagtggagacatgggtggaaaatgctgctgatggagaatttaagaacgcttacccaggaaaatgtgcctcacagagagatt

SEQ ID NO: 57773 - DNA, 1272 bp, Bovine  19866880571885
  misc_feature (1)..(1): n is a, c, g, or t
natggctggtgggctctctttggcagcgttctgcaagaactccgtggacggtctctggtactgcttcgacgacagtgacgtgcagcagctgtcggaagatgaggtctgcacgcagacggcgtacatcctcttctaccagaggcggacggctataccgtcgtggtcggccaacagctcggtggcgggtaaggccattccactccaggtgcggtttttctgagaacagaaggtggtgcttgatgatccagaggacttctccagaaggtcctctgattctgctggttggatcaggttaattgtcacatttgcatttaatctggaaggcagaatggttgcagtcaaggaaacggggctggaatgcgcaagcaactgtgataccaggagttggcatggaggtagagtggagcccagctcagagcacaatcgtgtgtttacttgtggagtcagtgagcgagggagctgaagagcaccaccaggcacttgcagagtagagggaccgcgtgatttggaagcagaaccagacttgactttgccaccccttgctcgggttatcgtggagcatgtcccatctaagccacgtatttgtcagccgtaacatgggtgtaataatgctacctgtctcatgaggtcgttgtgtccagcagatcaggtgaacttgggttaaagccctttgcaaagggtaaagcaccgttacaaattattctttttttccagtaaggctggcctgttctgttaggggaaggattgaaggctgtactaatcttagagggcttgggtttagtttgaggagatctactctgttgtgttaaacaaacacaagaacagtatccacacttgatgcagccacacagaatccagacggggagaaggcgtcttagtgccacgttgcagttgagagaataggacagagttgtgggacgtggccgtgtgtgagcagttattcatccctgcacccctcgaagcttgtgagggataagccggaagccgctcaaaggaagcatcgctgaggcagagagacccctggtgcatcacgccccacgcagtacagcactcagtctgtagctgctctcttcgttcacggaaggcgggaactccagggctctagtgccgtcccgcagtgctttccagagtttgagatgtgctcggacctgacacccccttgaggtgtcctcgagatagtcatgctgctgcacgctgtccatctcaggagtggcttctattgtcctaactcatatttaagggccttcctggaacagagaagacagaacggca

SEQ ID NO: 57774 - DNA, 882 bp, Bovine  19866880587993
  misc_feature (1)..(1): n is a, c, g, or t
nccatctctccttccttacttcctcttgactagattgatggttctcactggtatgcatgatggtaatatacaaggttatatgtccaccatcaactactctgttttaataatttaatgagtttaaggatgttttgacgctaagtcatcttcatcttcctcacagactctagagctgagctcctgtataagtcattttccaaaaggcagggtcagtgagaagagcacctgtcactcccaagactctagctgagctgcaggtgcgtgcaaggagcccagcacttagagcccctggtccctggagctgagagagcagccttccactactgacctggcatcgcaggacaccccgtcaaagaagcaagtgaccagcagctcgtcagcagagtagctcatgttgattttcttctcctgagacacctgggccatgatgttcatgtagtgcagcttgtaccactcctggatagcattgacccctgagctgaaggtgtagaccgcacagtccgatgtgtcattagaacactgtgaagaggaggagacaccaagataaagctacgggccctgccaggggcccttagaaggactgtgagcctaaggaactggactctagatactcaggggaacaggagagatacctgggcaaggatgggcttcttctcacttctgagaccagggactcaacatcctcaagcctcaaggaccaagaaggggctaagtgaggaaggacacagagcctcactctcatgagtctctcagtgagaaccaagaccagcttcctcagagtccccagatagccaggcttttaccaatcatggctactgagttccacccaaccctcaccatttcttatcagatcaacagtctaaaaattgagattctagccca

SEQ ID NO: 57775 - DNA, 1083 bp, Bovine  19866880595885
  misc_feature (1)..(1): n is a, c, g, or t
nttaatgaagcccattgtgctaataagaaattgttagtttggtctccttttaaagaggtacatacgcagatggtaaaataaatgacatcagcaccttttcctttcatttacttagcacaatctttcactcaaacgagacaagtggccgcgtacctggctaataaccacagccattgtacactgcagcttgaaatggcgacaaaatcaccgttttcccccaaggctgggggaagagaagggtgctgagttttggggttagaatgtcttcatttcagttccactcagccagtacttcctgaatacctactatgtgcagagatcacaggcatattcctgtacttggtacctctttcacctgtagccagttttacttgagataaagaatcgtcattatgccttgcatctttgccatttcatttttcccaaggacgttctgtttcatcccctcataatgctcacacagttctgtgtgggtgagggcatccaccaacaaggcaaagtgtcaagtacaaattttcaatcatctgacacctcgaacttcaattaatgggcctcacactgtgattcctagagagattccatgacaccaggtttctcttgggagttctacgtttattttttggaaatcaatgtgggaaaagatgcttctcatcagacctctagaggtttgtctactattctcacatattcaataaatactcgtcaatatcctgtctaggtaagcacagtgactcaggaaacatgaaaagctctgtggtcagaggaccagggcttgagttctgactctcccactgtgtgacgttgggcaccttactttaccagccggggccctggtttcatcatctctgaaatgagggtgatctcacacttacttcaaagggctgtggcaaggataaaattaatcctgtgtgagacacacatacagcatcctggcatcctaagagagcagccgctgggtaaatggcttccccaccccactcccatcccccagagcctcggtgctgctgatgtgaaaacacggctgccaccaaccggctcactaagttgttgtgaagacaaacctcggtctaggacttccctggt

SEQ ID NO: 57776 - DNA, 1549 bp, Bovine  19866880609698
  misc_feature (1)..(1): n is a, c, g, or t
ntccagaaaggagactgggactcctaaaaaagaggctggagatgttcaaaggatgcaaggaaggggtgacctgggtttgcacctctaaatccccagaggcaagggcaggagtcttagtgcagagactcggatctcagagatggatagtatctttatcgcaaagccctctgctgtgatggcggtgccctttgcaggcattttttcctgttatgacaaagcaattccttcatgaaacagtctgaagttatttccaaatcctccaagctgtgtagccagggggactttattagacgtatttattctgtaacccagcttctcacaagacatccagggatttcctttaagctgcctctcctccctcccaggaagaatcctcatgctgcttctcagacattaaaaataagacgagaaagcctctgtcattcagatccaaaccagcttagctgactggctgctgccggccccccagccagctggtggacacacacaccttcctgtttgtgttaaatccccttgcggctgagggacttcacccaccatggccaaacccactcttggatcttcaaggctgaggagacagttgaaatgcaacagaaaacgacactatttatattttcatttctattaggcctttataatgatttcttattgaactgaagcttaaatggctcaagactgatagtactagaacatttaattgtttgcttgtctaactctctcagtcctaattaaatattgtttttcactgagcagcttacacagtagcgtttttctccccgtcactgaagggagcatgggctcgaggcagaattcagatgagccaggctccctctgtgctcacatcctattcattttttgtccaacaacaggaagcagagccctctggagggaaaatcactgagttcttaggaagagctttcggagataatctcacaccagtccttggagatgacctgggtggttaaaagatgagctatgacagctcacattgccttgtagggtttcctatagaaacagctggctcagggctttaaaagctggtgttggagccattgctggcacctttctcccacaacccttctcagcagcgttacctttagcatcaccaaaatccagccacatctcatcacctctaggccatcatccagatctaagccacattcacctcttgcccagattactgcagaaacctctttcttggcctcttctgtttatcctagccctgccaccatctgttcccaccagagcagctggagtccctcattcccctctccccatcccaggaccctgctgtggcccccagctcacacagaagaaagccagggttcagacaatggcctccaccctgcgaatcctattgactttgtctctaattcccctctgctcattcagctccagcctccctgacctcctagctacctccttggatactcttcacgtgcttcctcctccaggcttttcatttaccattcactcttcctggaatttgtctctccctgaaatctgcaggctcactccattattccttcatgtttttatccaaatgtca

SEQ ID NO: 57777 - DNA, 931 bp, Bovine  19866880619663
  misc_feature (1)..(1): n is a, c, g, or t
ntcttcactgtgaggtcttgtggtgttagaacacctgccttgcctagaaaggagtctttgcctaggacaaaaacataaatatgggttcttcatttttaaaaatttaaaaatatttaaaaacttctcaattagaaaatgaagatacaccaagaggagaaaataaaaatcacccataattccactactcaggaaaaaaccaattattaacatttggtttatatttttgcagattttaatcaatacttataataagcattttaaattaaaattagaaaccaaaattaaaacacattattctgaaatctgcttttcattccctgcaattaatgtaatgtgaacatctttccaagacaagaaacatagatcagtggcatcttttatcaggcatcgttgtctcctctggtatggctgtacttgaatctcttcgagaaagtttaaattaaatcaaatttcaaatattaatatacactcatgggttaaaaattgaaaaggcacagcagagtttaccttgaaaagtctctctcctaacctgggtccttggccacccagttttgctccctataacaaccagtattacctgtctcttgtgtatacttctggaagtagccccagaatatacatgcaaatcatatacatttgttttctctctccaacacacacacattcaaatgttagcttaccttgctttttaaacttaatataccttggagtttgttctgtatcattacgtaaagaatgtccttattctattttatgactgcatcgtggtccatggaatgaatgtccctgggtatgtttttaaaattgttctgtattgactcagagaaacctttcctgtggttttgtccaagctccttgtccatatggcctggccaggggcagctaaaggaaggatgcccgttcagagattaggagggcccgcaggtccaga

SEQ ID NO: 57778 - DNA, 1881 bp, Bovine  19866880680242
  misc_feature (1)..(1): n is a, c, g, or t
ntgcccaactcggatgggatttgaacccagccaaaacttagattgagacttgaacctgtgggctgggattaaaacccactatctctctctcttttttttttatttttaaatttgactgcaccaggtcttagttgcagcatgtggaatctagtccctgcctagggatcagactcaggccccttgcactgggagcatggagtcgtagctgccggaccaccaaagaagtccccactgttttaattaaaatcaggacttactgaagctcaggttctttttgttttgttttgttttaattttttaatttacacctaaaacattttgtattgaggtatacccaattaacaatgttgtgatagtctcaggtgaatagcaaagggactcagctatacatatacatgcgtccattctcccccaaaaccccactctcatccgagctgccacatgacattgtgaagctcaggttctttatgtctcagcacagaagggattcagcaagaggcagaatatacataagtagatttattaatacagaatgcttgtgagggttcaagtgggcaggcaagggggctctgtcctgagaactaagtgggaaaacagatttgtttgtagagagatacattccatagatagaatgtaggctgtctcagaagatgagagtggccctgaaatatggggtgttagtttttgtggcctcagtaatttcatagggtaacaagtgggaggattagtcctactattttatgaaagacggggtggagattcccaggaattgggccactattctctttttggcctttcatggtcaggcttgggactgtcatggctgtgtgtgtctttagctgatgtattgcagtgagtgtgtaatgaggttcaaggtctactagaaatcgaatcgcaccaccatcttgcacctatttggttctgactagtttctgttgtatcctcaacatctgtgtcattctttgaacgttatgacctctagccctttcttctgtctcactaaggcccttcagctcagtaattccctttcctttttatctttagtacctaggctcctggactacagaaaaagttaagggaagaatcattgaaatactcttcagttggacagtctggtttccagaggacatcaagatccgagatgcttatcagatgctaaagaaacaaggtctgactgcgctgccttcccttcccacagtgattgttccttcttgcttttctgtacagtttgtcatttttgggtgaaagctggagatcttgtgtccagtagacacagtaatcgaggctgaagcaagtaatttcagtccctgaaagtgggcagacctttccttctggttagcaggaatgggggcttccctgatagctcagttggtaaagaatcgaccttcagtgcaggagatcccagtttgattcctgggtcaggaaaatctgctggagaaggacagtctacccactccagtgtccttgggcttcccttgttgctcagctggtaaagaattcagcaggagttgagctgggtttgagatggttgttgctatagttacccttactataccaggtttcagattcctctggtgttggctcgtgtttgaggtgggggctgatggcctagagagtttctcgcagtatctactctgctctcagctttgggtcttcctcttgctctacatctcagaagagttcttattccactgcctgtcctgacagtagacctttattacttgttccctgatgcccttcgcctggcgctagtggtggttctgttctgattaagccttggtcttaggaaggcacgtgtccctggtcttggagggacctgtttgtgatcctgttccaccccatactcgggctggggccaggacacgtttgcacattgcaccc

SEQ ID NO: 57779 - DNA, 1909 bp, Bovine  19866880686674
  misc_feature (1)..(1): n is a, c, g, or t
nggcacacctaccaaataacccgtctcagacagagaacagagccacgaaaagaaaacccgagacgtccacctgggagaattcaggaggtgccagggaagaagaaagggcatccttggggctgaggggtggagggtggcttcaagccacaccctgtggagtgacagtgacctggaatcagtcatgggacccacaggaatacgtgggccagggagagggaatttatcaggcctttgcttcttccaggaagaccgacacagaagggaaacgtggggagatactgatcattcaaatatttgaaaatcatcttccaaattctaaggagacagtgatctttcaatactcgccttattatcaaaatgactacagcatctatgtattttacaacatgtgaacattttcagacataaagacgcctctcaaatgatcagtgtactacatggttacactctcccctacaacctaaagcgcaatcttaccagttaaaattaggtttatggtgctgtactttaggttttatggttcactcatccttggttaggaacagcctaaccctaaccctaaaccataatgctgtgccataggaaaataagatctgtcctgtggtctatatccaacaattgttaggaaaaataatggctggtggtacttatctaaattgaaacccctgtccacttacaatgctcctcaactcatatcgaataagcattcccacataggctatgaacctgaaggacggacttgtaaaacacctttgataatggtgatctctagtgcccccaagtggtcgtaagtgatgtgacatcctcaatagggagtcatcctgagaggtggcaaaatctttgccatcggggcatttttatcacaacaggatggctgaaaaagaaggtatcaagggcaagagggtccagaaaatatggttccttttataccgctgtcacctcctatcataaaatcttggtagaagagagaaaaaatacaaaagtttgaaagcccactggaattgagttaaaatgtgagtttttatctacttccatggcccaggaaaaactgcctcttgaaggaaacggctgcatttactcttggttatgaagattaaataagcatggatgtgatttttttttttttttgctttaaaatgttacttacaaaatgtatgtatccttctgtaacttgttttcacttaatactacaactttaaagcattttgtatacatcagcataatacaagtacctgtttaatttccaaagttagttaacaccaaaaaaaaaaaaaaaaagttaacaccaaaaatgtggaggttggcaaggggagaaagaggaatatggcttgaagagggcatcatgtaataaatttattatatttcattacatttttccacttttctcttaaattccaactgtatactatataatcaactgctgttccagaaataaaacattttaaacataaaaatataaattttgcttcttaaaagtgcatacactttgaataataaaacatacaaataaataacagaagtcagtgacacatctcatgcacttgttctaaaataatttaaaatgtatgatacactttgtttccagcctcaaggaaagacatcctgccttccatattactgtacaactaaaaaagaaaatcatacacaaatcactatgaatggtgcatgaccaccaccaaagcattttgttatacagtgatatgacatgcagcttttaagacaactatagaaattccactgtaaaaacttaagagttcaatcaagaaactgcttttgtaatggggcttgaattcaattttaaccagtggtgagaggcacagttggtgagcaaaaccaaagggaacataaatgcatatttgaaaggcctacaaagagaacttcagctccagaaacacagtaactgcttccc

SEQ ID NO: 57780 - DNA, 730 bp, Bovine  19866880740835
  misc_feature (1)..(1): n is a, c, g, or t
nttgttcttgaaaattccttcccattatggtgaaaagaacaagcctattgctagtactactacgtacaggggtcagtgtggtttattttctgattagagtgttttaccttgtttagataagagaaaggaaagttgtaaccccctccaaccccccacctttcttttttgagtgaatatttgatacacagttgtattgacccagaataatttggcctgtttgtgacttgacatacttttacatacctcttttactcaattcactgttaagagttttattggggtaaaaaattccctatttaatatttaccaaggaaagatgattcagtggctgaatggcttttcgctagataacttctgaatgctgctatgtaatcatgtaaataatgaaggtgttttgtattttggcctcctgtgacctcatctgggaagtattgcagtaaaacagataccaccagcagtgttgccctgatgcagcaagtatttcatattttcataggccaagtcctcgaagattgataaaatgttcgtgattttccttactttgaaatgctcgttcattctttctttttgttgtaaattcaagatgaggggagagagagagagggaggcttcggtgtgtgtctgaggctaatctggttgtatctttaaagcctccagtgctgtctagctctttttgcattgtttaagtgggtgatataattacagatttgttttgacctcagcttgctgg

SEQ ID NO: 57781 - DNA, 783 bp, Bovine  19866880886667
  misc_feature (1)..(1): n is a, c, g, or t
ngctgaaggtgacctcagccttctagctcagaagctgggctcacaggtcctttaagtttgggtggaagggggctcaccaatgagaagccactggctagggagggccacgctgcccgaggggtatctgacagcagtgctaggtgagccctctcgctctcctgagacttgcagtgtcacctcctctgtggtggggccatcggtgggggccagggtcaggccacgaggctacggcagaagatggagagtcatgagtggtggcggggggcttctctcctgcttcatcccctctttccagcccctcagaggccctttctcaccactagggccaccccagtgtgaaccagtgctttagagacatagaagccagcttcatccttccccacatacagggtcatcctagtgggggagaggaaaggggagaagaatgagtgaaggtggcgggcagtttcagtcccatcgtactggtgtccttctattgttccagcccacacgtactctggcctgggtcatgtgacttgctttgaccaatgaaataatagcaaatgagacaatcagaggcttgagaaatgcttgtgcatggggacttgccttctcatgggggttctttggaaactgagaccaccacaagaggaaaacaaggttactgtgcaggggtatgagagaccttatttgataccccataggccaaaaaaatccactaactatgagataggtgagtgaagccattctagattgtccaggctcagccaagctgccagcggctgcccagaccagaagaccact

SEQ ID NO: 57782 - DNA, 1553 bp, Bovine  19866880956034
  misc_feature (1)..(1): n is a, c, g, or t
nagctggtgaaggacagggaaccctgggcgtgctgcagtccatggggccacagagtcggacacaacttagcgagtgaacaacaaacagcagcagcagctattcagccagtgtttgggtgccaactgtagccctttgattgtgtttttccattgactcccattaaacgtagtttgtagagggattcagagttgtgccatgccttggcccagaagtgaggagacaaggctttctcctctaggggtcctgcttaaatgttgctaacagcgtcgtgctccttgtttccagctcgcccctgacgacgcctggcggtgcccgcactgtaagcagctgcaacaaggcagcattacattgagcctctggactctgcccgacgtgctgattatccatctgaagagatttcgacaggtaaggagagcctctggcccagggaagagcgctgtgaccaggtgtcttacgcctcctactggcgggctgttggggatggttctctggtgtccccgtgagagcccacgatcttgtgttgttacagacccacattttccctgtgtttggggccctgttttgttctttcccaaagcaaagttcaagtgtcctgtgacctttgaatcccaaccattttagttcatacggcagatattttactttgttcctgaggatttgctttagatttgtaaatgttgtgctcatgtaagtgtgccttgggattaaaaaaaaattgagctcctttctgggggcgggaagaattctttttctacctaaattaataacgggtgttgtcctgcttccaaggagctgttgtacagttggggagatgagtcatacatgtatacgaagaaaatctgctttgcattgtatggctttgtgagtcagttttcccaaaaaggctgtctgttcctgaggttagagctgtcctgggcggcccccttgtaagggaggtaaatgaaaggtagatgctggaggagtctctgagcctggctgcaagaacgtgtggatctgaaagatcagcaggaggcctgcagcaggtgagggaggggcacgcacatagtgcctggacacagcgggtgcagagcagggcagggggctgagagccgaggccagtgtggctggaggtccggggggtcagggagaaaggcgagagttgaagtagaagaggccggctgtggctggccatccaagcctggtaggcagagtggggttctgaaccactgaagcaacatgaccaaaggcgtgatttgaagagaggctacaaggatgcagacagggaggtctgaaggaggccgtttatccagggcaggcccggctgatggctggcattggagttgcggcagcggaggtggagagacccggatagattgggagatggctaagattcgctgatgaagtgaagatgttgggggcgcacacaaggtcgccggggcggggcttagtgcatggaggtttggagtccagcccctgtgctagtgaggagtgagcatttgccttgagtgtcccagctgcacgcctccattggggtactgcgggtggacggcctgttgagggtttgcccagccct

SEQ ID NO: 57783 - DNA, 1041 bp, Bovine  19866880979695
  misc_feature (1)..(1): n is a, c, g, or t
naaataatttgcagttggtttttctgggcctggccacacactatgctgattaattcatatattcttatccttttgtattaaagggcatgcctttggtgtaacttgctagagttaatgggcctgtaataataatcaaagtaatttgaatatataccttctgtctcattagcagtaaataaatgttctaagatttggggatccagacaacagaatgtataggagagaaataatacattgcttaaataaaggattagcaacacacttggatagttagctaaagaaaagagaggtttgtgtttcagctaatttgaaagctcaaacgtatgctattaaaataaccatcaagacaactgactatataaacactaagtcagaaaatacttacaaatcttttgtctccttgtcccattctactactaatttcacgtgagcagtaccgcctggtccacaagattttagtgccctataggatagagaagagagtcacacattactttctaaataaatgattttaattaaatattcaaaccgtctgaaatcagtgtgattgctgaaaatctttgtcattggttcccatcagaaaaggttttataacctcatatttaatgatttgactacaactggactgaaaaatccttaaattaaaatattcaacatggaaataaagatacggcaagaaatttagtaccacactataagggttatccatgtaactcttagagggtatgacctttccaatttttgtctaatttttcatcaaaccagagactagacaacaacctctttgagaaccaagtctgcctctctccacctccctccatacaccgtggctggtcccgggactgtgcccacacccgatgtaaactgtgccttcctgcaagggacccctcaagttttacctcatttattgcccctgagctccttggctcctcagtcatcttctgaaacactcagcattaacagtcaatattacttctcaagtactttttattttttgcaatgttttagatcattatataatctattaactctaatttctaa

SEQ ID NO: 57784 - DNA, 2921 bp, Bovine  19866881063716
  misc_feature (1)..(1): n is a, c, g, or t
nacatctgtttcccctagagggatcaacaggaaaaaaaaaaaaaattcacttcagaagggctgaagccgctgttggcagaagcagcaaggaagtgggcagctggggggaccacatccgccccacagccaggctccctgggacataatgggtggtggcaacagggggagagggaaggagtctggtccctcggcccaactgaagaaggaaaaaggctctgagtcccatcccaggctgagatgcaacctggagtcgggtttagctggactcctgtgcctctgacagatctcagagagatctggcactaactgtgagaccctgggcagctgactcaagctctccggcttcagtttcctcatcagtgaaacagggatgtgaatggtctattcccagggaacaaagttaggactgcgggtggagattccccttaaaacagcttgtacctgctggctttgtgcttaccaggccacctcctctgccaccaagtcggacactatgagagcttgtctgcccacttcactgctgtgtctctaacacctacaaccacgtgtggcacacagtatgcactcaataaatattggttgaatcaataaataccaggtgctcaaaaatatttgttgaagaaaactacaggagatgtaagaaggaatgaaaggagataaacaaagagaggggaaggcagcacatgaacccccaggaaaattcctagcagtggaggtcaaccagttagccaaaccacttcttttgccattctctcctcaggaatattaaatgctttgtcatagtaaacagtacggctgataagtaggcaacggccaggcttactttctaatcagtctctgagcaaagacttcctttccttttcttttctaagaaagccccataggacagttctttctttcccctctgactttcaatctcattctcagcccccagcatccacccatagactctggaagagtataatcatctaatgtgcacagagtgcaaagtgcaagctctgtggcagagtgtatagctccaggccaaactcaagtgtatatgcctgaatcactgtcactagaacagctggctctattacgacaactccttgggtagccagtgaaaacccaatagatgtgactagacctggatctgaggaagcccatactatttacgagtgatctacaagggcctttccacatccacaaatctcttacagaagataggtggtggtttaaaatatgcactttggagccagattatttggactcaaatcctggttccttcacttaccagccatgtgaccttgggcaagttagttcacctcttcagtagtaaaaagagggttattaccatatagtaccacgctggtgtttaatcattaagtcatgtccgactcttcaaccccataaactgtagcccggcaggctcctctatccatgagatttcccaggcaagagtactggagtgggttgccatttccttccccaggggatcttcccatctcagggatctaaccaatgtctcttgcattggcaggcagattctttaccactgagccaccaaggaagccctcacaggtaagaatactggaatggattgccctcctccagaggatcttcctgacccagggatagaacttgagtctcttatgtcttctgcattggcaggtagattctttaccactagcaacaccttggaagcttagttatattatcatgaaagtggaagtcactcagttgactccaactctttgtgatcccatggactatacagcccatggaattctccaggccagaatactggagtgggtagcctttcccttctccaggggatcttcccaacccaggtataaaatccaggtcttctgcatcacaggcagattctttaccagttgagccacaaggaaagccctatactaccatattattaatacctcactgggctaccatgagacaatgcatattagagtgctctcgacagctaagattcttatttacaaacaacagaaacccactctaaccagtttaggcagaaagaccatttaatctctgggaggctaacagaatctgactagaggccccacagcccagaggaacatctaaaccatagcacagaacccatcctgagaggagtcactgccaccaccctagaatctaccccacggacactgtgactatccaacattcacgtgccacacatcctcctagaagcctttccacagccgcctgcctggtctggacatacctaccacctctctccatatcggattgccagtgtctgcttattctcatcactggaagctgattcaaagtccgaccaagatgcaaccaattggcagaccccaggtcatgtgtctctgctctagctgcaaggggggctgggaaagtggatttctgaattctacattcatggggcaggggtttataaggctgggaatctcccaacataaaaatgatgcttaagagtccagaaagcatgacatccgtcccctattagtttctggcacagctcctggcacatatacactcagtaattagtagccattccctggaaatgtggtttaggccccaaagcaaggacattcctgtgccctaacatttcccctttacctccaggtctacctgtcatctttccagaaagtctggattaaatccttatccttcctcctcctaagccctaactgtactcctccaaatgcctttggagaccctcctggaaactcacagcccagaaaaggagtccagttctccttatgacttagaggcagaatgcaccaaccagctgtaatcacagattcacagaacttcagaagccccaattggaaggtcactttgtcctactatcttattttgcaaatttagaaattaaatcctttttttttaaaaaaaaaaaaaaaagaagaagaagaagaaattaaatcctaaagaggaaaagggat

SEQ ID NO: 57785 - DNA, 1432 bp, Bovine  19866881080069
  misc_feature (1)..(1): n is a, c, g, or t
naggctccagtagcctgtggcctgacatgtgactgtacacacaaaaaggccctctgggtatttccctggtggcccagtggttaaaactccatgcttccaatacagggggtgcgtgttcaatccctggtcggggacctaaggatcccacgtgctgcatagcatggccaaaaatagggggggggcctattaatgattttactgagagagttcaatgtgaacttgaagacatcataagttcctagggaaaaaaatatgccaaaaataaaatgaacgtttgattcatctttgttgtttttaaaaagtacatattctaatttctatgtgctaactacagactaaaataaacttgaatcctataaagtcaaagttgatgaaaccagcaatgactggattcatgaaatactttggggatttttaagaataatgtctattataaggtttttaaaaagcaaagtgaactatattcaatatcctgtgtaaactataatggaaaagaatattttaaagagaatgtctacatgtgtgtagctgagtcactttgctgtacagcagagatttgcacaacattgtaaatcatctgtacttcaataaaaaataaaaattaaaaaagaaggcttaaaaacacgttttctaatctatgcaggaaaggggacagctggtttattcattataatcatcaatgctaggttttcatagtcagaaaattagtgcactggggtttttctagtgagtccatgggaagtttagattcttctcacaagaagggtgagaaaatataatctaagcaagctggctggctggggccagactcactgatgtcacctgaagtctgcaaagaaacatacctaagaagaaaacccacctaaatacatgaaagtcacaagtcatttaatgagttcccgtattaactctgtcccctgttgacacagttccctacagctaaagaagtaataattatcatctaacttagaattagcaacagtggatacttctcttgtaccacttcgttacttttcaccataaccctataaggtaggtactatcagcccatttcacagctgagcaaactgaggccacgacatatggaagacttgcccgattttacacagttgtaggtggcagagcatagattcaaacccaattctttctgactccaaccacatgctaggaattctaaatctctgcattttattgtctccctatttctaatgatgtcacttcctttaaaaaaattttttttttccttctctgccaaactgcaaaagcttcttggggtaagagtctagttccacccaaagccttgtcttaattacaactaaggcacaaatggcaggtctgcagctcctctaaagaatgctacagagacaagtctgccttgcttatctgagggatcctatttcttattcagaatttaggcagtgtcataatacag

SEQ ID NO: 57786 - DNA, 1377 bp, Bovine  19866881090321
  misc_feature (1)..(1): n is a, c, g, or t
ngccttttgcagtagcgtcagctctttttaaaaagaaagtaagctgagctaagggtgcactttgctgtattgcagacatggtgggccaggtgaggcctctgtaggctcctgctttccatgacgagggccagggagacgcccttcgccactcagttgctggatctcagctggaaggggctgccttgcttcttcctctccctttcaccaggtgcctggaggaacggtccccgggcactcacacttggcccgcgctctttgccagaggcaggaccctgtgtgccaagggtggcttgctttccaccctgtcctctgagggcgcttctttctctcctggcctgttgtcttgggaaggatagtccttttgtcttcaggctttgtgatcaagtcatctccagttaggactggcacctgttcccttcttcgcggggcctggtggcctttctgaagtcgcaggtggtcaggagccctccagtgtgtgtcacatctggtcagttgacctgccaggctgggtggttctactgctttctgaatttctaagaatctctttttctttcctaacgagttctgctgatttatttgacaatgtacgtaagtaccatgttctccttgtggtgtacgctctgttctggtttttgtttttaatcaaatgcctgtttgggaggagatgaacgtatttagtctattagatttgcgctgctggaaaattttttttttttaagtgtaaccttgactagctgtcttattattgtttatcctgtaagattagtctatcaattaaagtttgataattaattgcgaaaaaaaaaaaaaaaacgatgttaaagctattcttcattttctccctttgagaaacagtgttgagatttcttgttacaatgcaaatgaatttcaaatccagtctcatgttcacatatagcatattccaaaagatgatgaatctctaaactgtggaagttcacgtggagttagatagtcatgttgcagcctagatgtcagtaaaacgacaagtcagctaaaggtgcatatgtttctgatgaatgtgaagatagatttgggagcccaggtggacctgtatttgccaggaaatttcaccagacacaatattcaccccttcctgcctgactgcctctccacagacctatcttgctgtaccatggcccttatccacaatggggccatggagacagttgttcaggttgctggattaaccagattagcatatgatggcaaagcagagaacgaagcagaggatgtcggggttagtctccttgttgtcctgtggggcaggccgttagagcactctatgcaaactgccttccttattgtacctgaggaggctgccaggtctgtgtggccagcttcccatttttgtcccaa

SEQ ID NO: 57787 - DNA, 794 bp, Bovine  19866881181489
  misc_feature (1)..(1): n is a, c, g, or t
ncaccagggaagctccctgaatcagtgtctttaatagcgctttaggcaaatagtacacaaagctcagatttattaaaatatttactgacatgattgttgcaggttcccatgaatggtaaaagcagatgaacagaaagtagtcacccccaaagatgaaataggaaaagttccagtagagttccttccacctatcgtttttcaccagttaatttccagttccttgttcattattgcttttaatttctgatctccttgaagatgagcaaaacctggtgaaagtcatggaactggtggatgctgtgtatggtccgtacaagccctaccagctgaagtatggagacatggaagagaagtaccttctcatccagttcagcgaggtgcctctggtaagggcacagcactgccggggccaactgggcatcactgtatctgccaggctagggtcagggtggctgggatgcttcagagaaggtgggagccagcatacagaatgcagagagtgggaacaggtgtgtaaaacatgggctttcagcgcttcctgggctcttgtaatccaaattaaaacgagaccacaggtctgctacctggtttttatttaaaatccccagtaaggacctcgcacccctcagaggcttaaatcttctcaagattaagttggttttctccctgagtcagtcatgattatgcagtcttttgttcaaggcagatatgcaaacagacactggagcggagcactcaaggatagtgctctcaggccaggttcaccaggtggacacaccagaggggaatttcca

SEQ ID NO: 57788 - DNA, 2383 bp, Bovine  19866881295850
  misc_feature (1)..(1): n is a, c, g, or t
nttccctccgctgagggctgcacctgcagatggatccagctgtgagctgatggccaccaacatttgtggcagcgggggatgaagttatctggaaagatctgggcagcccacgtggtgtctgctatgtgcccccagcacagcatttagcagaacctgctgtagcccacttatttatgtatgtctctccatctatcagctccaggaggcagaaaataagattcccccccaccctcgccttttttttggcatttccccatcatgttcaatacatagcatgtgtttagtgactggtgtttaaatttaatttagcagcaaaaaaaaccttggagctaagaatttcctttatgtttgagaaattcttaacgtaggctccacaaaaagagttaatggaaatgcttttggggttggagaggggaggctgtagccaggctctcagaaatgttagcacagagactaagtaaatcctccacttaaaaagctttaaagactctcagcccttgggtgttttcctttacttgaaaagcagagcgcagagtgagcactaggcactgtagatctggacactggccataagactcacatgacggagtggttttatgacagaaatttgttggaaaattcagtgtacttagctgcactcctttcagatgcaatatctagaatacgtaggctggaggaaggaaccagaaggaagaggaataactgagaaaaataatgggtttcagactagagttcaaccttctttagtaaaaaatttgatgtgtctttctaatgaatgaataattgaacagaatgagataggggacgccaaacagaaggcgcttgacaaggattatcaatttagggttgagtcatttcagatctatcctcacgtcaggctctccacccagctggaatggctcatgcctctctcacttcttgtttcgtagactcgcagctgttggggttttaccaggcctgtcccagctggatgagaccatgagcagtgccagggcagcgacagaaagggtcccattgatttaggaattggaggagcagctggaaaggaaagaggaaacaatccacttgggctgtggtaagatgctgtgactgtatcccttttggttctaggattaaacccagaaaagtcagagctcaggatggatcacaacacctttgaggttttgttaatgtcatgatgcttcttccatgtgacagtaagactatgctgtcaaaggagctatgtgtgtttaaagtatttcgttagtcaccgaccaattcagccgtccttcccatcatcttaataacctgccttccgtgtcaaggggtaggaggtgccctactcattaaaagagatagtttaaatgagtttcacatacatgatggctttggatggtttcttttttccatttttgagatcttagtgaataggacactcagcatatgctgactatagtggatagttgaccagaagcctccaggatttatttatttctcccagtaatctcaccattgttgttgttgccatttagtcactaagttgtgtccaactctttgcaaccccatggactgcaacacgccaggcttccctgtccttcactatctcttggagtttgttcaaatttatgtctattgtgtcagtgatgttatctaaacatctcatcctctgccaccctctttccctcttgccttcaatctttcccagcatcaggcatcaggcctaccatgaattaatcagacaaatactcaaactggagtctggcaagataatgaagattgataactgagggacttccctggtagctcagttcgtaaagaatctgtctgcaatgcaggaaacccaggttgggtgggtgggggtagggatggggagagagagagacaatgacagaccacttggaggagcacagaagtagaaaagaggaaggtggacaatctagaaactaaacttcatatggaattctattaaaagttgatggttttacaagggtggtatccttttcctatttgcttagatttccatgaactcctcaagggcagagaccaagcttggtttatctttgtattctcccttcctgattgagtgcagccacagaataagtgcacaaaaagaaagttcattgttgcatggattattataatggttattgcatgaataaattatttctgtattcatggccttggagaagagagggcttagtatgattgcttccttatccgtggggagggtgagcccccagggactgcctgcctcagcaggagaactgatacagtcttggagtgggggttttggaactcaatggaggtcaacctttgaacaacacttcacttcagaaatcaacaatgaacaggagggagaatagggcaggagagatttggatgagctgagtgaagccggtgtttg

SEQ ID NO: 57789 - DNA, 713 bp, Bovine  19866881386588
  misc_feature (1)..(1): n is a, c, g, or t
ncccacagagacccaaacagaccttttggaactcaaaccagggcagagaaaacacataaaacagtaacagaacccatccagagatgaaagattaggcatgcagaatcacagggataaaagagagtgtgagaaagaggaggcaagagtcaacactcagactatttcaggtaccagtgggggctgggggagcggagagggaggggagagttggtaagcgtactacccacacccccttcaaggaagcccctataattaagttaatgctaagaggaaagagcccttttatttagctgtcatctgcatgagcagaggaggtgagtcaggcagcccctcaagcagagtggaaaagacccaggagctgccagctgacccagcttccacagtgatcgctgaatgggtggggatacacacaccagtgtctagtggtgtgagtctcagagctgggacaaataataatagtagtaaacactttcagagcatgtgatctgtgccaagccttattctaaattttatatacatgtgtgcatgtatgcgctagtcactcagtcgtgctgactctttgtgaccccatggactgcagcctgccaggctcctctgtccacaggattctccaggcaagaacactggagggttgcccttcccttatccaggggatcttcctgaccctgagatcgaacccagatctcccacactgcaggcagattcttttctat

SEQ ID NO: 57790 - DNA, 997 bp, Bovine  19866881412790
  misc_feature (1)..(1): n is a, c, g, or t
ntacctttggtgtcagaaagaggggaaagaagaatatataagaatgctaagttgcttcagttgcgtccgactctgtgcgaccccatctatggggtccaggctcccccgtccctgggattctccaggcaagaacactggagtgggttgctgtttccttctccaatgcatgaaagtgaaaagtgaaagtgaagtcgctcagtcgtgtctgactcttagcgactgcagcttaccaggctcctctgtccatgagatttttcaggcaaaagtactggagttgggtgccattgccttctccggtatataagaatatgtattctcatttaaaaatatttagatgggtaaagttaataaagaaatatggaaagatgaacagaaagtaagaaaggaataaacctggttacttctaggggctggaaaaaatggctgaggtggatatatcattttggctttggcaaatgtgaacacattactaaaaatgagcataagcaaaaaatcattttccaattaaaatatcctatcactctattctagtctgctatctgaagaactcaggatggtaggaagaaaacatgcgaggttgatatcttactacttgttcataaaaacacttaaatctggaatgcactgatgaaaatcccaaaacagagaagatgtgcaagaaatatccccttcaccgaatagcttctcgggtgcttcctacatttggcactatgattgcttgctgaaatcttacctctccaggctgcactgcatccagaagcctgattttttatggatatgggtatttctgctcggccagccaaagattaagctgaccagccaagcatataaaagaattgccagacaaagaaagatgttatattaaagatttctttccgacctgcagggatcaggtggcctcatagagaaatgacaaaatctattttctcttcctagtatgttcttgctgttggcactctctctttatgggagaggctaagtaaagattgcttgcggg

SEQ ID NO: 57791 - DNA, 1222 bp, Bovine  19866881421207
  misc_feature (1)..(1): n is a, c, g, or t
ncctgccctaggagatgtggttagcctgctctgcggtggctttggggtcaggagagctgtgccctggtgtcaccacggctcacagtcattcatacactggccttacttcagccattcctggtttgacaggttgcaggtcagaattgctgtcaggaaaagaagaaccccaccaccagcgcactgccagctggtggtgctcagagcccttctgcagaaaggaacttgctggacctcctctccccacagccgcctccgggatctctgtgagtcttgtgggcaggcagccgagaagtgttgctcctgtgtgccgttggccaggctgccgcttttccctgagggctgccctgtgtgccgcccctttaagtccccatccaccccgagtcaggaggacacacgccaaaggccaggacctctggaaagcggtttcaggagtaacatcagcggtagctgatgatgatgtttttggtctttataggttggttttctgttttcttgatttcactagtttgcagcgatgtttgatcgctagagaaatagatcatatagaaaatcctaaataccattccctaaacacgaggttgaatgcgccttctttgcttttatcctgcacatatagtaatatgtggcttgttttacacaagggaggttataatttacaggttgtgccatgctatgggttttttttaactttttaaaaataattttacgtttggctgtgctgggtcttggttgctgctctggtttttctctggttgcagccagcgcgggctcctctctagctgcggggcacaggcttcttgtggtggcctctcttattgcagagcaggggccatagggcgtgaaggcaggtagattctttaccactgagccacgagggaaaccccactgtggttttttatatcacacatctttgatacattttcatcattcatgtaaattggcttcattctgatagttgaataataattcatatacatataatgtatacttcgtcatttccctcttggggatatttacgtaacttgcagtgtggaggcacctgaagagtttctgtagtacagatttatataaatagagttgctataaggtatgaatgtaaacacattttcatagatcctgtccctttgcctctggcaaggctggagcactttgccctccccagacagctccctgagagcctgtgtccctggtggagacctccgaactgggttgagaggagctg

SEQ ID NO: 57792 - DNA, 1359 bp, Bovine  19866881763236
  misc_feature (1)..(1): n is a, c, g, or t
ntctgcaaagtacatttcccaggcaccactgccactggctggctggtttccagctctgtgtgtgtgtgtgtgtgtgtgtgtgtgcacgctcagttgctcagtcttgtccaaccctctgcaactccatggactgtagcccaccaggctcctctgtccaccagattctccaggcaagaatactggagtgggttgccttttctttctccaggtgatctttcagacccagggactgaactcgtgtctcttctgtttcctgcattggccggaggattctttcactgcaccaccgggaagccctggtttccagctgctgctgctgctaagtcgcttcagtcgtgtccgactctgtgcgaccccatagacggcagcccaccaggctcccctgtccctgggattctccaggcaagaacactggagtgggttgccatttccttctccaatgcatgaaagtgaaaagtgaaagtgaagtcgctgagtcgtgtctgactcttagtgaccccatggactgcagcctaccaggctcctccatccatgggatttttccaggcgagagtactggagtgggtacgctaacctgagccaaaaactgacaggggatggcatggtgggctgaagggaggagccagagctccttcccaacctcagagagtgttttccaacagaggctacatctcctccatggtttagctcttcactgggcagcccctgctgtgactctagctcctcttggatggccccagagacggacacccctgccctccgtgtatcccagcagtgacagcagcttcctgccattgctcagccagggtggtttcaccatctcctcttatcggctcttaactcatttatggaatcaattccttgatgaagttccccctgtgtgaaatacctggagtggttttgattttttcttataaaacatacctggcccctgacctcaggacacgtactggttctttatctgcgtttacttgctttgtgactcttggcaaattactcaatctctctttactttgttctgtctccctgtcaggaaaataggatgaaaatggtatttccctcatattcctgttgtgaggatgaaatgcaatgatgcatatagggtggttagcccatttcctggaacctaacattaggtgttcaaaaatgtgacctattattctaggccacaggctacagactgtacccgacactcccctctcccctccactgaccaggggacatcaagtgatttcttcctctatgactccatagagatacagcttgtgttcactgagcacctactgtttctaaggtcttaactcatttactcttgataaatgtatctaagccataggtattgctcttctccctattttc

SEQ ID NO: 57793 - DNA, 827 bp, Bovine  19866881832672
  misc_feature (1)..(1): n is a, c, g, or t
nttgccactggaccagaggaccgcgcttggtgggccagtcatgtcctttaccactgtgcgttagaatcgcccatagacagaccctgcagggcagaggggaaagcagatcccaggccttatgcaggcctcaggttccatgggctgggcagcctgtctggacccttcctcaggaccctcatctccatcctcctcctctttctctgcaaccatttacccagaactctttgaaggtgacacaatgccagtcgttgtaagtcataactgacaggttcaccctggcctgtcgacttcacaatccacggtgaagaactgtgatgcaaatgagatacgaaaagagtttagcaatgattcaagtggtgactaaatctagaaagtcattgaataaatacctgtgtaacaaatatactttgtggagttttgagtaagtaggagatgcaatgcccgttgcatttggagatgataggctagaagggattgctcgtctgttgaagtgaggaagacttcctgaagaatgtggaaccttaagaactctttcagggaagagaagccctgaagatctgaatgaagctgaaagagacggatttttgttacatttttgtcatggtgtgaacagaaaattccaggcttgttacagttattccttagcacctactaggtgctaggcatttgtgcgtgttttccaagtcatgcttggcctgatgagtggagagagctaagcctggctgagatggcccaatgtaggatatgagatctgagcagctcacctgtctgggcaggattccacttcagaaactgcatggcttttgggggggctctttgtcacaaaa

SEQ ID NO: 57794 - DNA, 891 bp, Bovine  19866881921174
  misc_feature (1)..(1): n is a, c, g, or t
naaacatgatttttaatgactgtacaatatttcacatgtatttcacattttaatgactattcaatatttcacatagatcatgagtatcataatctatattttatttgttattatggaagatttaggttccttccgggtctttgttataacaacactaaaatcacattaatcaattttaatatattaatatttctttgtccctctgattttttccttagatttctaggacagaaaatgccaagttctaaggatgtaaaaagttttaaggcttttgatgcatattgctaattttccccccagaaaaaatataaatttagaaaaactttttctttgcacccttcccaaagatagctgttgtaatttttcagaagtttttccagtttgttaggaggaaaatggcacttctttgttttaatttgcttttgtttgaagactagtaatactgaacatgaagtgttgatgagccatgttctcttcattggagtgtcttaacataaatatcctctcttctggtcttcttgtaggacatagctgtgatttcagccaagctcacaggtatgcagaacagcctaatgatgctcgttgatacaccagactactcagaaaaatgtgtacacttggaggcgttgaagaaccggctggaggccttggccagcccccagatcgtagcagcattcacatctcagtctataggtgagtgctggctgctttcctgtctctctgtacacctctttatttttttatttttttttaaattttattttctttttaaactttacataattgtattagttttgccaaatatcaaaatgaatccattgtacacctctttaaacagataaggctttccatgtcttcagtcttggagaatgtcttaattttgattaagtt

SEQ ID NO: 57795 - DNA, 2565 bp, Bovine  19866880155799
  misc_feature (1)..(1): n is a, c, g, or t
nctgcttttgaattgctgtctaggttggtctaactttccttccaggagtaagcgtcttttaatttcatggctcaaatcaccatctgcagtgattttggagccccccaaaaaataaagtctgacactgtttccactgtttccccatctatttcccatgaagtgatgggactggatgccatgatcttcgttttctgaatgttgagctttaagccaactttttcactctccactttcactttcatcaagaggctttttagttcctcttcgctttctgccataagggtggtgtcatctgcatatctggggttattgatatttctcctggcaatcttgattccagcttgtgtttcttccagcccagcgtttctcatgatgtactctgcacataagttaaataagcagggtgacaatatacagccttgacctactccttttcctatttggaaccagtctgttgttccatgcccagttctaactgttgcttcctgacctgcatacagatttcttaagaggcaggtcaggtggtctggtattcccatctctttcagaattttccacagtttattatgatccacacagtcaaaggctttggcatagtcaataaagcagaaatagatgtttttctggaactctcttgctttttccatgcagctctctgtagctgcaggcaaatcacaggcagtagcccaaaagcagacattggataaagagtcacagagacacatcaaggacagagagagaggcaggagaagggacctgacaggatctggaggaggctctggctggggccactagacagtacttttaacatggtagaaccaggaagtccctatcccaagaaattatttgatcaatcaagaatgattaagaacagtgtgatcacatgaaggatgcagatgtgttttcttggacctgtgtggccttataaaaataaagacatctggggacttccctggtgttccagtggctaagactttgcactcccagtgcagggttctggggttcaattcctggtcagggaactaggtcccatatgttgcaacaaagagttcgcacgcccaagaaaaagacccctgcatgctgtaatgaagatcaaagattcttcatgcctcaattaagacctggagcagccaaataaataaataaatgtaaaaaaaaatttttttttaattaaagcaaggacatttgatagaaaaaaaaaagaacaatgtgaccatagatatgctacttacattctcttcatctcaaactcttcatgaaattaataaaagtgcccaactcaggattcttgtgagtattatgcaaaggaacacacacaacggattctaatcactacctatagtatcaaattaataattattaatttaatttttaaaactccttcatatttaatattataattttatattcttgggcagtgggcctctcttagtgacataatagtattataccagattcaaattatatgcagaagataagaataacaccaggcaatatgaagaatgtattttcagtaacatatcagaagattgctaaactgcataagaaaaggaagggaaacacagcttggctatacctaatgtaagcaaaaatacaactcattttgacactgaggtagaaaaaagagctagaagcttgaataccatctcagtttatcattttgcatcattttaaactctaaattcacctatgggtcaagaagatctcaatcctttgtaggaattgttatgagaaaaaaagcatcaaccaagtgtaatggaaagaaagagacagtaaacaaaaaagcaaaatatttaaacttaagagtaaggtgtgtgtgcacactcagtcctgtctaactctttgtgaccccatggactgtaacctgccagtttctccagtccatggaattttctaggcagtaatactggagtagattatcatttccttctccaggggatctttccaacccagggatcaaacccatgtctcctgcatcttctgcactggcaggcagattctttaccactgtgccacccaggaagccctggaagcaaaggaaacaaatgtaaatatgctgatgttcaagctgtttcctatgctgcgtgtgataacttcctgtctctgactcagggggttcatgttttctcacaatcatgaagcagcaacaagctaacttccgagctttagaatgtgtcttgtgtgctcagtcacatcagtcgtgtccaactccttgtgaccctgttgcagcaagggggaccccttccagggcctgaaactaggctcttatctaacggttggaaatgaattgtctgagaagacacatgtgctgacaaagcaagagattttattgggaaagggcacccaggtggagagcagtagggtaagggaacccagaacagctctgccacatggcttgcagtcttcgggttttatggtgataggatttagttgtctttagccaattattttgactcagagtccttcctggtggtgcaagccttgttcagccaagatggatgccagagagaaggattcttgggaggtggtcagaatgtggtatctccttttgacctttctggaact

SEQ ID NO: 57796 - DNA, 2383 bp, Bovine  19866880240016
  misc_feature (1)..(1): n is a, c, g, or t
nagggttccccttttcttcacaccctctccagcatttattgttggtggactttttaatagcagccattctgaccagcgtgagatggtacctcattgtgattttgatttgcatttctctgataatgagtgatgttgagcatcttttcatgtgtttgttagctatctgtatgtcttctttggagaaatgtcagtttagttctttggcgcattttttgattgggtcatttatttttctggtattgagctgcaggagctgcttgtatattttgagattaattctttgtcagtgcttcatttgctattattttctcacattctgaaggctgtttttttcaccttgcttagtttccttcattgtgctaaagcttataagtttaattaggtcccatttatttattttttattttatttccattactctgggaggtgggtcatagaggatcctgctgtgattaatgtcagagagtgttttgcctatgttctcctctaggagttttatagtttctggtcttacatttggaactttaatccattttgagtttattttggtgtatggtgttagaaagtgttgtagtttcattcttttacaagtggttgaccagtttacccagcgccacttgttaacgagattgtcttttctccattgtatattcttgcctcctttgtcaaagataaggtgtccatcctgctgctgctgctgctgctgctgctaagtcgcttcagtcgtgtccgactctgtgcgaccccatagacggcggcccaccaggctccccggtccctgggattctccaggcaagaacactggagtgggttgcccatttccttctccaatgcgtgaaagtgaaaagtgaaagtgaagtcactcagtcgtgtccgactcttagcgaccccatggactgcaggcctaccaggctcctccatccatgggattttccaagcaagagtactcctagacctggtcattcttttgactatcgactcacatgatcaattccagttgacagcagagtgtcatcattttaatttatatttatattaatgtatatttataatttatattaatatattaatttgtagttacattttaatttctgtggaattatttgcactctctatcctgaaatgtcccttcctaacatcaagttacctagaggtgagtttaatcagaatgctgattgatgagcatagatgaaaattgctttgggaggaagttttatgtaaactttagtaaagctcaatgaaatatccatacttcaccactgaaaagatgatttgatgtccagatcatggaatctccaaatgtggtactctttcaccatcaaaagtatgagttctctcagtggagtagagaaagtggtaaggaacaaaattgataagctatatgtagcttatcagaatagtcccccccaaagatgtgcatccctggagcctgtaaatatgctttcttatatgacaaaaaggactttgcatctgtagctaagattatggacatggaattttctaagtgggtgggatgaaatcacataagcccttcaaagcagagaagttactttagttggagtcagagaaatgccgtagaactgaggcaggaaagggaatcagagaaacttggaatgtaaggagagtttgaagtgctgctgcttgttctgagtgtagaagccacttacaaggtctggagagaggtctttaggagtgaagggcagcccttgtctgacagccagtaagcaaatggggcctcagtcctacagccccaaggaacaagattatgacagcaacttgagtattcttggaagcaggttcttccctggagcctcccaaaaggaaattagctctgctcacaccttgatttgatctgtgaacctggagcagaggaaccagctgcccatacttctgatgcataaagttgtgagataataaatgttttgagtgttgttttaggccttaaaatttgtggttatttgttgctttagcagtagaaaaccaaaacactatgttagtatgttcaaattcaatctaagaaaaactagctgagaaaaatgacgcagttgtgcatgtgaacatacaccccaaaagagaattcaaaggacaagggcagggaaacctgaggtaggtcattcaaacaccaactgttatctgtaagataatgaaagctccccatctgtttctctgcataattgtgatcaaaggagcataatgtgttttgcacatatttggaagaaaacaaactacatcaggattttcatcaggggaggactgtacaggtgttgaactgcagtccaggacactcaacctatgttataatggcaaggaggtagatgtacagatttaggtgagtaagtgagcagtcatagagtgccagggaagatacataccccctcaatca

SEQ ID NO: 57797 - DNA, 1711 bp, Bovine  19866880342080
  misc_feature (1)..(1): n is a, c, g, or t
ngatagcaagtaagacttgagaagatttgagaatgtacattcttacagttcacacagcccctgagtgtcaatccactcagaatttcatttctagatgcttattgaagacaagaaaattaaaatataacaattagatctgatacttcagggtctaaaatcccacgagattctgcttgactaaaaatggtccatgcagaaactttcaaaacatgaaattagtttgaatatattacaaactcttctcacacatactaataacatacaaatgaccttgataccagatcacagagacagtcgtagcaagcatgctaattcaatgttttgagtaataaactggaaacagccatgtgtcctaaccaccactctatgcacacgtacagtgcatagtgactgagtgttcatgagacttggaaatgtttaaaataagatccctgacatataaaggctcagggttcaatggggaagaaaaattcataagggttcaatttacacgtgaaatagaggggtcatgggtgattggaatacacagtttatgtagaataaagatcttaagctgaattcgctgttttgcaaaatatttaattatttggcttttaattcactagctacagattgaaaataacggttgatggaaatcaatttttagcaaaattgttgtgttgttcagtcgctaaattgtgtcttactctttgtgaccccatggactgcagcacaccaggctcccctgtccttcacttactatcccctaagtttgctcaaattcatgtgcattgagtcagtcatgctatgtaaccacctcatcctcttccatccggtctccttttgccttcaatctttcccagcatcagggtcttttccaatgagtcggctctttacatcaggtggccaaaggactggagcttcagcttcagcatcagtccttccactgactattcagggttgatttcctttaacattgactggtttaatttccttgctgtccaagggactctcaagagtcttcttcagcaccacaattccaaagcgtcaattctttggcacttagccttctttatggtccaactctcactcttgtatataactactggaaaaacctatacggatctttgttggcaaagtgatgtctctgcttttttaatacgctgtctaggtttgtcatagctttcctcccaacgagcaagaatctttaaatttcgtggctgtagtcaccatccacagtgattttggagtccaagaaaataaacctgtcaccggttctactttttctctatttgtttaaagtgatggcagtggataccataatcttagttttttgaatgttgagttttaaaccagctttttcactctcctctttcatcctcatcaaaaggctctttagttcctctttgccttctgctattagagtgttatcatctatcatctgtatatctgaggttgatgatatttctcctggcaatcttgattccagcttgtgtttcatccagcctggcatttcacatttagcaaaatagtaagccctaattctgaattcttccttttaaagatatccatctcttctgcctctaatgggaaattaaggtctcagtgctacatcattttgaaaaatctactgaaaaatagatttgaaaaataagtctgttgaaaaatataaattcagacaacctattgtttagttgttctcaactgcaccaaaataacaatttgagtgctg

SEQ ID NO: 57798 - DNA, 2341 bp, Bovine  19866880440310
  misc_feature (1)..(1): n is a, c, g, or t
ntcagtcactcagtcgtgtccgactctttgcgacctcctagattgcagcatgccaggtttccctgcccatcaccaactcccagagtttacccaaactcatgtccattgagttggtaaagccatccaactatctcatcctctgtcatccccttctcctcctgccttcagtctttcccagcatcagggtcttttccagtaagtcaattcttcgcatcaggtggccaaagtattggagtttcagcttcagcatcagtccttccaatgaatattcaggactgatttcctttaggatggactggttggatctccttgcagtccaagggactctcaagagtcttctccaataccacagttcaaaaacatcaattctttggcgttcagctttctttatggtccaactcccattcatgactactggaacaatcatagctttgactgtgtagacttttgttggcaaagtaatgtctctgctttttaatatgctgtctaggttggtcatagcttttcttccaaagagcaagtgtcttttaatttcaaggctacagtcaccatcagcagtgattttggagcccaagaaaataaagtttctcactgtttccatggtttccccatctatttaccatgaagtgatgagaccagatgctgtgatctttgttttttcaatgttgagttttaagccagcttttttcactctcttctttcaccttcatcaagaggctctttaattcctcttcgctttctgccattagggtggtgtcatttgtgtatctgaagttactgctatttctccctgcaatcttgattctagattgtgcttcacccagtccagcatttcacatgatgtactctgcatataagttaaataatcaggggccctctgggaaatcccaaagttagttcaaggtcaaaaagacttcatttagaatttgatttttggtaagttttccaaactttttaagagattaaaaagaggcagcaagaatacacagagaaactgtacaaaaatgacccagataatcatgatggtgtggtcactcacctagagccagacatcctgtaatctgaagtcaagtgggtcttagaaagcattactacaaacaaggctagtgcactggaaaaggtcagttttcattccaatcccaaagaagggcagtgccaaagaacgtacaagctactatacagttgcactcatttcactggctagtaatattatgctcaaaatccttcaagctagacttcagcagcatgtgaaccgagaacttccagatgtgcaggctgagtttagaaaagggagaggaaccagagatcaaattgccaacatctgttggatcatagagaaagcaagggaatttctgaaaaacatctaattacgcatcattgactaactaaagcatttgattgtgtggatcacaacaaactgtgggaaattcttaacgagatgggactaccaggccaccttacctgcctctgagaaacctgtatgtaggtcaagaagcaacagttagatggaacaacagactggttccaaattggaaaaggagtatttcccaatacaaggctgcatttttaacttatatgcagagtacatcatgcaaaatgctgggctggatgaatcacaagccagaataaatattgctgagagaaatatcaccaatctcagataagcagatgaaaacacccttagggcagaaagtgaagataaattaaagagcctcttgatgaaggtaaaagaggagagtgaaatctggcttaaaacttaacattcaaaaagctaagatcatggcatctagccccatcatttcatggcaaatagattattctctcaggctccaaaatcactgcagacagcgactgaaagcacaaattaaaagacacttgctccttggaagaaaaggtatgacaagcctagacagtgtattaaaaaagagagacatattttttctgtcaaaggtcccgtatagtcaaggttatggtctttccagtaatcatgtatggatgtgagagttggaccatagagaagggtgagcactgaagaaatgaggctttcaaattgtggtgctggagaagactcttgaatgtccctcggagagcaaggaaatcaaacaagtcaatcctaaaggaaatcagtcctgaatattctctggaaggactgatgctgaagctgaagttccaatactttggccacctgatatgaagaactgactcattaggaaagaccctgatgctaggaaagattgaaggcaggaggagaagggtgtgacagaggataagattgttggatggcatcatcaactcaatgaatatgaatttgagaaagctctgggaattagtgaaggatagg

SEQ ID NO: 57799 - DNA, 4336 bp, Bovine  19866880448854
  misc_feature (1)..(1): n is a, c, g, or t
ntagcctagacatgaataccaggctttcctggcagctcagatggtaaagaatccgtctgcaatgcaggagacctgggttcgatccctgagttgggaagatcccctggaggagagcatggcaacctgctccaggattcttgcctggagaatccccatagatggaggagcctggcgggctacagtctatggggtcgcaaaagtcggacacgactgagcaactaagcacatcacagcatacagcacagacatgagaataccaggctcagtggcctcaagacaaaactggaatcatctttgggtgtcctatttcctctgtagctttatttgccagcatgttaactgatacataaggccactctgctcaagccagggattatagaccctaaggagcacatggccacatgccaggagaacaagaagctgcaggataaacatgagacattttcctcaagtgccaataataggggaaattccttttttttaagagcattataaactagaatactatacaaacatggagtaaaatgcaaaattcatggacttttaaaataaaatgaatcaaaactataaataaattttgagcctgaagcaagagcttccaaatccttccccagatctccagggtctaaatgtttatctttctcctccattaggggcactttgatgggtatttgagaaaaactgtcttaagacacctctcctagagtcactgatattttaaaaagatactcttaatgaaaaataaaatctgttaccaaaaaaaaaaaaagagagagagaatgaattaagggaaaagaagtatttacagtacatatagcatatacttatggcactagtcctcgttgtatgaaggtggaatctgagattcagaaaggctgaataattcatctgatgccacactgagtggcaaagccaaggcaggcaatgaatgtagatcgtgagtaaggagatccttttctgaaacccctatatcattgcccatggggcagtcattcactccacctctggaaagagccctgggatcccctgcagttggtgtgtggctgcagcactgccattttgctctaggaaggattctacccacgtgcctaccagcaccacaacaccctgccagactcagagagagtgagcttacgtttatttcctcaggagatatttctcattttttcccaattttatcgaggtaaaattgacataaaacatatcctaaagaaaataaaccctgaatattcattggaaggactgatgctgaagctgaaactccaatactttggtcacctgatgtgaagagccaatcattggaaaagaccctgatgctgggaaagattgaaagcaggagaagagggcaacagaggatgagatggttagatagcatcactaactcaatggacatgaacttgagcaaactgggagatagtgttggacagggaagcctagcatgctgtaattcatggggtcgcaaagagtcggacacgacttagcaactgagcaatgaacaacattgtattagttaatcatattagtgtaccatgggacttcccaggtggctcagtggtaaagaatcctcctgccgatgcaagagatgcaggagacatgggttcaaactctgagtcagggaagatcccctagaggaggaaatggcaattcactccagtattcttgcctggaaaaccccatggacagaggagcttggcagggctacagtccatgggattccaaagagtcagacacaacttggcaacttgagcacatacacacacacacacacacacattagtgtacaatatgatatttgatatatgtgtatgtttcaaaatgctcattatagtaagtttaattaacatccatcacctcacacagtaacaattttttttcccatgatgagagtttttaagatctactctcttaaacaactttcaaatatatgatacagtattgttaactctaatcactatgctgtatgttttatccccagaacttgtttatcttacaagtagaagtttgttccttttgaccatcccatttcctccatgtcctattctccaccactgtttcagaaaacagtgtattctgttgctatgaattcagattttgcagactctacataaaagtaagatcatgcaacctttgtctttctctgtgtcacatttcatttagcataatgccctcaaggtccatccacattgttccaaatggcagaatttccttctttttatggctgaaatttataaatatcacatagttttactcattcatccaccgatggacacagattcaacccatgtcctggctattgtaagtactgccgcaatgaacatgggggttatcagaagatatttctgttgtcctctgtgtatccctccagccaagccagggatagttttgatgagacagacttgctatgcttggcagtgaaaaagaggtctttgaaggaatcacatgaaaatttaaaaatgaccaagctgaggatgcctgactattttggttcttcttctctctgtgcctctctctgagtctctaaaactgttcctttctcagtttccacttttctctgcctttttttttttcctttctatccattctctatgtcttcctcttctatccatttttctctttatttggtttgaaaaatttgcatcatttgcttgaagacctaaatgttaagactggatactataaaactcccagaggaaatcataggcagaacactctttgacataaatcaaaaccatatttttttggatccatctcctaaagtaaaggaaataaaagcaaatatcaacaaatgacacctgcttaaacttaaaggcttttggacagaaaaggaacccatcaataaaatgaaaagacaacatactgaatggggaaaaacaatttgcaaattatattcccaataaggagttaaatttatatattcccagaatatataaacagctcatatagatcaacaacatatacaagaaaagatgtttaacactgctaatcatcagggaaatgcaaatcaaaaccataaaaatatatcacctcacacctgtctgaatggctgtcatcaaaaagttgcaaataacaaacgttggcaaagatgtagagaaaagggaatatgcttacattgtcagtggtaacagaaattggtacagccactgtagaaaacaatatggagaattttcaaaaaaataaaaataaaagcaccatattacctaccaattcctatatatataactactagttatatatctgagaaaaacattaacttggaaagatacatgcatcccaatgttcatagcaccattatttacaattcccaagacatggcaacaacccaagtgtccgtcaacagatgaatggataaagaagatgcgttataaatatagaatggaatactactcattcataaaaaagaatgagatattgccattagcaaaaacatagatggacttagaaggcattgttaagtgaaaaaagtcagataaagacaaatactgcatgatatcatttatatgtggaatctttaaaaaatagatttttttttaagaaaaacaaactagtgaacataccaaaaaagaagcaaactcacagatacagagaattaactatggttccagtgggataggggagaattaggaggtacaaacccctgggtgtaagataacctcaaggatgtattgtacaacatggggaatacgtgaatattttgtaataactgtaaatggaaagtaacatttaaaaattatataaaaacttaaaaaaattttaaaaaggaaaaactgtgtcctttgcaaacaagcctgaggacataagcattacaattatgtaattaaaatatgtaaagcaactggcagccctagtacattgcttggagttttttgcatatttattaatttatttattaattataatttaatttgaaatattttagcctagactgagatattctgaatatgctagtttaagctcccactccaggggcagtcagctgccttaatggaaaacctatactcctggggtgcccagttagcatcacatttgagaggactgttctagaagcagctactgcaaatgattttgtcttctgtagtctcaatcagtacccaaggttttctaattagtgaagtaaattttagaaatatttaaaatggtgatttattaaataaatgaatggctttttagagtatcacagaagtttccacatatttgtaacatcactccttaaatattttattttacagaagtgaaacctgaggttcaaaaggttaaaaatgtgctttattggtaaaaattagatgtattcaagatgtatagactgaataaaatatttataaggccctctgcatccttg

SEQ ID NO: 57800 - DNA, 1825 bp, Bovine  19866880493544
  misc_feature (1)..(1): n is a, c, g, or t
naccaagcaattcctggagatattatttatcaatggatattataaaaataaccaatgaatccaacactgtggaatgggaacaaacttcatgtacatatctgtatgcatgtatatgtacacacacattatattcaatccatgtgcatacatttaaataggattctgtgtgggcttagtgttcatttccaatcccttggggctctgctgcatcccatgcctcatgctatctgtgtggccaatggatctgcatcagagtcctgaatcctgctctttttgtatttttgccatgttggttttcaagctgctatacttttatattattatttgacagcaaacactacttttcctaatttgtcatggctaaatttctgaaaagtgtgctcccaatccactgcttcatcacatcatgtgagaattcttggaattgtactacttttataactataccactttattctgtatttttttttttaccatttttgtacttttttgtttacagttatttattgctgtattacttttttcactctgctagaacttctgcactaactgtagactcttaaatcactagtttaggaagggaaccaagaggtcaaagaggaaagaacagttatttgccaaactccacttgcagctggacaccaagaatatatcacagaacaggttgactgcctatgactttcataaaagcttgattttcattagatttcccctccaactttttcataatctaggcttcctgctctgtgttaattatatttctgacccaaaaccaacaaactaagaggctgcatgttgtgatggaaagcatgctggaccagacgccaaaaactgtgtggtttagggccaattctagagctaaccagctgtgtgaccttgcacaagtcacttcatctctcagaaccgttgttccctcgcctctttaatgaacagttaataaaattatgcctatgatttcttcccagtcaacgttatgttattctttgatgctgattgctcttcttctcacaattaatgtactatatataacaacaaaatcgacaattcttataaaccagactaagtttttattactacttccttcaaaacataaattactattcaggagctatataatactaaaaatgaacactatatgcaatttaaaaaacaattttgttaaatttatttcaggtatgattcagcaaatgaggtatttaacatactgctgtgaaagtaaaccttggttttaaatcccagcaaataaaaactggatctgaaaaactggagctaagattggctgggatccatcatctttatgagagtagagggagttagaatataccatttgcctaagaaccggacagataatctggaggaagagggcagagggtggtaaattggtgggaaaattaaagatacattttccccagctgtttgatttttcatgctattgagttttgaggttatagtacgtagctcatatatgaaacatcgctaagaggaagggaactcatttaaaattatgttagttgtagaattataactagatgtaaagcaaagaaagtagttatctattattcattccttctgaatagacatttcctgtctgtgaatacaaagcatgactagaattcacttgctgaaactcggagatgctatgagaaaacatttcttcctcgtttgatctgaccttgtgtatgataatggagcttctttaaaatactgtgacactagtctgttctccatatattgcacccctgagaattattccttcctctggtctcatggggtggaaattaacctcagagggttttagtgtcttgtccaaggtcatcccaaggct

SEQ ID NO: 57801 - DNA, 1648 bp, Bovine  19866880495383
  misc_feature (1)..(1): n is a, c, g, or t
nccttgccgtactcctttcccagttgttccatgtccagttctactgttgcttgttgacctgcatacagatttctcaggaggcaggtcaggtggtctggtattcccatcttttgaagaattttccacagtttgttgtgatccacacagtcaaacgttttggcatagtcaataaagcaatagatgtttttctggaactctcttgctttttcagtgatccaacggatgttggcaatttgatctctggttcctctgccttttctaaatccagcttgaccatctggaagatatggtaagtaaattagaaataaacttaaggaaaatagtatagaaataaaaaggcatttttgaaacacaaaataaagaaataaaaaggaaactttgaaatttaattcttaaaataactgaaccaagaattctgtcttaaagaatgacagcaggatacagaaacgcaaggaatgatttgtcctttgaaacacaataagagtatctcaagctattgtgttaaactaaatgattccattttatatacttcatacacctttggtctcctagtcaagtgtctatcaacacaaagaataccagtgtgaacctcactaatgagtaaaatctatgtgaaggatttatctttgttcctgtgtacaccattgtgttcatcaaagatttgaataaaatagtagagagcatacttcacaaatgtgtgtgacgtgataccaaaaggcataaataatatgtcaaaatagagtcttaaatctctaagatgctgcagtctggaatggtggggcaattaataaagactaaattttaaaagattaaatgtaaatcctgtaattataggcccaggttcacagtaaatagtgtggaaaggcctgagataatatagtcaactgtaagtttaataatagcccgcattgtgtcactgattatttaaagagcaatgtagtctcaggctacattacaagaaagagtatcatccaattactagctagctatttgttactctctactaggtgctgatcaaggaaagtaactatcacgactttgtacatgattaatttgccttgtgagtatttgtgttctgtttgaaggcctcctacatgggagattcaagctccttaacttcagaaagcaaaactacatataaagatctaatttataaagactgatttcagatcatttgaagggaattatttctcaaataatctgaaccatgttatcagtgaatatttgcccagaaatatgggcactaggtaaattatgttcaccagaaactatgataatttctccattaaaaaaaaaaaaacagagtcagaaaagaaattcaggctttcccctgctttcacctggattgtcaaagatgagaatgtgtgtctatgagctgttcaaacatggtggatgggccagaaaggaggaagggattggcagtgactggcaatacaggagaaaatggatgtcattactggtcataacaagcacaacactgtacatatagaaaatactgtctagagaagcttttggagaatgtttctttgttgtctgctatataaaatctcttagctgactctcttctgaaaagtccatcataaagatgtacttgaaattctaattacaatcaaagatgttaaagtcagactcttgttccacctgtgtg

SEQ ID NO: 57802 - DNA, 1575 bp, Bovine  19866880505811
  misc_feature (1)..(1): n is a, c, g, or t
nactctaattttttcgaggctgccttcttcctgagctttatctttcccaaaatcttacagccactgatcgaagccctctgccacaactcgatattctttattttatagaagtatcaaaaaatttcaaagtccagcttaaattccatggtatccttaaggcactccatgattttcctaatgagaattaattattactcattcttcacttaagctatactttgaacttcagtttgagcacttaattccttctgatttgtattaattttgtgtactggtatcctgttttagatattataataaactctttaaaaacctacttctttataacctccaaccattttgcctactattttgtctatactgggtgttcaacatgtgtttattgaatgaatgaatgaataatctaatagtattttagtatttacagtgtcttccattaaagcaagaagtttgcactcacaggcttatttatatttctcctttaaattccccagtgcctatcactatgtctgatagagtcagcacccaaatagctgataaatgacaaagaagtgaatgaatctcttcctctgtttcacagacatgcacaaaatttttagaatttcaatccaagtctttcagaagcatgaactcattggaagcaaatacctcaaaacagctattgcattcttgcaaaaaaattattgtggaatctgtgagaacatccaattggcagatacacgaccaaccgcaacacatcaatggcatacaacaataagtgattcttactcattcctctgagatggttgatttggcaactctgctaatcttgactgagcttgactgagtggttcttttggtttcacttggataatttcacatgtatagggagatctattgttgtgtggggttctgttcagtttcagccaatatagtatgctcttggctggaatgactgggccaattcatctttgtctcaaatgtctctaatcatccaatgaactagtacagactttattaaagtgacaaagagggtaagaatgaagacaagcctgattgcacaactgctttcaacctttgcttatgttatgcttatcaacaactcattggccaaagcaagtctcatggctgggatcagagtcaacatgaaaaggaactttaaagtaatatagctaagagggatgagtggggcaattggaaccatttttgcaaacctaccacaaaagtaaagcctaaatatggctcacttaagtcttttgaccctagtacataatagtaggctcaacaaagacttgttgaacagaagcacggatcaatggatacatagatgaatagatgaattaatgaagctagtttatgaagctcttaacaaagattagtcatcaataattcatattaacttgatggcagcaagaaaacatttgtccagaggtttctacaagatccaatataatatcttacaaaaatagaaacaaggacacacttattggatccatcaagcaactctggggatgggctctcagaatccttctctaatgaacttgaaatactttccaaggcatctacccttctttgttatcttcccatgtaattaag

SEQ ID NO: 57803 - DNA, 994 bp, Bovine  19866880587847
  misc_feature (1)..(1): n is a, c, g, or t
nactttctctcacttttttatgcttttccatcatttgaaggtggcaataaacaagaacaatttccctggaatgcccactggggtaagtggatgagtcaatttttaagtgtcatcaaattcctaaggtcaagttgaagtaaagtagtcagatgatattggacgttgattctaaaatgtgcagaaaaggaaagttactcagggatacaagaatggctcattcatatttgttcctatttatacgagtgaaaatactgtggttatgataacaggtttagttgtaatttctttctagggtacttcccaatatgcattcatctttcccccatttttttccaggaggttgcaaggcccatatggattcttgtggctttgtcaaatgttgagtttatgtctttgtaataaccccagcactttaaaatgaccactgtaagtactagctttacagaattgtcctgtctcttgggctactcatttccaaaggagactacactacaagtgacttgttttcaatttgctttacataccaaggcaataagaaaaaggtctaagcttttagcaatagtaagttcttcccctaagactccaattatgatggagtgtcaaaaaacaacataaaatctttacttcagcacaatagggggaccaaagggattcatagctcagaaagccagaggtctactgacaattaaggacttctgccaagaagaaaatatccataaaacgacaaataaggacatagacctatatgttgaaggcataaaacatctgacggtatgagcagggctcctgggataaggaactttcctttgacttatgcatatctaaggcatttaactctactttgttctaaatccctatacagttatgttcattcttccattatgttagtctctcaatcatgtccagctctttgagaccccatggactgtagcccgccaggtccctctgtccatggaattctctaggcaagagtactggagtgtgtagccattcc

SEQ ID NO: 57804 - DNA, 2738 bp, Bovine  19866880606905
  misc_feature (1)..(1): n is a, c, g, or t
nccaagaagaatcaggtttagcagattctatcccagctgagaggacaggctagcatacaatgttggcaaaaatgatatcttctcagccttggaagactttccttgagctactagaaatgccagagaggaaggtgatgactctttacaaacccctgtttctcaggccctctgatcacagtcattctcttcagttgatcacacaggcttctatcaagtcttagcaggcctcatgtgtattatttatttgattaaaaaaattgtgtcatttgcttttaaggagcctctgggaatgagcataattaagcatagattaaaatgtctgaaagactgaaaaccactataataatatggtgaaatgaacataagaagcttgaaaacatcctttacattgtcattccatcaaagcataccaattttgcaatgatacccttaaaactgattctcactggaaatgatcaaattgacatttcagctgcttgaacacaagcagtgattctacaaatttgggaagattaatttggaaaagagttcatctgtaccatcaaaggaagcataaagggcatcagtcagatttgatggaagagaagaaagagaaggaagaggagaaacaggaaaagaagaggaaggaggaggtgcaggaagaagaggagaaggacccactgagacaccttagcaaacaccgcaaaattagctggagattgcataccaatatctgaacactttctatgagctgggccatgttccaggtaacacttgctatgagctgggccatgttctaagtaagatggacagactgtagagtgtggagagattttgaacaaacaattcctacctacataggaaacacacaatatataggatgggaagttgagtgaagagaaaaatgcagccctgtgatgctctggggagagattttccctgcagaaaggagtagtgagggcaaaggccaggaaatgaggcagaatgcctgtgcgggccaggtcaccgcagtcctatctgattctttgcgactcaatggactgtagcccgccaggctcctctgtccatgggattctccagacaagaatactggagtgggttgccatgccctcctccagggaatctttcagacccagctattgaacccatatcttacatctcctgcattagcaggtgggttctttaccactagcgccacctggaaagaggcagagtggtggccaggttatctttcctggagtgtccttggggaggggagtagatgtgtgagtcagggtggacagtgaccaacactgagaacaggatgtccttcacaccctttctgaagggctgcttctaggtacctcgaatagtaggtgctttgggtggcaagtaatagaatccctaactattggtagatacaaatataaggcttaaagttttttttttttttttaatcaaacaatacatcagaaagttggcagcttaaggctggtgcagtggctcaatggcattttcaagttcctggcacttttcttcccttgtttctatcctccgtatgttagaggtgaattccctcatggctgcaagatagatgccacagcactaggctctgtgtcctcacgtagcagcagaaccagcaagaaggaggatgcaagcaaaaccattttcctgtggagagttctcctctctgagaagaaaatcttccccggaatccacccatagatttccccacacacttgccttaacaggactgactgggtgggcagcctagacttggaaggtgaagagggacaggaaggttgctagggtgctagagaggacaccgtgaccaagttatcctgagtgtaagatggagagccaggaaaagcatgatgagaggatggtgttagcagggcggaggtgcagagtccagactgggggtaacgggagcagattctttgggtccatgtcccaacatgaccactgactagccatggaccaccctctacctcaccatctgtaccattgggggggtgttacagtacctgtcttataggatcttgagatggacagacacttggtgtatgtaaattcacttagtgtattaaattcacagaacaatcccccatacaacgttcagtctctaaagatgacgtgattttattattgctctctacctcttgcctctccccatgttggattatccagcacttatttgcaaatcttcacatttgttttggcattccctgtggctcagaaggtaaagaatctgtctgcaatgtgagagacctgggtttgatcccttggtcaggaagatccttggagaaggggaatggctacccactccagtattcttgcctggagaattcagaggagcctagcagggtacagtccatggggttgcaaagagtctgacacaactgagcgactaacactttcacatttgatttacagatcacagagaaacttcacttgggcttcctccctggctcttgagttacactactctatctcttttttaaaaaatttattcatttattttaattgggaataatactttacaatactgtgatggttttttttttttttttttgccatcatcaatatgaatcggctctaaagatggctggatggcatcactgacttgatagatgtgagtttgagtgaactccgggagttggtgatggacagggaggcctggtgttctgcaattcatggggtcacaaagagtcggacatgactgagcgactgaactgaactgataggtattcatgtgtcccctccatcctgaaccccat

SEQ ID NO: 57805 - DNA, 1203 bp, Bovine  19866880607805
  misc_feature (1)..(1): n is a, c, g, or t
naagactcttgagagttccttggacagcaagggagatccaaccagtccatcctaaaggaaatcagtcctgaacattcattggaaggaatgatgctaaaggtgaaactccaatactttggctacctaatgcgaacaactgactcatttgaaaagaccctgatgctgggaaagattgaaggtgggaggagaaggggatgacagacaatgagatggttggaaggaatcatggagtcaacggacatgagtttgagtaaactccaggagttggtgatggacagggaggcctggtgtgctgcagtccatggggtcgcaaagaactagacacaactgagcaactgaactgaactgatacccatctttttgttcataatgtttttagccacctttccatttaaaaataaactatttccctaaatcctaattaaacttagagattgtgccacattatgattcattatgacctgcctcaaagcaggtatcagatactaagaaaattgcatggtcattttatcttttcacctaaaaagcatatctttacatctttcagtgcaaaacctagaatgttctatcaccacccatggattaggcaaaagcaactccagtctatggagagcccttgtccaagtagcagaagacaggacatggcctctgctccttcctctatgaccaacagtcaaagatttcactgctggcctttgtcctgactttaccaacatgactcatcttaatcgtgtaaatgtgaacatgattttatatgaattttcatattagagaagtctgctcacttaacataaagatccatttcaatcacaggctttttttccttctcagaaatgatcaagaagaaatgtggaaaattattttttgtttttttgaatagaaactaccaacattttaacaaattgatttttgctgaaaataaacataataaagtagtattttaaaacctcaaagtgagggatttccctgcaacaaaatttaggattatttagctgtctccaagaggacaaataaaactgtgaacataatggttgacttattgagaaagaaaaatatattatacaaagaccagaaaacagtggaagagaaaggtctgtaatggcttggctgctgaaggacatttctaccctcatgccagcactaagtgctcttcccaatgaataaaccatatgtccatttttatatgcttcctttcacttagat

SEQ ID NO: 57806 - DNA, 2085 bp, Bovine  19866880663474
  misc_feature (1)..(1): n is a, c, g, or t
ncagagacgctaaataacctgagcttaagctcacatggttagcaagtggctgaggctgtggactgaatgcagagcccctgctctgcaaccgtgatgctctgctgcctcctcgtggaggcgactgagaacatgccttgaaaccaaaacaaatgatgaggctttataggagctgctcatgccagagcttctcttttcctggaggaaaaggcagatttgaaagctaggtttggacacaggaaattcagatctttccatggcttttagatgacactcaaaatcccatcttaggaaaagggtgttgtaggtttcctctaaataaaacaataaagaagtaaaacttgtgttattattaaagatggggaggagagaaggaagccagcaagtgggggccaggcaagtgggtgaccatcaccatggtgggtgaacacaggtgtaacaggggctagtgatgtggtgaaactgacgagctaggacaacccgggaactcaaaactggttaaaaaagggggtatgcgcagaaggggcaggagaagtgacataaaataggtctgatataaaataagtctgttgagctcactaagaactggaaatcaggttttcattttgctgagaaagtgaattgattttgcagagaattctgaggacacaatgaaatttcattcacagaaactcttcacaaataacacaagttgaaacaataaaacataccaatggccccaactgttggtaaccaggcaagctacaccaaagaaatatccacactacaatgaaaagtaaactctttttttaattgggcagtgggaaaacattaatatgattttctatattacaagtatatcataatcatttactcaataaacaagtattacatagcagttacactatatcctgtactgggccagacacagaattcgtttttgcggttacataaaatacaaatttaacattgatatatttttttcaaaatcattatgtataacataaagcatatattattatttttattttatcaaggactcttagaatgtgaatgacttgctcaggtcactcaaaaaaaaaaaaaaaagatagcaaaagcatagggccaaatatgccatattgctggttttagggttgtgtccctacctgctaagagtaagattaaacttcttcttagaaacacctctgtgtggcccatcttttgtcctagaaatctaaggcaatgtatagttctcatacatgcagacagctgagtcatctgggcatgaccatgagcttctccagaccacagtttctttgtaagcaagagaaggatgggtgaatcaaagtacgacttaggcttctcttagctgtaaccatctgagcttattagaaagtgcttgaatacgttataggtctgaccttaaacctgtgcttttggctctcagaaaaccacagctatagcatcaaggcttttactttgattgagtgtcataaagtcatcttagagcagaagtgttcatagatctggaggtagcaagaggagggcaagacttggcctcctaaagtcagagagaaagaccagagattgttcctaagctgagggtccaagtttagcaggatgtgtcacacttagactcctgaagagcatgtaattttgaaatgagattagggggaaataacggggttctttgtgagtaaaagcatcaacaacagaccagcttgttatccacactgtaccctttcttatgcctctgtcggcagtttcagagcatggaggagcgaagccaaggttagggtcaccatattgtcctaaggaaccaactgcaaccatgccgtaaagccaaataaagcagccagtaaagatggctcatcacatcatcttattaaaaaatacttcatgttatacacttcacgtctccctgagtatgcatgttgaataattttcaaagttgtgtaaaactttacaaaggccttggcttccctggtggctcagatggtaaagcgtctgcctgcaatgcgggagacccctggttcaattcctgggtcgggaagatcccctgaagaaggaaatagcaacccattccagtactgtagcctggaaaattccatggactgaggagcccgg

SEQ ID NO: 57807 - DNA, 709 bp, Bovine  19866880680214
  misc_feature (1)..(1): n is a, c, g, or t
ntgtctgattagtatgaagttatgtaatgtgtccatatggctctggaatcaaatctggaagattaaataacttgttcaaaatcacgtggctaagtctagggtccttcatctgtgaaatgggcataataatatatacctcaaatttagaggctttaatttaattaacctttgagaaaaatgcgaagagacagtggctattattacacttgatatattatagttgtgggtctgggcttaaaatagtttccctgggagacttaccctatatgcattcccatgatgctgacattcttcaaaatatcagctgcctttcccttttggaactgcttccagagctagggtttacatcttagcagaaaattctctctttatgcctacatttgaccaaaaagattttaactcagttttatcaacctcattcaccaaagttagctgtgaggcatgtttaaccatttgtgaaaaccacagctaaatgcaaaggatgaaaatttgcagatttgccataactgaagatatttggaagaatttgcttcttctagtggaggggatagatatcctgtttgccagaccaggtccccaaaccttgggaaaatcataaaccatggcatcaaacagtgtttcagagttgagaaaatggaaagcaggggtgctgatcctcaaggtcagccctggggaagctagaattttctgaacttctaagagagaaata

SEQ ID NO: 57808 - DNA, 765 bp, Bovine  19866880739520
  misc_feature (1)..(1): n is a, c, g, or t
ntttgcactgctgctgctaagtcgcttcagtcgtgtccgactctgtgcgaccccatagacggcagcccaccagggctcctctgtccctgggattctccaggcaagaacactggagtgggttgccatttccttctcccaatgcatgcatgcatgctaagttgcttcagtcatgtccgactctgtgcaaccccatagacggcagcccaccaggctcctctgtccatggcattctctagcaaagagtagtggagtgtgttgccatctcctttgcactagctggcacctgttctgaagatttcgatgcccatgtacattggcaaccccactgacaaccaacatttcaatggctgtcctgcttatggtgatcttgagacacctcctgatttcagaattgacaaatatgaaaaaatgtgtcttagaatcagtgaaatacagtaataacttgataacaacaatatctaattctcatcttgaagagaagaaccaactatatatttatgttcgcattagagaataagccacttacaagagatatgtgaaagatctgtcataaaattacaggacaagaattcttatccctatagataagcccatataccccctaaatgagtctgaaggggagtttttattgtttggtttgttctgatccttatcattctggcattaattttgtttccttaatttaacagttcactcacttttcaaatctttttctagtaagaaggtatctgatcaaaggagaaataagctaaatcatgtagacag

SEQ ID NO: 57809 - DNA, 1518 bp, Bovine  19866880771191
  misc_feature (1)..(1): n is a, c, g, or t
ncttgacgttcgaaagcagagatctcctagagaccatcacgtgtcctgaatttcccagcttcgtttcgagacctattttgtctgtcgctgcttatacctctgctcaggctcatggtaaatggtctgcttctgtcaatgactttttcatctatgtcaggcaaaggcccattagacaaatccaatgggacaagttcagagagtttgtcagttcctgtcactttcaggtctggctgtgcagtgaagcacggacgcaaaacagacttgtcaagatgggcagcttcttctggaagaagtttatctcaatggagaggaacacgtgatggctggaaatcatcacaacacgagcgcctcagcctgggaacagcacagggggccggaagagctgactgtgaatgaattaagtatcagtctcctgtgcacaggagcagtggggagatgatgctatataccccagatatttgggggtgctgggtacgaggaagccatcacttcttatcatcaataattattttcaacttaacaatcaataattattgataaagataagtgagaagctagaggagaacttcccacataaccttactgccaagacggctaagcccccacatcctccctcaacctcatacacttgacaccccctgctttctgcaatgagcagaaggtcctggaagcagtcgaagcccaaatcctcttgtgcattggagtctcttgccttatcaactcgccaagcactcactcctagagttgtctgccttctgcattatcagttcctctccattggtcattgctttcagcttaaccatgctgtcataactgccactaaaaactttaaaatccttaaacaccttttaatcgccacccaaatttttctgtttgctttatagggaacttactttctttctcaactccctcctccttccctcagttcatttcagttcagttcagtcacgcagtcgtgtccgactctttgtgaccccatgaaccacagcacgccaggcctccctgtccaccaccagctcccagagttcacccaaaccaatgtctattgagtcagtgatgccatccaatcatctcatcctctgttgtctccttctcttcctgccctcaatctttcccagcatcagggtctttacaaatgagtcagctcttcacatcaggtggccaaagtattagactttcagcttcaacatcagtccttccaatgaacacccaggactgatctcctttaggatggactggttggatctccttgcagtccaagggactctcaagagtcttctccagcaccacagttcaaaagcatcaattcttcggcactcagctttctttatagtccaactctcacatccatacatgaccactggaaaaaccacagccttgactagatagacctttgttggcaaagtaatgtttctgcttttgaatatgctgtctaggttggtcataactttccttccaaggagtaagtgtcttttaatttcctggctgcaataccatctgcagtgatttttggagccc

SEQ ID NO: 57810 - DNA, 1880 bp, Bovine  19866880781068
  misc_feature (1)..(1): n is a, c, g, or t
nctgaaggctgagctgcgtcctgtggggcaggcagtagtatgctactttggatacaatccatgagcccacggtcataaatcccctctcaagagggagaacaggaagcactagctctcaggactctttgtcgaaaacacaaacgggctggagacccatctgcatctctcccctcagagggttacctgttcgaggacccccatgttggagccgcagcctggaagcctgcagcagtaggaagcccaagaaagtgttttgtttcactgtctgactcatcctcacaatgttttaaaagccaaggttacttagcagatgtgaggcttaattccagtagaaggagctcagcactttcacttagtatataagtttatgctaagcaccttcagtccttgctgctacctgctgaccctggaggcactggatgcagcagctctcataccagcatattggagagaaggggcgtttgtctcagtcctcttgtgtggggtcctccagctgtgtcctctctactgtctggctcctaagtttccatctctatgccatcttggactcctctgatgcacttgctgttcacctcctcggacctgcaataaccatacagagatgcttccacccttggggggaagggtgctcctgggaaggttaggtagcactctcagttctcctatcccagcttggactctgacccactgcataattccctgccacattagctgtagcagatcactgactctgccagagtgttgagaagatcacagaggatttcaaaagccagaagagaaacaccaaagttgagccctgatctctattccctgagtacatcagcacctactggttctctccttgttcaaggcccctcttgttgctcaggctctgctcctcttgggcaccttttctgtcctgccatctctctctctttcctccctgtgctagtttccagactccaatgttgggctgctactgagacgtcctcctcttcccttttgaatacccaccaaccgtcttttggcagagtaccctctttccctgggtacttttgtaattttttttcatttaagaaattgccttaatactttaataaattaaattgccttaataaagccattataactcttcattgagccaacgtctccttttaaaggagactcagactttccatatccactggactatctgaaatctttcttaaagtaaatggaatggggtggtattagtttagcatgaatcgacactcaggctttcaccccaatctgcatttgatgcactgtcacgattccatttaaccctcacaataccaaacacatcctgtaccatttataaagactgtcaagatttagtattaaaaaggaaatagagtaaaacctgtgacccaaaaagagctcttggcattttccacccagtgctcattcaaagctagggatatgatagctgccttagaggcagaatggtctcaaggctagacatctgcccacggatttcccttctgtttgctcctttaatcaagtgcaataattatcaaatttcagtgtggagagaaattagaacacaaggttgtatgtcttgtgggtgatataagggcttttcaagggtaatactaagtttatatgatgttcacgttaggtgttgattatagaacctaaaaatatcactgctaagatgtgactcttctgtcaaagcttccttcagtaagaattctgccttcagactagaatttctaaatggctgagaatttttaaatggtggttattattttttcctttttggtctcactacctttggaaagagaataccaccatccccccaccttggatctggagtatcctgttgaaaggcacccctgacccccacatcaccactaaatagcttctgtcaatctggtata

SEQ ID NO: 57811 - DNA, 1739 bp, Bovine  19866880784998
  misc_feature (1)..(1): n is a, c, g, or t
natccctcttggagcttgcattctaacagaaaaagatagacagcaaatacgatcatagctgatgtgaagagctgaatcactggaaaagaccctgatgctgagaaaatggaaagcaggaggagaaggggacaacagaggatgaggtggttggatgcatcagcagctcaatggacatgagtttgagtaaactctaggagatggtgaatgacagggaagcctggcatgatacagtccatggggttgcaaaagatggacttgtcttagtgactgaacaacaataatcaagtagattttataataaattagaagatgatttgaaaaactgtagaaaattcttaaagagatgggaataacagaccacctaaccttcatgctgagaattctatatgcaggtcaagaagcaacagttataactggacatggagcaacagatggttccaaattgggaaaatagtattacaaggctgtatattgtcaccctgctcatttaaattatgtacagagtacatcatgcaaaatgctgtgctggatgaagaacaagctggaatcaagattgccaggagaaatatcaataacctcagatataaaaataacaacacccttatgacagaaggcaaagaagaactaaagagcctcttgatgaaagtgaaagaggagagtgaaaaagttggcttaaaactcaacatgcagaaaactatgatcacggcctccggtcccatcacttcatggaaaataggtggggaaacaatggaaacagtgacagactttattttcttgggctccaaaattgctgcagatggtgactacagccatgaaattaaaagacgcttgcttcttggaagaaaatctatggccaacctagacagcatattaaaaagcagagaggttactttgcctaccaaggtccatatagtcaaagctatggtttttccagtattcatgtatggatgtgagagttgggctataaagagagctaaaaaccaaagaattgatgattttgaactgtggtgttggagaagactcttgagagtctcttggacttcaaggagatccaaccagtcaatcctaaaggaaatcagtcctgaatattcattggaaggactgatgctgaagctgaaatttcaatactttggccaccagattcgaagaactgactcattggaaaagaccgtgatgctaggaatgactgaaagagggaggaaaagtggacaacagaggatgaaatggttggatggcatcactgactcaatggacatgagtttgagtaagctctggaagttggtgatggacaaaggggcctggtgtgctgcagtccatggggttgcaaagagttggacacgactcagagactgaactgaactgaatggggcttccctggtagctcagatggtaaagaatctccttgcagtgcaagacacctgggttcaatccctgggttgggaaaatctcctggagaagggaattgctacccactccagtattcttgcctggagaattccatggaaagaggagcctggcaggctacagtccttcgggtccacaaagagttggaatgactgagcagctaacactttcgctttcactaaactgaatggtctggccaagcaaaaagcatccatggaccagattcaaccagtggcacaccagtatgcaaaccatgatttggaatcatctgtgacaagactgggttccgtcaatttgtctctaccattgtctctaccaattagcaaaagtaatta

SEQ ID NO: 57812 - DNA, 1807 bp, Bovine  19866880796288
  misc_feature (1)..(1): n is a, c, g, or t
ncaattttaagacttaaaggcctttaatatgctgagacacatggctgctaatgaagtttatccatgtgttgaggcagaaactcattaaacccctattatgggatggaaactagcgtaggggttaactgttcagttcacaaggtggagagagtttaataggagggtttggtagtttggatttagcatattcagggacttgggagaaagagtttgaaagaaggggtgtgaatgaggtggtggaaaacagttgatgagagaatcttagagctttaccatatgatgatttagcaatatgctaaatcttcatactatttatgaagataaatttaggtaaacgtatatcgagtcgaatggcttaaactcagcatatacacaacaaacacatttattttattattataatatggtaataaacataggctttgtaggatgcctattccagatgtccttttaaaggataatcggtagtcacaaagtgttaaaataagaattgaagagaaaggaagaaccacgaaataaatactgcaccatagacagtatttatggaacactcactgtactagacattattccttccccatctctgagaacctcattttttgatgcaaaagcctgaaatatggtttcatgaagtctaaatataatatttagaacctgatttcaaaagagagcatggattggggttgggaggtaggaaaagggaaaagaggaacctcattttagaaaaggctgtggaagtaatggaatgttataaattctaagatttaaaagttaggccagctctgtttgctctagaagaggaaaagagggtcacaagaagtctgtgccagtgacggcttggcattgggaaggccaacttaaagtgttccctttaataaataaataatgtatagaagttgtttctaatataataagagtattaataaccatgatcatcagggttatcctgtatatattacagtgagaggttggaagaaagttaaatagagcctttgtaaagaccgcaggtgaagagaatattgttaaaatccattggtggtaggcaatacttctgtctcctgaagctgaaacagtagtggagtgattctgtttgaatcaggaaaccaaggggagtttaagacagtcatgtgtaataaaaccaaaatccttttttcccttaaactttggaataacttttgaaaaaaattatttgagatacaagcacagatgaaaaaatatttgttaaatgatgtgtctttctttgaaaaatatacactttcaattctgtagaaattatagttgaagccccataaataaatcatgagaaaacaagcttttcatagaaagaagctaattctgggcagtaaatggagctctgggagtccaggctactttggttatatgtattcagttcagttcagttcagtcgctcagtcgtgtccgactctttgcgaccccatgaatcgcagcacaccaggcctccctgtccattgccaactccaggagtttactcaaactcatgtccatcgagtcagtgatgctatccagccatctcatcctctgtcgtccccttctcctcctgtccccaatccctcccagcatcagagtcttttccaatgagttaactctttgcatcaggtggccaaagtattggagtttcagctttagcatcagtccttccaaagaacacccagggctgatctcctttagaatggactggttggatctccttgcagtccaagggactctcaacagtcttctccaacaccacagttcaaaaccatcaattcttcggtgctcagctttcctcacagtccagctctcacat

SEQ ID NO: 57813 - DNA, 1727 bp, Bovine  19866880859966
  misc_feature (1)..(1): n is a, c, g, or t
ngcttacttcactctgtataataggctccagtttcatccaccctccattagaactgattccaaatgtattctttttaatggctgagtaatactcccattgtgtatatgtaccactgctttcttatccattcatctgctgatggacatctagggtgcttccatgtcctggctattataaacagtgctgtgatgaacattggggtacactttcaattggtgtctctttcagttcctcagtgtgtatgcccagcagtgggattgctggatcataaggcagttctatttctagttttttaaggaatctccacactgaagactttaaagtcatatgaatttgtgaggaattactagggtgttctatacagaaactgaggaatcaactgtttctagttaggagtgtcagatactgtgtgggatcaacaattgaggaaaaacaatggaatttatcagagctggattggagttgagattctgctttcgaccttaggcgaagcactggttccttgtgagtctcagtttcttcctctcttatattggggtaatgacactcatcttgtctaaattccaggatagctgggaaggttatacttgataatgtttgcaaaaggactccaatgtcttaaaacattatttaagtgaaagcatttctaggaaaaaagacattttgatcatccacttacattctgaagtctctgctctgtccacaagatgatacattcaaagtcaatgaaataaattttatgtgccaaacccacagtctgtcggtacactctactggcaggtctttgttatacattagccttttttatttattcaacatccactgggaccaaggctctgcagttttgaataatccacgaagttgtcactaaaagctgatattctctatgttgataatgaagaaaaacaccaatgaacagccttattagtgtaaaaagtcacacactccaaagcctctatcccattaggaaaaaactcaacatatgtcacgtcacattaataaatactgcatgtgcaaagtgtgccttattctaacagtaaattcccccttggaaaattgatttgcttttaaattttaattgacttcttttctcttctatggaccctagttagtttccacccccctccttttctttcacaaatgatgtaagtttgcatgaaaaatacatcattctttaaacccaacagcaaaaaaaaaaaaaaaaaaagaaagaaaagaaaagaaacaaaatgcagaaaaaaagaggtaaggggaaataaaaggggaaaaataacaaattggtcattaaaagcgaaaagatgcatgagataaaagagagggaggcaagacgaacatctactatattgggcttcggtgcagatgtaagtataaaatgctccacaagtcctgtaattgagaaaatctatcaaatgtcctgacagctgctcgggcatttccagaagcgataaaacttgaatttatttcactcctagaaaaggggcagtatcaccttctggcggctttaatgaaatgccataaaattcgaggaaaaactgtgttgtaaagtcataaaaaggtagtcggaagtggattgttggaaatggggcgggaggggtttgccgtgtctgaagagttaccgaaggaggccagagggctctgggcttggcccgcgataaccagccaggccttcagtttcccaccgaccctgacccccgcagccccgcctccagggccaggggagggagta

SEQ ID NO: 57814 - DNA, 1039 bp, Bovine  19866880865099
  misc_feature (1)..(1): n is a, c, g, or t
ngggattcttggagaagagttgagaagttttccttaagtgtgcatctgaagaaaccatgattgcagtccttcaagagaggatgaaacaaataaggagtttggggtcaaatgcctgaagtcctggagtctgcaggaaaggctgtaaataatagatttttctctttaaaataaaaattggaaagtaaaaagcagaaaaataaatgataaatttcagaacattttccaaaattatttacttctctttttctaaactttcttgccctggggcttattacctctgtggcaaagatctcagaaaagtgataaaaaataattggtctgactctataaacaataatgacaaacagctatcacataagttcagggaggatgggaggtcctagagcccatgctgaagctctgtcttgagtcccttgaccataccacagaacacagtggcagctactaggattttttccccactaggtggttctgtgatgggccattggcaaaactgatgtgttaaaaatctggccacctctggctgtgctccaggtcttggaatctcctctcttctgatggatacagcacaagcagtagagcaagagagcgacaccagagtgaattcaccagaaagactgagtttcctactttctgttgttatcaatggcttcttgaaggttgggggttagtttgcagaaaaagtggcacgttggctgtgaattaattactgatacaatttccgtctgtgtcttccatggacaggtggctcatatgtaagtcctaagaatcttcagcttcaaggtgccctggtggggttggcatgttgtgaaatgagctacacaccctctaataccatacttaccagcagctgtgataaagaaacatctgcccccatgaaaagtcaagggcagaggtcatctggcattccaagggaactctccacagcagggagccttctaattggctgatattgatcggtaaattgtgtctccactggattaattctagctgccccccaaacttccacagcaggagcggataggtcaagatttggggc

SEQ ID NO: 57815 - DNA, 1464 bp, Bovine  19866880884490
  misc_feature (1)..(1): n is a, c, g, or t
nctaaagaaataattaagtatgaacaaagaaggaatgaaaaaggatattcactgtaaggttgtttatcatactaaaaccccagaaacagcctaaatcctcatcagtaagagactgataaaacacattttggatcatctgtacagcaaaatattatgaaatctttagaagtaataatatagcttcatatttataggaagcccacaaaacattgtcaagtgaataaaacaaattaaatatagtatacataaacactttatcccatttttgtcaaaatgtgtatctatatgtatgtatgcatagaaaaaagtcttgaaaaatacataccaacatggtcatatgtttatctaaaagcagtaggattatgaatgattttctctttctttttaatacctttgtgttttaccatattctttcataataagtatgcataatttctatactcaaaaaatactaaagctacttaaaaaatttttttaatttatatgcaaaaaaaagccaactgatttaaaaaattaaaacccatatctatatggatcttatctcgttcatcctcaaacagaagggagacgtttcattattgctgtgtgtagcagggtttctcaatcttggcactattgacatttttggctggataattccttgtcatgggagattatcgggtgccttgtaagatgtttggcagcatcactgacctctactcttgtaatacacatcactcctttcccaccaagttatccaaaaatgtctccagatgtcaactaaaggctagactgccctggttgaaagtcactgctctaaggaaacaggagatctggaattaaaccccatgtttgacacttactagttgggtgatccaacctctctgggcttccatttcctcaagactacattatcttcaagatagctttggtcctgaaaaccatcttttgtgagtttgcggaaaatcagtggattcaaaagggtccaggcttccccagtggctgagttggtaagaacccacctgccaatgcaggatatgcaagaaacgtgggttcaacccctgggtcaggaagatcccctggagtaggaaatggcaacccacaccagtattcttgcctggaaaattccatggacagaggagcctggcagactataattcacagggtcgcaaagagttggacatgactaagcagctgagcatacaaagggaaagtggttggtccagagttaaaccaaaagccaaaagttcaaacagaaatgtggctaggtctcctaactgcaatcatgcatttattcactcatttgtgtaagaaatatttattttgagtgcctattatatcctgggcactattacagcactgggaaacagtaataaacaagaaaatgagatccttgctttcatggagtttaccttctatgaaagaagcaaatagtaatcatgtaggttaataaacaggagtattttaaataagtatattaatagg

SEQ ID NO: 57816 - DNA, 1757 bp, Bovine  19866880912288
  misc_feature (1)..(1): n is a, c, g, or t
ngagggttcccatgcaaccagtggtaggacttagaactttaaattgaacatatttgcaagctttttgcctcctctccactcactactgagttttacattctctctctcttcctgaaagattatacatctgccctagttcctggttcctagttcctgttcctgtgtccagaactgaaatgatgggtaggaagggttaaataagtgcaaggaataaatctggttttaatcacttacactggaaagaagttgttgtttttgttattcaatcgctaaatcatatatgactctttgtgacccgccaggctcctctgtccatgggatttcccaggcaagaatactggagtggattgccatttccttctccaggggatctccctgacccggggattggacacttgtctccttcattgggcaggcaggttctttaccactgagccaccagagaagcctctggaaaggggtacaagagctgtctgcagaaagaagaggaaattataagaaggagaagagagtcagggaggggatttctggagagaaaaaatccattaaggaaatcagaaagaagagtagagagaaaggaaggattcagaatagttgccgtgtgtgagtgaaattaaaacacgcaccctggagaaagagttgctaaaatttagcagctcactcctttgtctagttctttgggagtctctagtagagatataaattgcttttaattattcttaattcccatgtgtatctgtatttctttgaatgaaactctgctaacttgtccatgtggggtcttaaccgttatttggtttgcatgaagcagctccaggctatattttctattcagataggttcttgcactcattttttatttcttgaaactcactccagatcaagattctttcttcttatggccaaacttaattttatatagttccctctccttaaatcctgcctattgggtgggaaagagtctttccagtttccttttctttcttgacaaaagaacttgtgatttctgcctcctttcaacactatactgcaaggccatagagagccaatttctctgctatccttcttctcagccttaaggttccttctagtcaaaataataaaaaatctctttgctagtagtgtgtaatttacattgttaaagacctcatgcatgcttaataacttctttcctgggcccagaaagtttcctataggcatatattcacgggcaagtactcaacaagattgattaaggccctggcatctgtgtgggaggatagagcttggaatgggatacaggggttgatgtggaaagagttcagatggaaagaatgtcagcatttgaaacattagacttcttatagctattctaatttccagagaagtttcgaatgaggctatatatagttctatttcccctacttagtgattgccaagttgtctatcacgcagtataatatttatcatgatttatacaaatttttcattttgtaaatacatagagattaattactagtctctggtggttgtaaatataccagaaatggaaaactcctgaaacagttggtgtgattctgtctttgtgtgctctatcaaagcttaccactgagaacctaaaaacactgctaactagcttcaatgagtttgacacatggtggtaacattttcagtctttttatggagaagtcttagtgatgaatgttatgctaacttttcaacacctgatactgtaagagacacagaattaagcaatcttgtcaattcaatttttcaat

SEQ ID NO: 57817 - DNA, 1797 bp, Bovine  19866880937609
  misc_feature (1)..(1): n is a, c, g, or t
ntgagaagcctcctgtgtgtgtgtgtgtttgggtggtggggggtccactggcttctcccaaggagaagcgctgccatgcaccctcccccgacacactccacccctatcctgggaaacttaaccgagtgatgattctggacggcaggaacagctgagactctctctggagagtgtgccaggcggcagcttcccgccaccagctgcctgcacaggactgggaattgagacaacccccctctcagagatgaggctctaattacaatcagcatcaccttctagggaatttcttgggtgagtggctaccagcagacaagagctttctgctcactaccctcctggttagtaccgtagccagggattccagctgtggcctgggaagagaagaaacacctctttcaacagaacttgcccaaaccttggtaattcttccactttctcccccagtcaaggcattgagttcttttggatgaagggtgcttccttcctgactcttaggaccttttattttggacacattccaaatctctcgatccggctttgcctaatacatacctccttcttcttgcagttctcagaaatctttcagcagcagtaagaatgaccttgaactagtcatttcagaccacaccattggcaccaagaagtgcaagtttgccatatgctccttcattaaatacttttcactgtgcacttggatctgaaagaaatttgtagctaaagaccacaaacctccatgcctgccactcatagagtaacttcttgaaatttcttttgtaattaatgacttttgccccccctgtctgtgaaatgagaataggattgagaataataccatttatttataatggaactagtactgggctagatccaaagacacaaattccagttctacaagctattcatcttgtgattttaggccatttactgaaattcatcaccttcagattcctcagctgtgacatggggatagttagcattcagaacagagttgtaaagttgtaaccgaacgtaaatgaggttcgtgcaccaaagcacctttttcaggtctgggccaggaggaggcatagtccagagtttgctccctgccttccttgtttctgataatactgaagaaatttatgaaggaagcatttgaagacgttaaactggtagacgttaaactggttaaaacaataacaacaaaaacaaaacagaacagagaacagggtatgtcttgacatatagtcccacactgtccaatataatagctactagccacaagtggctatttaaattaattaaaataaaattaaaaatacagttcctcagtcacagtagaaataattcaagtgttcaatgtcccatgtggctggtggctatcatactggacaacacagataaagaacatttccattgcagaatgttctactggataacattgaaaggattctcacagaaattaccataatgacaagaacaagtttctcaagataaaacccagattccctttcgccatggagcacactatcttgtctcagtggcactgcatttaagacatacagtatttatttcaaaccataaccaagaaagcacactgtatgcccagatgtgcccacatcttcctcttagtcctgcacacgtgaacatgtgtctcttaaccagctcccgctcttcctgccaacctcatcaggggtgaaaggcctgtgcgtacaatttaggtgaaaattgagctctcacagaccttgctgccccacatggctttgtgcctggaaaatgatgggaagataacgccgaactctgtaatggactgtgggatgg

SEQ ID NO: 57818 - DNA, 1204 bp, Bovine  19866880984727
  misc_feature (1)..(1): n is a, c, g, or t
ncttatttgtctttccttataggaaatgaacaaatgtggtgcaaagtaaccctagagtcagttttgtgattttttttttaagtgtaattactttcccatatcattgcatttcctgtctaagtagaggtttctatttcatcattattgaaatgctccctggaagtgtgggaaggaagattcttcagaagtgaagtgacgcttcaaggaggtttcactttaaatggttgagaaagtgtatgtaaattgaggtcccttgaagaggcaactttgtccccctgggaaggagctgttttattgagaaaactcagagcatgttgtgtgactgtgcacagaaatagttagcaaaggcaactcttacttggcgctaatggctggtactggcttcccatactaatgagatctaccctccactgttgaaagtgaagcaggagaagctctattctgagcagcaaccctgtcactagtagatcagaccagactctatagaatcatttctgctcaaattatccttaaaataggtagaaggcctcacacaaggatgatggagagaagagtgcagtgtttatagttcttagggcttcccccacggctcagcgggtaaagaatccacctccagtgcagcagatataggagatgcaggttcgatccgtaggtcaggaggatccctggaggagggcatggcaacccactccagtattcttacctgaagaatcctataaacagaggagcctggagggctgcagtccatgaggtcgcacagaattggacatgactaaagcagcgtagcgcacacacacacacacacaccaatacacataagcatacttcgggggttgagggaaggagatattccacaaagctatttcaaactttgcattctcctcaatcacaaaacaccccggctttgctaattctcatctgcataacagtattacttcctgtatgaggtgcatcagttgacagacctggagaagaggaatccgatggctgctagccaccctgcagggctgctagctgtcccagatcttgcttttgtgtgaatcagaaaaaggtgcccttctgtggagcaggtgcaacctgtacttgggtggcagagctagtgtcagccccgctccacccttcagctggacacccggtgcccactgcctcacatggctgcatcctcaccacaggagctgatccacttggccggccttccctaacc

SEQ ID NO: 57819 - DNA, 3547 bp, Bovine  19866881004910
  misc_feature (1)..(1): n is a, c, g, or t
ntggcttttcttgaagacattcatttcaactttggccaagcggtggctttacttatgggcaatgggataatgtgatgattactgagcaaaatgttgaggctgagttggggttttggagctcagctgcctgagtttaaaacctgattctgctatgtggttgtataatcctgggcaagttactaattctccttatggctcattcttatgaagaaacaccttataagatttctgtaaagattaaatgagttaatacttaaatcacatataagaacaaagggtacacctgtaaaagttagctctcgttattttactaaaaaggtgagaccaatgtttttttccttgctatacaggcagcatctagagaattgtttggcatatagtaggtactcaagaaatatttattttataaataattaaattaagggatgcatacaggaattataagaggttatatcttgggagccaggtaagatttagattttgctagctcagtcctctatccagcttcatttagcaacaaatatgcaaagaataggagcatcagagtatttgggaggcaggggcctattataccactccttatacctcactgtgaatgaggagagtgagattccaagaagctaagtgatattatgtgaggtaactcatgatttgtcaaagctggtattagaatttatgcctcttagggacttcatcagcctgggtggagttatcccagaaatgatttgaacttggtcacttttaaaagaaactatctttttacagtttttttggaaggagggaaacattgtagaacatgaaggaccatctcctttattgacgctatgatctaacatggaatggtatcttcataaggcttataatgtaaatttgtatttcagcccttgttcctggctttcaatatggacatggattggaatcccaactctgtaatttgcaatctctgttaccttggggtaagttgcttaacctctctgagcctgagcatattttatccatgagattagttattacatagattcaaagggtcatcatgatgagtattaaggagctgatgagcacttaacacagggcctggcatagggcaagttctaattaagcagtagctgttattgtggagcacgttgtggaatgtctcacttaactctctcctttcatttgtgggattactagtgcagaccttggatctaccattgtttcaatatgacactttttcccctctttaagccttacttcctatggctgtcagctttgttgataattctcataaactgaccactggtcctgatttcctatttctacatcaaatctagaccttctgattctgcttttcaaaatcctcatcataaaacctcacttcacctctcacagctctactcacaactccttaaactgcatgcttttcctggcccatctctgctctgtccatggtactgacttcttagtttcacattctctactgccccactgtcttgctgctgctgctgctgctgctgctgctgcttaagtcgcttcagtcgtgtccaactctgtgtgaccccatagatggcagcccaccaggctcccctgtccctgggattctccaggcaagaacattggagtgggttgccatttccttctccaatgcatgaaagtgaaaagtgaaagtgaagtcgttcagttgtgtccgactcttagcaaccccatggactgcagcctaccaggctcctctgtccatgggattttccaggcaagagtactggagtgggttgccattgccctactgtcttaagctctccaaatcctccttatatttcaaagcagctgaagttccagctcttgaaaaagccttctatgattattccagtcctcactgagttactattctgagttctgacagtgtttctaaaacctgttaggatagtgcttggttttcacttctttggttacccatcagctgtgactgaaagaaaattgctgttaattataagtgcagtgttatatttggtgattgtatctgatgaagaacacatgtcatatattatcctaatatgaatttatcatattggcataataatgtcaataaattataaaaatgaagagtaaatatatatattgatttctataaaataggcacagatacatatttacagtaatttgctaaaaggatatcaaagtatttaaaaggatgtatttttcttattaaaatattcatgtaagtgggaaaagtgcacaaagatgtttttggtagggttacctaagttataaaaacattgaaaatactataaatatatgtcaataaagcttgagaagttatgatacatccatacatagaccatgtacttattgaaaagaacaaactggattctatatattgacaaggaatgctgtccttggacactatgtgcagaaagaagctacagagtagaacatatgactaaattttgtaaagcaaacacagatttcaaatatatttttatgttcctctatggatagaaaaaatctagatgttaattaaaccactgagaagttagatattggtaatggattggggtagctagaagagttattatgttttcaaaggatctatgcaacaaataaaaatcaaagtcctctatgttgtaagtttagaccaattataatatgtatttaaatttttatttaaaaaatgttatgcttgttttctaataatcttaagggttatgtaaaatatataaagtatgtgactgaaagaattgatatttttctcagtataaattttctctcagcaataagtgttatttgtatttccttcctttaatattgacattattcctctcaagaaccaatattcagtgtcttcaaattcataaaccaattaaggagttgggggatgttatttaaaagtctgtcatacccctactaacttttacactgactggttagaatgggtgctggctggtgtttcagatcaggcatcctggcagtccaccagccctggtctgaactgtgtgaattggcagaaggcagtctctgaaatctgttcttcacctttgttttcttgtgctcaatccctcccttttcccacccaacccagaatcaccagcctggaattatttgaaaaagactctttcacctagtgggcttccctgacggctcagcggtaaagaatccgtctgccaatacaggagatgcgggtttgatccctgggttgggaagatcccctagagtaggaaatgccaacctattccagtattcttgcctgggaaatcccatgaacagaggagcctggccacctagagtccatggggtcacaagttggacatgacttagcgactaaaccaccaccaccattcccataacggggtgcaagagacagtagctaaaaagaagatagaaaatgagaaagagatgttgaggagtgggaagagtgtgggatttagagcagacagatctgggtttgagttctgacttgttaattttctccttgtgtgacatggggcaagacaggtaatcgctctgtgcctctgttccttcctgtgtagaatgatgtcaatctctacttcacgaggcagttgtcaagggaaaa

SEQ ID NO: 57820 - DNA, 1280 bp, Bovine  19866881025441
  misc_feature (1)..(1): n is a, c, g, or t
naaaatgagagagctcaaagtgactgtattgcttgttttctttccccagcacactcaccagaggcttataatcattacccacaggatacatgtagttgtagagcagctgtctggcttgaggtgccagatgaaatgcaggaagaccagttaaatctgaatttcagatgaaaaacaagtaatgttttagtttaaatttgtcctaagcattgcatgggacattgttgatgttgtttagtcactaagctgttgttcaagtctttgcaaccccatggactgtatagcatgccagcctcctctgtccttggaattctctaggcaagaatactggaatgggttggcatttccttctccaggggttcttcctgactcagggattgaacctgcttctccagcttagcaggtgaattctttatgactgagccactggggttagcccaacctcagcttacccatgcataaaatggtagtagtcttaggtgttagagagaaaagaaaacaggtgatgtgatgagactgacttctgtagatatgataattggtcaaaacctcagtgaagctttttaactcaaatgattagaagaaggcagccccgtaaagactgtgcatacatgcatgtgtgtgtgtgtctgtgtgtgtgtgtgtgtttatatctgtgcaactacagataggacagaggagatgagggccagacaggatggcaagtaaaagtatttaatggggatagaggattccatactgacctgtttttttaacaaaaataaaagaaaccagattcagagtaaagtgaaagcctgacaattggggcaaagtaaaactaatctataaatcacataccgtgaagttgatttaagtggtgaacagaaatgtatgctaagtgaggaagaaaatacaaacactgagcttgaagttatgatcaaattaaaattataacaaatttcaccccattgatcccggtcattgtgtatctgaaggaggacagtgctatctcccccacctccaattcctatgttgaagtcttaactcccaatgcaataatatatttagagaaagaagctttaggtggtaattaaggtgaaatgaggtcatagagtggggtcctaatacaataggactggtagccttaatagaagagggagaaaaatctttctccctactggagtgtgctaaggaaaagccatgggaggacatggcaagaaggtgaccatctgccagccaggatgagaggctcaccagaacccaccccaggctggtgccctgatcctagacttctagcctccgga

SEQ ID NO: 57821 - DNA, 1846 bp, Bovine  19866881064512
  misc_feature (1)..(1): n is a, c, g, or t
natcactggaaacggtctttcctattaactcctgtaccttctcatggctagctctttataactgaagccagagggagtactgatctgaaccagtgtattttttacttttagttagcttgcaccttatccctagagaacacaattctggatttgtacagcctgccttttatccttgatcattttgatttgtacaacttcctgttgatccatggaacacttttatcctgtccaccacaccccactccaaagtccactgatttcttttgtgccttagatattattgaagaagttaaaaaaaaaaagatacttacataaaatatctgcactcgatccaactctataattggttccatgctttgctttcaatgcatttgctgccttctgtccaacttggatctgtaggtgggaaatgcagagacagatatctggtgttaaaaataaatctaacaatccagagtgtttgctattttgtccaaatccatcctctgagttccagactatctttctaacttcccactgaacacctatacctgggtcatctgctgatacttcagactcaacatactcaaatccagtttcatcatttcctccactaataaggctgttttgattttcatcattctgtcttatcacgtgccccatatgtaaattccgacaatcatctttgactcttctctcaaataatgaccaagttgcatttctaacatcatcactctatttcagttttattaactctgaaatggactgttgtcatcttctaataagttttccttcctcttaccaatccttaatcccagctgatcttctgacttcagggtgagcttttgtagagcaggactgtgatcatggtcctgctgaaaaccctcactgactcttggtttcccactgcgttagggtacactgctcagtgtagtatttaagattctctacaataaggacctaacccacctttccagcatcatattttcttgatcctaccctagattatagtcaaactccagttctcccacagttccccagatgtgccccatgttcttcagcctctctgccttttcttaagatatgccctctacctgggatgtctcatttctttgttgaaattctgcaccacctcaaaaccttctcaaatgccaagttctcttgagtaccgtgactagattatatctcctcacttttttttttcttacatagccctttcttcatactcctcttattgcttccctcttatttttctttaaaggtatttgatatttatctttcacaagctcatagattttcagaacaggaaatgacacccttctctgtacctatcaccatgtcacctgactgcactggaaacccttcagaactagatgatgtctaaggtctcagccttgctctctgaagaccctttcctgagatcagaaacactaactgaagtctaactgtattggctatgtttattgaccatgcaataaatctcctttcataccctatggacagtctaagtattccccaccctagattccctagtgctatattctagccacctgatgacttacaccactacttccccttgggttctacacaagacaccatgaaaatccccttagccaccacctgcctggatccaccattccttcaccccttagggcagccagactacactttcaggagcatcagttcccgacttcttcccttgatcagtgacagatcttattttagattctgtttttgtttttttttgtttttttttcctgctcctgtactgccccactgaatcctaatgtgtgacagtgtggtctttgggtagagtggatttaagcacagtgacattcaaaacgaaaagcaggagaggtaataagtg

SEQ ID NO: 57822 - DNA, 1072 bp, Bovine  19866881072527
  misc_feature (1)..(1): n is a, c, g, or t
nctaccagggaagagcaaatagtatacattcattcaataaatatttactaaaggctcgctgtttcaaagtaccacattctgaatacttctgactccattcacctaaaaacaataactgtgcacatcaaaaattattcttttttattttctttgtaaaaacaactttattaggaaaatttctgctaactttcttcaagttatacatttctataacttcttaagcttcacatccacacttctttacacaatgtggtataatttcaattttccctaactcagtcctccctaaaaataatctgaacaagtgaagcttcactataccaaaccagtatttctgttttcaattttggattgaaatatgcatatttttagatccagacctctcatccttcatatattcacccctggattgatcatcatgatccatgaaagtttatgaggtggaagtaaatataaacaaactgttggttacatttgctttagaaccaacattagcacttatttggggtgggaagtacacagatgtttgttagaatatcttctgtatttcttgcacaaatattaggaagctaccatgaagggtgctgattgagacgttgtcctgagctaaacaggaagatctggcagtaggcagtcaagaaaagcatgaataggtcacacatgcagaaaggaagtcggtgaaatatgtgggtgagggatctagcgctgtgaaggccaacattggccccatcttttagttgcatgtcatgatgagttggtagtatttttcatttgtggattggtgttttgttttgttctatggtctgttggcttttttatatctgctaaatacccagaaatcacccttcaactcagtcttaaatacattctctttaaaagaacagacatgctcataagtgatgagctttcaatatcaagctagaatccaattcttctactgccttacttctatttgtgttttcttaaacttctctgacaacagttcctaaactgtttaggttgttgcaaggaaaaaaaattaagatagaggtcagaatagaaatttttataatacccagggcaacaacaagca

SEQ ID NO: 57823 - DNA, 2361 bp, Bovine  19866881073263
  misc_feature (1)..(1): n is a, c, g, or t
ntcttttaactgctttaagtagggcaggatcagtgtgtatatggatgtaaaacccaggtggagaagccttctgattgaatcctgtttagctgaaagggtggtatttctggtaggatccaagaaacacagggcaacagctctcgaaagaaatatttgtattgctatgaagatatgtttaatggtttttgaaactggatacagtaaaaagtatatatgcatatatgtggtgtgtgtatgtggtattatgtaacacttcttttgaagtaaacatttctaaaaatagaattactgggttaaacaatcatttacattttttatataaatgcccaaattgccctccagcaaggctttgccacttatttcctcagtcttggggaatatattaatattttccagattttttttttcaaagagtacaagaaagaatttacactttcttctgtaacattcaccccaaaatactaaagtctcttagattttcttttttaaacaagatccagtaagatccatgagaagtgtacgtgctggtatcagagatgagatatacttggctcggctacttgctctgtgaccttgtccaagacatttaatctctatgttcctcagtttccttatatgtgaaaaaggaatagcagtacttctcctgcagtttggttgtgagaataaatgaaataggctacactttactgatgaagcaataaataaaatgatagctgcaactgtgatgtgctatttatatctctcccaggactcagggcactgcatctgatccagtctcatcacagaaaagcatatagtacccatgtgatgagttgttaatctcttccctcagttaagtattattactgttataataatgcattttatccatagatattccatgctaaagatgaaagtcaattgagacacagaaatttgtctcagaattgagagaaaattgagacaaagtcaattaagacacagaaattcaaatagaatttgttatgccaaattaattattatcatttaccataattcttatcattcagataattctgctagacagaaattgaatgtggagggtatcatatgctgaggactgtcctaatatgtcttatcttggttaattgcttatttcattctcccttaaaggacccttaaaggactttatttcattctctccttaaagttattaacttggtcttgatttagaaatttcactgttctgcgaaggggtatacccagactcttctccaattttggatccatggacattaacaaaggatattttggggattcaaagaagatcccacaaaataagcttatcctgaaatttctggcatgattgagtgccacagcaaagtccagaagtctggtggctatctgaaaattgtgtgattggacaatgtttcgaaagtgttattctgcattgttgaacttgattattctcaatcatttatttgtgaagttcaacagggtgtcctagcctgggtggtagagtagatctttaaagaatatgggagaagggacaattataattcattggtttagtctttcatttgtgtgctaatgaacagccaagagctaagagttcagtatcttgatgaaagaaacaattatcttaattagaggcaagcaaaggatcttctaattgataacctcagccctccctggctgtttcagatctaccagtggatgagtgagataagggagaagtacacggaagtggtgacacagcatttcctaggaatgacctatgagagccggcccatgtattatttgaaggtgagcgagaaggctgagagttacagccttattcaaggatattggcttactattcaggggctgctcagaagtacggacaaggttaaagagacaggacacagagatgctgacttttccaccctaaactgggcttttaaaattaacaacttgtaaatgcttacatattaatcatctgggtggaatcttattcggaagtaaagagaacttcggaagtaaagagaacttggaatggctgggtgacaccacgggcctgcttgctcagtcgctcagttgtgtccaattctttgcagtcccatgggttgtagcccattgggctcctccgtccatgggatttcaggcaagaatactggagtgggttgccatttccttctctaggggatgctcctgacctagcaataaatctgcatttcttcagactccttcattggcgctaggattctttaccactgtactacctaaggcccagaagtaagaacttactgcttagttttcttcctgctgggcctcacttgtccctgctaaaaccgaggaacttacaatcacggatggtggttgaaaaggacttaagacgctctggcggagaggtttccagactgt

SEQ ID NO: 57824 - DNA, 1840 bp, Bovine  19866881126726
  misc_feature (1)..(1): n is a, c, g, or t
nagttgactcattggaaaagactctgatgctgggagggattgggggcaggaggacaaggggacgacagaggatgagatggctggatggcatcactgactcgatggagagtcggacacgactgagtgactgaactgaactgaaaggaaatataacagtgacaatcaagatctagcaaagtgccgactgcttttataagattactttgagaatgcagccattagtttttcaactcattttccaaaacagaaaatatcaattactcactatactgtccactgctagtctgataaatcggagttggcaccgtgacagtggtgatggcaggtgctgaagtctcctcttcagatttctcttcttcaatccttggcactcctggtgcatcagaagataagtcattcaaaattttcctagaaaaatagagaattgtatcagttaaaataaaagtaacatttactggccaaatacaaagaagaggaaaagatcagaaaactgacagaaagttgagtgtttaggatagaatttaaaaatgttatagtttaaaatgtaaaaacttacaataataaacaataaaatatgcaacattaaactaaaaatcaatcagggcatctaaatgtcaaaaccatatgaggactagaaaaaacacagatgaatttctcctttcagtgaacataaaaaagacggtgattcaaaatccaggtgcaattaaagaagagatgaatagaaaaactgactataggaaaaacaacccttttgcatggcaaagaatgcttccctgctggctcagctggaaaagaatccacctgcaatatgggagacctgggctcaatcactggtttgggaagatcccctggagaagggaacagctacccactccagtagtctggcctggaaaatttcatggactttatagtccatggggtaaaacacttggatacaactgggcaactttcactttaatctagacactaggttatttttttcttttaaaccaatacaatcttatggtgtattggcttttttggcagccacatttaatcaatgataattaaagaacattatcttttttagatgaattcttaatccagaatcctgtatgggaataactgattttattttaaactcaagttcagaaattttaccattatcctcaacattttatcctatagtttagttcagttcagttcagtcactcagtcgtgtctgactctttgcgaccccatgaactgcagcacgccaggactccctgtccatcatcaacttccggagttcactcaaactcatgttcatagagtcagtgatgccatccagccatctcatcctctgtcgtccccttctcctcctgcccccaatccctcccagcatcagagtcttttccaatgagtcaactcttcgcatgaggtggccaaagtattggagtttcagctttagcatcattccttccaaagaaatcccagggctgatctccttcacaatggactggttggatctccttgcaggccaagggactctcaagagtcttctccaacaccacacttcaaaagcatcaattctttggcgctcagctttcttcacagtccaactctcacatccatacatgaccactggaaaaaccatggccttgaccagacagacctttgttggcaaagtaatgtctctacttttgaatatgctatctaggttggtcataactttccttccaaggagtaaagcgtcttttaatttcatggctgcagtcaccatctgcagtgatttgtagccccaaaaaataaagtgtgactattcgtttcactctatttcccttggctgctatgatctttcaagggttttattctaccatct

SEQ ID NO: 57825 - DNA, 2182 bp, Bovine  19866881171343
  misc_feature (1)..(1): n is a, c, g, or t
ncgggcctgtgatattccccatgtgcaaaaggaactgatgtaaagacagagagaaaaaaaaaaggcacctggggagaaatagagcttcccatgtgcctcaggggtaaagaatccacttgtcaatgtaggagattcgagttaatttccctgagtcaggaagacctcctggaggaggaaatgtcaaaccactccaatattcttgcctggaaaattccatggacagaggaggttagtgagctacactccacaaggagtcagacactactgagtgactgagcatccatacagaagcaaataacctcatagtcacagaaaacctggcaatagcccccttggttctgatggattgtccagtccctgtttcattttttcctggagcctaagggttgttgagttctatgagatacacagggattctttcaacaagttttaattttctcatatctgagtctgtcacttgttccaaaaatctaactgaggtattgtgtatcatagtactgtgtatgatgattaagtggtcaagattattatccagctactctgtaccaatggtgtcctgtagggaaggatgagtttctcatgctccctccaagaaagcagggcttctgccagaaaaaagctacaacaatcgctttgttcaagttcacttgccgtgcagttctattttctcttccatgtatgtgcattctctccaactaaactggaagcatctttagggagatgattgtacttactcatctttcttttcatcccctgtagcacctggcccgtgatactattgaaattgctgatggtgttcatgcaaaaagaaaaaaaaaattaactttctacttcaacaattttccatttgggcaaaacttctcttacctcgacttaggaaataatcacatttctttctctttttttgttgtaactgatctctcttcttagctttgtgtcaatgaggagataggtttatttagccagtaatttccactgcagaaaatcttggtcccagattgccctgcaaaagcaatatgttctgttttatttttatattacattatatttattttaattgcattctccatctggtcaaagatagcattaggcatcatagacggagaaaagaaacaaagagatatctaaccatgataataactggaattattattttttaaaactatcctggggtactataacctctaggaatgaggcgaaaacaatagcccttttgttagagagctctagaatgattctgtagagggagagagaggcggaatgaaccaaatggactcctagtgtcccctgagtggccctgagtggactcttgcaatggtcccacacctggaaccagttccaggacagtgtggaccacggtatgaaatgatacgtacaagctctaagctatctcgagcacttttactatttcccaagtagtttcagcaggacactaatgcacagtttcaatcacatattttattaataaactttagaagagacccccaaaggggaggtcatttccttctcatttcagaagatgtttctgcaaaactctgctagcaacgtggaggtcttccaaatgaagctaatattatgtcaatggtttagcatactagaaataaatcctaaattggatgcctgcagtggatggctaggcacttggcttctgggtcacgatgccagttgaggggttatcagggatgctgaatcatttattcctgcatttaaatctgaaaatgatgggactggaggggaaggtttacacatgaaagtttgccaagaaactgtgagtggtaacattccttgatgagagtccactcccccagccactccctacaagctaccacttaggatatttatcttaaaaaaaaaaaaaaaaaactcatccaaaactggcataggcaaatgatggcatttgttggctcagagattgatgattcaggggcatatatcttctggtgaagtctgactcagagactcaccatatactacaagggtccattgatttgaaaaccttttgtcaatctttagtgtcagacttttcttcaggttggccccaggctcaggttccagaaatggtttcacggtttgaaacatccttttcccatggcagtcagaagagaaagtgcctttcccagcctttaatcatagtagggaagcatttcccccaaaatctcaaagaaaagactctgcacttgtt

SEQ ID NO: 57826 - DNA, 865 bp, Bovine  19866881246750
  misc_feature (1)..(1): n is a, c, g, or t
naatgctacataaacattcttttagtatatagtgccctatcctgtcagtggggtagcgtctaattagtggaattgttgaatcctagtcagcctgcccagttacccttcccagtgactacatcaatttatagccaataaattggtggttgtgttttttcattaacactagtattagtttgtccattacttggttcacaatccctgataataagtgttgaaaagatgttattcttaggtagaaaaacatgtttcactaaatcgtttttctcttcattttggctactcaaactctcagctaagtttgtttaattatacactttccttattttgtgatagaatcattatatacatctaaatacacgttagttacttgacttcttttctttcttgttttaatttagtttttttgagagcaatcttaaatccttttaaaatataacgtgtataaataaatattaagagaaaaacaatgtttgataggatcagacttcagttttcagagtactttcctatatacatggtctcatttgagttttataacaattatacttacgggctagaaccatatatttttatttttacagaagagataacagattcaaataatagtttagtgatggaacttggactagaacccagatctcctgattttttagtttgcttctttccttccactttgatttcattggtatatagtcaagaagaaagctctgtgtgttgaatacagtggaatttgctcattaactctaattgagaaattgtggtttgattctgttaaccttctgattctttcaagttacccagcagtgttaatctcagaatactttttacatatttcttttttcccctttgtctaacataagta

SEQ ID NO: 57827 - DNA, 1445 bp, Bovine  19866881261510
  misc_feature (1)..(1): n is a, c, g, or t
ntaattttcttataaaatgagatacctatttactactaggtttgttgtgaggtttaaatgagctagtacatatacggtgtgtagaagttaaacactctccacagttaaaaaatgttagctactactttgaactttattcagttaaataccctaatcatacatacagaggagggaagcacacaagtactttgatcaaattcattgaatgtgggattttagtgagaaacatttatgttttaaaataaatttattttgagataattgctgagacatacacatagtaagagataatatagagacatcctatttatgcttcatccaggttccctccatagtaatatcttgcataactatagtaaaataacaaccagagaattgacattggtagaatccacagagtttattcagatctgaccagttctgcatgcactcgtgtgtgtgtgtgtgtttgttctttgccaagcctgttctccagcagaagcatctggacagaaaattaggtcatcaattcaaaatttagatattaaagaagatagttgcacaaattcctgtagaccacatgcttgaatacgactaccaatgtattcaaagaaagggcctctattggaagtacagcacaactagatttgaattgcctcttctttccatttccctctacccctcctcactcccaaggctttactctgaagaactaagacacaagagtagagagattaaaaaaataaaattttcatcgtgcttcataccagactatcaagaaagaggtagaatgtttagtgtagtcagtacagattttgaaaacacgttttgtcatcaccttaaggggccttggaatctgggttccttttcacttcaggttggtcaaggtaatctgatcaacaagggcagagaaagccctgcacactctctcagctccacaatataggtccaggtttactgaagattgcaggtctgaaatcaacaaacaggaaagtcctgcagagaaagcacctgtaggtccttaaactgatcttaataaagttctagcacagagaagaactaaaattcatctctcttcagttcctggtggcaatgccctttctctaagctagcctgaaaatgagatgggtatcatttaccatgatcagttaccaattgagacaagttgtggttcttgaagagaattttcccataggttcaagcaaaattctgggtagccagaaatcccagtcttgagcagcgattttcacactctggtgtatgttgaaatcgcctttgtttgttgtgttagtggctcagtcatttctgactctttatgatcacatggactgtagcctgccagtctccctatccgtggaattctccaaacaagaatactggagttggttgccatttccttctccaggggatctttctgacccagggatgaagctgggtctcctgcactgcaggcagattcttaccat

SEQ ID NO: 57828 - DNA, 1416 bp, Bovine  19866881315658
  misc_feature (1)..(1): n is a, c, g, or t
nagagcacctgtgcatgctaagttgcttcagttttgtctgactctttgcgacccaatggactgtagcccccagactcctctatccatgggattctccaggcaagaatactagaggggattggatggggctacacagattctttgtattcattttggtcattgttttggggtgcttgacattgttaatgaactagagtgctagacatttaatttgaatacactgcatggcttcaaagacatcaatcactgaattgtttatgcacaggcatatgagattatacttactaattacctgaattttgtttgaaagaatattttttaatattttgaactgagtgacgcaaaaaacaaaatgaagcaactggtaaataaagcattctactaacaaacaaaattaataaaagctctggaccccaagtaatcttattgaagtctttttatttcaatattcagtgttaccattaatgatatccaaactctaacaaaaaggcggtaagtataaattttttctccaattagtatattttctattgtattaaatattaagactgtaattgataacactttgctttgaaaaacaaactaaaaataaaaacagcattataagaaaagaacccataaaaatatttttcctcaagatgacaagacctgaataaggttcatcgcaaagaagtccaattagcaaatttatttgagttccagacacaatgctatttttatctctaattatgctcatctcgccaatcatttctgactattaaaactgatggttgaaaaccagtttgaatttcagctatgttagcaattcacttgcttttctagatccaaagaagtctcagtaagtgttttcactgaaggtttagggcctccttaaatgataaatcttatccgaagggttaatattagaagacatagctgcatctgaagattcaccaaatcgtgaaaatggcggaaacaagtctggggaaggaagtgagaaggggaaccagcctcagctttaacttgattagaagaatgagcacattaagagcggccattctttgactaccttttctagagggtcatgcttttacttctgtgctactttcactaatgtcttacattaatttcttaaaaagtatcacataaactcactatctgttatacatggttgaagagatgccattcttgcaaggcttgccccttactcctcctacaccctcggtactacaccagcggggctgccaagtttttctgatgctttgtgagccatctagtctctggtgctgtcaatcctgtcttcgtagaatgcaagcattggtagacaacatgtaaatacatgaacatggcagtgttccaataaaactttgcttgtggacactgaaatttgactccaagtcatttttcaagtgttagaaaacattattcttcatttga

SEQ ID NO: 57829 - DNA, 696 bp, Bovine  19866881357176
  misc_feature (1)..(1): n is a, c, g, or t
nttatattgtttgaggcttaagtgatttaaacaatatgattattgcttttaaggagatcataaatcttaataaaccagacatgtcaccaatttgtggcccctttgattcattttggagatactatttaattgtccaggattgaagaggaatgtttttaagcactttacagccagcatattttcttaacatttcctagaccaggctccttaaagagatagactttatgttgaactttgaatgaaaggataattagttggggagaaaatcaagtatatgggcatgagggaaagttaatgagaggaaaaataggtgaggaaaaccctttaggagagatggcaaaagtgcctggagatgtttgtagtcttccctggcaagtttcgtgtaaattatggtgagataaggactggttgaaaaagagctgtttggtaaccttggcatcatcttgcctgcatatgacaagtttcttgcatacttcttgatcctatgaaagtaactaccgcagggagattttggtgaactgaatttgtgctgcaagacttggattatcttgttttctatcaacttatgctttgggatcctatcatagaagttgcagatatggcagtaatagatttgcattttttttcttttttagagactaggtcttggattggggcttctttggtggctcagatggtaaagaatccacttgcaag

SEQ ID NO: 57830 - DNA, 1228 bp, Bovine  19866881413821
  misc_feature (1)..(1): n is a, c, g, or t
ncgatacaatcacctatatctgttgcattaaatcctcattgtagtatcctagaagaatctggtagggcatgttaatccaatgaacaaatctagggcctgttagacgatcatttttgcaaggtttttaaaactgtacttatgtctcttggaattttaaagcagtccttttctggctaaatgtgaacatgcattacaggtggtacacttcacttgtgaatgactcccattgctactaataatacaaccggggaatacagatgaaccaacacaaaataattctaatggctgctccaccagtcagtttcaaaactgctaatgggacctgagacttttgagttttttgtatactcacaatattagaatgattatttacttccatttccctactatttccagagtggaaattcaaagcccttttgaattttcttgatgaaagtattcacacaattgtgttttaagatgatgtatttcactctactgagaggggacgtaagggagggagtagaaaaatatttatttcagagccccaaaccctgaatttgaatactttgggtctgccacttaccaattgtgtgaccttgtgtaggtattacacaagggctccaaaatcactgcagatggtgactgcagccatgaaattaaaagatgcttgatccttggaagaaaagctatgaccaacctagacagcatattaaaaagcagagacattacgttgctgacaaaggtccatcaagtcaaaagctatggtttttccagtagtcatgtatggatgtgagagttagaccataaagaaagctgagcactgaagaatgatgcttttgaactgtggtgttggagaagactcttgagagtccctgggactgcaaggagatccaaccagtcaatcctaaaggaaatcagtcccgaatattcattggaagaactgatgctgaagctgaagcttcaatactttggccactttgatgtgaagaattgactcactggaaaagatcctgatgttgggaaaggttgaaggtagggggagacagggaagacagaggatgagatggttggatggtatcactgacttgatgatgagtttgagcaagctccaggagttggtgatggacagggaagcctggcatgctgcagtccctggggttgcaaagagtcagacacgactgagcaactgaactgactgtgtaattgtttttctgtgcctcaatctgtaaatagagaaaaaaaaaaa

SEQ ID NO: 57831 - DNA, 682 bp, Bovine  19866881421948
  misc_feature (1)..(1): n is a, c, g, or t
ntattaaagagactcttgtaacattctcaattcactcattaaaatgataaatgttagtactgtattcatatgaaataatataaacaagtgttatcacctacagggaaaactgaggaccaaaaatagtaaataccttaacccaggctatacaacctgccactaaattaaaatctgtcccattcccttcagcttgtattctatttagcattaatatagtttagtagtattcttactttgttcactcagccatcttacaatcaggtattaagtgcccatagatttcaggtgctgtgctatagaataacccagcagttaagataggaagggctgttcagataaggaaggctaaagaaagacagggcattaaatgagattagggctcctgtcagtggtcagaagcagcatggatgattctgagatacaaagtcacttttctcctctggaaaggctgttttttattgatgctgttcatcttttaaaattatgccaatgtgataatacattaatttatataaatagaagccctaattcaaggtcaggcatatcagcaggatgaaattaaatacctcagtctggaactgtagggggcccatcgaccactttcaacctcctcagctctatagataagaattctttgaatttatacaatagcaactgaaatagggcaattttaagacattaa

SEQ ID NO: 57832 - DNA, 1802 bp, Bovine  19866881587136
  misc_feature (1)..(1): n is a, c, g, or t
nctctagacagtgtctcatttttccactgtggatgtctcatgacttttgtgattcatttcatagcttttcccaatttttccttataacactcagtgtttttatggcctgttgaatgttgggacagataaaaaggttagatggaaaccaactaaaaagcctcacttcattaggaatttgattgagattaatttagctacaggtatcttcaagtaactacaggcaaggtgaagctcaaatctaagttttaactggagtagccctgacttttgtgatgcctgttcaaattttattagtaaagagatgaaacttctgatactggaaaggagttatcatcaagctggctatcctgggaaagaaggagaatatgcaccaagaagctcattcaagtctgcatatgagaagaaacatttgggaaggaattgggatgtctaaatttatagctcagttggtaaagaatctgcctgcgatgcaggagacctccattcgattcctgggttgggaagatccactggagaacggataggctacccactccagtgttcttgggtttcccttgtggctcaactggtaaagaatctgcctgcagtgtgggagactgtgttcgatccctgggttgggaagatcccctggagaagggaaaggctacccactccagtattctggcctggagaattccttggactgtatagtccatggggacgtaaagagttggacaggattgagcgactttcagtggtttgtgtaatgcctcatttcaacttcgtaacaaccctaaaaggcaatcactcttatccctgttttcccatgaagaaatgaaagttcagaagtacaaagggatttgcccaactaagggcagggatttgaaccaaaaccatctttgccaagatccacactctctcctatagtttaaggttgcagattaactttgttcttttattgtgtcttccagaaagcttcaaaactttatttttttttaatgaagctatagttttaccctgaaaaggaaaatttgattattactcaatgtggtctaaatttattctaggagatttagcaacaacttgaaatttcattttcggtcaccaaatttcactaacattttacaaattgctttccaaataactgatttttttccagatctatctctgacttccattttttattaagctgaaatatttgaggtgcaatcactttccacaggcattttgcaattgtaggacaaagatgctataaagtaccagaaacttggaacatacagttattaccacgatgatgctaaagttgagcatttggattgaggatttatgtattacagccttacttctgggaatgtgtgactagcagatcaagtacaaagatatggtacaggaagtgcagtctctcagccttctttggagagcctgtttattcccaatcctactgctaaactcaagagttactcttaaatctttcaagtacccaggccagaagaacaatttcaatttctcttctgaactttgttcatgagttttctgtagtaatacatgtgctgccaataatttggattcaaattgtgttatactttacatcttcacatcccttacactttcctgctgtacatagaagctgtgcaggatctcttcatgttgaaatggcacagcccagttagttagtctccctagagtgtaacatgaggtcaggggcaacctggccgcagtacatggatttctaaaattaatcatgataaaataagtatggcttcttggttgttgcaactatatatgaggtggacctagagattttcatgcttaaactaagtcag

SEQ ID NO: 57833 - DNA, 820 bp, Bovine  19866881998480
  misc_feature (1)..(1): n is a, c, g, or t
ncttctctggcttctagattcaaagattttttttttaacataggaatcagttctactaatcatgcgtgaggttggctgtcttttttaccctgttatcgtcaggcaatcaaagatgtaaaaagggcacaagaggtgcaggaggggtggacaagggatacttgaagggctttgtaaggaagagcacagagaggagaaggaaatggtcagcatgaagttcattttggggggtctccgatatatttataaaacgcagctttgtcatggaatccaaacatctctttttctggacataatactcatcaaccaccaggcattaagctgggccaatgaaccatcagtggggcaggaggccagtagctaggagcagcattataatttcaggtttccacatctttgacttacagtcatgtggtaggagaaagaagcacaaattaaaataaaaaaaaaactgtcaatggcttcgaaacactctttttctatacattacactctgaaccctggataaagcgtgcttcggaggaccactacaagaaacaccatgacaggtttttcctttcaaattggagatatcctggaatgctggaagttaccaatttaaacgagacaatggtttaatatgtttcaactgtccactaaagcactgctttgaataacctgtcctcttggaagcaaactagcttcaggttatttcccagaaagcctgttcactccagcaggctccttccaaccatctctgccatttcagagaggatggatacttgataacatgcccaaatgactaccgctctccccaccccacaacagacaggacggttagcgt

SEQ ID NO: 57834 - DNA, 1662 bp, Bovine  19866880164375
  misc_feature (1)..(1): n is a, c, g, or t
ngttcacgtattgctgaagcctggcttggagaattttgagcattactttactagcgtgtgagatgagtgcagttgtgcggtagtttgagcattcttttgcattgcctttctttgggattttaatgaaaactgaccttttccagtcctgtggccactgctgagttttccaaatttgctggcatattgagtgcagcactttcacagcatcatctttcaggatttgaaatagctcaactggaattctatcacctccactagctttgttcgtagtgatgctttctaaggcccacttgacttcacattccaggatgtctggctctaggtcagtgatcacaccatcatgattatctgggtcgtgaagatcttttttgtacagttctgtgtattcttgccacctcttcttaatatcttctgcttctgttaggtccctaccatttctgtcctttattaagcccatctttgcatgaaatgttcccttagtatctctaattttcttgaagaaatctctagtcttccccattctgttgttttcctctatttctttgcatgttgactctaattcccagaaggctaaaaaattgttgattctagaaagtcttgtcttgcccttctttgaaactcacacagcgtctagcatggtaccctgcatgcagttaaggattcaaaggtttaataaactaatttttacagattatgacaaaccaagaatgcagagaaattggaaccctcatacattgctggtagaaatatacaatggtgcagctgctgtgggaaacggtggttcctcaaagttaaacacagagttagcatacaatctatcatttctattcctaggtgtacagagacaagaaatgaaaacacgtgtccacacaacaagttgtaagtgaatgttcaccgcagttttattcacaaaagctacaagaagaaactcaaatgcccatcaaccgatagataagcaaaatgtggtatattcatacaacagaatattattcagctatgaaaatgaatgaagtactgatacatgctccaaggatgaactctgaaagcattatgctaaatgaaagatgccaaatatgcaaaacaacacatattacatgactccatttatatgaaatatccaatccagagagacagagaacaattagtggttaccaggggttggaggaggggatgtgactgcttaatgcatttgaggtttgggataatgaaaaggctctggacctgacagtgatgatggttggaaaacactgtgagtgtacttgctgccgtcaaactgtacactttaaaatgtttacaacagtgaatcttatatgtgttttgccccaatttaaaaaaaatagtattacagtgcagttgttaacagaaatcataatattaaatataaacagtgcactacatcattctttttaggttttatctaaataatttttagataaaatgctttcttcctgcacacgcatatcagaactgcctatttgaatacttgatccaaccattcattcacaaacatctgtcaaatattttagctttacaaatcctctgacttcctggctacttcccatatgcccagcaatctacaagatacttcataacatgatctaattttacaccttgtaataagttgctagagaaggatgtccctgccagggaccttatctcaat

SEQ ID NO: 57835 - DNA, 1914 bp, Bovine  19866880386278
  misc_feature (1)..(1): n is a, c, g, or t
ntttaagccactttttactctcgtctttcactttcattaagaggctctttagttcttcttcactttctgccataagggtggtgtcatctgcacatctgaggttattgatatttctcccagcaatcttgattccagcttgtgcttcttccagcccagcatttctcatgatgtactctgcatagaagttaaataagcagggtgacaatatacagccttgacatactccttttcctatttggaaccagtctattgttccatgtccaattctaactgttgctttctgacctgcatacaggtttctcaagaggcaggtcaggtggtctggtattcccatctctttcagaattttccacagtttgttgtgatccacacaggcaaagactttgctttagccaagagtctgcttttacagaccaatctgttatcaaaccagtagtactggctggtggtatagttttaagctctcccaaagacagccccaccagcaccactcctccaattgagatcagctcctctcatctgaccaggttgacccgctgaactactgacaggaagagcgagctcctgaagactctgaaggatgaccggaatagggatttctcagagggcagagagtgtgagaagctgaaagatttggaggataatagcacacctgaaccaaaggaaaatgagaggaaggctgtcatcagaatggtctcgctctccctgtagaaaaggaaagggaggtcctctctcactcactggaagcagagcacaggttactgaaagcaatgggatggcaggagtatcctgaaaatgatgagaatttccttcccctcacaaaggatgacctcagagagtaccacatgaagacagagcagctgataagaaacggctttaggaagaatggcttcttgcagtcgaagttccaacctattctccccttggaggaccacttgcagagcagagtttgaggactcagacacagagacaagtagcagtgagacatctgatgacaatgcctggaagtaggcatataaatgctcacagttaaatctgacccagtaaactcagcttgtgtgtttagggattatacagaagaaattgttcttttccttttcttatgttattgttgaatatttcatgcacaggaaaaatagtcgtatcccaaagagagagcgaacagttggcttgtttagcttttggttgttgttctccctgttatctgcttaatagagagaactttgtgtggtgggaaatatttttaaaacacaccacacatacacacagtatatatggggcaatgcacaggatagagctggcagtgcagagaggaagacacactggtctgcagcagcagcttctactaccagcccttggggcactcacccctgtgctcaagcaatcactgtcaatgacaaagtgactattgaagttataattgtatcaaattaatgctaataatttggatattttattttatttctggctgctcaggtaaggttagcccttaaccaaacatatgtggtttctcccccctctttttttttctttctgggtacagctgtaaaatatttggatttgctgggctattcttgaagccttgatattcagggtggattgcaaaataaaaatttttgtgagatttcaaagattaagattactttgataacattatttacagatttaaaagatgtggttatcacaggtctgttggggggaaagctactgcataaaataactcacttgaaataaatagtttgcatcagtttggggggaaaaaagttttaattttaaaaagcaaattcagtgtatttcaaacttacaaaggctcaaagaatttcttataagtagaccctcgatcccaggtctcccacattgcaggtggattctttaccatatgagccaccagagaagcccacaagtggactcata

SEQ ID NO: 57836 - DNA, 1392 bp, Bovine  19866880488641
  misc_feature (1)..(1): n is a, c, g, or t
ntggggcagcacttggtgttgtctgctcctggttgctccagaaaatgctttcaccacagacatggtggggactggcgagagcggcctgggagttgggagcagctctactcttgccccggagaaggcaatggcaccccactccagtacttttgcctggaaaatccatggacagaggagcctggtagactgcagtccatggggttgctaagagtcggacatgactgagcgactttactttcactttttactttcatgcgttggagaaggaaatggcaacccactccagtgttcttgcctgcagaatcccagggatggggaagcctggtgggctgccgtctatggggtcgctggagtcggacacgactgaagtgactaagcagcagcagcagcagcagctactcttgccctccattggtaaaccctgggaggaaagcaaagagtcactcagtcattccttggggcttttggagtgaagatttgtgggcagcttgactatgctactgatggacttgcccgtcacaggctcacttcattcgcttcttccattgccccttggggcttccctgatagctcagttggaaagaatctgcctgcagtgctagttctattcttgggtcgggaagatcccctggggaagggaatggctacccactccagtattctggcctggagaattccatggattgtatagtccacgggcaggcagagttggacaggactgagcgacttttacttttcactgctcctcaaattaggcaagttctttaacttcactaagctccagtgttctcacctgttacatcaggatgtaaacatgtattctaggattactatgaagatgatatatgataacacatgtgaagagtttagcacagtgctttacgcttaatgagattttaaatattagttgtcattgtggctaactctgtatcatccagacttcaccttccccaattctctctcttagacttctaagaaacctaagaaatccagctgtgagacccagagccaggagtgtttcctgtctccttttcggaaacctttgactcaactaacgaatcgaccaccctgtctggacagcagtcaacatgtaagcctgagctataacctgtcggtgtctgtgtgtgccctcttttgtttagggaggctccctgaatcctctctcagtagccatcagatgctttagtgggagatttgggcctggccacagctcccggggcctggaaaaggcctgacctcttttcttagagatttccttagtgtacctgacttggaattccccttgttatagctacttgggcaccaactctcaggtggctgggcaccggctgatgacaacaaggtgcagacagtgaagaccttcccatttagacagggtgtggaacccagcag

SEQ ID NO: 57837 - DNA, 971 bp, Bovine  19866880498646
  misc_feature (1)..(1): n is a, c, g, or t
ngaatgcctttgctgggccccgtcaaggcctccaggacctcagtgcaagggaaaaaggaaaaaagagaaaaaagatagcagaaagagaaagacagaattggtgctgggagttgtgggcagcccatgcctcagcccctgcaagctgatggtactgagcatgggcctgtgaggcctgggcccatcacatggtgctgacataatctgcgaaggcttgcgatgagtcccacgagtcgctaaccacatggcaggtggcccggagccgccggatggcttccctggctgtgactgcatcctggtccagccagttctggaagaggcgcaggtgaccaaaggccccacggccccagcgctccagccgcttggcgaactccagaagcccatctggcttgatgcagttggaactggtaggggtgaggatcagaaacccaggaatcaatccctggtctgtgtccctgcagctttatcccttgtcattccccacccccacgggtacctgatatccagctgacagagagaggaggatgaatcttccgagaaaacatctgccagggccagtaggccagcattccctggggagatggggagaaatgctcatgacctttaccccagaataggaaacaaaggtatcccaacccaattctggctggagagaagcccagtctcctaaagccccagcacaactgtatcccaacccctgtcttcccagtggagaggtatgtgccttcacccactgagtttctaggtcagaggactggctccttccccctctccctcctcagggccctgtccccacccaggcggttccctggcagccggaggcccttcaatgtggagttgcccttcatagcagcaaccatctcgggcagaaattgggctgggcgcttctcaaacagacggcagaaggagaaggtaatctctgtaaagaaaaatggaacaagttctggggcagcctagaactggtgctgtcccac

SEQ ID NO: 57838 - DNA, 1202 bp, Bovine  19866880527382
  misc_feature (1)..(1): n is a, c, g, or t
ntgtacatgttcccgtcgcccttgattttgctgcagaagcagcagctgtgacggttcagctccatgtctgcccagtggcacatcttcatctctgcctcttcagctgagcttagtggcacatctgtcttcagcagaactgaacccccgcaggaggagagggcaggtgagtcagaatgtttctccccaaggataggatctccttttcatcccacgaaggcccaggtctctctccagcccagggcagggccagcctggctgtcgcgcctcctcagcagagccttggctgtgtccttgagacggaaggagcccgtgtccttaataatgcaggtgaacccttggccaggtgccatcatgttgaggaacagcaccatggcctcatctatatgaggcacgtgcatgcctgctaagttgcttcactcgtgtcctactctttgtgaccccatggactgtagcccgccaggctcccctgcccatgggattctccaggtaagagagtgggttttcgtgccttcctccaggggaatcttcccaacctaggtaccgaactcaggtctccaatattgcaggcagattcttcactgtctgagccaccagggaagcccaggtcagtttctacttcccggtaagataccactccactttttccacacctcaaagggcttgatgagggggctgggcttccagttatccatgctgtattggggggcggaaggggcgggggtgcaggggtcgtcaccactgtcctgaccaacccatacctgcaggaatggctcagggagcccaggccccgctgaggcccacacagctctgcccatcacactgcagcgtccatctactccacgcccctggtggccccaccctggcccacacttgtttttaagaggccaaaaagcaggacaagtttaaattcttggcctccaaatcaaattttggaaagacttaacagcatcaaaattacattattgttagtcatgcctattcttctcctatcgttggggcccccaaatacccctaaatgctgtaggactccagctctagctgtgaagctgacacagttctgtgccctggcacgtggcaaggactctgagatcacaacctggtttcatgatgaggagataatgactgtaagtgatgaatggcaagggctttatgttctgtctgcaaatcatgatgggaatcttatggtacaagatataaaacaa

SEQ ID NO: 57839 - DNA, 1027 bp, Bovine  19866880594278
  misc_feature (1)..(1): n is a, c, g, or t
nctgacttatggccctaatgcctaattttagttaggagacagtatttgagctcttctgatggtgttaaatgcttaatgaaagatggcagaaataggcacattatacccattttatgaattgtttgaacccaagtgtgtagagctgtttatcagcagcctgtcctcgcaggcagttaacttgtatttgtcagtatgatgaaatgtggtgttggtatggctgcagactttaacatgatactggaaagtcaaataacatactgctcactcaaattctgtgcatgctggagctggctggagtgcggcatgctcattggtgaggaatggtgagggctgtgcttctttccacggctgtattgtgggaaagcatcttcttgagcatccttgcttcaaatggactgaagtaatttaacttttggtattttcttggccttattagtattaactgacagttggcttaaagaacccaggaatactggctgaggcctccaactgactctgagtagatgggagtttctagccagtgcatcaaagtcagtagttaatttcttttgatctgaactgtgcaggttgacttttagaagagaaacacagcctgttggtcattgaaggtctgaattatttaagattatgctaagtctggattagactcgagttagactgttaaccactgactttattatttatattcagttcaaatgttacccaatttggcttgaatctggcctgtcctaccccagaatataggtcatttgacatgtttattggaatctctgacttgtcctgtcatctttgtctgttatgtttagtattctcaatactgaagaatttttgcttgcagaaaccgagggctcagaagaggaggataaagaaaatgacaaggctgaagaaacactaaatgattcagctcttgaaaacaaggtgaattcttatttgccgagtattatctcctttcttattgtaggactgtggtttactagtgtaggcataattattatagatagtcatttctggttagggtttggggacc

SEQ ID NO: 57840 - DNA, 1190 bp, Bovine  19866880699997
  misc_feature (1)..(1): n is a, c, g, or t
nccccaatagataagcaacgtcctgcacaactcagcccggggccaggccagggctgctcaatcctgcctctccccacactggcacctttccaaggtctccctgacaaggcagctctaggctcagcttgaagctggagggatggtaaggtccctgcccaggaagctccaggccttcttcaggttctgccaaggcctgtcctccatcttccccagtggcctgtcccagggaggaacacagcactcagctgctctccctgcatctacccatgttcctgatcccaccacccacccccaaacccagtcactcacaagttctgtaggaaggtcgtgccaccgtcactgaacagcccacccgtgcccagggtctccagagcatgaggtatgttgcttggcaggaagggaaccagctgcagagatggaggcatgtaaggttcccagacctagaaacccttgggtcccacccccaaaaacacactgtcaaggcagccctcagccctcacggtgccctcactggagccacaaaggcacccttgttggcctgtgataactccccataagatgtgtatcctgagaggagtctggaaccacatataagcctgtctcagatgaacggccccaagcctgccatctcagggcgctgagaacccctggacagctgtgcaccactgtttgtggttgacgaagaaggaccactccatgcagctcccacatcccagctcagaggtgaggtcaccatcaagcatgtaccccaatacttctgatcagcccctttttactggtcccccagggatcgaatttgcgaccccaatctcagaacaatcagggtgcaagggtgccagggatgggtggcagccatgggtacctagaaggcttccctgaaggaggggcaatgccaggacctttgggttccctccccccgcccagcataccgtgtggccagcaacctcgagtctctccttggtctccagcagggcccgcttcatggccggcgtgggcatggtatagttgtcagtctcataataccctacacgcaggggctgagagctcctgtagatctgggggcagcatgcacgagtcagagtcaggtcaggagacggtggcccgaagcagggctcccagagctcagagccattactcagccccagacacagctttgaggctgctgcctagatccccaaaaactacctcca

SEQ ID NO: 57841 - DNA, 2750 bp, Bovine  19866880791790
  misc_feature (1)..(1): n is a, c, g, or t
ngggcaggaggagaaggggacaacagaggatgagatggctggatggcatcactgactcaatggacgtgagtctgagtgaactccgggagatggtgatggacagggagacctggtgtgctgcgattgatggggtcgcaaagagtcggacatgactgagcgactgaccttgactgaactgaagagaaatgaaccaatctgaagaggctacataccgtatgattccaattacatgacattttggaaaaggcaaaactatggagacagtgaaaagattagtggatatcaggagctggggtacagagtgatgaacagatgggacacagaggattttagggcagtaaaactactctgcatgatactacaatgatagatacatgtcactatacatttgtcaaaactcatataaaaataaataaataaataaataaactcatataatgcacacgaagagtgaaccctaatgtaaactacgggttttgggtaataataatgtgacaatgcaggttcaacagttgtaacaaatgtactaatctggtgctggatattgatggtgctgaaggtggttacatgtgtggggatagggtatatgggaactctgtacaatccactcagttttaccatgaatctaaaactgctctaaaacaggtttattacttaaaagaaaaaaaaaatcacaatgaactagaaaggttccactcccagaatggctaagtgcctacttaattgaccttactatagttataatctagttatatatgctgttgttgttcagtttctaagtcatgtccaactgtttgtgaccccatgaactgtagcaagccagcttcactatgtccctgagtttggtcaaactcatgtcagtgatgccatccaaccatctcatcctcctggtcacatagtaaatatttaatattgaactaaactgtatgaaatgaacctactttcaaatcaacagaccccatactattcaacatattccagactttaaagtgaaaataaagagtcttagaatattctgtggatccaaatatcaggatgtataagattttagaattaatccaatatgaagtttgatctttctctacatttggttaaatgcagagtccacagtcatgaactgggcttttacatcagttcttcctcccggatctgaggcctacttagattttctgcagtatttaagagcgatgatgatgatagctaacatttatggagtactggggagcctggtcggctgccgtctatggagtcgcatagagtcggacacgactgaagcgacttagcagcagcagcaagcatgttatatgtattaacataaagctagagcccgcagacccagacaggctgaaaaggccaggtgatgttctcgatcaaagtctctgagtagggaaaaatctagtcctaaattctgtcagcaatctaaataaagagataatcatatcagagagaagctgcaagtagtgattactgcctggcattcacattatagttgtgatactatgttcaaggtttgcaagtgctaaattaatttctacatgatgaaaagtccaagtcagatatatgctgagtttttacaaagttcatggttagaatgcactatctgagctaacacctagcccagttcattctgagggaaaagtccctatgcacaatgagaaatctggctttaaaagccaagtaggtctagttccctgggtctccccgtgctcttgctggtgtcttctcatattagagttagtacagtatttgagaattctactgattcttggaagagggtcatgagcacactgaatagctgggtctgagtgagtctgataaagtgagacccttatctcaaggacacagatcagcttcagaatcactcgattcttagggtgctcaaacaactattcctcattcatcctcagagtcactctccaaagacacactaaactataagcaagtagacaaactcaaatggaacagacctgtcttatttggtttaatgctatactgtttcactactttggtacctttttattgcccaaagacaaggcttgtagattatcaaatccaggcagcaatggcttcctatggatccaagcctgctctatttccattatccctaggtctggaacttctactgtaaacagcatagcagtgaacagtgtagcagagcaacaactccttccacaaagctgagtcccctggtctgactcccctgggatttaagaatacatgtctagactaaaacatatggctaactccaatgaggtcttctgcctcataatttttatatattctttagtcagatgcaagtacatcaatccttatactgcctagaagagcccatattccagatgaatgcctgagatcagtgattccacatactggaactgaaataaatgtcaacatgaaacaaacagttctctcactactgttgacttctgttctaacagagggcaagttattaggagtcctatgaggcagaaaaccatctgtgtgagccctaattcttgggcaaggtaggacaaaatgttaatggaggcctcatcacatggtcccagatgaccggagtcataacacactctcaacacaccagaacaggggtggtggacccaagacatgcataagaccaaaaggaatattgacaggtcaaggcaagaaataactaagagtcaaaaacagactgaacatactctcccacagaaagcatgcccgtgagttctgtctgcttcagtcagccaagtaagaaaaaatatatcgtaaca

SEQ ID NO: 57842 - DNA, 1289 bp, Bovine  19866880814854
  misc_feature (1)..(1): n is a, c, g, or t
ncaaagggagttggcacctgcattgttcagtgtcaactgtactagggaactaatttttaaaatttagatgtcatttagagttctttagaaaagtggaaattcttttttaaagtgaaaaattaatatttttgcttataatttaaaaatatattgaaaaattttaccatcctattatatcttcatattttgtactcatctgagaaatatgctgaagccagctagagggataatatataggaaggtggagatttcttttgaatatatgtaattaaatacaagtagaatttcatcatggagaaggaaatggcaacccactccagtgttcttgcctgaagaatcccagggacaggggagcctggtgggctgccgtctatggggtcgcacagagtcggacacgactgaagcgacttagcagcagcagcagcagcagaatgtcatcaaatccaaacaggtagcagtaacaatacaggaaactaacgtcattttaaaacaggtgcttatgtgatccttaagtttttttcctatcttgtaaataagatattgtagttaaatattgtatttgtatagaaagctgtaccactactacacaaatgctgtgcgtctgtcaattatttttcatcatctgtgacatgtctattatatatgattaaaaaatagaaattcatatttaccatctgtctgtgtttagtctaatgatctcacttagtcttctttaggatttaacacattaagatggttaaattgttttttgggggaaaaaaataacctgcaaaatgaaaatttaaatagaagcaaaatttattatatatagtgaaataacattatttggtgtactcagacaaaaagttagttaaacaacttggtattattttagatgtaatctaacaacttaaactattaagaatgctttacttttattgacatatatgtttctctaggatattttagtcattgaacacaacatattgtctgttgcttgttaattgatgaatggtagtaaatttaccacattttcacggaagccaacctaaatactttgaatatccaaagcttaactttttggttttaattctgtggattaagttttagtctccatggtcattctgtgccaacattggtactgggtatgatattaatatctgagaatgatttttgaccacttacttttcttgagcctcttgcctaaactaacccactttgaatgtttctttttggctgagaaattaccactgactctgtttttctctgctgtggtacgtgtcagaatctctgctcttgccgaggatctg

SEQ ID NO: 57843 - DNA, 741 bp, Bovine  19866880882882
  misc_feature (1)..(1): n is a, c, g, or t
nggaaaattaagcataaatattttatcccaaaacacatacatctatcctaaatgtacatttcacttattcagaaccctatcctcaatacagtattaaaagtaatacccatacatacaatttaaagattatcttgtctttttttgtgtgtgggaagaaaactatttagaaaattttaaaggttctcctacacaggtttttaaatggtaatctttaaatgacaacttgtggggcattaaaaatatttttctaaactactaatctcaagaattattttttaaactccattcaactataatacttagtctaattaccttgaaatatccccccagtaccattctgcatcctgaagagaaacagaactgtcctttattccatttgtaatggctgaagtcattggcttaggtggctttggtggaagagctagaagagaaattaacattattattttgtaatgtaaattattatttactctctaatttcctcaaatacagttcattaaccaatgtacattaaggttccagatcattataaatcaaaatagggattattttatgttaaatgttaaacatttgccaatgaaagaatccttttagaactctaccaataattgcctgaaaaaatgaaatattcaagctatctgcatttttttccttcttataaaatactaactttttgttggatgcctttctcctaggccagggtcgggggtagagaacatctgtgccacccttctttcaagg

SEQ ID NO: 57844 - DNA, 1012 bp, Bovine  19866880939342
  misc_feature (1)..(1): n is a, c, g, or t
ntaaaatttaaattttagcagtgtacaaaaaaaggatctactatatttacatactacttaatttatattttaagaccatgtggttctgtgactcaagtttcttttatgtcctgccattttctttgagtcttctagtgttgttccttaaagtcctaaaccatctctgcagaagaaattttttgtcagtataaattcaaattggagaatattattgaaagattgtgaactgagtaaattatccccactctgatctgacccagctgccactgttgtttaaacttaatctttctaaacagctgctgtttttttctgacactctacaagttcatacctgcctacggaagccctaaaggcttaatggaaacaggtattccctacagacagttgaaacctggaagagtttaaaaatcaaatactcatcctgggattgcaaaacaccaaaaatcaaaacaaaagcatatctaggggaggaactaaatgacctctgacagcccccaggattctataatcttagaccccacctcccaattagtcttagtgataatatgtgaagaaaacaaccaacacttacattaaaaaaatttttttttcctataattcctttcttcagggaggaggtaaatgacaaattgcgggacatgccagatggtaccttcttggtcagagatgcctcaaccaaaatgcagggagattacactttgaccttgcggtgagtatttttcagcattttgtctagtgttctactagcatgatttatttctggtatacaaagattcctgtattttatttaaatctttatatacaaatttcttcatatttttatttaatttagatacataattttagttgtttggctaactatctttttcctacacatttaaatatttaaattaatactaaaaaggcaacaatttttatttttatgtagcagtaaaacaaaaagccttaaaatccctaaatatgagaagtaagatgtatactgttgaccttagaggaagtagaagtcagggca

SEQ ID NO: 57845 - DNA, 1905 bp, Bovine  19866880984777
  misc_feature (1)..(1): n is a, c, g, or t
nacgcttactccttggcagaaaagttatgaccacctagatagcatattcaaaatcagagacattattttgccaacaaaggtctgtctagtcaaggctatggtttttccagtggtcatgtatggatgtcagaattggactgtgaagaaagctgagcaccgaagagttgatgcttttgaattgtggtgttggagaagactcttgagagtcccttggactgcaaggagatccaactagtccatcctagaggagatcagtcctgggtgttctttggaaggactgatgctgaagctgaaactccagtaccccgaagctgtaaaaaaaatatttggtattgtaggaaacaaattccaatgtttgatgatgagctttcattttttgattgttaaatgtatttcattttcatggaaataagtcttttcgatattgtttaaaagttgattaaaacatctttttcaacattactttaggaatatctgattttaatcttcgtgttgcattgcaaacacttttgaaagagtactgtgaggtgtgcaaatctcccaaagagaacaaattttgtagttttctgcagacatctaaggttcgacctcggaagaaagcaagaaagtacctgtatgcagtaggtgagaacccttttaaaaagtaatataaattatctttattttcaggatcaaaacctttaaaagttttgttattattaaaatgtgagaatatgcatgtatgtcaaataggcatatttaatttcacatacaggctgcagatttagaaattgcatttatatagtatagtggacacatctaagaataaagatatttatttgatgtctattatttggtgatttaaatctttgcgttcttagatacccaattattatcaaataattgcctaagatatgtggctttaaaaagtaatatttgaattctagtgagaaataggaaaataaatctcaaacatattaactattcacagcgtctgagatggtctttagggataacaggaactagtggtctccaaagtgtggagatgcaggacaatccaaaggaatattgtatggacattttgtattttattatagtgtagtatagtgtagtgtagttttttggccatgctgtacagcttgagggatcttagttctctgactaggaatttaacctgggccacctcagtgaaagcacagagtctgaaaccactggactgccagggaatttcctctattaaaaaaaatatttaaaatagaatttaaaatgttgatatatatcaacaacaaaattgtccagatttatatacataattaatttatatataagaactttatgtataacataatttatactatgtatgtcattgcatgtgtaattttatatatactgttatatataaattataatttttgagtattcattaaccttttttataatgggatgttcagttaaacaaggctttcaaccctcactattttttaattgaaaaagatattaatagggacttccctggtggttcagtggttaagaatccaccttgcagtacagggaagacaggttcggtctctgggtggggaagtaagagctcatatgctatggagcagctaagtctgcacactgcagctgcttagcccacaagctcgagagcccatgtgccacaagcactgacctctcaagctgcagatactgagcccaggctctacactagggtctgcatgtcacaatgaaagatctcttgtgacacaactaagactcagtgcatgaatagaaatcacaatgaaacttcctagataacaagttcctagatttacattttatctaacatttagttatgaccaggaccaggtggtagaatattgtggttgaattcattgcatttaagccatcatcttttaggacttggtacatttaagaataatggat

SEQ ID NO: 57846 - DNA, 1025 bp, Bovine  19866881035856
  misc_feature (1)..(1): n is a, c, g, or t
nattcattgaagctacagtcgtccactgtttagtaactggatcataacattcagtacagtcaaaaatcattgaatctttttcacctgagtcaaataagagacacatatgagaagaattaataatgttattagcctaaaacccccaaacaatattcaatggcattctgtgttgtcagaattcaactattacgtctgattttatactcttcattaaaatttatttgcccaccatgtgttattttgaatcatagcactgtcatttattaatgtccacttaattaagcaaagtagactattacctgtttctaattccaccacccaaacaatccatgtaatttttggggataaaggttgcattttgaaacttctatattttcacagcttagacagcaggctctgctacaatttgagttttaatgcaatgcttatctaacaacaaacagaaaatgaaaaaaaaattttaaatagcacttaaaaatagaattttaaatataatatacctagaagaagttaatgcaatcaaagattgtatatggcttggcccaaaagtttgttcagctttttctgtaagatgttatggaaaaatccaaatgaacttttggccaacccaatataagacctttatggatataatttataaattttatttagataaatttttaaattagtagctcagacagtaaagtgtctggctgcaatgcaggagacttgggtttgatccctgggtcgggaagatcccctggagaaggaaatggcaacccacttcagtattcttgcctggagaattccatggactgtagccctaccaggctccaggctccagtccatgggatggcaaagagtcggacacgactgagtgacttcacttcacttcaaataaatgaagagatgtatcatgttgatgaattataagtgtcaatgtaaagatgattactcccaaaatgatttacagatttaaagaaattccaatatttaagaaacctctttttattgcattaaaatacacataacataaaatttatcat

SEQ ID NO: 57847 - DNA, 5009 bp, Bovine  19866881058946
  misc_feature (1)..(1): n is a, c, g, or t
nacacttggatggcttctcatcacagtcaagtttttttctttattaaagcatatttgatatacaatattatataagttacagatgtacagaagagtgagtcacaacttttaaagggtacgctccatttatatttctcagtcaagttttaaaagcccaagttcttacaatgtcctatacagtcttccccaccatccacatcattacttgtcttttaaatctgactatatgatagtttcccctcactccacttcagccacactggcctccgacctgatccctgactgcctgacacacatgctcctgtgtgtcatctggtattccctctgccaggcatactggcatataaatcttacctcccatatatctacctgactagcaccctcacttccttcacatcaggcccttcctgtcctagtatctaaaatagtttccggcgggaatccatggtggtccagtggttagaactccactcttccaccgcaagagagcatgaatttgatccctgattggggaactaagatcctgcatgctgcatggcctgaatgaatgagtaaataaatatataatattgaaaacagcagctccctcacccagcactcatatttttgttctctgctttttcttcataacatttatcaccatcactatgtattccacttatgattttgtttattctttgttctctcccctcccttaaaaatgtatactccatgaataaagggagttttgctgttctgttgaatgctatacctgcctggcaatcaaatatttgctgaaaaacatgaattaattaatagacatgaacgaaaacatttttggatgcttaatatggtctgggcatcatgttagctgctttacagttgttaattcactggactctcaaaacaatcttattgaagtagggacaaccatcattgccgtttttaggcaaggaaaccaaaacacagaaaacataagtaaattgcccaatgatatatgctaggaagtggcagaagccaacatgaactctggcaatctgattccagaaccctctctcttcacagccccactatattgcctatgaatttctaactagttaatacaatctaattaaaagatatgatctatgagttactttaagtgtcctaatttttaaggtcagtcattcaaatcataaatcaagtcttaggcttaatttaccaaacttaatttactaaactttgaaatatggaatttataattttataaatgctttctcacactcatttatcagatgtactaatttactctattccaacacctacaagcctcaaataaggaaactgtcaaccagagatgttagcttcctcatcttctggaaagcaactgttaagacaggaaatggtctgtcatatttaactctcaatactatgtaaccctgtgaattccaatttataaaatgaaaatgggtttcataatacatcactgtactaactagattttagttttgaaaaagaaaaaaattaactcgctaattatctttatttccaaatacagagacaagaactttgaaaagagctatggttctccaaattacttttcagagtggccactgttgtttgccaacctagaattcatcccctcctcttccttcctaacagaatccttcccctgataatgcctcagaggaagtcaacaccactccagattccacaaacacggttatttcgatagtaatcactattgaaccactcatgactggttcaggaatagacatatgacccaattctggccaaaaagctgtgaaagaagcctgctacaggcttttagagaaagtttcctctctctgaatacagtggcacagaaagagacctcttccttctttcagaagttgtgtgtatagagacagtagccagttccagggagggcagcagaactgggcaaggcaaagaatatgggtttttactgacattgttgaatttctgtaatcaaccaacgctgaagcttattacatgagaagataaagtttcttatttcttaagccatgttgaaatgaggttctgctgcttacagatgaaaatatactaattatatacttttttatgaaacatatcccaggacgaccaggacaaatttcaggaaaagaagtctgtagttcattttacaaatccttgttagaagttcaatgtgaattataccatactgaatgactcttctgtacagttagaaagctaagaaggatacatgtgaaagaatgaactctaaagcagtattcctctaacacaatcattttgatatggccttctccaaaataatttatatacaaattttaaattttgactcatgatttatatttgcctaagtttaaaaaagaaaagaaactagggaattctctggtccagtggttaggactcagcactttcacttctgtggcctgggttcaatccctggtcagggaactgagtaacatctgcaagccgcctggtacagccaaaaagaaagaaagaaactacaacaataactacctaagatcatatagcctggacttgttgccctatacccttacacacaggtagacaactaaactggtccacaaacagaacatcagacaggaaatcgaaggcaggataatggtggatggtatgacatcatagtgttgactttggctttgtgttggctcatagtcacagggcacagggcagtttttacactgacatgggacatacaaaatggaatgatctagcaggctagacctagtctacttccccttttattaaaaaaataagataaccctctcacttcatatgaacttacaaataatgcacaaggagccaaaaaagataccatgggcgaacaatttgaaaattgatcttataaggctctacggttgaccttaccttgttatcccaagtcaacttctacacaatctaaatttaattggtatagtaacacactaaacaactacatttaacccaaactttcagaaacttactattcacttttactacttcaaaatttcaaatacggcttttatgcaaaaccataaaattttgctgataacactatgtattgcattttttcattattccttttgttacaataaattatccttagaactttaaagatcacatgttgataataaataataccaacattttgaaatgagtcacaaaataaaactggttgggtccacaggcctaagatttaactaaatatttagacactgggtgtttaagcttatcttgttggggaaataaattacatttgtgaaataattaatgccataacagaacgtgattttgtgtcaaaataagagaccagccctagatcattaaaggcgttcagtgctggaatttttagaggaagaaaaggaggaagaaggacttacaaaggatccggatttaaagatggggtaggatgagcataatctaacataagcagcagcataagcaaaaggctggagatggaaataagcaaggtatagtgaagtgataagcaaggaattgggcaagaaaaaaaatgagaatagaagattagtaattaagatggaaatgtaaattggtaccatattactaaagattacatatgtcaagtttaagagtatggcctctgcttaaaataaatggagagttgctaataatttctaaatagagccataaaacaatgaaaataacatttcagtaggattaatctggctgatgaattcaggatgaatttataggggaggggaaaaagaaattagaaacaaagaaccagttaggaggtaccagttaagaacctgggcgttggttaggcagacagacttgctctgctacttgctgacaactgaataagttagtaaacacatttgtgtcagtttcccgtctgtaaagtaggataaaagtcgtgcctattttataaagttgttgtgtggctaaacgaaataatacatatgaaagcatttaacatagtgccaggtctacaataactactcaacaaatgctggcaactattaccttattacaaataatttcaaatgtgaggtgatgagcaacaaaggcaatagaaactaaaaagaaaggatgatttgagtgatatttccatagactcatgagagtctagaaaagaccctagggagttcttccaaaaacaaaatagctccagtttaaatgtcaaggatgaagaaaagcatgcagcaagatatctcaaaaggttttgactacaagcgtatgcaaagagatagagttaactgaatattagcaatatgccaggatataagctacaatgaattgagtatattacatgtgccaaagggcttcccaggtggctcagtggtaaagaatctacctgccaatgcaggagcttcaggagatgtgggttcaatccctgggtcaggaagattccctggaggaggaaatggcaattcactccagtattcttgcctagaactcatggacaaaggagcctagctggccatagtccatggggtcacaaagtgtcagacacaactgagcaggcacacatgcagcacacaacatatgccaaacactgtacaagatattgatatagtacttctaatctccagaacaacttcgaacggtatgtattaattcaattctacagaagagaaaatggatgctcacagcaaagtaagaagcaaagctaggtttgggacccataccatctgtttccaaagcctgtgttctttctactacattcaggctgcatcctcctttaatatcaataaaaattatatcacatagacatatttgtcattatttttctatatactttgttaaacatggtgaccataaagatgtccaatattttctacattctaagaaaaatacaaagcatgaaaaaacaatgagaataaaccttaaaagcattaataagtgaagacttaccatacttctaatgaaacatacttagatatactataaactataatatattaaaatgaaagcaatgactaatctttttcgataagaagatgcagaaaaagttggcatggcttttttacatcatttgattatataaacattccttccttattacaatattattaaaa

SEQ ID NO: 57848 - DNA, 877 bp, Bovine  19866881076992
  misc_feature (1)..(1): n is a, c, g, or t
nactggagtgggttgccattcccttccccaggtaatcttcctgacctaggaatcaaacctgggtctcctgcattgaaggcagattctttaccatctgagccaccagggaagcccatattatctaattaaccgggataacttaactccctacttacttccatatatggagagatagccattgacagtctggtatacagaatttcttgacccagccctaatatctgtgatcaagaaattagttcactgtttggtttttttttcccccaataggtgagaaatttattaataaaggaatcttttgatagacctgcaagggggcaggcaagggggctttgccaagttttttgtttttttttttaatctgtgttaggtcttagatgtgactccttgcggctggagagcctagttgcttttgcatgtgggatcttagttcctccacagggctcaaaccacgtcccctgcattgggagactgcagactctcaaccactggaccaccagggaagtccccaagtttttaaattaagcagcaactgtgggttttggattgtagacacttctgtttttctggttaatactaggactcatgtaaacatgacagatctgggttcatagtattctcattcagccacttactggttgcttacattttgtaaggtgggaataatagctagtttggtggttttgtgtgtttgtgtgtttttagtgcctgctttgtgttagggacagtgcccagctttttacatctattagcttatttaatttttatagcgaccctatgtagttattataagccttagatgagtgaactgcactataatcaggttaaataatttgtccaaaatcacataactaatacaggtagagccagaattcca

SEQ ID NO: 57849 - DNA, 1121 bp, Bovine  19866881172975
  misc_feature (1)..(1): n is a, c, g, or t
ntgaagtactcttgcagctttccctcctcatttcatgcttgctttggctgctaaactgacttttttgttacttagaatgttatgaagtgtgaatgctttgtattgtatcattggtctaattatgattccatttcatcaagatgtataagcctctaattagcaactacataattggcacgtctgacttgagttgtactatcatttgaggattctgctgtgtctgtaagattgatctaacggtattaataaccacaggtatagtccaattaatcgttaatacttacatatatatacacacacacacatattatgtaattgactgctttgagttttcttacgtttgagatgttcaaagacccattatcaatatctgtagctaattctggttaacttccttctacctgtgtgcaagtccttgtactccagccagcacaagcatggtaaccagaagtgaattggctaaatggtagcaccactgggctgctcattgggcttgaggagagtgtatggaaaaagcacagaactgaactcagttttaaaaaaaacctctcatgtcttaatctttagagtttctcacatacattaaactttacttttgattccaaaatacagtactgtgtagtaggtagtatcactccagttatagtgatgaggaaatggagggttagaggttacgtgacttgtttgggatcaaacagtaaatcataggaccagaatatgaccctaggtctgatgtgaatgtgttcttcccagaatacctcacactgaggaagtcaactttaatcccttcctttaacccacttcttgtcagaaatgtatgtggtagcactagcctgcagaaatcttggaagaggttttctcttaaaaccctgtgaagaggtatttaagagtcattgtgctgctttgcacagctctcttgccaccttgttttgaagatgctctaagatgagagaagtggtgtctctaaaacgttgtttccctttctctgaaggatgacttacgacaaacaagattccattttcaaagaaacttagaaaataaacagatctcttaactgaggccttcagtgcatttctgttaatacctgggcacagattaccaggttaaaaatagggctttct

SEQ ID NO: 57850 - DNA, 1115 bp, Bovine  19866881191084
  misc_feature (1)..(1): n is a, c, g, or t
nttctggattcaagaaggaaagtcttcctcttcaaacttttccgccttatcttttttcttctctcccctaatatctgtaggtggcttttcctaaaaggcacattctttcttggagtggaagctgccattccagtggtgatggtttccagtgccaaccccactatgctggctcataccatcatgacctaatgcagagccatgccaactagataggttccctgtgattccagcatatgctcccttagagacaccagagtccacagaatcatggcggaacagggagggctggtgccaagaatctcctattatctgaagaggtccattgttgaaaatgccatcagaggaattatgtctacaacagcttactccaaatctaccatctccttgggataggtgccctccatgtttttcaaaagttgctgtaggtgacttagctgaatgtggtgttgagaattttagccaagcaggaacaaagtcatgctgcaccatttaaatccagtgtctcttttcaacaaggtgaggcctccaaccttatggccaggatcccagagtataatccctgtggtcctgcttcctgaacttctttgagctgccagctggatttccatgaggttctcttgttaagagggtacttaattaggctggccagcagaatgccttacgatgaagcacaaagaagccaggctctgtgtggatcaatctctcagtcccctcaactgcttatcttaaaccatctacttcttgacatatttcccaaaggggaaggaaaaaggggagagagagggggacataaaacgtatttgttccatttaaaaaatgggggaaagggaaagagctatatcaatgttcagctcattcaacttccttgagtgatgacactatgatgttgcttaaatagatgatacgtggacatctgcacagtgaatgcaaatgctgttcataacaaggtcatagcttagaaagacagaatgacttctgtttggtcaaataatgtcattgaagtgatagatcaaaaataaaacattgaagagctataaaagatcttctgagtagtcaactctagtagcaaaacatccatccacattacaaagccattaatttacaaatctcattat

SEQ ID NO: 57851 - DNA, 1663 bp, Bovine  19866881224367
  misc_feature (1)..(1): n is a, c, g, or t
nggaggcagtttttgagatagatctgaagggactgctcccaagggataagtaaggagccaggttatataggagtttttgcaacaaagactaggtagttaaaacatcaaagattactgctaattaaagaaaaccagatatctgaagttaatgaatttaatgcttttctatgcatgggaagcctcaagaggctgagctcactgaaatcattcctctgatatgcaccttaactctctagagagactattctcttctttctcatcctgagtcccctcagggtgtaccactggcttggctgcagtggctgagggcttggcagcaggcagcctatttatctccattctgagttctcacaggggttaccttcggggttgtctgcagtgatggctacaatatcgtttgtttactgagagggtgggtgacatttttcattcacacaggccagctaatcaatgtagaagaaataatagacaaaaatcattgttttttaaacatcatagcaataaattatataaataagaataatcaatggaataatcacataaaaaatgttggagaaaaggatatttgcatagtttcaaagtatctcctcagagacttctgcttccaaccataatttaccttctggcacacacaaaaaaatctaaaaatctgaacaaaatatttgaaacatttttcaaatgttggaaaacagacagaacaagagagttatccttgagagaaaggaagaaaacaagatgagctgtaaaatggccctgggatttccatggtggttcagtggctaagactctgtgcttccgaagtagagagccaggatttatttaattcctggtcagggaactagaaaccagaggctgcaactaagagtttatatactgcaactaaagatcttgcgtgctgcaactaaaacccggcacagccaagtaaataaatgagtattttaaaaaaataatgaaatcaaataaaattatcccagcttgcttcatggagtacatttcctgccacagttcagcattctccctgagttgcagagacaaagttgagaatttgaggaagccaaggaggacagaatttttaggataaagtaccagagaggatagagcagcacagaaaagagagaggtgaaaatggtgagcaatttggaaaccttcagaaggttctcctcacatcttcatctgggtactgatcagtacatctgtgtaagaaaactgagtcacggaaaaatcctcatctcacgtaggccagaaacattttatgtcccaaagagccagaatatgtcatcaggtagagtacaataagagtatgtcaaggctgtatattgtcaccctgcttatttaacttatatgcagagtacatcatgagaaatgccaggctggatatagcacaagctggaatcaagattgccgggagaaatatcaataacctcagatatgcagatgacaccacccttatggcagaaagtgaagaacaactaaagagcctcttgatgaaagtgaaagaggagagtgaaaaagttggcttgaggctcaacattcagaaaactaagatcatggcatctggtcccatcacttcatggcaaatagatggggagacagtggaaacagtgagagactttattttggggggtctccaaaatcactgcagatggtgattgcagcgatgaaa

SEQ ID NO: 57852 - DNA, 1039 bp, Bovine  19866881378519
  misc_feature (1)..(1): n is a, c, g, or t
ngtgggattatctcacccttgaagatgtgcatgcctctgaaattcccactgcaaactaagtgtctgaagataagtggaccagagtttgaattagacttaggttagcgtctaaagatttctacttgtcaagtgagaagtctttctgttttcctttccagtagaatgaataatgcttgtaaccctgggagaaaaaagtaaattttgtgtttggtttttgtagccctcccaggcccaatacttcaaagcatcttacctctgctcaatatatattacttggagaggattgaggaaactgccctcaagaaaggtgagtgtttttctgtctctttctcagtgattgtaagcaaggcaccatgatgttcttcaggtaaatatgacacttgatacctgcatagaacttcatgcttttcaaaaagtaccctcacacctattttcttatctgatttctcaatgtcctgtgaaacacaaaacaagtatttaatccccattatactaataaaaatgaaaccacaagcacaccacaattaagagcaaagccaggtagaacacagatcttttgttttgggcatttttggtcttgcctcatggcttgaggatcttagtttcccaataagagattgaactcggcccctggcagtgaaagcacctagtcctaaccactccaccgccaaggagttcccaagcccagatcttttgaaattttagtttttctattttatcagactacctcctaagctcctcattaaatacatgttaacagctaacattcatccttgtctcaagcattgtcttaggcactctatctggagaaacttatttaatattttcatcaattttgcaaaatcactattattaactacattttgtagataatgaaactgaggtacagaaaaattaagtaacttgctcaaagtcacacagctagactgttctggtatttaaacctaaacagtctgtctttagagccagtgctctttaccagtctgccatattgctcctggaacctagaaaaggacattaaaaggctatgtacttcagt

SEQ ID NO: 57853 - DNA, 2247 bp, Bovine  19866881422001
  misc_feature (1)..(1): n is a, c, g, or t
nttttgtgaatgtttacctaaaattggaggttttcatatgctccatgcagctaataagaggttattaggcactgaaaatttacgaaacactcctttcctttagggaatgggagggggtggagatcactgaaagagattttaaatagaggggaaaatataatcagatctgcattttcagattattcaggaaaatagtgttgagtttggaagatggcacataaaattccatactggggacttccctgatggtccagtggttaggaatccacctgccaacgcaggggactcggtttgatcctggtccaggaagatccaacacgttgcggagcacctaagcttgggcgccacagttactaagcttgcatgccacagctactaaagcctgcatgcatagagcctgtgttcactaagagaagccactgcaatgggaagcctatgctctgtaactggagagtagcccctgctcactgcaactagggaaagccgaatgcagcaacaaagacctagctcagccataaatcaattaattaaaataagtaaacaaatgaaggtaccggtgttcctcccaaaaacttaatactggccgactttattctttctacaaacattcaggaacctactgaacagagcttgtactggaggatacaagaatggaaagattgcaatgggggtctatcgtcccgagtccagcctcgtggaagtgaccactattcaaacaaattacccaacgattaaatcacaattgtgttaagtcctgatgaagaatcaggagtggctctgagagatggcacggagatagaaaccgttcttagagaaaggtgagacatgaaggtgagagaggaaggagatgaaagatgattccagttttctggtttagagcctgaggttattgacagaaaaaggagggcggatttaagaggaagtgatttgccatcttttgataattaagtgctgtgctgtgctgtgcttagtcactcagtcgtgtcctttttttcgcgacctatagcccaccaggctcctctgtccatggggattttccaggcaagaatatcggagtgagttgccatgtcctccttcaggggctcttcccaacccagggattgaacccaggtctcccgcaatacaggtggattctttgctgtctgagccaccaaggaagccctgggtcagagattctctaggaccctttaaaactcaacccaaactaaataaaaggtcccctgatggtccaatccctgcccctcagtcacgactgaaactaacaatctcagcttcagccatactgcactatttgtagttcctcacacctgtgtgtgtctttgtatatcctgctcctcagcatgagagtcgcccacactggacttaagctctatagaccagagacgagaatacagtgcttggcagagagcacatgtcagtgaatgccaggccacttgctctgccatctactagatgtgtggattcttttgcttctgcttgggttcttgggtagagctcctcagtgattctttgatgtcaccaaagctttacaatgcccctgctggaccttgctgtcaatgttctttgcatctggggagagtcaggggttagagtaccaagcctgggtgcacacccacatgactagccatttgggatagattcagacatgctgtgtctgccttcatttatcttgagacccaagtgggagaccctaaacaagggactcgaagagtgggcatacttgtcaggcttgaggtcacggtgcacgatgccgtaattgtgtaagtactccagggctagcacagtttctgcaaagtacaggcgcaccatgtccacaggcagggccccgatgttcttcagcagcgtggcacagtctcctcctgcaacaagcccaggccaccatgaagcagggagccagtgccctgctccagatggtctcagaggccccagaggagatggcctcaccaaactccctggcgctagagacggtgattctagcacccctgctgctggggtgggtgggagacagactgtagactggagcaggagcaagaggagtcggccgggggcggtcaaggctgctgttcaggccaaagaaggaaggaacccaggcctctatgcctgtaagttgacttgttgggacaggaataagttatttttgggtgggaatcctgtttattgtaaacacgtctggctgatatttcagcatgtgttatttccttcccatggctgtcctttagttttagtaaagtaacatgtaaactccca

SEQ ID NO: 57854 - DNA, 1053 bp, Bovine  19866881536501
  misc_feature (1)..(1): n is a, c, g, or t
nctgatcggtcccacacgcttgactttagttgactgtaacacccttactactaacaggaccactctcctaaattcttacagtcccgctggccaggtctcaattacaaatctcttcttctacctctaatgtctctcgtgcagcaggatcaggtggtgccagggtgtcctccccacaggcccagaatactcacacaaggtgctgatctcgggatcttgcgcagctggatcaggtcaggtttgatactattcatttttttatctatttctcggttatccaaagcttgtttcttcaaatcctgttcaagacgcattttgctatcatgaatctcacccagacgtgatttcagcttgtcataattcatcataattctgtgaaaatatttgacatattaaggttaaaacagaaaccaagcagaagcgttctacagcatgcacacggtctaacaccctcaatgcggtggacatctgctgtttttgcctggcacatctttattctcacccctctgggaagagcactgtcatgttccctgtagcgaagggctcctgttcccatctcagattcattggtgaacatcacacaacccctcctggccaagaaaagtgttctcttccatcctatcccagcctcaggccacaatgacttgttcagaaatcagaataatacacaaagtaatccaatgacagtcaaatctacggctcttgctagcaatattgtagacagattctctgtttccactgagattgttaagttgttaacatgtgattcttagtctcccaacagtttatactactgccttgaagggaaagcctgcctgaggatgaagccaacacagaagaaaactgagccaacagacagagaatgaggagaatccggacgacattgtttgggccctggccccagccatgactgaacgagtaaagctgggttactatgtgaactaaatgtgctcacaacatgtaaaaggaccagtgtctgggacatcttggtaaagcactcagtagaggatggccctaagcttttccaccacacaaagtttttgccgtgctctgaac

SEQ ID NO: 57855 - DNA, 727 bp, Bovine  19866881905823
  misc_feature (1)..(1): n is a, c, g, or t
nctggcctgagtccacgtttactcctatcttccccagtttaataaatgacaagccaatatttttttcagtttctcaggccaaaagctcagaatgatacttgaatattttctttctcacacatttcacatccattccactagcaaattctatgctagccgagttaagataatgttataattatctgggagagaggtgatgatgacaagtactaagaaagtgatagtcctgatgaaagaaagtgaatgaattttagagagactcagaaagcagaaacaataggaactgttgattcatctgggtagagacaaagaaagaatatttgagaataatttccaagattctggcttggacaactgatatagggaacaataaagaagtttgaaggagattatgattgatcacttagatgtatttgctgttaagtaccaatgagatatctatggaaggatgtacagtgaactattgattaaattggtttagagcccagaagtgagagctaccagtatttagatgtataacaaatacaaactgttcaataatcttggggttatacatgtgatgacattcttttctgttttctagttagtcactcaggcccctcatgtcaagttatcaggaagtctagtatctcctccttaattatttaagaactccaaagttcctacatattctaaaggtaaggatggtagttgtctattgctatataataaaccatctcaaaatgtg

SEQ ID NO: 57856 - DNA, 1336 bp, Bovine  19866881948651
  misc_feature (1)..(1): n is a, c, g, or t
ntgggactgggacatgtttatgcggatgccagaacaacgctgaggccgagagtgcattatccctgacgtgtcctgatcctaccgctttggcatcattggcctcaacatgaatggctacttccatgaggcctacttcaagaagcacaagttcagcatggttccaggtgtccagctcaggaacgtggacggtctaaagaaggacgcttatgaagtagaagttcacaggcttctcagtgaagcggaggttctggaccacagcaagaacccttgtgaagactctttcctgccagacacagagggccacacctacatggcatttatccggatggagaaggacaatgacttcaccacctggactcagcttgccaagtgtctccgaatctgggacctggatgtgtgtgacaaccaccggggcctgtggagactgtttcagaagaagaaccacttcctggtggtgggggtcccagcctccccatactcgatgaagaagccaccatcaatcaccccaattttcttggagtcacccacaaaggaggagggaggcccgggagctgcagaacagacatgagacctcctccaggaacctgcagggctgcgtactgtgtagccccaggcaggctagccctttatccaatcctgtaggattttgtagacactggcaggggctaggtgtggttttttttaacatgaaacttaattactaactcccaggggagggttcctctgctccaacacccctgttcctgagttggaggtctatttatttaccttcttgttgggaaagggcaggagagtacctgggaatcactgggatccctgggcagcccattctgccctttgcatactccttcctcccaggcctgactgagaatctaaggtatttattgactgtcctgagggtcttggaaacagctgaagcctggagggccttgattcttttttttttttttttcttggactggggtgctgccctgagggtggggcaggctcttactcaggaaactgctgtgcccaacccatggacaggcccacctggggcccacctgctgatgcagactcactcagagaccctcagacactgaaccaggcctcttctcagcctcctctttgtccagatttccaaagctggataaggtggtcattgattaaaaaaggagaaaagctctggggatgtgtctcgtgactgtgtgtgtatgagagagagacacacacacacacacggatgggtgggagagagaatggtgatgatagatggtgagttttctttactatcctccacagggttattttccacttgggcttccctgggactcagcggtaaagaatccacctccaa

SEQ ID NO: 57857 - DNA, 1621 bp, Bovine  19866880426853
  misc_feature (1)..(1): n is a, c, g, or t
nttgcctttgaagagccctttgctcttcccctagtcctgcccacttatcgtcataataacaaagtaattttcagggaagagcaatgttgttcagtgtcccttcttgcatagagtatatttttgccttttcatactgtaaaaacgttgctgacaaaggtctgtatattcaaagctatgatttctacagtagtcatgtatggatgtgagagctggaccataaagaaggctgagagctgaagaattgttgctttcaaattgtggggctggagaagactcttgagagtcccttggacggcatgcaatatcaaatcaatccatcctaaaggaaatcaactcaatatactttggaaggactgatgctgaagcggtggctctaatattttggccacctgatgtgaagagctgactcattagaaaagaccctgatgctgggaaagattgagagaaggagcatagaggatgagatggctggatggcatcactgactcaatggacgtgaatttgaacagacttcatgagacagtgaagaacagggaagcctggtgtcctgcagtccatggggttgcaaagaattggacatgacttagcaactgaataacaacaatacagtcaggtcccttacgagctctcctgtgataatctgagccgggactcttagcagatcttcaaatctactcttcttgaaagtcactccttctgtcatgggagaaagagagtacatgttaaactagctgacatgtgaaaacgaaggccaggatgtcgttcatttttttttcagaaaccagcataatgtttggctcacatagaattcactaaatggcgaattaatggtgattttttaatagagctttggacacagctccttcatttccttgagaaagctaggaaataggtatttctgagtcctaagtagtttatacagaggtttagaatgaatggctaagagtatatggtgtttcctaaaactttagtatcttatgaagatgtagctggagagttgggctatttcaggcctgagttccttaaaagtgagacagacaggaagaaagcagccagctgcttttatgcatgttgcaatgacagaatgagcacatcatctaggaaagcaaataactgcaaatattttcctgaataagcaggaatggaagatgggaaaaactactgagaacattttacattgggatttttttcacagctttcccaatcttggcagttgtaagagaattgttttatgtggttttggtctgtgcttgcaacatacggcagcctattcccgaacacaaagaggtatttcaggatgtctggtgagtgaccagtggtttgcctttttaactcttcaaaatataaaaattaaatggattacttaaaaccatttttgttttcaggggttaataataacctattccttagcactagcttctctggtttttatgctatcttatgttccagtgaggctctctgagaagtcaagaatgatattcttcttattattattattttttaccaaatccaaaaggcttctctcaatctttgttttctataatctatgtgacctccacttggtatcaccgaccacctgctccttcttgaaaactcctctgttcttatttctaagacatca

SEQ ID NO: 57858 - DNA, 1041 bp, Bovine  19866880448543
  misc_feature (1)..(1): n is a, c, g, or t
nactagcaaggctttagaccagttaattgtatcctggttagtaacacagctaaatacaagtatgttggtcttgcacacaaaatttttttcaagtcagaaattgtcctactcacttctcaagcactttattccatgtctttaaaaatggagtgaattgaattgattgccatcacctagatgttaactggaacattgaggatcccattttgtcattcatctttatgataagaacactaatgcaataataataatatgatgtaagtttcatatattatgggtttaccatgtgtaagatcatgcactcagcaccataattattatgatctcatttatggctttcaagaaccccgggatataggtactattatcaaccctatttaacataggttgaaaaactctcctaagagcccaagctagtaagtagtggagctaaatttcaaacccagttctgtatgatttcaagtcagtgttttttctcaccatgctctatagtctcccttgattacacggcaaggcttcagaaactgaggatgaaaagatgactgactgttccccaaagatatatcagctcaataactgcatacagttagtagagaattgcttcaggaaaaaaaaggtgtgcgtagtctagtaatttcaaatgtaccatttaaaacgttcctagggacctgacctttcctggctgatggcaatagctcccacgaccagtaattcagaaacccagataatccatcacccacagcacggcttttttgtattgccatcaaagtggcacttcagagtatctgctgccacgcttaatgacacagagtgagagctcttcaacttagggaagcctattgctctgctctagccacagccagggctctgctgctgaagctcagataaggtttggatatggacctggatagtttaaaactaatggactcagctggaaacaggcaatggacagagacagttggtactgcaaaagagagaaagatctaaaaaggtcatcacaatagtgtttttagctccatttagaaggccaggaaaaatata

SEQ ID NO: 57859 - DNA, 1188 bp, Bovine  19866880473443
  misc_feature (1)..(1): n is a, c, g, or t
nttaaaacagtatcagaattaaaaatagtatttcgtttttcatcacctatagatttaggctgtaacatgctcatatgttaccagaaccaaagcttttccataccaaaatgaattcatgtgaaattatgagtaacaactcactaatatagtaattgatttcaattattgtgttttgttaaataaataaattgtattcctatatgtatttggttatttttataagaaaaactacaaccaaagatgcaaagaaagctgtacaatgccaagattatccattgaaaggtaaaatgtttatccatcagttattttatttcatctgatatatgtaaataaactgtccaaaggtctgttatttttactaacttcacctcctttggaattctgacaagatgttttggtaatctcagacatgacttcagaaatgttcatcgcatgcaggtttcataaagtaatactaagagtacctgtctttaaagatcagtgtttctccgcggagactggttatggcatcaagggataaggaagggtcacatttgtctggcgtttttggatgtttagagtaggggtcttcatctcctggacctgcagtcatgaaatgagttaaggaagtgactgaggatgacctgctcctaccatggagagcaggaagggcttcatccagggagggcagtgggtcctgccacctcctacataatacgccaaagaacccgtaatccctcctccttcctccagggctaccacggccttgcctgtgggacttccccttctgttttcaacttttaaaacccttgagaatcatctaagcttcaaattcagctttcttgaggttggtgatagaaacgggctgggggagcaagagactttggggaaactatccccatgctttgcacaacctattcacagactgctcctgagaaacacattgctctcacagacatttctggaggcacgtcatctctgtgggagccctcctttgggctctttctcaagcctacttgaccagctgccaacatcagctcaccttgctttagagtttatcactgtgtatctgcatctcagtgaaaagccggccttcgaccactctggtatgacttgtaacgtgttggtaactttccaaccagctcacgtgagtgcaaaagggttgcaggacataaaatcattctaaacttctttttcactacctatgtc

SEQ ID NO: 57860 - DNA, 2995 bp, Bovine  19866880627800
  misc_feature (1)..(1): n is a, c, g, or t
nttaagcaggtccccaaggccataacttgagaaacgttaggctggaggaagcacaagctggaatcaagattgctgggagaaatatcaatccctcagatatgcagatgacaccacccttatggcagaaaatgaagaagaactaaagagcttcttgataaaagtgaaagaggagagtgaaaaagttggcttaaagctcaacattcagaaaatgaagatcatggcatccggtcccatcacttcatgggaaatacatggggaaacagtggaaacaatggctgactttatttttttggctccaaaatcactgcagatggtggctgcagccatgaaattaaaaaacgcttactccttggaagaaaagttatgaccaacctagacagcatattcaaaagcagagacattactttgccaacaaaagtctgtctggtcaaggctatggtttttccagtggtcatgtatggatgtgagaattggacagtaaagaaaactgagcactgaagaattgaggcttttgaactgtgatgttgaagaagactctggagagtcccttggactgcaagaagatccaaccagtccattctaaaggagatcagtcctgggtgttcattggaaggactgatgctaaagctgaatctccagtactttggccacctcatgcaaagaactgactcattggaaaagactctgatgctgggagggattgggggcaggaggaaaaagggacgacagaggatgagatggctggatggcatcactgactcaatggacatgagtctgagagaactctgggagttggtgatggacagggaggcctatagtgctgcgattcatggggtcgcaaagagtcagacacgactgagcacagaactgaactgaaatgaactgaaggctttaacaggacacctaatctgaaacaaaaccttaacaagttgactatcagccaagacacataagacttgttcgtagtgagtttacaaagcaagggaaatacagattctgggtaaagctcactgctcagctgaatccatgcctcatttgaatcctacattcaactaaaattttaaattttgtttgaattatgtttaagcaactaaaaaaccattatgtggatgtacaaatgccatgtgtttataaggtaatgtgcacttgctttcaaagaagttgaggtatttgcaagtgttggacaatattattaggaatatctaggtgtagcagtttttgtaagtgaagtttaactcaaagtagactttagatttaattaggctaggaacaaaaagatgtttgttgttttcccaaaacacacacactatgaataagtgtcaggggagcagtgggtgttcctggtggggtgaaggcttgataagtgtcctgctataagtttcagaagaatcattctctctcctgacacatatttaagagaaatacttctctccaaaccacttgactccaataaccttggtggcagtcttaccggttctgatggaacaagaggccatgacactcgatgccacagctttgcttgttatctccaccagttactgggctgcacaaatctgtcatgcactaatttgcttggagtgtcaaggaaagcagagctgaattcttgacatatgaatctcctgtccccaaagctctctcctgggctctgctgagtgcagaaagagctggcagctgagtggagttttgattaactgcgctggtgtgtatccactcaagcttcagcgagattgtgcattgtcagtcagctgtctcctgggtgctgaattttcattaaagcttttgtatttaatggaagttctctcacactctagagtttcaaatgaagttcaaatcagatgtaatttacaattttataacggtcatgtaatattttctgtctctgtaagtagctcggaaacaaaattgcctttagtgattataacttctcattctcaaatttgcattaatttgagctccctaacaagctaaaaacatttctccactaaatacatccatatggggggttatgctttatgcatattagtgttcccagtatacctgccacattttagctgctttgacttgacttctattgttttaagggcaatttgaatgcatgggattcttgaaacacagacgcactctccttatcctttgaaacaatcagcagttagattacaacaggctgtgatttatgtggggcttgcgtggaaatacatgccaacatgtgcctaattgtttagcaacaaacatagaccccatatgatgctctgaaagttaaagttctctttaaaagcaaaatcaagtattgcattctggtcctatagaacacaggtgtctaagtctacaggtactagtgtttccctatagaataacagtgctgttttaacataagatttttggtgaaggtgtgcagattttagcaaagtctttaaaaagtttgtagtgctgccagccttaagcatacactggaatgtagtaccaataccacttaatcaagaataaagtttccaactgggtagaacaatttctgtaggaaacgcatgctaacagaatactaaaatctgaactaggtaggagcaagacagtacttacatcctgttttttaactgttttgaacatggctcaagatataagtttctgactttgacgttctgacttcctgtccttaaaagaacaactggcctttcctgatatcccctgaaagtcaatacaaccctaataaaagggttcctgcttatacaactgctaatattagaggtcaaataagtctcacaagaaatttaagaacaatcagtcagagttcactcaggaaaaagagaaaccatacctgttactgtagtaaacatttaaacaggtactggagaacaaaccagcaaaaaggagaagactaaggtaacacagaggtaattaccaaaggcagctaaccatttcatagggtcagggggaagtaagggaagaagctgggctcatcagacctgttagttccaaccagggcttcgtgggtagacttatg

SEQ ID NO: 57861 - DNA, 1138 bp, Bovine  19866880654555
  misc_feature (1)..(1): n is a, c, g, or t
ncggcctctgtgcaatgctgagctttgtttcttttacttggtgcagatttgatgagaagacacaatccatggagccaggttttcccaagcaaatagtggaagattttccaggggttgaaccagaggtggatgctgtttttgaagtatttgataagaggacactccttttgttggcagtggggcacttgaaacattctgtagtaccagaagaaagaggaaagctgaagtatttaataaagttttctttaaccagattcctcctcccaatcctaaatttcagcttacaaatttcatatcaattgtatgactacttcgtataataagctgtataaaaaccccctcaagtggtgtggccaagttcaacagtggccagctggcttctccatcccacctctaattctcatggagagtttctctgtctttcctgagtagtcagtcagctgccaatatttaactttccatgagcccaaagttaaaaaaaaaaaaaaggattttctcctgcctcagggatagatgggtggagggatagatgatctttattgaaaggtaacctgagcaccaggatggcagagtcagaaaggatcgtctggttctgaaagagtccctgagattctctgaggccagagaatcaggcttctttgtcagcaaaggggaggaggagtattcggaaggaaaagtgtaaagatacatggtttctgaagatgcagagaattttatctgattttaagtggaataacctaataacccagagcctggttctgctgtcagagagagctggagtggggtgctgttcccatcctttccttattgagtgaccttgggcaggcatttaaatttgtttgaatctcaacttcctatctgtaaaatggagttagatatatgtgcctcataggacttttacagaaagaaatgaaaataaaagtcatgcaaaatgcttaccatagttcctgctgctcctgctgctaagtcgcttcagtcgtgtccgactctgtgcgaccccatagaaggcagcctgccaggctcccctgtccctgggattctccagccaagaacactggagtgggtttccatttccttctccaaggcatagttcctggcacatagtaaatttctacaaacactttctacttttaggtat

SEQ ID NO: 57862 - DNA, 2550 bp, Bovine  19866880664433
  misc_feature (1)..(1): n is a, c, g, or t
nctaggtttgcctgtttttataaaattgaaaatcataacatcatgactctttaatattaagattctttcagctaatgttgtatttgagagattcatccatatggttacatatcaattatagtccatttattctcaatgctatatagtatgccattctgagaatctatgtcttctgtcaggtataatatatttctgtcatgtatgtattagcagtagataggatattaatttatttgttccccgttgttagttaatgccaaatagtattccaggtgattttcttgcttatttaaatttttttgaattatacatcagaaaagtacacattaatgtacagttcaatagattttcaaaaagtgaacctttgtaactagtccaaaatcaataaatagaatgttaccagcattctggaagcatctccctcattcttttctacacatgatgcagcatttccccattttgtgctaaggggcaattaattttattacttgagttgttttaaagtttattttaaaacatatttttgaggatatttactagtattttatcttgcttagaaacttggtaattttccaaaaggcttttgaacatttatttatttttattatatcactatgaggcatatattattagtatccttttaagatgaggaaaccaaagcatagagaaagtgaatgatttgtttatcatcatgtttccagcttatgatggattaattaatgacatcatatgatttatatatatatattataccaatgaaattattgtaaaagtaagatgctttaaaattacattgaatcttatgataaaagtctttgctatataatcttatagttacaaaatttcctgatattaagggacttccacatctggagaattaaatgtaaaaatggggaaaagttcattgaattttatagtaatgaaatagaactaagctagtaatactatcagtgatcttaagtaggtagattaaaatagtttttctgcatttactgctgtcatggaggaagaaattttcctctacccttataggttcttctggctggtcaaagaattacattgacataaaatgaattaataagggaagatggtggctcaggtggtaaagaatctgcctgtaatgcagatttgatccctgggttgggaagatcccctggagaagggcatgacagaccactccagtattcttgcctggagaatcccatggacagagaagcctggtgggctactgtccatggggttgcagagagtcagacatgactgagtgagtaagcacagcacaacaaatatacaaaaaaagatattaataatgtgtttatatgtgagagatcctagaaaactaagtaacctgctataatggctgaagctcttaataccatcttcaactaaagacaaaaaagtagtgaagtggggatagtggctttagccttcaaaaggaggaaggcagtttatgtggagatgcaaaaaagcaaatgtttggaaggaaatcgctgggttatgcaaagacagtgggaaacagagaggaaatttgaaagactttgccaggttccttcctgaccaccatatctagttcatactgtacttatctatggtgataactcccttcctggaattggtcctctatgattatattaataatattaatgaacattaatgttaatttaaaggctggaaaatgaaagttgctcagtcatgtccgactccttgcgaccgtggggactatacagtctatggaattctccagaccagaatattggagtgggtagccatttccttctccagctgatgttcccttctccagaagatcttcccaacccagagattgaacccaggtctcccatattgcaggtggattctttaccagctgagccacaagggaagcccaagaatactgtagtgggtagcctgtcccttctccaggagatcttcccaacccaggaattgaacccaggtctccctcattgcaggcagattctttaccagctgaggctaccaggggaagccctaatattgatgagcattaatgttaatatcaagccttaaggaataatttaaatgctttaaatatgtattattatagtctataaatatagctagagcctgaaatttgtttaatattttagaatatttttagaaaatttctaatatcttagaaatgaaacaaaatttttttttaaattataggttccaaagatgtacagtgggaatttgtacatggtttgcttgaaaatgctatttatggaggacgcatagataactactttgaccttagagttcttcgatcatacctgaaagcaattttttaattcttcaataattgatgtattaagtgaaaggaacaagaaaatgtgtttttccatactccatatctctgccaaaatcctgcacgcattttggtaggtaacattaattgttttcagtttattaccagattgaaacttgcataatttcttacattgttaaaatatgttgttgcttcttttcacaagtacaagcagtcatcacaaatacggattattatttattatgccaatatgcagcccgattctc

SEQ ID NO: 57863 - DNA, 2170 bp, Bovine  19866880739368
  misc_feature (1)..(1): n is a, c, g, or t
nctctaagcacacctgaacctcagacaaacctggcctggcccccagcaaagtgccttggttctataattgggtttctcattccattaaaaaaaaattatttcctcatccagttctggttacggcctggagccctgcctttgtctgggtgacctcgtcctctgtggctgtgcttctcatgtcattttccttactcaccctgcaaatgtcacctgccaccccttctggcagcccagcacctgtcactcaggaaggaggacaaagggcctggacctgcctccccctagtgtagcttctctgggccaagccatgaccattaagctttgctcttaatggtgtagtcaaaaggaactgcatttctatgatgcatttttatttatgaacaaatataggatctattgattcggatgagcaaagaaacgtatgtccagagagatttaagaatgagacactcaggaacattccttttagagacaatctatgcaagctaagtgtaggttccaaattttctgagaattatagtgcataaaaaaatgaaattaaaactctatgaagtctaaattgcctattaaatacaattgtattgtcgctaatgactcaagaggtgctttgtgattttaaagtgaccattgcttatcatcattaatttataagtgaaatatttagctcaatcagacctaaccattacaaattagagagcattagatatttttctatgcgatttctaggccctctgtctcataattgggtaggtctcctttcaggttctttagatctgggcttactgcttatgtaatgtattaacagaactatgggtctagtggccattttaataaatctctaaaataattttttttagtttttatggtgttctaaccatgtaatcatcaatgtgatgtgggagatctctctctctctcacacacacacacacacacgcgcacgcacagcttacggtgtttgccctcaccattctaactcgggatctacttgtccagatacacgtttaaaccattaatccgccaccactcattgcagagtcaaatggaataaaatgagtcatttaaaagacagaaaaatcaatagaactgatcatgtgagggattaatgaaagggttgaatcaaagatgaaattaaagtttcaaagctaagtttaagaaacatttacagtgaggggtgtttgagtctgaggcaagaagctggagaaagatacgcttatctcaatgaacctgtaacatactgttccacaacagtggcacaatatggacattatgtggctagaaagattagatattaagcttgataatttgaaaactgtaaacaatctttagaaccttaaaattttatgtattcaagcttcctccttgacaatcccagatgtctacatgtgtttctctcccagagagttctaatttccttttctggtaaaaatataataatgccttcaagtcatgacagctacctcagagatcccaagtgtaaaaaaagaagttaataggaggtgggtctcatgatcactcccaggatagctctcgcctgaaatgcagcagatttactcatcaagacaaggaaagccactttctggtttaaaaatgagagccaccgaataaggctcaggtgttattttttgaggctgaaaacgatgtggagtgtggccatgtccacagtagcagctgtactagcagggggactgatcacatgcttgaagaagaacttctagtgcaaataaatgattgctatcatcttcaagttgtctagtctttggatttgtagacagtttctgaaaaaaaaattgttcatatctgccaatgttggagtattaggattctctagagaaacagaaccaataagatgtataatatgcagaaagaaatttattattaagaattggctcatacaattagtgaagtaaacaagtctcaagagccaggaaagttgatgcttcatttaaagtccaaaaacaggatacactgatgtctcagctcaaaaagaaggaaattcctcaaatatgaagaaagagtcaacctttgttctatttaggcctccaactaattggataaggcacaatcaccttagggaaggcaatctgttttacttagcctgtcaacttttaaatgttcaactcattccaaaactccctcacaaaatagtgtccgaccagatatctgacatg

SEQ ID NO: 57864 - DNA, 1465 bp, Bovine  19866880764933
  misc_feature (1)..(1): n is a, c, g, or t
ncatagaactagcagtcattaagttaagctcttatttattgtaagcatattaatttttgcttgctgactgtgtaagtagtcacaataagtaatgccttaattatgcaaggttttcattagtgaatctaagttctaactgaggggctacagaagctgtccactaagatcagtgaaatagttaccatttttctggtagacagcatctactttatcaccaattcctgggaagacctcttcaatgagtctcgggtagtctttatccatcacatggttagtgtcatcatagctatataataagaaaaagaaactcttaagtgggttgtaggtaaattactttagaaataatacagtggatataatggcaactttcaaaattgacaaagttcccaatttttaagtccatttaaaacacctggtagtttttttaaattaagaattataatactgagtatatagtagatacctggtgactactttgacttgcctaaaggccgtgtttataaagatggttataaactcatttccacttcaaaatttgtacatctattataaaactatgttattaggaaagcatttttagagccaaatacatatgtttctggattgaacaattgtctattgatctctcagtatgtgtaagacaacttgttaagggcagtcgtggatactaaactatttaaggctcagtttctgcacaaggaagttacagaggcaaatggtagtaataaagcgagggtggggagcatagatttctcctcccataactatatattccacactcctcttccccagcacaaactcacactctagccaaccaaacacattctgaaatcagcctaggagaacaacctcccatgatgcactcttcctactgttactgatgagagttttttatattcttgaggtacagtccaataagtaaaagctaagaatcattgcaccatcaagaaggctaagacatatacagatggcattgtaacactaggcaataggggctaaacatcatgagagaatatacaggagatgtcacaggaattacatgagaagggagatagcctttgaatgggatgatcaagaaagactgtgcataaaatggtatttcaaattaactttaaacatcggatagaatgtcaagaggataaatgtagggaaagacctctggcaaagaaaattgtataagggaaggttatgcagagataaaagcacaaagcttttgagatatggtaagcagtccaccttgaccaaaccacagacctcatataggataaagggacagaaatactagaccaggtagaacctagatagtaatgtgtaatagtattgtatttaattgaattgcatttaaagttgtgagtgtcattatcagaaataagtcaaaaagtaaagataatatgtacagaagtgtgtgtgtgtgtacacatgcacacatgagtgtacgtgtgtagaggaagtaaagctaccattt

SEQ ID NO: 57865 - DNA, 1033 bp, Bovine  19866880927850
  misc_feature (1)..(1): n is a, c, g, or t
ncctggagaattcccatgggctgtatagtctatggggtctcaaagagtaggacacgactgagtgattttcactatggtaacaatatgtttaaatttttgaggaatagaaaaaaatttctaaagtagctatacaattttagtttcctgccagtagtaaatgacattttctctttttacacatagttacaacatttattattattcatctttttaattgtagccatcttaataggtatgatatggtttcttattgtgattttgattagatatctctttctttatttttgtgactaactaccatgagaaagttagcttctatagtttttatatataatctaagaactgaatattagatgctgatatgttaaatgatgcaatttcttacagctgtttttataatatgtaacattttatcagttagcttcactattcattttgcctcttttgtcagaaataattgtggaggtgtctcatatgtttaactagaaagaatgaagtgtacagagtagtatatttgtaatatccaatcaaacataaggtctctttgtgggaagttttcactttggtttgtcttgcttgacctttattgttagaataatcttggccttttttttttttttataaagcttttggcattaactattcaacatgagaaacctgatttagaggaacagaaaacaaaactattacaacaggaagaagataagaaaattcagttagctaagcttgaagaatctcttttagaggtaaaatttagttattcaggatgttgatcatattacatattttgattaaaatcaaatgctgtttttttaaaggttataataccttcagcatgtttttggttgtatcagaagaatatcaatatatatattaaaataaaaattcaaacagaagaagggtagatatcttggaatatgaaacttgggagtaatgtttaagacaagtgatttttaactaatactgtctttacactgtatttcattaatgtttaattatatgctcagaataacattcaaaagaagcatgagat

SEQ ID NO: 57866 - DNA, 1717 bp, Bovine  19866880978875
  misc_feature (1)..(1): n is a, c, g, or t
ngggtgtgacattgctccgagttgaaaggctttctcaatggcttggtcccatctgctcttgacaggtctggggtgtaattttcaatccttcaagtggaataaaacacagacacatcagatttcatttctcatggctctgatgggaaagagggttcccactctggtgctcaatctgattacctgtaggtcaggtttgtgttctcccaacgaggatttcctggagtaagaacaaacggagccacgtcgggcaccccacatctgggctgcttcatcacattcagggtttcagcatctggtttcccagtcactctcagcccaaagaatttttgcatttgctttagcttttcagttatgaggccaccgtttctctgcctttcaactttcttcccattactgttcaggttgtagtagttttccaggtatttctgatgaaagataaaattatcgaaacactgaatgggaaatcctccaattttactaaatactgatggtttatactgtcatacctgaaacaaaaaactacttttaaaggttccacttaggttgcatggtccttattatccttattgttggtggaagctcattttggagtagaactcttcctaccactatttactatgaagtcagaattacaattttatagagacatatttgtatattattcctttagttccctatcacttttaactggaaatgagagtctatgcacagctagatacattttgggggagaataccctttctggaaaaaatctctctttataggaaatgcatccttaaataaactctattatactattactgggggcttccctcatagctcagacagtaaagaatccacctgcaatgcaggaatctgcccaccatgcaggagtccacctgcaatgcaggagacctgggtttgattcctgggtcaggaatatcccctggggaagagaatggcaacccatgtcagtatcctcactgggggaagcccatggacagaggagcctggtgggctccagtccatggggtcacaaagagttggacacgacttagttactaaatcaccaccagaactgcatactgatactattctgttatattgtggaaaaacacaaatgaggcttttgggtcttaggcatgtgaagttgagcatttaccttcaccgtctccacatcttgttcttgtgtttctgaagttgctgctgggaagccgtgggaccccgtgccccagagtagcagcagcagcagaggcagtctgggcatgttggtctctgtcttccttctcagcttaaggaatctgatagctcctacctctctgctgctccagtgtctcaactaggaagctccctctttatatacaggttctggaacttccaggaagccggcggctgtctgactcacatttcataacatcctttgattagctatgagcaatcatcacgaatggtgactccaagcagaatatctggggtcgtttggtgttgcaatcttcattactatcgaacaggacgtgggcaaaggagacatatccaccacataaacaattgttttctccaattcatttctatcctgtttgagagagaacttcttatatacacagatcacagagtacgccacggacttaaaaaaaaaaaatagcaggctttgctacttgattctgctggtcataaagtgctctgggtacacacacaccttgctttccaagcaaagggcaaagctgttacatgtatgccc

SEQ ID NO: 57867 - DNA, 1234 bp, Bovine  19866881125131
  misc_feature (1)..(1): n is a, c, g, or t
natagcttgaaagaattcaggaggtgcacaaaggagtaggtaggagatgccagccccgtcagcctcccagaagccctcacactggaatccatcttggttgagagaggtgcatatcactaggaaagaccctgagccagaccaaatttggcagcaagcaaggtgattggccaaagacagcctggaaagctaaccccattaccgtgaaacctgagactgcaaggcacatggcagagttctctcctgggctcccttaccttatttgctctctgccaaggtgccccttcccaaaagtcttttgctttgtcagtacgtgtgaattcacaattcatttctaagtattagacaagaacttagccttgtgctctcgaagaaagtgatggcaccccactccagtactcttgcctggaaaatcccatggatggaggagcctggtaggctgcagtccatggggtcactaagagtcagacacgactgagtgacttcactttcacttttcactttcatgcattggagaaggaaatggcaacccactccagtgttctggcctggagaatcccagggacagaggagcctagtgggctgccgtctatggggttgcacagagtcggacacgactgaagcgacttagcagcaggcaggcagcataccttattacactgaaaggcaaaattaaaagctctgtatttattagacaagtaattatcacataatttggtatatatgcaacaggcttcattaagacagcattctgtaaaacagctttacaagctcacacacctacagggtaaagtaggctatgtaaattaaactggtctgggtgtgagactatggggtggctgagtacacaccctatctgcagtttggatgagttagcttagcacagagcaacagagaattcaataactcagttgtttaaaacacttgctctcatgagttggtcaagggtcagctggggaccctgttctttgtcattagaacaaatctatccaaatttgacatatccatcaaaagtcatgaatgtcatcaaatgtctagaacattattggttactatggcagaggaaaaagaagacatattttattttgcttagtccaagcaacattttttttcttaatttgaaagatgttagaatgtatgatagtcattagaactcttttcagataaatttttagagcctcaagttttctttctcctcaataccaataagatatattgtcaattaaaacaattgtga

SEQ ID NO: 57868 - DNA, 2608 bp, Bovine  19866881175024
  misc_feature (1)..(1): n is a, c, g, or t
nagaaagagaaagccaagagaagcatgcagactggttgctctaattgtaattctgacttctaactgaaattctgtagacctagcaatagcatagtttctaccactgcactgacatttctgtatcaacggtaagcataaaaagggctatgaaattcagacagaaattcattgcagaagcagatttttttttcccctcttgacactaaacctttaaggtaaaagaactattctgtcactacagtgaaatgctgggaattttcagagaaataagaaagatttcatatcttctgtttgaattttttttatttatcagaaatacctacaaaactattacggcttaggggttggaaccagctgattcgaaaggcagagaaaccacagtacaatgattgaaaaattaaagcaaatgcaggaattctttgggctaaaggtgacgggaaagatagatgctgataccctggatattatgaggcagtctaggtgtggagtgcctgacgtttcaccccagtatggactcactccagggaaccctccttggcagagcacacacctaactactacgggtaattagacggagccccagagtggggacactgtttcccaccagagccgtgagaaatgagctctgacatgtctgtgaagggttgaaaattacaccccagacctgtcgagagcagacatagagcaggctgttgagaaggcctttcagctctggagcagtgcctcacccctgtccttcaccaaggtctctgaggggcaagtggacataatgatatcctttgtctggggaggtgagctcttttctccccaaaccattctgaacctcgcctcacacttctttcagacacactgagcttccggtcagattttccccttatttgagggtgctgattttacgggctgaagaagggacccctcacaggtgaacaatgctttttggctccttgtccctacgctctcgtctctggtagggaagtctaaatagaaaaggagatttatctttgctgccctttgtccctcacagatcattgtgacaactctccctttcatggacctgggggcatattcgctcatgcgttccaaccaggaataggtattggagatgttcatcttgatgaagaagaaatatggaccaaagttttgaatagtgagtcaaggaattctccctttctatttttattttcccttttcatggcttactgcaatatgttctgttttgtataaaagaataaaccaatattatgatgatagttaaatgctttaataaagatatgctttttaatggtggttcagaaagatattgcaacactatagttacagttagtgataatgtccgaggatattgtttctaccaatggctgcatcttaagggtaaaatatgtttttgaaattttaaaataagattacaaatgatattttgtatgtgtacaaatatgtaccaaaattaaataatggtaactcttggtggggttgctttggagaatatgtgttttggtacatggttatccaaatttttattttgaatctgtattagtttatttagaatttatattagatcagagtaataagcattaatagaatgctgttgtttctctatgtaatcttttttccaatttatttatagctggacttactaatcaatattaaaattttgcatgtcagctaattttttcccttacattttatcagttcaattataaaaatttagacttgaaggctttttagtgttaattaattcttctcttgtgattatacacacacacacatctcagaccatgtcataaaccaaaccacaggggaattcttgtgcggtttggagatacatttgctctttgaggcctgaatactgtactgccatctgctaaagactgactgattctgttgccctttagattacaacttgtactgggttttggcacatgaattgggccgttcctttggactttctcattctactaacatcggggctttgatgtaccccaactacatctacactggtgaagtttatctgtctcaggatgacatcagtggcatccaggccatctatggtaagtgaagctgggtgaaccagacacatgcttgtgagctatatgtgtgcttcaaaaatagtggcaatgacctggtccttgaaagactcttcatcatatatatattttgggtcaatgtagtatgtaaaacttcattaacttcaggatctttgtttattttttaagggccatctaataaaccacagctggtcccagtgccacaaatcccacagccctgtgataactgggctgtctctgactgtctggctggaatcagctctctacactctgctgagcgttgaacagcccagagtccagacagggaaggcctccctttctgtgtgtgagtgtgataacaggataacatttgatgctgttaccaaaattcttggggaattgctcttcttcaaagacaggtacaagttataattaatcctgacgtatgtttataatgattatacatgtgtgcgtattttttttcttttcttattcttcaatattatattcatacataataataaaaatccataaaataaaagctctcctaagtccactcccaccaccctctgtacacagatata

SEQ ID NO: 57869 - DNA, 824 bp, Bovine  19866881185064
  misc_feature (1)..(1): n is a, c, g, or t
ngaaggactgatgccgaagctgaagcttcaatactttggctgctgctgctaagtcgcttcagtcgtgtccaactctgtgggaccccatagacagcagcccaccaggccctgccatccctgggattctccaggcaagaacactggagtggattgccatttcctcctccaatgcatgaaagtgaaaagtgaaagtgaagtcgctcagtcgtgtctgactcttagcaaccccgtggactgcagcctaccaggctcctccatccatgggattttccaggcaagagtactggagagggttgccattggctacttaacgcaaaaagccaactcattttcaagatcctaatgttgagaaagattgaaggcaaaaggagaagggggtggcaaaggatgagacatatgctacagacagcatcaccaactcaatggacatgaatgtgagcaagctctgggggaaaaaaagagttcttgtcatgcttcagtccaaggagtcacaaagagtcagacacaactaattgtttactcctcatgactcaaatcctcaaaataagctttgtctttagaaatatcaacagatataattttgaatatatttattatagaagaaagagttctaaacacttggatttaaaacatatagccttagatcaatggctatggtaagctcaggagtatactaaaaaccaacaaataagaaacactttacatgtaaaatctaattataataatataaaaagtccatttaccttaattatctgttcaaacgctaaggcagattgtaacatcattggtctctgactttgaatcatctgttgatcaatagaatt

SEQ ID NO: 57870 - DNA, 1077 bp, Bovine  19866881190411
  misc_feature (1)..(1): n is a, c, g, or t
ntccagatgctgtattcaaactgtatgggtccattgaaaaaatagatataacctataagaaaaagaccaaaaagatttcaaagtttgaaaataaagtcttactctagctaccattaaaatctcaatctgttagattcacttttttaaacatttcaatgcctgcattataaacacaactaatgctttaacttattgcttataatttaaagaaggggaaatgtataaaggtttctagctctcctaaaatgtcacctcaaattaattgctgtgttggcatgagttccagttttgaggtttgaattttttttttccctttggccatgcccagctatgaaagtacagtctagacctctggggaatgaccccaaatgcttgagttattaatattggttatttgttgcaaattggagataatgtccttttccataattaaagcaaaaaacattttatatttatgatgttatttgtcttcacatataaaatactccccattcatccctgattttaattatagtaatactttttgcatcttgtgtgttgtgcttagtctctcagtcgtgtccgactctttgcgaccccattgactgtagccagccaggcactttggtccacggggattctccaggcaagaatactggagtgggttgccataccctcctccaggggatcttcccaacccagggattgaacccaggtctcctgcattgcaggcagatcctttaccatctgagccaccagggaagcacctttgctttttcaaggggtcatttccacctgctgtaacacccccagctacaaggggtcttacaggggcagcaaacatgtatgaagtaaccaacctgaggaagaggattctccattattggagagcaaaaatgggagcaagctaggagagaaacttagataactgacaaagggaaaactaaaccaggtctcaaggaaacagaaagtataagtggcctaaagtctacctctgggttctggcctatgtaaaaaattactgttccaaacaatttgagccaggacagtttctcaaatttaacaggagcaaaaggaatttactatcctaactttcaa

SEQ ID NO: 57871 - DNA, 1866 bp, Bovine  19866881264412
  misc_feature (1)..(1): n is a, c, g, or t
nattggaaacgttgggagaaattagtaaagtaggttgtatcatcctactttggattcagatgttttggaaatggtcctgttgccatttggaagaaagcaatcatgagtcaaactgcgggtgatctaaacaaacactgtcaccttataaaaatcggactctagaccgaggacctagtagaagatagacagagagcaagccattaagaccacatcaagctgagaaaagtcagtggaaatgagaaaccttccgattctgctattgctatgtgtggcggtgtgctcagcctatccactggacagggctgcaagggacaaggaagacaccatggagcttgttcaggtaactaagggggcggtcctcacatccctgatggcccggtggggaaactagctctgctttctatttataaagctcacacagaattgttggaactgaccgtgtatgaagtgcaaaggcagagttatatgtgttgcacatggaaagggtctcagtatcactcacctgggcttctctttttatactggaaggaacaaaagccagagatattaggtactaagatcaaaaccaccttagtagcagcattgtttaaggtacgtgaataacaagcagagagtatatgaaatgtgtcttgttttgaaacttctgtaggtattttaatccaatataatgttagctggatatttttattgctgctgtcatgtttagacatagagattttttttaagtttttttcttaagccagctccttatgagaagtataaagtggaaaattgaataaatgtagctgaaatcgacaaatacacacaaggaagtttgattgtttgtttatctcctttaagttccctagatatttaccttgattttccagttcatggcaattttcattgctctggtagtaaaataagctgcacagattattctgctacaaagataaagcaaaagtgaagaagagtctgtaactgaagaattaaacatgacattgacttttatttcagtaagctaggagactatttcaaatagataaagtgagcaactgcacaaattttctgtaaaccactaaaaatcataagaataacctaaaactatacttattttccattagcaatatctagaaaactactacaaccttgcaaaggatacgaaacagtttgttagaagaaaggacagtagtccagtagtccaaaagattcaagagatgcagaagtttctggggttggaggtgacaggaaagctggactctgacactctggaggtgatacgcaagccccgatgtgggattcctgacgttggtttcttcagcacctttcctgggtcgcccaagtggaggaaaactcacctcacgtacaggtaatgggtccaaagagatttttacatactatgagattttataaattactattacaggagaaaatagtatctttattattactttttttcatacagaattgtgaattacacaaaggatttacccagagatgctgttgattctgccattgaaaaagctctgacggtctggggaggaggtgactccacttaccttctccaggatctatgaaggagaagctgacataatgatcatatttgcagttagaggtaaaaaaaacagaaacaagggggaaaaaacccacacaaaattttatctggtgttgtttcattagaaaaagattgcaaagagatcctaattattgatcatccaataattttttctctctctctcttagaacatggggactttttgccttttgatggacctggaaaagttttggctcatgcctacccacctggatcagggttttatggagatgctcactttgatgatgatgaacaaggacaaaggatacatcaggttagcgacacatctctca

SEQ ID NO: 57872 - DNA, 1020 bp, Bovine  19866881422266
  misc_feature (1)..(1): n is a, c, g, or t
naagaaataaaagcatacaggcaaattggaagttatgactgtttaggaacttaccgatgagagcagatcgtaagactcaaaccaccacctgagataataaacctgtctccaaccctctagattctagtttacccaattcttctggcaaatacttcccagctataacagctacaacttattataaaaaacttttacttttttaaataaactaaaaaacaaataatgtaaaccatcacattttgacaagaagaatataacaagagtatggaaacagaatttaaggtatctgttaaaattacctttggatcaaaagatcctttatttttaaaaagaagttcttcaacactctctcttatttcctttggaatatttcgtgcatcaaaggttgctatgtcttctcgcacccctctctttgcaaggaagctagaaataaagcatattattaattcaaatgaggctaaatatagtttgctatttttaacaaaaatatcaatttaacagagtggtatatacaatactttcaatctattagttaaccacagaacagagtaattttaaagtacttaagtttctaaagtaacattatttcatcagtttttatagacaaggagctccagaaagatgcacaacagtttttctaaggttctgtgaatacactgaagcaatacaatgaaggaattataacactgaactccatccacatccctttatgtgaactcctgagtaattaatacattataggatatgcaagaaaatattctgactcctttataagaaagatattttacgtgctctctcaatttaaatctcctcccccatttcagactgaaaaagaactctactatcagaatgaataccagcacaaactataatgccattgctatactgtgaaatctaaagctccacattatatactgagttaacagtcagccttttctcctctggtttacatcccttttatattttcatggggctctcactttttctctgggtctctctgcctctgccaagagtgaaaaa

SEQ ID NO: 57873 - DNA, 1089 bp, Bovine  19866881434740
  misc_feature (1)..(1): n is a, c, g, or t
nttatgattaaagaccggtaagaagctttctttgttaaaatgagaacagttttttccctcatttacaatttcttgtctttatttcattatagctcacatttataagaattttatattattgatggaattgatctccctcagcacttctatgtaataagatattttgtataagtgatgatcatgtcacagaatttaccttcatttatgccatagcaagaatatatgtgacagtattatcagactttcttatgaatggtttgttacctactgtgtgaggtgtcttataagagtccaggctggaagctgtgcgcatttattgtgctcatatcctactgaccagaacctagtgttctggtggtgagctgcatgggagactgggagatgcccttctttattaagcagctgtataatcaggtagaacaactggatgtcactgaggaaacttttttcatcgtattaattttgttgatagttatcacagatgctgttagtcatgtgaatggttttgtaatgttgatgtttgcagtatatcttttgttattgtaaatttagtgtctaatttatttttgagtaaattcattgcacttgaaataaataatgaataagaatctttagaaaagttgatattgatgttttttgacctttaaatagaaaatattggaagtaaaaatgtgaatataaagtagaaatttacattgagttaaattatgtatactctgttgacttatagattgaagtgatgaaaggaaacgtcaaatcacgtcttcagatttattatcaagaactggaaaaatttaaagctcgttgggaccaactaaagcctggtgaatgatgttattgaaacaggccagctgagtactcttgatcaaagtgcaaagtcaataaaagagaagaaagttgaatttgatgatcttgaagtcataagaaaaaagctgctgtatgtttattctttaaaactgatagtgctcattttggaaaaaaagttttatgtttatatattaagctaataatgtacctgtatctgttatattaatgtctttttataagcttcagcagtttaaaaaataccagtattaagtgctcatgcta

SEQ ID NO: 57874 - DNA, 1347 bp, Bovine  19866881712853
  misc_feature (1)..(1): n is a, c, g, or t
natgcaaagctgaatatatatagccacagtctatactgttaaattctgtaaaaacagaagaaatacactctagaataaaattgaaagggaaattcactttttgagcctttgatctgaaatacctaaatctgattcaaactttgatttaaaagcaggcagttagtccaggtaagactctatctgataactttccgcttttgtcttcctatttagcatgcttctccatgactaatcagacaggatagcacaagatccttgctacctccaaccaatacaatcattcttctagctattcacttgtttctcaagtgtcacagttttaaatgtttcagaataaataaattaagactgtagatttgaagataacatttaaaggagaaatatagaaaaaagtgaccaaattagctgggaaggatgaaaataggaaaaaaagagtataatctactagaggagatgatcgctgcatagctaattttataagaagtaaataaattgtataggaattatgaagaaggaaagatattttcttgagagaaagcctagggtaaagccacaaatgagtgaagactgaagtagtttggatgcagaggaaaatccaggaacaggataaacaaccaacaaactcaagaaagtttagtgtctctgaaaaaatggcaaagggctgactttttattgaagtaaaaagtgtgtgaacatgagtagtgaaaaacgaaaaatgaagttgtggaaagataggttggagcctctttgtggaatggcattagtgactaagatgtttgtttatttagtttatttcagatgtttacttgattttgttgttgatggaaatccatgtttctatgaaatattttcaattaaagtttttatatttcaataaaattttgtatttttactatagaaaattttaaatacataaaaatgtagaggaaattaaattatttatggtcaagctactaggagaaaaaatactattagcactttacagtacttttttctgatttttaataattgtgtattctgttttatatcatgctcattcgtggacaatttataaaattttatctattttttctatgaatttgaatgtcatcagccaaaaggaagtactaataaggcgaagtatttcttcttcaccgtgtaaaaataaaacatgttgcttacagattttttaaaatatacattttccatagttgaaatcagatcatatatattatttttcacgtctaatttccatagaaacattcaaacatattggttgaaaggtgaactagagcaaaaaaggaagttgggaacagatattatctgcaagtggggtgactatctttttcatttataaaagcctaatga

SEQ ID NO: 57875 - DNA, 1074 bp, Bovine  19866881883096
  misc_feature (1)..(1): n is a, c, g, or t
nacagttgaaatttagaatctggaacccatatcaataaacatttcatactcagttacattaaaacccattggttatcttgcactctgaatggatattttgcctgtacataactgtaacttcatgtattgatcatttggaaaacatttgagctatgtagatcttccaaatgtggatacatttcattatacaatatcataaaatcacattccttaataaaccactgataccagaagaaaaagtctgtgtatggtgaggttgtcaagcttacagtagtagagaatttaagttttccaaaattctactttttcatgaaagcctgaatttcatcattggcaacaaatattgttcattttttccttgaaatgatagacttatttaattcatttttgagggaaaaaaatgtctgccaaatacccaagtcttaagagtaatagtttgtcatctattcaagtaaaaattttcttcagtgataaaagctgatactgctaagtcacttcagtcatgtccgactctgtgtgaccccatagacggcagcccaccaggccctgccatccctgggattctccaggcaagaacactggagtgggttgccatttccttctccaatgcatgaaagtgaaaagtgaaagtgaagttccccagtcgtgtcggaccctcagcaaccccatggactgcagccttcagctcctccgtccacgggattttccaggcaggagtcatggagtggggtgccattgccttctccgataaaagctgctagttttgatcacaactcaaacagtaacacaagttcctggttgtttttttgtttgtttgtttgtttcttttccttaaggcaaccactgtacttcagtattcagcgtaagtgcttttggtgtttcatccatcagaacactaaactgacttgaactcaagatttgagatttgactaaattatttactctatcattgaagacattcttaaatgaaactggtatcttttcctttgagtacatggaggagaagaaaggatgtctactagaacatttcagtgtcccagccttgatttgtgcaaagatgccagcagttagcca

SEQ ID NO: 57876 - DNA, 837 bp, Bovine  19866881901410
  misc_feature (1)..(1): n is a, c, g, or t
ncccaaatgctactttgctcactatcaaataccaaaaatatcactaaaattattgctcccagatttcaaaaatccacatagaagttcaacctaatggtctcaatgcaggactggtagttgggaaaacgtaaatctttacagtgattctgctgatttgcataaaaattctgtatgtgtataatttgaaaatgaactttacaaagtatattttgatacccagtgaatcaatatttcagaatattatatattaggagttgtttatttaccatctaccaaacttaaacattttaaagataaaagataatataggacttaaaggtataattagattccacagattaaaaagaaagaaaaaaaaaaaaaaaaactctaatagatcataccagttcaaataattgggccaaagcagtttaatcccaggatctatctttttcataaaattattaaaatttagaaagttcgtaagtggcctctaagatttaacgaatagagaaacttttctcaagctcagttatactaccacagtgacaggaatgctctaacttctgcaactatgtaatagtttttgaataatgtaatataacataagggtgccaaattaaaattttaagttgacagagcaaagtatcacctgagtgctaagaatactaacagctcagccgttttaatgtgcttaattcaaataattttaatacgttatacatttaagattgctacaagttaaagtaaaaggaattaatttgcatgcgtcatacaaatatgagctagtggagtatatgtcaaattctagtatgagttattaagaggtataagaatacagcagtatctttcacagta

SEQ ID NO: 57877 - DNA, 3098 bp, Bovine  19866880347769
  misc_feature (1)..(1): n is a, c, g, or t
ntttctcctcattacaaagttgatcttgtaatgtgttgtatttacttgccaacacatgctgcaggaaagcacacagctatctttgtggctgatgactagtaagactaaagcttgtagcagcatcttttttcaagaaattaatacaacttctggctccatcttacttttctctttttatttgttttcttggcctcatgtttcttatctggttttaacaaatgcttatttgtaagtccccttaaatccctttttgaaaaagtctgaataaaactaaatgctctcaatttgactaccacagttttaaaaataagaactaccaaacagtaaatgaaaactaagaggcaaataaaaacctgaccaaaatatacaagacatataaaaaaaggtgaaaagtcttgattgtgaagaatattggaagtcaacaagagaaaactatgtgaactgcaagtaaaaaactggggaaaggtccaaaaaagatacaagaagagaaaaaaatgcaatgggcagataacaatgtggaaaaaacccaacctcagttttagttcaggaaatgcaagtcaaaacttgatgagaaactcccataaacaatgggaaaataaattggtttccttggaattgtcaacttaaaaaaatttgtacaatgtgagagttgtgggtcattttatttgggaaaaaaatgaggacaatagaaagcctgggatacaacacctcagatagctctgagaaactgctccaaagaggtactggggaggtcagtatacatgtgaatctggtgaagaaggaatacatgcaatcaagcacatgtttttttccagaaggtttctgctagtcacaagaagcagatgtcactatgaaggattttagtgcttttctagatatgaagagatacaagaattgggctcataaaatcagctcctgcaaatatctaactctcttctctgaagacctgttctgcaagttttccccctgagcaaagagtgcttcatttctgctttctaccctgaaactcctttcagggggggggttgaaaatcagcagctgtagcagcacatgatttaatccttatagaggtagatgaagtgaaactgttagtcgctcagtcacgtctgactctttgcaatcccatggactgtagcccaccagggtcctatgtcctggggattctccaggcaagaatactggaatgggttgccattcccttctccagggaatctttctgacccacgggtcgaacccaggtctcctgaactgcaggcagatactttactggctgagccacctgggaagtcctgtagaggtagatggtaagtgccaatttgtagttgacagaattcacctaccttgttccctgacctcaaggaggggaacagacatgcagataagcatgtataggatagagtggctgtgacagagtatatgtgtgtttacaaggaaacaccagagggaagataaaatacaggctcatggttggagagatcccagaagaatctggaaagaagagctgggatcattagatgtgagtttttgaaggcagggactgcctaagtggcattcctcaagtgcacaatctctggcatacagaaggcacttgataagtctttttttagataaaaagagtgagaagggacatttctgccgggaagcaaaggcccagaaaaaaatccatcaaatgaacaaatgggtccatgaatgaatgagctgtttgtcagggacatactaatgcatctttgaaagaattaaatgaccagcctccaaaggacaaaactaacagcctccaaaggactttttccccctcctatggatcattaccatacatcttattacttgaaaggagaattccaaaccattcaacagttcctttggattcacttacatcctgatttttctaactgcatttcatcccaaccaccaggattaaatactcccaactcagaaatattcccagtcaagactctgaaaaagcccatctgagctaaaccttaggacatatgggtagttgccataaatctcgatacttttcagctgaaggtttttttttttttcttggttattagggaagacagatgtgctataggaaaaacatttaaaagctaacattggttgtttctcagtagaggatttctgagtaacttttattttccactttgtacatttcggtattttgcaaatcctctccatcagttctgaatcgcttttataatgacaagaagagaaatcaggtcaagaaatgcatgtgaatcttgttgtggagaattaaattagaaaagttgtggaatacttagaaatcaactgagttttcacattgtggacaatttaaagggagggttcagggtgattagcccttgggcagaatatggttttagacatgttctattctaagctattaaatacaaaatgtataaatgttatcttaaatatcaaatattaccaaaggcaatttaatagcaattaattttgtgtcgtctcaaaagctccagttgaaaacgtctttgttgtaataaaattcctacacttcttaacccagcattttaagtaatgaatttaattatgaagaaaactgctgtcattaaacccttcttcttaatcatgcctgtgtttatgacaaaaaaaaaaaatctgttgccatggaaattttagtgtcaaagttgcaactcataaagctttacagaagtataaagtaaaaataggaaatgatctttagcaaggtgaaacttcttccttaatatatttttaaaaacacttaaattatggacagcaggtagattttacaagtgaacctaattttgtataactaagcaatcatgaaaagtttggcatttatctcattttggaaaatcaaataaagtataattagggaacttataaaagataagaattgcactggtaatccacctcaatttaattaaacatttattggggctctactatcttataaaaattaatattttcatgggctgacttttctaaaagtgggcacttatatagtttgacattagtttttaaattatttttagctgtcattaaaaccccaaataatggaactagatgtgaacaatgcagctatagttatacaatgagaccagagtcataacttacat

SEQ ID NO: 57878 - DNA, 770 bp, Bovine  19866880398002
  misc_feature (1)..(1): n is a, c, g, or t
nttttctttccctgattaaaatacagatgttcttcaaccagcaatcaaagaagtcttcatgtgcaggcgttgcatgaacttggaaatcttctcatcttcgcacagaagaaaaggtagcttataggagtcagtaaaacagggagaactctgttcacctgaaaaatgtttaactattgtgaaaaaaagcaccatcttttataaattttagttcttggataatattccattgctgtgttttagtcatcaaatgctaccggagagaaatggttatgagcaataaatggcacagatccattctctaacattttgatgaaaatgtttattcaatacattttctttcctttttgaaagatagatttaacaacacagatctcatgctgcctgatgccccgtttctgtttcagggctgcttttaagtgttggagtcaagctctggatgaaattttcagaaaagaagatgtgctccatacatggaaggagattggcagctcactcaccagtgccactgatggctggtcacctccaggttccaaagactacagtgaggagctcctgtccaaaggcggcatctgggggtgtttgcaggggagcggtgatatcagcaaagatagcacagtgagtatgacgctgggagccgtttgcgtaggacctggggccttccttcatgggctacccacccgggccatggtagggtgcctcacacacactgggttcttgggcagctccattcatatcctataggcttattatacactttacttggtttgggg

SEQ ID NO: 57879 - DNA, 1619 bp, Bovine  19866880480927
  misc_feature (1)..(1): n is a, c, g, or t
nattaatacttagtgaaacagaatgctatttctgagcaaaaaaaaaaatgaaaactacatgtgtctggctagatgcattaaccatcacctagctgtatgaaccactcacctatctgcaattccattaacaatgatcaccataccaaccttccacattaacactttctagtggaacaaatagttggtactcttaagattttttttaatgacttgaaaaaatatacttaaatgctcataggacatcaaaaacttaaaacccaatcattcaattattgacaagaacaaacttaatgagatgggcaatctggtcctctctttgtaaaaagtagtgggaaagtcagaggaattgtttatgaaaatgctatatgaaaatattcctttagctaaccctgcaggggaaatcatagtgcaatacataaaagtatcaaatcaatgcagttgtgcacctcacatttacacaacaatatgtgttgattacattccagtaaaaaaactgaaaaagaaaagaaaagaaaaccttccaaacactggttgagaggccatctcagactggggcaagggtctaagtaaaagcagtactgaacaggtggcccattagaaaatcctttacttatgatcaaagctactaggtaactaagataaatattagatgtttggcgtggctagataagacactgaagatgcatgtataactgaaaaattgaggagcaataattgatgcttgttgtatctgaaaagcagatcagtttgggtccaactgtaccgctggcttcagtatttggaggtaaaacccctttactagaatagaagaatatattcacagcagtgctcaaaaacaaagattatacacaccaaatagatggaaatgactcaaaaattatccacactaaatagccaaggtttataaaatgttatccttacctgcagattctctttactaataagaggttttcccgagtcaaatgattgaaatagctgtcaatatacaaaatgttaacattagaaacaagagtactgagtggccctttagatgaaaacgttaatgtgttctaaagctattttaaaataccatttttactataaaagtaatacatgctctagtcagaaaaggcaagtatagtataaagaagaaagcaaaaaatctttaggttgttaatgttaatatcttggtgtctttactaccaacttccttctgatgtattttaaagctttatacatggatttgtgttccttttcactaaatgttacatcataattattttctcaagccattaagttatttgtaaacctcatccaacagctcaatgacactctagcctacgaatgtactggtgttggccaaaagtttgtttgggtttttctgtaacatcccatggaaaaacctgagagaacattttggccaatcgcagtagcataataacttatcctcttgcctattgtgaggcaaagaggaccacttccaccttcaccccaccattcagccctgtactaaataatattggtgatgagtatttctgattagcacctttgaatagattcctggaagcagaagtgctgggtcataagaataagaggcttccctggtggctgagacagtaaagaatctgcctgaagtgcag

SEQ ID NO: 57880 - DNA, 1025 bp, Bovine  19866880499750
  misc_feature (1)..(1): n is a, c, g, or t
ntgtagagtttatttgtaaatggaataacacaatcttatggacaggaaaagaaattccaacatgacatagataactaatatggcactcctgacagtttaatcacttgaaggattctattctttcacagggtgatacgaaattctcttccagtatggcaacaagtggaatcatgtgtagtgttgtagaagagggaataaaaatcaatgacattactcttttttgttcttgggcatttttaaatgttattgatcaaagcatcacagcataactctaaaaaatagaaaagcaagttgtggctgaaatattgtattactgtattgtctgcttcaactttcttaacattgttaactttcagtacactggctcacattactaatgttgagaatgttttctcagtaatgaatgttcaatggacaaaagaatgaaacaaattgacaactggagaagctatgttgtataaatggaacatggactgtaactgaaaggcattttataagcaaatttggcataacaaagaatcagtaaggatagccaaaggaaatgcaattaaaggaagaagtatgaaatttagatacttagaatttgtttcagataaatgtagttttttttgcataagtatgcaatatttttttaagttaatgttcttaaacacaggagcttccctggtggctcagtggtaaagaatcatccagccaatgcagaggacgcaggtttgatcactggtcttggaagatcccctggagaaggaaatggcaacccactccagtactcttgcctgggaaatcccatggacagagaagcctagtgggctacaccctacggggccacaaaaagtcagacatgacttttagcaactacacaacaacatattcataagcaattagaaagaattaaaatttagctgagtgtcctttttctagtttgctcaatcttgtaaccataaaggagggacaattcttgttttttaatttcccagaacttaaattgctgttttaaaaatagcaaccagttctgctttatagat

SEQ ID NO: 57881 - DNA, 1811 bp, Bovine  19866880528816
  misc_feature (1)..(1): n is a, c, g, or t
ntttgcttgctatttggggaatggatggtggatgaggttgagtataaatagcgagaccagggagaagggctttgcaaatgagctgagtgagacatgacagtggttagaggtaaacggggtggaaggaaagaaatgtggtgaagttctagatgtgtagctaaggcagagctgacagcatttgctgatgctggttgagatataggaggtaagagaaagaagttaagcatgaccacacagcttcaacatgagcagctggtaggaaagtgttttcattgactgaaatggggagtcctgctgctctgaggcagggtggagcatgttaagtatgagattcctaatagacaaacaggtggagaggctgcctgtgtaggtgcagagagtatatgattcagaggagggctgcaggtaaatttgggagcattaacagagagttaaaaaatcatgggactggatgaaatcagctggggaccaaggcagagtgaaaagtagaagtcagaggactggatgttgggatcctccacacttagggtccagaagacaagaaggaaagggaagtcagctgggtagaatgggaagcaagagaaagttttcagtagtcactggtatcaccaaagcaaataaacaagcagcctgaaactcacgtgctcagtcacttcagttgtgtccaactctttgtgacatatggactatatagcccgccaatccaaactgaaacttatgtatacagataaattccaaacttcatttttttaatcaactcatttgcgtaagacaaaagtgggggcaaattgtctcctgatggactgtgacttcatattttttattctcaaagttattgtgcagctttccagcttcagttgggaatttagaaagcgtaattaaaagaggaagtgcattcagggtttataattaaaataggtgccaatgttattaggctgcaggctagttatttaaagaaaggattaatgaattagatttcagtgtaaaagcagttactgaaaaaaaaatcttacagattatgattggacttttcacaggcttttaaaaaattctatttttaaacatactcatattgagtttctgttctcatcaccaaatctaaagtcctgtcattaaacttctttaaattatatcaccagaagtctcaccatggatttgcttactcacttttcaatgtattcaaggaaataaagactatcttaaaaaaaaaaaaaagaaatgtctttaaacgcttaccaacactttcttccctttagagctatgtgtgatgtcttgatttagaggtccctcaaaagcagatcctgaaataaagatttgggaacacgtagtgtggtcaggggacttcccttatggttcaggtggtaaaaaatgcacctgcaatgtgggaaacctaggtttgatccctgagttgggaagatctcctggagaagggaaagcctacccactccagtattctggcctggagaattccatggactatataaatatagtccatgaggtcacaagagtctgacacgactgatcaactttcactttcacagtgtgtttgggcggtgactccaggaagaactgtgagtaagggggaaagtcagacagcgaaataaggaaaaccactccaaagagtgttaatgagatcactgccatggcagtcggggccacggagagacagtccctcacccctcatgggtagtggctgctccttacgtgtccagcctctcctgaaactctcttatggccgaagaccaccctcaggtagagaggtccaggtggttgaagtaggataccatatccacatatgagtgacctattca

SEQ ID NO: 57882 - DNA, 1573 bp, Bovine  19866880585524
  misc_feature (1)..(1): n is a, c, g, or t
ncagaacagaaggtgacataagacttgggctaactgacacagcccagaacatgagagcacttgggtatgggctcttattatgaaaagtgatgagaatatttagaagtctgttttttccaccccttcctccccaggctcacaagtatttgttgctgacggttgcctggtaacctgacaaacgctgtctgtgtccagcggggctgagtgactctcccaagcgcggtttcagagcaacagttgcacacatctgcttccctccacgtgtaggggaccagcctccacttgtaacttcccatcaaatgtgcattctgtgtgaggttacaggcggcaaagacgggaccagcttcagcaaagaggaaaagcgacattcatccagtacaccccaagaggcagttccagcagaagtagaagctcaggtctccaaaccactcccttcatcgccactgcccagtgggtgttttaagactgtaggagcctacagggcaagcagtccatctgggtcagcaccatggtcgccttgtgcaaagaaatccttccagaagcaccagccacccctggtcctgtgagagcctccctaggttacttcaccctaacaacatggatgatgctgagagagtaagtcccatttccacttccctcagcactgcctgctgccctgacaggttccaggcttacttacacaaataggtgtgtccatgggtgtgttcaaatatgtaccctcatgcccaactctgcctgctcctcccactgaagaagaaggaatttgtgtaaataatcccctagagtggagaactcagacgtatgtttattaagttccataattttttaaaaaattacagggtaataaagagatgtttgtggaagtttaccttcttcattttgatgttatgaaggataatattaagttcattacacatttattgaatgaatgactctcactgtggatagaacaaacccaggcaggaagccgaatgacaggaaccccatgacagacacaattttctgtagctaatccccaggctggttaaagctccgtatgaagcattgcatatatgtactggcatgtgctttttgctggcattttttattggaaaactcccagacagacactgggagctataagcaaggccccacaacttcataccttcagtgagagtttgctgtttagtcgctaagtcatgtctgactctgtgatccatggattgtagcctgccaggctcctctgtacatgggagttcccgggcaagaatactagagtgggctgccatttccttccccaggggatcttcccagaccagggattgaacctgagtctcctgcactgcaggcagattctttaccactgagccaccctgttaagagcttactaaactgtaattctccttatctaagtccccagcaaatacctgctgcgtgtgtgggctctggcttggcaccccaattctgacatagagtcatgcgtggggctttccagcactcagacttcttacccagctcacattcctttccagcactgcccttcccccaggaggagccggtccagctctgagctccccatcagcagggcggagct

SEQ ID NO: 57883 - DNA, 3606 bp, Bovine  19866880615441
  misc_feature (1)..(1): n is a, c, g, or t
ncatcttttaatttatggctgcagtcaccatctgcagtgattttggagcccaaaaaaataaagtctgacactgttttcactgtttccccatctgtttgccatgaagtgatgggaccagatgccatgatcttcattttctgaatgttgagctttaagccaaatttttcactctcttctttcactttcatcaagaggatcttcagttcttcttcactttctggcataagggtggtgtcatctgcatatctgaagttattgatatttctcctggcaatcttgattccagcttgtgcgtcatccagcccagcatttctcatgatgtcctctgcatataagttaaataagcagggtgacaatatacagccttaatatactccttttcctatttggaatcagtctgtttttccatgtccagttctaactgttgcttcctgatctgcatatagatttctcaagaggcaggtcaggtggtctggtattcccatctatttcagaatttcccacagtgtattgtgatccacacagtcaaaggctttggcatagtcaataaagcagaaagagatgcttttctggaactctcttgctttttgatgatccaatggatgttggcaatttgatctctggtaaagcaagtatccttcaaaaaaaaatttaaaaatgaagaaaggccagataaggagactgagtacataaaacagctttacttattacagtctaccagtggaggtcagtgtagtcaggctacacaacaaagatatcagcatcattatccaggagagatcggaatataaatttccatgatctagcatcctcaccagtgatgcacaatgctggatggtaatatccaggtgtcttttaagtctctgatggggaaacaatggaagcagtgagagactttattttgaggggctccaaaatcactgcagatggtgactgcagccatgaaattaaaagatgcttgctccttggaagaaaatctatgataaacccagatagtatattaaaaagcagagacattactttgccaataaatgtccatctagtcaaagctatggtttttccaatagtcatgtatggatgtgagatttgggctataaagaaagctgagtgctgaagaattgatgcttttgaagtgtggtgttggagaagacttttgagagtcccttggactgcaaggagatccaaccagtccaccctaaaggaaatcagtcctgaatactcattggaaggactgatgccgaagctgtatctccaatattatgaccacctgatgcgaagatctgactcatttgaaaagactctaatgctgaggaagattgaaggcaggaggagaaggggatgacagaggatgagagggttggatggcatcaccaactcaatggacatgagtttgagtaagctttgggagttggtggtggacagggaagcctggcatgctgcagtctatgtggtcacaaagagtcggacatgactgagagactaaactgactgactaagtctctgatgcttgaagaaatgtctgcagttcctctggagtgcagtgttgcttcaatttaatcatacagtttcagatacctccacttggctcttctaccaaactctaatgccacaggttaggaatcccatgttagggttctgctagatactaagtctcaccttcaatcagaggttttgagttttgaacggcctgagatctggaaactagatgaggaagcacgattttccattgcagtaactaatatcagacttttgcttaccatttcttaacttttctgattatacatatcaagcagcaaatttgttgccttctcatccatctatcttgaccctgtaacaccatgattcattagtcaacactgcatatccctataggtagagacaccttggttgtcactctggcctgggctgtccattatggtaatgacatctcatgctggcctttgttaactgttactacctggctttgccattctggaattacatcatccccactaatattatagggttccccagtggctgagcagtaaagaatctgcctgcaatgtatgaggcgtaggagacatgggttcaagcccatgtctctggtcaggaagatcccctggaggaggtcatgggaaacccactccagtattcttggctggagaatcccatgaacagaggagcctggtgggctacagtcctcagggtcacaaagaatcagtcatgactgagagactgagcaccactaatatgatgaaactaaagttcatggcagaatcccttactgcccacagccctggcccacagacagaaaacttccaaaacttctccaaagttgctgttactcaccttgttacattccttgcattctcagtggagtcgtcctctgaccaactaggggaacatggccaaaaggtaggttctttaggacatatgtaataaatccattctaacatttctctctctctgagctttctggccctgtcttcaaaatcatgtcaaggaagtgctgcatcttcatttcatttaatgtagaacattatcagatccacacttccagaaactaccttgttatgtgattaggaattctgaatcatggctgagcccctcatattgggtttccttggtagctcattggtaaagaatctgcctgctgatacagaagaagtgggttcgatcccctgagttgagaaaatcccctggataagtaaatgtcaactccctccagtattcgtacctgggaaattccatggacagaggagcttagtgggcttagagtccatggggttgcaatagagtcagacacaacttagcaactgaacagcaataacaacccccatattaatgaattctaccccatccagctttgtctttctggtcttagtgtactcaaaataccctctgaacacatgttacccccagtttcagctaatccctgtaagccagatcctgcaattcctttggcatgtgggctatttcttcccagaacacagcttgtgttttcctgttcaggctgtgctgaaatgtgtttgatttttagccaggaggtaatgaaggatgttgggggcatatctagagggaacaagaatcatcttgaaaggcacctgcttcagattaggtcattgcacgttcctccaggcaaaaaaaaaaaaaaagactctttttctctggcaggtggttagaggatgtttctgcaaccctggagggttcagaggaattcaagagctcaaaattagacttgtctacctaaaaatctccattttatatctctgaatcccattattttcttggaacctctgctacataatcagatgtgggcccaagttttagcagtctacactgtcattactctgagctgcaatagaggcaatctgacttttagagaatgcttgaagaacttccagtgcctcaaaggaatccatcctacaatccctttcattaatattgccccatactgactaactacaatagctatttgacctccctataccttgctctctacctacacctcatcacaatgaaaccatgggtgaaatcactgcatgccaacccaacttatgaccacagtcggctccctattgctttcagacaggaagattcaaccctaaatcccatccggggagtcca

SEQ ID NO: 57884 - DNA, 1113 bp, Bovine  19866880652099
  misc_feature (1)..(1): n is a, c, g, or t
nagtggaaatgtctctttttctatttcagaatatacaacttgctagaaagaactctgattggtcaagacagccgggatcatgagcctacccttaaggcaaggggaagatactgagaatggttactccaccaaaatcatgtgatttgaggaaggaggaatagatccaaaagaaagaggaggaaaatatgctgttcccagaatctagggtaggaatggagggtaactaaaaacaacagatgtctacaatctgttgaatgatgctggtggaagccagtttgcagttgaaatccagtcagcttttcagactcagctgtcacagatatttattcaaaaactaagacacattctcatagactgcgcttcattttgaaaatgcttgcctattaattgaacatatggattaagatatatgtattccctaaaagtcacacataagagaggcaggcttttcactcctttatggtaattgaagttttggcatgagagaagattataaggttacaggatttaaaagtaaataaataaaaacactagaaagtttttcaaggtgttccctttgggagtctgtacatttatcttagcagtgatgttactgcacaagacagttttgaaaattctcttttgaatttgcctctggcttgaaggggtaaaaatccatgtcttttaagggctaatttgaattttgaaaaaacctaatttgtcatttggaataaaatctggtgaaaagggcaggttagaggcatacagcacaatcatgtaatccaataatgagatagattgatttttctctccaagaccctaatgacctcctctcctctttatccttctctctctccctcctccagtagctcttacacattcatccagactaatctttctgaagcataactccaataatatcactacctttttcgaaatctatcaatgacttgaactactgatttgaaaatatccaagctctttggtctgaaagtcaagacaatttgtagtctcactgaagtttgttatttgttctccctttcagcaccctcaaactgaacccttgaatagtttttgttaaatctctgaattcttaacttgttgttttctatccatgaccagtttctatctcac

SEQ ID NO: 57885 - DNA, 794 bp, Bovine  19866880669961
  misc_feature (1)..(1): n is a, c, g, or t
ncttggagcggctttcctgtacatgctgtccatagtctctcaggcagaatgctctcaccacctggtatctcagaacacaggaaacagtcaccccagaaaatctgcaaaccatttgaggcttaggttcagagagttacatcatgttctgagagaggaaagaccacctttggagagtacgccatccaaaatcctggaggaatggatcccaggaactgtcagagccaagaacatcacctggcatcagttgatctcagctgttccctgagcagtgagggctgggcatccttcctgaaatggagggtctttggcaacttgcttctggatagtgatgtgtttacggtcatatccaccaattgccggaagtgtggggtggaaactgattctgaatgcacagtctccttgaataccaacaacctgcttcattatttgtttctgaaaacctttaccagtttgtgctcctttcagaacaatttgggatcatgatgaacaggactacctgggcttcttctctcctcacttccctggggctgttgaaccccaaggggtcccagggccgagttcagctggcaggtaagggccttacattccagtcccagtaaatcctctgctaggcacttgagatcttccaggattgctatagggggggcttcccagagcctgtctccccagttgtcttgattatcatcagtttgaaaggaattctagtctagtgaccataagcatcaacagcctgctgccagactgttgagatttgcatcttagatctaccaccaaggactgtgcaaatgacctta

SEQ ID NO: 57886 - DNA, 2123 bp, Bovine  19866880700652
  misc_feature (1)..(1): n is a, c, g, or t
nttataagaataacaaaaatatttaaatgttaatttaaaagtaggtacgtaactaggacattactatacaaagcattgttatttaagaaccactgaaaaatggaaagataaacaggatatagaattcatcagtgtcagagaccaggtagagtaacactgtttaagaatggaacattccagtaagcaagcgaaagttactgaactagggaaggaggcaaagaaataaacaaaaggaagcttattaggaacttaccaggaaagtaaacgtacataggatttataaagcaaatcaagggagaggcatctgtccttcccaccccactcacccaaatatttaccattatctttgctgctgttttcttcaatagtcatttgctcagccaattcagataacgattcatcaatagtctggcttcctcgaagcgtgagggatagccttctcttaaattttttcatcctatcaactgaatgtgacttgaaaaatcctgaaagagaatagaatgaacacaagagtaaagctatgaatatcttactgctcaagaacaatgtttttctgcgtttactgggaatcttcaaaataagtataaagtaagaattctcacgtgcctcaaacatcacaaaatctagcctcttccttaaaaagatccattcattttgattaatgccatatgtatatagcatcatcagaagagcaagaattctacaaaactaaagattgacattttaagcatcacaattaaacttagaaggattagaaattttcctaaaatgaactctctaaaagccacttcagtgaaaatatattattattttgatgtgtcagttccatcattatatcaatcatcgtattgcaatcagtggtatctttagatacaactgaggagataagacaggtgaaagcaatgaagcagggagagaataaagaatgaagtctgacaatttattaaacagcaccaggagaaattttcttttttaagttcttatttagccaatatattggggttctgttcccccaccccatcccatcagttgtcaggagtctcttcctattatcataacaatgccaaattttagaaagaaaaaaaataaagtctaattaacaggtttcaaaatgcctactccgtaaaactattcttatctcttaattcatttagccttcctaattctaaagagtagactatactatcccaatatcacaaataagcaaacaggcccaaagaagttccttgactgaaagcaaacaattgatgacgtaagtgagatttaaaactaagattatcatttctgaaatcaagatgtatcacaattaatgcaatgtcaattacaactgatagctttctcttttctgagttgtacatataccaatggtacaattcatagtggagtcttagatatgattaaacaaggtactggttgccaaaatcaagtcctcaattatttacccataacttcttttctaatttacagtcttaactgttgggagaaggaaatggcaacccactccagtattcttgcctggagaatcccatggacagaggagcctggcaggctacagtccacagggtcacaagagtcagccacgacttagcaactaaaccaatttaccagattaccaagcatattacaaccattagcccaactaaaagtaagaatgttctaacactactatgttaaaatacctgtttaaccacctagcgctggatatctattttgaattggcaagtattttgcttactttttcattccagggctttactccaagtagctgagtgtgctaaacaagctacataagatatttataatgaataatttttgtctgctcaaaggctggggggagggtatcaaatacaaatttgtaagtaatattatgttttaccaattctgttttacattcttaaagataaattactgttgctgaatattttctactatcttccagttgactaatcctcttttcagctgtgtctaaactacagttaaactgatctattgggatcttaatttcagttactctattttcagtcctttattcttaattgattcctttctatagattcaagttctccagtgaacttcaccatgctgtcaattttcatgagtaggttagttacagtattttaaag

SEQ ID NO: 57887 - DNA, 1317 bp, Bovine  19866880704475
  misc_feature (1)..(1): n is a, c, g, or t
natttgctgatttgcttatctgctaaaagttacttgtaacctccaaatcaaaacccttggctctttggtggtcctttggggacctgcacagagcatagaagaattggatttttctgacatgcacattctcagccaagttgaacaacacgatggtgactttttgtttctactctcatactataaacaagtatcccttttcatggtatatttattgccaaacttttcacatttttgtgggggttttgtcatttcattatttgaaatggcccctaagcataaagctgaagtgctgtctagtaatcctaagttcaagaaggctgtgatgagccttttggagaacatgtgtatgttagacaagcttcagtcaggcatgacttatagagctcctggctgtgagttcagggataatgaatctacattatatattcaattatatgtctttaaacatagacacacattaaacaagattacatattgatcagctgacaaaaaatggtgtgaccagaggcttgtaggaacctatccctgtatttcccctaggagtaatgcttcagcattcactgactcactgttggcaggaactttctagaacacagcttctgtgaataagcaagtatgggcatcagctgtgtgtgcagtaaagggccactgtcctgcaccttattcctgccattactgcccttttcattctctgctaacttttcctgttcactgagctctcttctctgatgcttttgttcagatttcctttttgctcttccattcattgttactttttagtacgtaaaaaatgcttgctgagtaaggatgagacatggtttgtattatgtctggacttgggtaactgcgtggtattctttctttagtcaattttactgacagaagctgaagacagactcaacacccttctgtcggagatggaccatctaagccataaggacctctctcagtgttctgctggcgaactggagattgtagtggaggtcagactgcagctggctgccattgccctgcagagacaccgggcagcatacaggcgagtatctgcacacatgatttcttcctcaccctgatttgttcaatatatctcaattttatgtaagcttcaaaaattcctagattaatagagcagacttaggattcagggttttttttttcacatgttactacacttaaaactatagtcctcaacaaatgagttggtttattaaagcacatagcttcggatgttttatgtcaaacattagcaaattcacagatctctccttttcagaattaatctatttttttaaaaggcagaatctaaattccttatag

SEQ ID NO: 57888 - DNA, 3710 bp, Bovine  19866880717016
  misc_feature (1)..(1): n is a, c, g, or t
nattaatacatgttttgcctcttgagatggagaaaacttcccatcctggaaaaaatgtgatttgtctttcctgttctgccttgtccctggctcagagatatgggtcagtgccaactgaaaactgggatatcattcctctactgctatcctattttctattcctccgagacacaaatttcccatactggtggggagctagaaggacacattatatcttcaaatcccaaataattataccacgtacaggtgagaatggagataaattattcatgctagaaatactgattatatacatgcatgcatgtgtgtgctcacgtgctgcaccaattcagattgtcaacaattcagacaatgagggtacaatgagaattatcctcagtgaagcagaggccccaagtcagtgtaaccaggcggtccttgctgaaggtggtggaaaccattgcaaagggatgcttctcaatgcagggtataagggacgctccctccaaaatattcttctaaagataaacttacagatagcacagataatacgtggacaaattttggcctcatttatggattgtaaagacaaaataattgtaaacagaaaaagcaaactttctacgaaagaacaaaaactaaactggtcttattttttctctgtgacattaaagactacataatattggccacataaatgtagaggttcttttttgcttttaatttagctcagttttttgcataggtcatttattttcaagaatcacaattcaaaattcatagaagggtatggaaagagttgtctcccttccatcttctctgcaagtgactcagttctcttccccagaggcaaacagtgttgtcagaatgcgtgtgtgtatgctaggttgcttcagtagtgtccaactcttggcagctatatggactgtagcccaccaggctcctctgtccatgggattctccaggcaagaaaactggagtgggttgtcaggccttcctgtaggggatattcccaacccaggaattgaaccatggggtctcctgcattgcaggtggattctttaccaactgatctaccagggaaccactagtaccatatcaatgctctattcctcctataacaaatagccacaaattcagtggcttaaagcaacacaatgtattctcttacagtgctggtgttctgaagcccaatataggacttattgggctaaaattaaggtgtcagcaggctactttcctctggaggcattaagggagaatgtttccttacttacttagagtctcagattatggtcaagcgctaactatggcaaaaatccaaaagttatcaaagaaaaggttaatagtttatactacttagaaatgaaaagtttcttcatggcacacaattaccataaagagggttaaataacatgtgataattgaaaagatgtatttgcaaataatatcacagttaaagggtttatttctataataaagagcttctgtgtatgtgtgtgtgcttagtcgttcagtcgtgtctgactctttgcgaccccatggactgtagtcagccaagctcctctgtccatagaattctccaggcaagaatattggagtgggttgccatctcctcctccatgagctcttcctgaccccaggatcaaactcctgtctcctacattgcaggtggattctttaccactgagccacttgggaagcccaataaagagcttctgcaagtatttaaggaaaaggcatggacccttttactagttaatggaaatctattcggaatatgtaaaaaataacaaatggatacaattttagttttcccaaatggctatcctatttctgtacttttttctaatttctattgatctgtctattcaggattcaataccacactattttaattattatagccttataatataattagtatctattagagtaaatcctcacttattactctttcttttcaaaattgtatttcttttatggctctttttttctactttggaaacaacttgtctagtttaagaaagttctctcataattttattaaagttgcattacctttatattttatcctagaaataacatgtttttattctgttgagtcatcttaaccaagaatattgtatgtcttatatttttagttcattttcatgcctttttttcaaaaaaaatcagtcccttaggagtgttttaacattttctttaagtagatcgtatatgcttcttgttagacttacttctcagatttttatcttattagtagtattgcagaattttttcattagctttctattggttgctgtttttgtgtatggaggctattgatagctctgtattacttaattatctttagatatttttcctcactttatccttcatgagcaaagtctaggcagcacatatcttctgtaaagggccaaatagtaatattttatgttttgtgatctctgttgcaactgttcagctttgctgtgttaatgtgaaggaaccatagacaaaatgtaaatgagcatggctgtattccattcttaaggacactgacatttgaatttcatataactttcacatatcacaaaatattaattttttaaaaccctttaaagtataaaaaccattcttagcttatgggtcttacataaacatgcattgacctaatttggctcatagactagagtttctccttatagatctaattaattctaattagtgccattaaattaatccttatatttgttcaagtttccttttttttttttttttgtaacacaaacagtggtgccatgagtatcttgtgcaggactcttggtacatgtctctgagtatctgcatttaaaattttattagcctctgcccaggaatttgctctcccaagtagtatatgagaattatggtatcttcacatttattgctttcagattttagtttctgttaattgctgaggaatgtgaaatggtatttcatcttaatttatctgattttttatgatgctaaaaattttggccatttggttttccttttctacaagttacctgttgaaattctttgcccatgtttctgttggactatctgactttttcttattgattacatagtagagagaagataatttatgattttttaaacatgttttctcagtccatggtttgttatttatgattggtgtcttttgtgatacaattttttttaattgaatgcaatcctaagtgtcaatatttcctttataagttgtgctttacttttttcacatatggttattttacaaggaaaacataatatttgtattctaatttttttttttttacactttcagataactaccaagttgtcttccagactggttgtacattttcttacgttagtgaagagatacatgaagatgtagattctcagaaaaaaaacccaattaaagtggatattacatggattcttctgctgcgctactatattcacctacaaagaattaataatatgagcaaattgctaggtaggcctttgaaagaatatattcctttccagtcattaagtcatgtttcttacttagaactataaaatatgtttaacatctttctgagtgaactctcatcagaagatggaaatttcagggggttctttgcctgatatacagggacctttgaaaagaacagtatttcaatgtatttaaaaacatccttagaaggaggcatccagaaacttcccccaaaactactgaagtgctatgtgactcaaaa

SEQ ID NO: 57889 - DNA, 893 bp, Bovine  19866880770237
  misc_feature (1)..(1): n is a, c, g, or t
ncgatgccgccacttcctgaaatgtgtaatccttctgtcttgaattccaaagaggttggcaggaggaaggcactaaagatagttcaggaactaatatttaaatcagtttttaattcacctttcaacatgaatagtaaaaccggaacaaaagcttacccttattaggactccaaatctttatgtctatgaggctaaatattcagcaacaatagctccacacagaaatggtcaacaattacaggcctgaaatgattacccctcaagagcaataattttgccccagcagtcacatcaattgcttttccagaaacgcattacagctcactccgactgtccaggctttggaaactatgttgtgttatcattaatagagcactctgacttatttccgggacttaaacatgagaatggttttgcttttaattagggaggtttcccatgaagtcgcgatccctgagtaccaagcattattctaagttttccacatgtgtctgcttgtttagttctgcacagagtcctgagcccacactatttgagccccattttataaatgaggacagcaggcacccaaatgttaaatagcttgccccaggtaccatcccctccccaccctggaaaagcctgtttgagtgattcacaaaccagaccggataaacagactttctcaattgtcacattcattctgtcactctacctgtgacggaggccacagaacctccctgcacctaatttctgttgtgagcaaatttttgcagcaaccaccaaagaaaatgcagaggcaacaaaatttgacccacggtcacacctaaagggtggacctccctggtggctaagtgataaagaactcgcctgccaatgcaggagatgcaggttcaatccctgggtcggaaagg

SEQ ID NO: 57890 - DNA, 2722 bp, Bovine  19866880773184
  misc_feature (1)..(1): n is a, c, g, or t
ntccacgtctctgcgctaatcttgaccttgatccgggataactgcctggttttccgggttctcacagctctcaccacagaagcctgccctccccagttcccaggccagggtgtgtgcagttttcatctcttccacttcactggggtgtcaggctcaatgccagcaaccttttcttgtcatgggcacatcagtcacacacctagatgttccctaacttctatgaccgcaactccaccacacctcatcttccctaagacagagcgagttgctgacaaaaccgagtcctcaggtcataccgtaagtagcataaagtggtggtcatacctgggatgagtcaaggtactatactaacagaaccaggttgggccagtggctggcctggattccctcttatcaatgtggaattccttcttcactctctttcctcccatgtggctggtatggtcagatcatccatcctagactaagcatatgttccacttcactagggggagggtagaagggtggctcccagaccctaaggaaaggattcgcctataatccaggggtaaggtccaaagggccacagaatgagcctgtgggcaagtaccaatagctgaggttttacactagagaaaaaaaggtgcaggccaaccagataattcttcaataataaagttttctgatcatgcctatgctgaaaagatgaacacacacacacaaaaacataaagtggaaggaacatctctggcttatgtcacatacttagcacatggtttcttttcatctttgcactttcccctgcccatccctgcttcacagaggtgaaggattaattaaggtagataaagtgttctacaggtctcagatgaacgttcttataaaactgcaagaatgcgtaccattactgaccctaattagcctgaagtcaagtgagtattaactagatttaaaggtaaaggaatattggtatatgtttcaaagttcctactacccaaggggaagacatgccccatgaaagaagatttttcatggtgaaattataaaagtattcagagtgaaaaaaaaaggaaagaggcaaacatcaaacatcaagggattatgggtgaccatgaaagcaaactagttaacaagaacaaagtaggtccttcaccaaggtgacagcataactgatttttatataagatttttcaggtcaagtctattaaagaatctgtcagctccatgaactttcattgtggtaccatttctctgcattgaatgctggctgaaattaatggggcatgggttaggggtggaaagcttttaataaaacacagaaatgtttgtggtaaattatggtagctaggagtttgtggttgggggaggggaatgttctagaacatttcttacagcaattgccctagcagtcatacactacctgatttctcatctttggtgagtgcagtcatttaacctttttgtgcctcaatttcctcatttctagaaaggggaaaatgttgaccttataaagttggtgtgaggaaaaatgaattaatagataaaaagcactggtatggaaaataatactaaaggagttactactattattacgattatcattgctgtgattgtactctgcccttggacagagaatctattggagactgaaataggtcttataaaggccccaaagaaggcctaagaacccagggaagaaaaaatggagaaggaaagattcaaagtgaaaggactgtagatctgctatgaagatttgcttggataagttttcacctattccaatggctttttcatgctattctgcctcattttaagccattatcaaaatagtatttggcctatagaagcaaattgtttccaagcatagtcaaggcctgtttggagcccagtattttgaagtaacattggacacaacagcattatttgacccttctctctcagttgtcatgagattatctgaaaaggatattttagataatggaaatgagacaggctggaacctggggcccttgctgcagtgctgcaaagctcacatgtagacacacttctccttgagctacaaaatacaaagaaactgtaggagactaaaaatcactgagtgcatgcacagttggggcaaattctgggccaaaagatacaaaaaaaccaaaaaactcaacaaccatttctgaagagctgggagcaaaaactgggtgtcgggagcaaaatcagggtactgcacataccattacctaaagggagggcaaactgcctaagccacccctccagcctaatgcctggacagacttccacttgctcccaacctggagtggggtgcagaaagcctgttacttgttttcattccctcctgcagctggtgcagaagccccaataaagccttacctaaatttcttgtctggcctctagtcaatttctattgagtggagaagggcaaggactctggttggtatcagaaaggagatgggtagtaataacatttgtcgattatttccaacccttctgctgggcacatgataggattatacgtctggtcccctttggggcattggatgggatcaacgggctagttcctgccaatgagttgtgagaagcagtgaggtgtgtcccttccaggctgaagtacttaatagccaatgcagcacccaccaatcctctccttctctctggcttgaaagccggcagcttttggaggctgtgactattcatcagcctcatttcttcatgactgatcaatgatgagcag

SEQ ID NO: 57891 - DNA, 1668 bp, Bovine  19866880791852
  misc_feature (1)..(1): n is a, c, g, or t
natgattgctaacataaaaatgaatgctttttattacacatgtaaaacaaaggtacagaaattgggtatagattgagaaagtctcagtttaatttccttatagggtattatattgaaatttgtataacttcttggcaaaatgactctgagagaagttgtgatgtgtaggaatacagaaaagtctgggacattttgaaggcttataagagcagcaaaacagaacatatgaaaacagaaaaccagcatgtctggttggtttttctctgtggtaaaagtttcctcaggtaaaacctctgaggaaactaaaaacctttgtgtcagtatggaggttaatgtgcttctttcagaaataaaaggatgattaagtcttccaaaaaatgtataattatataatgttttaaacattaccttgcttgctgaatcatataagactttttctagaacaggtggatgttccatgacttgaaatagttcttttggaaattcatcaatacaagaagaagaatatagctgtaagaatcttttaaggaaaaaatgcatttctttttggcgcaaaatcaatccagagttaaaaagagaagtgagaagagtgtcatctggcaaagacatcccagatcctggcttcagagatgcttaaaggaaaaacaaaaactactatagaatcatgttagataacagaatggtctcaatattgctgtcctttgcttgctaatctcattcctgcacattcccacctcacccagtggctgcccatgaccttcctccatttttcaagcttgtacactaacagaattgcttctggtcacaggaaggaaagaacacctcaaaactctgtgatcctacttctggtttcaagcgtatcaaagcaaaacattcaatctagctgtcttatttgtcttatccccagccaaaaaaaaataataataataaagcaaaaattcaggttcaggtaatttatttgaaaactgatctgaagtgagagaatgggaaatgtgtgacagaaaagaaaagagtcaatgacaacaagttaggaaagggctccagctatggacaaggagagctcagtcctgctgagggcctcctaagaaaaagcatggaaatctgttccatcagggggctggcatgctggaatacctatcaaccagttccctccctcagcagttgtgggttactcctgaatgtgtgcagtccctggtacttccaggctatcctgcctatatgctgggcctcagtcatttctaagaaagcccagggcagaaagaagcaaaatgtgcacgattgacatgggagataccagcaggtgaatccagggggagctgaatccataacaggagggcatcactggggcccactgtgctggattatatccacttccttcgctactgaactggccctatcacgatgcaccttttacccaccacctttcccagtgcttgcctctcccgtcactaactctgataaccaggctgagccgctctgtgacttagcctctttgccctgctgatttccccatcactgggtgctgctttagtcaagctgtctttcccaattgtttgccctcataagcaacactggctcaccaatttcatggggcacagataaatacatcatcacaaaaccacaagaggagagaatgtgacttagattacaacagtttttttggctatt

SEQ ID NO: 57892 - DNA, 1055 bp, Bovine  19866880862895
  misc_feature (1)..(1): n is a, c, g, or t
ncttcaatcaaagctttcataaaatttaattttatttaggtaacagaggttttattgggatgtattttattataccattaaccattttataacttcttaagcttgatctgtttccagaattttaaaaattgagatattaaatgaggataataattttcagcagtcccttgtatcactgaaaatggcatatatgttactgatgtatgcattgcaggcaacgagatttcagagtcatctaggaaggcagcctggtgcaggggtccagagagcagtttctggagccaccctaccttgagttcaaatactctatccaccacttccttgctgtgtaatcttggccaaatcacttaattccccctatgccccagttttctcctctgtaaaatagaaatagggtacttacttcataggattatttccagaataaataggttaaatttctaaggttcttagattacaacctggcacatacaaatattagtgctggcagaggttaatagttatctgtgtgtgaacctatctatttacccatctctacccatctcccaaattaaattatttcatgcaatatcattattactttggcagcgtttgaatactctaaagtacttcccctcaaattatgtttattttcaatatttcatgtagttttgttttccatctttgcatcttccttttcttctattttatacaatattcctgtgataaactttgaggattttatgcttatacagtttcttcctttcttggtgcattttaagtaactgcatttgtttattttagaaaacgatataacagattacgtgagccttatcaatgaagtgtgtgtggaggcaaaagctgcaggtgacagggagctacaggctgaattcttgatgcaagctgtaattatcggcctacaagaaaagcatttaaaggcagacatcataaaaagccttcaggtaggaaggcagtctcattcacattgatatttaccaaaggattctggttagaataaaaggagagagtttaaatttccattagttactgcttgttggcagtcaatatggccagct

SEQ ID NO: 57893 - DNA, 1495 bp, Bovine  19866880864783
  misc_feature (1)..(1): n is a, c, g, or t
ncatcctatttacagaggagatgagtgaggctcagtgaggttaagtaacatgtccagagttgcacagttttaaatattagaatgaggatctgaacctagtttttacaggataccatagactctgctttttcttctacaccattatgtactgcacacacactgagaatctatcacgtgtaaggtgctgtgccaggtctgggaacacagggcataaaagatttcactctgtccagatggaacgtatggtgtagtaggagaaagtgaaagtgaagtcgctcagttgtgtccgactctttacgaccccttggactgtagcccaccaggctcctccatccatgggatttcccaggcaagaatactggagtgggttgccatttccttctccaggggatcttccctaaccagggatcgaacccaggtctcctgcattgcaggagccaccagggaagcccatagtaggagaccagagatctaaataagttataactcagggtgaaaacgccgatgagaacacatgggaggggatcagagctgaagattctaacccacatctgggaaatcagagtgggcttcctgaaggaagtgatgtcaaaactgagactgcaggtcagcaaggaaagacccagggaataataacactgagttccagtttcttgtctgctcaaccaggttgtcagtgggcactccctacccctgagaaacctggttctaagattcatggcctttgagattcacggcctttgatggtcccttcccaagatggcccctgagtcctctgtcctgaggtgttctctgcctctacctcgctcatcctgaaatgctatcatgattttgccccacagctctccagagataagactcagccccttctctattttcctcattacttacttcagtatcgcatgaattggtgaacctgacttaagattttggtggagggaggcaggcatcgtggggagggtccctttcggagcacagggtttccgccctctcctggccccccacttcctccctggagctgcaagcaaaatcctctctttgtcttgctgggagcggcccgcctacctccgtccccaaggatctcggtttttacttctagcaaaggattttctcaacaaacacagctctaccttcctaagaggaattctgatgaataaaacgctcttctctttacacgtgcattgtctcatctgatcctcctagcaaatctccaacagagccatcattgtgcccattttacagatggggaaactgagtagccaggtggtggcactgagagtaaagagtaggactgtctgaatccaaaatctccattctcagctactctatcctgctttccagtaccacttggattggatctgaggaagagaggggttgggagggaggacaaggaagatgattagatatcagaagctgggtccatagaaaaatatgaatttcaccagcgatgctagtctgcagtacttacatctccacaaccttagggcaattattt

SEQ ID NO: 57894 - DNA, 1204 bp, Bovine  19866880899856
  misc_feature (1)..(1): n is a, c, g, or t
natgtgtctttctcccttgccgtggccctgtagaacagaacagccaatgtgaataactttgtaggaaattagagtgtgattggaccttctcagaattcttgttgaaagtatacactccccaaattcaagtaatgcctaagagaatgtgctttctgttgcaggtcgcctatcagactggtaactatgatctggctaagaaagttttctcaccagtctgggattattttgttgcttcaccacctcagggtgaccaatccattatttgtttaagcaatataatgactattacacagagaaggtaattagaaatgttcttttaaaatattattttgcttattgaaaagataggtattagctgtgaagcctggagttaatttattttcaagttcatgttgagatggtatatgtaaaactacttccaacaagtaaagtgtagatattctgaaggtttgggtccttcttagaacttgctttgttagaatcagaaaaaacactggaaacatataggtacattctgaatataagctaatgaggttatgagggaaaaaaccccaaatactaaccaaggtagtgtcagttttactagaagacacaaatacgtattgggaacctttatcacagagaaagatcaggttgagattaaggttagggtctggtgggtgagctcttagggtaagaaggcttttcctttgcttgaagaggcacccaggattaggccatcaactgcaaataggtctatagaagccatagaaagctacaggctatcctttgccattttttctttaagaaaccaaagtttaagggcagcatcagaaatgagcattggtataatttcagcctgtctcaacatattcagtaagaacagtctccttaaaaaaaaaaaaaaaaaaaagaacagtctcctttacctgcttgataatgcctaaaattcccttaataaggcaaaactcttcactcctcaaaggtaacgagtttaaaaatgcaaatgctgaatgaggcaagacattggtaacacttattcatgtaaatgtataattccattcaattaaacaaacataaacttagtgtttaccatgtatgaggatgctcagtgctgtggggggatggattcaagaggcattaaagaagaggaagagatagatcttggcagattttatgtgacttgtggggataagacagaggaaggaggggaagctgactggga

SEQ ID NO: 57895 - DNA, 726 bp, Bovine  19866880917782
  misc_feature (1)..(1): n is a, c, g, or t
ncgtgttctgggcaatcgttgcaattttgggggtaggagagagtgactgtattgacaagtgggctttcctttggtggtctcagtatctctctatccctcaaggcccagggaaatgatgtcctggtttgcctaggatggtcacaggttacatttcttatcctggaataattattaatagcacttgcttttactcaaaagtgtcccagtttagacaacagatttcattttcatccttctcatgacagatggaagttagctgagatactgtcccatttctctctttggccccggcacccaccttgggagaatctggcagcctatataccagttaatttagggagcagaattcatggctttaacctggggacaagtggtacagcagccccttgcagaataaaagactgatatagctacttcacatccctgtaattatccaactggctgccttcttctgcccttattacttaacatcttagatttctttttcaggggtcatcagagctgttatctttcaccttaataggattatatgttgtgtgtgtgtgtgtgtatgtgtgtgtgtgtgtgtgtgttttttaatccctggtgggtgttatcatccatgactaacagacccatctgttttaatattcagtattaaacctacaataacaataattatgggcttcccaggtggctcaatgataaagaatctgcctgccaatgcaggagatgtgattttgatcc

SEQ ID NO: 57896 - DNA, 769 bp, Bovine  19866880929942
  misc_feature (1)..(1): n is a, c, g, or t
nttagcagagggtgtggtaggcgcccaacaggaaatgctgagcatcatgttcctacctcatacaaaggagcccagacaccacttcctgttgtttttcacatggctgaccttgcccacagcccttgcagggccttgctgctgtgttgcttgcttccaggtgccttgtttcaatgaccttcagctccttctcaacactttgccatatgtaattgcagcagtcattccatacaggccccagttcttactcagtgttgtattccaactgagttcctgccttatttctagttccattatcaatgcccgggtcttggattgctgcggactcatggatttggtttgataagaccacactgaggctgggttttcagttaatgaaaatgtgaatttttccccataacctctggcttgggcccaaattattccaagttaaatatgatatctttggcacgtgtattaataggctccttggaccaagtgttattttatacaaagtgattttaggccagacatgggaggtattctgtctgttaccaagccaggtctgttttcctgacatgaagcgagccaagtactgagccgctgagatttgcagcagagaaacagtttattcacaaggcaaccaggcgaggaaaaagtctcagatctgcctctggaaagcgagggagttgggatatttatgagatatcaacagtgtgatcttaggctcagggaaaggtgattggaggtagggggaaaggtgagggaggagtggagttctgcacagggcacc

SEQ ID NO: 57897 - DNA, 2096 bp, Bovine  19866880936915
  misc_feature (1)..(1): n is a, c, g, or t
ntgtaattgaaaatgaaatttaggaaaataatgaaataaaagtccttttgtgttctacaatgcattggggagtaattctataattatggaaagattgcttcattggattctgggttgcatttaggagcttgagccttcaagagagactaattgatgactaatgatactgtggtggactggcaagtatggccacaatatgtgggatttagtgtatacctgtaggaagaatttaaaaggaattagacacagtctgcaaagagtttagtcaattctgtgatcccaggaattttccaaatcagcattcttagaaggaatgtttagacttcaggctagagaatgagattccaaggcagtacatggtacttcaaatacagaaaacagaaaaggagaagttgaattagaagcaggcttggggcgggggcaggcagagacctaagaggaggagaccaagcatcagagtgctgctaagtcacttcagtcgtgtccgactctgtgcaaccccacagacggcagcccaccaggctcccccatccctgggattctccaggcaagaacactggagtgggttgccatttcctcctccaatgcatgaaagtgaaaagtcaaagtgaagtcgctcagtcgagtccaactcagcgaccccatggactgcagcctaccaggctcctccatccatgggattttccaggcaagagtactggagtggggtgccatcagctttaccaagtacatagataagatttaggtttgaaaagagtagaactaactgagcaggagagaggaagaagggaacattgtcagccgacaactgtgtgaaaggtatagaggtgagaaagtgttgatttgttttagggggctgagggggcttggttagactggagtgggggtcttgagtaggcagtttggagaagatgacatgaggacaccagaggcccaggatgtggaggagaccgtgggtccagtcttgaactctaagctgagacgtaacgtggagggtgagcagtgagagagatgaggaggtgtggagtcagagtagggtgacaattttatcctggtgtcactaggagacaagaagcattgcaggttgcagtgatcatcagtagcatgtcagaaggagatcagaaaggcattgaaagaatctggaacaaagtttttgattaagtgactattttttattggattgttagcactcagcaactctttttgtatgagagtagcttaaaagtcagtgagaactatggagagtctcctgtagtcttgtgctgagagggggaattcatgacacagttttgatcaggagaaggacgagatcagatgtatctggtaggagtgttaggagtagagtgagatgagagtaggatcttactggcatagcatgactggaaactcaactacagcattgccagaatccatgaaaaggggcaattgttgcatcatacagaagaaagaatgacagcccctgtgagtaatttgtctgaccttcccgaactaaacttggggtcagtgagtgggaaaagagaaaagtcacagtcagaaaacaataaacagtgatgctttctgacaaatcaaacagcagtaaatcacactgttaagtctctaccagtgctctaatgtctttcagggaaagctttaaggcctctttatgatcaacttgtctggcttcctaaaagatgtattactctcaaaacatccagcattcctgggaagggtaccaatagttctgtatttgtatgatggaatagttgatttatgggtggttcttttttccacctggcttatgttcacaatgtttctgaaaatacatgtctattattatcaccatggctttttcaagtggtcagattcatttaataaactgaacgagaggtagcctgaacagttacaagtggtccacgtatagcaatctcacattcaagaccagaggagactgacctcacatagatatggggaaatgtttcctctaaggagcagagagttcagtcgactccctaatgcctgctttggtattatatgacaccagggagattagagcccaaagtgttttagggaagagccaaagtgggcaagtcaataggcaagccattttctcttcatta

SEQ ID NO: 57898 - DNA, 1516 bp, Bovine  19866880944030
  misc_feature (1)..(1): n is a, c, g, or t
ngagtgaggaaggaagagaagggaaggaagggttggggttgttttaggtggtgaagtttaggattaagaaatgacttgagttggtgggattgtgaatgactgcagtggaaagaggtgaaaagtgagatttgatcatctgggagggagccttgcagggtggcagaggcatgcactccatcaagcagctcttccaaataaggggcagaaacatctccattgatcctgtgatcctgttgaggtcagaggttcagcctttctcaggagctcctagaaatgccaatgctgctggtctgtgggccacacctgagtacccaggattcagacagggagattttctttcttttttaaaaacattaatgtatttattttaattggaggctgattacagtattgtactgggttttgccatacatcgacatgattcagtagcaggtgcaaatgtgttccccatccagaacccccttcccgcctccctccccatcccagcccccagggtcatcccagtgcaccagccctgagcaccccagagagggagattttttaggcaggaagttgggtggggaactttgtgttaattttttttttttgaaaacttgatttttatttttcaaaaaataccatctaattgtttattctttagatttcagtaggctttatatatttcattctcattaaataatcctctgacccaccaaaaaatctctccagaaaattttgatgtaaaatctctaatctttgagacaacataaacatgatttaaattctgtagacaaataggctttcagtcagttggaacaacttaaatggttgctgccttaggtgggtaacagctattttttttttcatcaaaataattacatagaaaacttacttttgtgatatgatacacatctttacatccaataagagaaaacagaaatctttgtttccatggcagtttgcaatgcaaattaataagatgctaggatagaaaatatatcaccttttgggccttctctagggagctgtttataattaggagcttaaacaaataagatttgaatgaaagaatagtataactccagtgactgaacagcaacaacaaacacaatatgagcattattttctgtatatcttgacatggcataaatattttagcaagacatacaattattagacacacagaaaacagtcaaaaacaacaaaaattcatctaggcatattcagaccattgaaatgaaaatttaaaatatgtcctagtaaagacaattgctatataaatgctgaaaagaaaacattattgtttcacttacatggagagtctggagtatagtgaccgtcaccctggtttgggttggaatcctatcttcatgacacagcagtgggagcaaagcctttctaacccaagtttcctcatctgtgaaatgaaggtgaggatgcttaccccttagagtagctaggaaaattaagtaaaataaaagactcggcacataataaatacccaaaagaaaacccaaaaagaggtgaggggactatc

SEQ ID NO: 57899 - DNA, 863 bp, Bovine  19866880947671
  misc_feature (1)..(1): n is a, c, g, or t
natgaatactgtgaggtcaagatggcttcaaaactaccctcagtattaaagatgatgggtaagatccacagactcttgcagccagacttcatgggctgtggtactttactgagttatccaggtactaactctcagtgctgaacacctgaagccatcacctcattcagagataagatcagaccctgggagaactgatttcatactccccagactcagacaagtcagatttgtcccagaaagcttctttatgaatatgtagtagcaagaagacctccatctgctctccagaacaccttttccctacattaatggtatatgtgtattaatatactacctagattttttttcttagtaagttaagttagttatcaaaatttgatttgatacccaaaaagatgatttgggtatatggattcagagaaagaagggcttgtgatccataggctgatatttcctgtctatgttagtgctaagtcacttgagtcgtgttctactctttgtgaccccttggactgtagccaggggacaagaatactagactgggttgcaatgctctcctccagggatcttctcgacctagggatagaactgcatctcttatgtctcctgcattggcaggcaggttctttaccagtagcatcacctgtgatagggtctcatgaattccctttggttccatgtgtctgtcagaaatgatcgacagcaagcaactaaaactgaccctggttacacagagcaagaaagaagggttatttggaggatcgtgggcagctcatggaggttttccctgaccatcctatctgtagtgacctcttctgttgatctctaatacaccaacaccctatctctttcataggacttgt

SEQ ID NO: 57900 - DNA, 1058 bp, Bovine  19866880953255
  misc_feature (1)..(1): n is a, c, g, or t
nttaaggtagtaaaaatgcacttgtgtgtaagatatctcctaacaggacaggaagaaaaaggcctggtaatttactgaagacataatgaagaatgtcggaacacatgggccaaatggggttaaaaaaaaaaaaatttctgaagaaggaaagaaaatgcagatttaacatatcccaaaatgagtcaatcatctgctgccctgtctaatcaatgattctggactcagagcaccagaaaataaatctgattactttgtcttctttccccccaaagtgaatttattataaggatatccagaaacaatggcatgaaggcagctggcctctgggagggaatagaatctggaccagaaaactctcattaacgtaggcaatactctgtctccaggttctgcctttgcttttcaaagacgtcttgcttttctctctcgagacaactttctctgtttttccaagctcttggaagacttgaccactcttacaagcagttttactatgcgcagcagaatctcagtttcagattcccaggagaaatccctggcctcactatcaagttttactgattcttcactcctggctttgcctttcagttttttcaactacagccttgactcaacaccattcggattgatccttgtggtttaacagaatcatgggtaaggagttagagattgactaattttggaagtagaaccagggtatcaaagggcctgaaaattcagggaaaactgtttattcttgaaatatggacatacaaaatggaattccaggtaagatgattgagtactcatcagtgagcctttggagtaaaaatacattacttcagtagacctatgatgtaatttggagtgcagagttttaggaactctaagatcatggcatctgctcccatcacttcataggaaatagatggggaaacagtggaaacagtgtcagactttatttttatgggctccaaaatcactgcagatggtgactgcagccatgaaactaaaagacgcctactccttggaaggaaagttatgaccaacctagatagcataatcaaatgcagagacat

SEQ ID NO: 57901 - DNA, 962 bp, Bovine  19866880982411
  misc_feature (1)..(1): n is a, c, g, or t
nactggcctccccacaaggcattgtaccttgggattcctaagggcagggactatttataatttacctttttagacccacagaacctagtacaaaacctgaaggagcataatactagatagatgttatttgaaccaaaaaaaaaaaatgaacaaccagaattccctcattgacaaagctcataatactgcatggtgtttttttctaaaaagaggttctgctgctgctgctgctaagttgcttcagtcgtgtccgactctgtgcgaccccatagacagaagcccaccaggctcccccgtccctgggattctccaggcaagaacactggagtgggttgccatttccttctccaatgcatgaaagtgaaaaatgaaagtgaagtcgctcagtcgtgtccaactcttagcgaccccatggactgcagcctaccaggctcttccatccatgggattctccaggaaagagtactggagtggggtgccattgccttctccaaggagagttctagcagtcattatttcaatgtttgcaaattgtgatgctcactaacacctgtgttgccccactccatttccaactattctttaaattgacttgatactgcatttttttgacaattcagtgacagccacaaattacttcactgttaccgtggtaactaagggacctccaaagagagaaaaaaataagattaaaataaaagggggaaggaataatctaaattggcattattgaaacgttgtccaagtgtagacgggtatcagttggtcaagctttggggagtttttcccagtaaggaccccctgaatcagtcagccagcagggggaggttgctcctttgaacaagaatgcttgtttcctgcaagaagcaatggttcaaagttatggaaccttctactctcccttacttatgcatctcttttatttggatcatctcctttgtttttcatctcctcctgctttt

SEQ ID NO: 57902 - DNA, 1212 bp, Bovine  19866881019678
  misc_feature (1)..(1): n is a, c, g, or t
naggagttaaaggatcttttacatcaaagttaaacctgtgattttttatgaactttggtgtgcctaattaagcgattagtaacaagcaggagtttccaaatgtcaagtgtataattatgaaataaacaagagctggtttttccaataaacttctgtactgtgctctattacctcttgctggggaccaaacaatgtcttctggtgaagagtacgaaattaggatggatttccattgccgaaggcgagaaatcttatctgctgaaacataaccacaagatacttaggataagagtaagttttaacctagtaaatctatggatggatattaattccacctctcaaaccatatattataaagaaattccattttattcctttttgcatttttattttgcatgctttggactctcttgctcttaagctttaccaccagtatttctctctcatttcaaaattcaaaatagttattttttttaactgaaaggtgaattaaatttggtgtggatgaggagctgggagttacatgataagttaaacatattactgtttaactgagtagaaagtcctctgtgttatttcagatgaaggatataatttttaaagcccatccccaacatttactcttggtgtttctgtacagatagtcagtgtttgactgattcccataggttttagccaaccaaatattaaggtctattgttatatgctagggagagtggcagagacaaagaaaatacaagtttttatgtctgtgtttgggaagtttaaaagataattgaagaggcagagtatatgttaagtagaatgagtaatacttatcatgaaatatttttgtcatttgttataaaagtaatacatacattaattaaaaatataatgcacatatggcttatttttctctcagagaggtaggtagatcggtcaatctagttcttttaaccacccacttttattcattcatttctttcatactaggcatttataatgtgttccagcttagttgcagtcaatagagaagcctgaataacagggttcaactaaaggagaaattcatttctctctcatgagaaagaaggccagagaggcagcatagggatcctccctcgtgctggtagatacccaggttcttgccagcttactgcccaggcatgtctttgctttctggctcaatatagctgctggaacataagaagcacagctgaactccagtcg

SEQ ID NO: 57903 - DNA, 772 bp, Bovine  19866881036580
  misc_feature (1)..(1): n is a, c, g, or t
nattttaatgacaatatgctcaactctgtcatggggctagttaagtctgagtgaacacagttaaggaaaaccatcttcatgtcttaaaaaggaaatttactttcatgagaaaactaatgttttggctgtgtttcattacgacttgcttataatccatttttaacaactctgaatcaaagtaattcagattgggcctaatgacaattggcccaatgccatcattggatggcattttccagcttaagtccaataagactaatgacccacatagaagtgctactgatttcttaagagtcatagcaacatgctcagtgttaaaagaaataaattaaaacaggtaaataagacatacgcctcccttcaaggatttctgatctaattacaataagaccagaattttaggcttaaaaagcaatagtcccttcctcaactcctaattcactccagtctccaaacctggataaaaataaaagggatggaaggacacactctagaatttctcttactttcaggtaaagcatgtattctcggtcccagacttcgaaagtacacatgtttcatggcctcttctgctgaaacccttttcttagattcatactgtgaaaaaccaaaaaagcagcttcattaatttttttctctaaataatggaaaaagcatgtgtgaggggtaggggacacacacacaaattagcatttaaatgtttagagctaccgttagcttgattacttaataaaaattacttatttttaagaaccaatttactatgctctaa

SEQ ID NO: 57904 - DNA, 1034 bp, Bovine  19866881148357
  misc_feature (1)..(1): n is a, c, g, or t
nctccttcgagtctcccaactaacttcactgccagcattcctcattccatccagcctccccagcatcagaggaatagtcgtcataatcaccattgcatcagatgaaagtgaaagttaagtcgctcagtcgtgtctgactctttgcgaccccatggactgtagcctatcaggctcctccgtccatgggattttccaggcaagagtgctggagtggactgcgatttccttctccatgggatcttcccaacccaggaatcaaacccgtgtctcctgcattgcgggcagacgctttaccgtctgagccaccagatgactcgtcgttaaaaatgtgaaatcctttgctcctatctagaatcacatctaacatttctagcttgacattcaaagacttgtcacatcgggtcccagcagtctttcttgtgttctctccattaacctctttcccaaacccacagtttcctcctcttgcaacaccggccacgctctgtcatgttccgctctgtctgacttgaatttgtacctccctgctgattctgttctgctcagatcaatccccagttcccccaaatccttcctgattaccccggttggaagggaatccttcttcccttttttcacaaatgacacctaaaattccttttactgctaaattttgcatgtgtgaccgttcctagtagcttataaactttttgaggacatgggatatttctttcttacatacttttatattcaacactgtattaaacatagcaggcattcaatcaacaaatgtttttaagtaaacaaatgaattttaacaaatcatttttttctgttagtttctacattaatacttttccaatgctatgcctttatgcccattttaatttctaatattttgagctagtacttacattctggagcatctgtgctaaaaattcattcacttgatgggaagagaagtcttttaggtctgctgagctgaatgaatttaaatcatcatctttggcctgaaataaatgttgcctgattatttacattcatgtagaactcaa

SEQ ID NO: 57905 - DNA, 2476 bp, Bovine  19866881179286
  misc_feature (1)..(1): n is a, c, g, or t
nctaaaaatctgtgatgtggaatcttttatactaaatctgagaccacaccccaaatattatgtgaacaactggtaactgtagctagttttattttgaagtatgaagttttgaataccaggaatcctgagacctttgaaagccacgtggatataaagggggaaaaatttgtacatgatttaatcccacgccccgcaaaacacaactatatgaatgcaaaaatccacaataggatttctttacagcagataatgtgaaactcaagaattttggtaattgttaactccgttttagttcacagtgtggcaaaattagcaaacaacgacagaaacaattaaagcagcaataaagcaaccccaggttgacttaatagagacatagggaccagaaccagagagtgagagtttcattttactgtgctctagtcatatactgtacagggacattggccacctcaaataataccatggtaagagagggaagctctgtcctgggaggatagaagtgcttggggatcttagtcctggagagtgctgggggagcggcagcctgcatagatgctttcagattcttggaaggctgtataattctcaagttgagtcttgagtggtcttgtgctgttctagaaggcataactagaatgaatgcactggaggtgtatcaaagtgattgcatttcaggttaaagaagatcatgtttagaagtgtcttcttatgccacgtggcacattccttgttgattgtgggcagagaaggtgagggacatcaggtggtggtgctggtgatgttgagggaatgaaattagattctcagccccttgatgctatgattactagaaatatgtagcatcaggaactgaaacttttcaatgaaggtctgttgtcgatcaatcaacagaaatttgttgctaataacaattgcattgttgcaattagctccttgggcttcccttgtggctcagctggtaaagaatcctcctacaatgcaggagaccctggtttgattcctgggtcaggaagatcccctggagaagggataggctatccactccagtacttttgggcttgccttgtgtagctcagctggtaaagaatctgcttgtagtgtgggagacctgggttcaatccctgtgttgggaagatcccctggagaagggaaaggctacctactccagtattttggcctggagaatttcatggactgtatagtccatggggtcacaaagagtcaaacacgactgagtcactttcactttcatgcctttcataattagctcctcgactagtgttgacatttggtaagtgttaagaagaataagctgagttcataggactctaggagctaggcaggaagacatcgtaaaatggctaacttgagattttgagttcttgaaattcttctttaacttttaaatgcttattttttagttgactcattatttgtgtatttttagcgtcagtgacttgtgctcaccattcttcgtttgattatattgaataaaaattggcattattcccttaaaatgaaaagacactcaatcgtgccctttctgatttaggccttggaatacctcctgtgggccagtatatgtatggagtcttcagtgcctctcctgtccatcaggtacttgacgtggagagctactctttacacagctgtctgccagtgctactatgactgccaagctggtgttcatggagaggtaggctactttttgggcttcccaggtggcactagtggtaaagaacctgcctgacaatgcagaagatgtaagagatgtggcttcaatccctgggttgggaaaatcccctggaggaggatgtggcaactcactccagtatcctagcctggagaatcccatggacagaagagcctgttgggctatagtccatagggttgcaaagagtcaaacacactgaagtgacttagcgtgcatgcgtgcaggccactttttaattatgaggatgctaatacttaaaaatacaacatatttagcattttcttcattagataagtggcaagaaaacaagcaaaccaacaaaagccaaagaattgggatgaagcagggatacaagtcccaggctttatttgcagacatttgcctggcttctccattctgtgaatctcttgcttttactttctgcttccccgtttattctctgttcacttccaccatctttgcttcttttctgaataagatctctgatatcttcccttccgctttatattcttgtatgcaagccactttccttccctgtttagtttttgtgttccaagctgtctactatctgttttgtttttctctgcttccagccaccatttatttagtatactctatttcttatttttcctcttttcctgtatatatttttgatgaaatatttgaaatgtagcttaactggttggagcttctattgacctctgccacatctctgtgcaaatgaaatccggtaccctcactatagtatgtagtactctg

SEQ ID NO: 57906 - DNA, 971 bp, Bovine  19866881231882
  misc_feature (1)..(1): n is a, c, g, or t
ntatgaaattgtaggtactctggtccttcttcttgatggaattgatcattatgacagatggatgtggaagcaaagaaacgctctacctgttaggtgaatggatatgtctagatggtgttaaaagagacttttctttctccctcctgtcttcctagtgtttactttcaaggtttgccacaagatcaaaatgtcaagaccttaaccgcattgtccaagctgtgtttctcagaaaactggcgtcccattagactttaataattaaccaaaagaaagtgggttttgtgttgaaataagtataagaatttgaacaggtttcttcagagccttcagaaagctaatgttcctggtgactctcccagacaggcatgtaacatgccatggctctcaaatttacttcactaaagagccttttttgacagggttcttaacaacttctcattgggtgctactgttgctcaggaatcattgtttaaccttgcttcatgctccaactgaaatgtgagggtggggcatacattaaaaggggaaattagatttttttatccacagatctacttttgctacttgaaaagaactgaaaaaatgtgagacatttttacttttaaaagaacgtatctaagaacaatgctgcaattgtaatgacttcttaatgacttgatttatgagtcagggaaacagctgtttcttttttccctctctctcccaggctatccactgtagagctattcttccttgccaggacactccttccgtgaaattaacctacagcgcagaggtaactattactgaaattattagctgaattgttctgtatgagtatttttatagggactacattaaatctatagattgctttgggtagtttgggatgttttagcaatattaattcttccaatccatgaacacagattgtgtttccaaaatgaatcaaataagtcaataatgataagcagagataataatgttttttt

SEQ ID NO: 57907 - DNA, 1539 bp, Bovine  19866881289918
  misc_feature (1)..(1): n is a, c, g, or t
nggccaaatcgagaggtggtcctcatttggaaaactgatggagttgttctgccagaggagacctaggtcgttctgccagagtggacctaggggagctgtggaggacttcacgtaggtagtgatactcagtatggaagtgactacagtcttctttctcaccagccaaaacccctcacacagcccctgttggccacaagtatgtttggccaattgcactaagggaggagagtgggacatacatatgcctgtgggttcttctgccctttctcccttctgtctttttccctctcccactgtcttccctttggccattcagagtctcagtgttccttaaatcccagctctatatatcttcgcagtgccctgtgactgttgtggatagctgtaaactctcttctatgagcttctgtgtaaggattgaaaatgaaagtggaggggaagaatatgaacactttctgacagaagagatgtagaatctcagaacctggaagggattttggaaatcatttggtcagtccttttctattacagatgggaaaaataaatcccagagtatttaagccagctgctggcaacccttgaaccagaacccaggtctctagcccagggtattctaaataatccaatgactgctgttctctttcctcatttctttttataaacatttgagagggcttctcttttcttttaaatgaattcaaatactaaatgaaaatattatttggacacagtaacttttcattgctacttagtgtccgtggtatattgactggtgagcccagacatacagttcatacatccttttaaattgtaccccttactgactcatggtgtctaactggtcaagggtggtaacctgccaaattgtagataatccattggatgagctgctgagtagcctgcatctggtatcattaagtagttatgctatagtgttcgttagagagcaggggtcatattttgcagaatgttctgctttatgcttatgaaatcattttattatgtttctacaaaagaaaatgatttcaatatgcattaaatctattttataaaaaatttctgagtttgtaggtcaattgttaatttgcagtaaatcattttgactcaaaggattgtttgtaggactattaattcagacttctgataattgaccatttagtgattcattcaataaatattttaaagtaacttctctgtgaacaaaatatgtagaggttacattctagtggagaaattacagaataaataagtaaattaaagcctgtgataagaattaagaaggaaataatggtggtgactaaatgagttacatgtaacacccctagaatgttcctggcaaatggtagagccttagtagtattagctgttactgttatttatttttcattcattcatttagtaaccatgtgtcaaaggcctactgtggtccaagagtggtggcacatattaatagaaaagatgggagtcactttttctgtcttttttgaatgacttgaaataagaagcaggattgacggacagggagaacaggaaaaacat

SEQ ID NO: 57908 - DNA, 880 bp, Bovine  19866881293359
  misc_feature (1)..(1): n is a, c, g, or t
ncattaattccagttgccgtaactcatcaattttagctaaagcacgccgaagcaaatgcctacatgcaattaaaataaatttaattcataagacgttagagtacagtgattaaaaatgtatcaagagagtatgttttactctcccagacatttgatttaatttgtgaattaaactaggctgatgctgactttttcagaacatagtggctgacccatcaatcatttcctagaagcaccactaatttctgtaaatctaaagtcaatgaaatgttggctatactaactttagaatgcagaaaagtaaagaaattcaaaaaagtaaggaaattcaaattctgggttacagagtagcttcttatagatgatcacttctccggtattgcacatgcatgcacacacacacacacacacacccctcctcggtgctcttctcaaattctaacttttccaccaaaaccagctgtattatctattcaactgtacacattgtcaactaaattgttaggtccttaaagggccttgtttttatatttccagtacccaacatatagaaagtgtttattaatatctgaggaaaggaagaaggtgggcttgcttatttaatcagatcaccattattataattctctattgctatgatagagataatagcaaaatgagtttcattcctgtcatttattttagcagttctttcaagtattttatttataatttatgatttttcatgaagatgtttctagaacataatagtaacataaagggttacacttttcaataagaaaaaaattgcaataggaatcaaatggttaaaactatgcaaacatgtctatccctgataaatttaacagctacagcaatatgccaccactagtacactaag

SEQ ID NO: 57909 - DNA, 983 bp, Bovine  19866881328139
  misc_feature (1)..(1): n is a, c, g, or t
ntcctcgcagaaaaaaggggagtgtgaacagccccaaagcacagcttttgcagaaagagctcttactgccatctaaccaaacagatgtcccttgaatgtgctttcaaggtgaagtcaggaggcctggccctacttccaagccttcccctgccatccagaacctgcatgcacctctgttttcttcatcttggtaatcccactgcccaggctccctcatagatggggcaggaatcaaatgtgaccgcacatgggaaagtgctttgggaattacaaagtcttaggcaaatgtaacccaaccccgctgacagtggggaaaggtgataaaggagactgaaacagtccctgcacaactgaacaggccaaaagggtctggatgtgtggatggtgagagcagacgataccaaggggaagtgaaactctgagggcagggtgtgtgtaggggttgggggagaagaaacagctttttaaagatgcacaaggaaaccgccatctcaactaatgaagtaaacccagatttgtcaaggtccacgccagcaggggattctccactggggtttccttctttaccacctcagtgaaacagtgtgggttttacttaaagaagactgcagcattcttataagatgagatctgcaacgtgttcaaagggagaggatgaccccagtaattacaaatcaccaaccatcgagagaagaggctgtattagatgatggaagaacagagccattatatcctgcctgatctgggttcaaatacatcccttggtaggtgagtggtacttcattcttaattcagttcagttcagtcagtcatgactgactctttgcaaccccgtggactgccgcaacccagactttcctgtccaccaccaactcctggagcttgctcaaactcatgtccactgagtcagtgatgccatccaaccatctcatcctctgtcgtccccttctcctcctgccttcgatttttcccagcatcagggt

SEQ ID NO: 57910 - DNA, 986 bp, Bovine  19866881364123
  misc_feature (1)..(1): n is a, c, g, or t
natgaaactggaagttgataagaaaaggtgcctccacttcctctccatcctcaacaccttcaaaactgacaccgagtggtcaaaaggcttctgtggtcttactcagaaggcagtaaatttgaacctttcccaggcttttcttcagcttcttgccctttaacattacaaaactaggattatgtgaaggtacaaaagctctgaggaaaggatgaaacaagaccatgtccaaattaggaagacattcttctatttgcagggattgggggcaggatttttttacctggaggataagaatgttctttacaatgtttgttggtttctgctgtacaacaaggtgaatcagcttttatacatacatccccaccctcttgagcctccctccaacccagcccccatcccatccctctaggtcatcacagatacggggcaggatttaatattgagtggtgaaagtgttagttgtaggcctgtttgcaaccccattgactgtagcccactaggctcctctgtccatgggattttccaagtaaagagtactggagtgggtagccatttccttttccaagggatcttcctgactcagggatcaaacttgggtctcctgcattgcaggcagattctactccatctgagccaccagggaagaataatgatcaagcattaaggacacagaggtataacataaacactgtagaaatagtctgagacacagaagatattctgagacttacagtttgtgcttcctttatgttaactcttatctttggtctaaagaaacttttgttttttcttctagattcaaatactcctcttttgaagatcatgactgccatctgcctcaaaaagaagaattacttatgaagcatcaatgggatacacttctcaactactgatattaagtacttcatcatctgtagagtacagtggatttatctcatgaaatttttatacctttattggggcctctctataatattctctggatt

SEQ ID NO: 57911 - DNA, 1618 bp, Bovine  19866881407804
  misc_feature (1)..(1): n is a, c, g, or t
ngtatattctgacacattctatttgaaaatattcagaattcctttaaaaatgtctttctctaccatattactgcacatagcatagttaacaggcagtctataaatactgtaggaatcccatttgagcctatcagaatctgtccacattttaatgataaaagaattcacagtggcagctagctgccacactctcaagtcctctgttaactgccccacggaaacgtgcctttccctagctgatagaaaataaactcggcacttaaagagtcacaaaactcatcatgtcttctacgtttttacagatcctagaacctaggctaaagtagtcaccaccaccattactcataggtacggttttacacctaacaataaaagctagtcaaagtctagatagaaagagtaatttcccaattacctaaagtcatccagagtttcctgtatcatgttctgaataaaacggatctgaacagatgacaacggtgcatttggccgactatttccaatggtatcaacgattttttctgatagtgaaccagcaactccagcagtgacagaggatgctatctttggatctgaaataaaaatttgagaaaatattaatagtcagcttggactaagagacatcaaatatgattcagcatgagaaagcctgaaaaactggcaacaccccctccccaccaaaaaaaaaaaaaccagtgctcccatgacatttagaaaaattcactgtctggaacacaagtcttagaaactttctatgatgtcatttctataagtcattcatatatatatataaattgccactgtctaatgtactaacatctgacagaggaattaagtcttaaaggatcgctgaaccattatctcttacaaaaaatgaatgtgacgagctgctggataaaccaagactattagaaacaaacagaagggacataggagtaaagtagttctcaggcaaagccctagagtttaagctaatgcaatatatccacagaaacctcaaaatacaggtatttatataaaagagctccttctatacaaagagttcttttgtatagataactcctatcgctaaacctaatattgctttaaatgtgaccaagtttttagggtctctaccatgaactctatatagacactttaatatggaaaaagaaaaagacattttcaggtagttaatgaccctatattacattcctatctgtaccacagtagacaagacacttacatattggattgaaaatgaaattcatacccaaagaataccaaattaatgtggttgaatttaacctttcgttttattgtcttctagtaagagagtccagagaaggcaatggcaccccactccagtacttttgcctagaaaatcccatggacggaggagcctggtaggctgcatgcagtcagtccatggggtcgctagagtcggacacgactgagcgacttcactttcacttttcatcttcacgcattggagaaggaaatggcaacctactccagtgttcttgcctggagaatcccagggacagggggagcctggtgagctaccatatatggggttgcacagagtcagacacgactgaagtgacttagcagtagcagtaagagagtcacgcactag

SEQ ID NO: 57912 - DNA, 1618 bp, Bovine  19866881422328
  misc_feature (1)..(1): n is a, c, g, or t
naggcagcaaaggatgagatggttatatagcatcactgactcaatggacataaatttgagcaaactacaggagacagtggaagacaggagagtctggcataatacagtccgtgaggtcttaaagaattggacatggcttggtgaccgaacaacaacaatgaagcctgcgtaaaaacccaaaaggatggtgtttgggaagtttccaagatgatgaacacatggaggtgctgggagtggggtgcccacaggggccatggaagcactacgccctttccccatgccttgttctatgtatctcttccctctagttcctgagttacattatgtccgtttataataaacctgtaatctaataactaaaacgttttcacaagtgccatgagccactacagcaaattattgaacccaaggatgggtggtaggaacctctgaggtaacaactggagcttgcaactggcatctgaagtgagtatgggatgtggtggaatggggagtggtcttgtaagactgaacccttaacctgtggaatctgactccatctcctcgtagagtcagaatcgagttgagctgtaggacaatcagctagtgttccaagaattatttcttggtatcaggatccctacccctcccctccatattaagcactaactcacattgcccagtattctcattcatgcacttgtgtcacaggcaaactaaatgtgccttcaaacatgcttcagcatttctgcttattaaaccacatgttgttttcaagacctagaacaatcattaagtttggaataacacagcctcggattcagatgaattagggttcaaacaccaactgtgtctattgcttaaaacaactaggttttttactctccaaaaagcctcagtttcttatctgtaaaagaggcataatcgtacccatctcttaggactgcaatgaggctgcaagataacagttcatataaagcatttagaagactacctagcacatgataactgctcaaccagtgactcatcggtagcaattaacataataatgctggtatactagaaaaaagcatatttttttttcatatcaaaagatctatgtttcctctccagagtcactagttattatactgtgtgattagctttctttttctctcttatacaatagggataataacagtatctaactcatagagttattgtaaggagccaatgttttccaaagtactttgaagaataaaagcattctaccaatattagttataataataataaaactgcctactggatgaataagcgattatagtgacgaaatctccaaagcatctttacaaaagttaataagtgcactttctcatccagcacagaaaatatttattaagcaacttatagtacacaggtaaataccacgctaggcaaatgaaagacactgagaagctgtcagctaaaggacagactgttgcatagctaatataaacggtagctattttagctaccactttcatcttactgtatgtgctgcagttttgtctccaaagccttttgggaaaaagacagttttgaattgattcacgtctgctttattctcatcaaagctgatgctgaactccgaagatatctgccatagcacgtaaaaggg

SEQ ID NO: 57913 - DNA, 1212 bp, Bovine  19866881512784
  misc_feature (1)..(1): n is a, c, g, or t
nctttttgtgatggaggccttagaggattgctttcctactttaaaaagagctccctgtgtccttgttctctggtttggttcacctcagagacatgaaaattattttactggctcttaggagcacttggatgtgggtttttatttgcagacccctgccatttttatcttccaatgagaatatgtttctgtatgttagaaattggtttcatcattttcttggggaaatagaaaaaaatagtaaattatagcttgtagaaataatagatacttttaattaaccttaagtatcagcttacaagtcaataacacaaatattgtgcttatacagatgattttgtagttctttagactttatctttgtgctaataacgaaggttattttacagcactataattatttgtcaaattatttgtctaattattactatacagttaagttttgagaatagggtaattttagcaggtatagtggggaaggaaatggcaacccactccagtgttcttgcctggagaatcccacggatgggggagcctggtgggctgccgactgtggggtagcacagagtcggacacgactgaagccacttagcagcagcagcagcaggtatagtatatttcagcatttttttttttttattaaagcttgcaatgaatttttggtacataattgtccctaagcgggagctattttatctcataatatacttactcttcagaaatgattctttcctttcctcattctttctttctatttgaacccttcaatttttttttatagttgtaggcattaaaaattatttgcagaaattaaaattaaatttttttgaaataagtaatgtgattatggggcttcccaggtggtgcttgtggtaaaaaacctgcttgccaatgcaggttagacgtaacagatgtggtttctatccctgcgttgggaagatcccctggaggggagggcaccacaataccaccactctagtattcttgcctggagtatccccatggacagaggagcccggcaggctgcagttgtagggtggtacagagtcagaaacaactgaagcgtcttacttagcatgcacccaatgtgattataaacctagaagtatgtatagagacacacaaaagttttgtttcctcttttgctttcttcttgtttttcctcacacgccttttataggcaaacatttcttttagtatcctgcttatttttca

SEQ ID NO: 57914 - DNA, 1310 bp, Bovine  19866880419016
  misc_feature (1)..(1): n is a, c, g, or t
ntttacagtctctttcttctgtcctcttgtggtcagctggtaagtagaagtgaggtttgcagaatctcagcttcagcatcacaaagcaagtagagaaaggtgtttggagctgagagacaattacttagtaagtgacacaatcatctgcagaacattcttcttaaataactgaaaattgactcatgattacaatcacactgtggttaacaatgtaactacttataaaggttggtagcttagtaggaaaccatataactcaacataacttcacagttttaacagtagagagagaaataatgcaaactccaacccatgtttattatgtgatagaagaagatgaactacgcatctgcatatctctttctgatgcttgtttgaagaacactgatgcactctatgacttccaagagtaaaaattgtaacataaatctgacacttgccaaccatgaaaaggaaaaactgagaagttcctgttttttaaaccagaccaaataaagctaatttcaaatgatgtttgttgaaaatacactcactcccatccctctcctaaaacacaacataaactaaataacaactagaatttcttgcttctgcctatgtcaaaaaaatcaaaacctggttttgattagtgtgtgaaaatatatgttgttatatcctgttggtgagactttctttcacacttctgtgcaggggtgccatttggctgttatgcatgacaatcctctaaagcaatcatctgcagcttttttggcagcaaggacagttttggagaagacagtttttccatggacaggggtggggttgtttggggatgattcaagcacattacatttattgtgcacttgatttctattattatttgatcagctccacctcagatcatcaggcagtagattccagaggttggggactccctgctataagtgaagaagtgaagtggctcagccctatctgactctttgcgatcccatggactgtagcctaccaggctccttcatccgtgaaattttccaggcaagaatagtggagtagttttccatttccttctccagggaatcttcccaacccagggatcaaacccaggtctcccacattgcaggcagatgcgttactgtctgagccaccagggaagcctaaaatctgctttattcttttcaacagaaaactcatttctaaaactttactccaaggagataatcacatgggtataaaatagagtcatccaaagatttctcttattaatgtcatttaaagaaaaatagaactgatgataaacttaaacattcatccatgaagaatgttgctgttca

SEQ ID NO: 57915 - DNA, 1214 bp, Bovine  19866880485783
  misc_feature (1)..(1): n is a, c, g, or t
nactagaactcagttcctcctccaagctcttcctctgaccttttctcacccaagcatttgagaattgttagacagaggaggctggtgggctacagtccacggggtcgcaaagagtcagacatgactgagcagctaacagaaagcacagggactctttccagatgactcagcagtaaagaatccacctgtcaatgcaggagatgcaggatcgatgcctgggttgggacgattccctggagaaggaaatggcaatccactccagtattcttccctggagaatcccatggacagaggagcctggcgggccacagtccatggggtcacaaagagttgaacatggctgagcaactaaacaagggactctgccagcagagacagagtatgtctctttaatgtacaaaatggtgcctgcagcctgaaagaatcatttatttgtgttcactcgtaaacagaatagagctgtggtggcaggggattgagctcattgctatgcgtgcatagactgtgaggaataatggtttactagtgtgggaaaaacacaaaacaagcactctccaacctccctaaatcttatttcttcatcgctcaggtggggataatgaatcctgcttgcttatttcccagcgtggctgtgaaattttaagaagagccagtggagtgtacagtatattcttatttaacaacagtcaagcacttattttagaacttcctctagacctagtaataattaaaatattaaagaaccaaaactgcttgagtttcaaccactctggatggaatccagctgtaaattctgatctagctgtaccatcagcctctcctgggtgaacactagacttaccttcagggtaaagaccacttcccaaatcctccacacatgtagtttcatggatataacattgactagaatgtgtttatcttatttatttttttaattggagaaaaattgctctacaatgttggttgttttctgccatgctgctgctgctaagtctcttcagtcgtgttcgactctttgcgaccccatagacagcaggccaccaggttcccccgtccctgggattctccaggcaagaacactggagtgggttgccatttccttctccagtgcatgaaagtgaaaagtgaaagtgaagtcgctttctcgacctcatggactgcagcctatcaggcttctccgtccatgggatttgccaggcaagagtgctggagtg

SEQ ID NO: 57916 - DNA, 1117 bp, Bovine  19866880578489
  misc_feature (1)..(1): n is a, c, g, or t
nttttggaaggttgtgttttattttattctctcaaaatattttttactttttcttgtggttttcttcacccactgattactcaagaacatgttttcaacagagcctgtgaggacaatgctgttggctccacgtcaactcttgggataaaaaaggataagttccatcaggagggtttccaggaaattgccagacaggtcaaataatgacagtcctctgagagcgaggtttttgggagctcagaacctgtcttcttgctccagtgactgcgtggatgctggttttcactttgattgacgagctggtggttttcagagaggtggagtgggagtgagaggaagaggtcaagtttaaaaggcacaacatttgctgcttattatttatttatttatttggctgcggctgtgtcgggtcttagttgcaacacataggagcttcgttaggtcatgcagaatcttcccttgcgaagcatggacgctccagttgtggcacgtgggcttagctgctgcacagcatgtgggatcttagttccctgaccagggaccaaccaaacccaagtctcctgccttgcaaggtggattcttaaccactggaccactagggaagtccccattcgctgttcttattaagagtcaggatttttttttttcttgaataaacactcctcagattaccacgagcctttgattgattttcagagttctgaagaaattgattttgacagtttttgccagtgttcttgcttttatggcgaatggattttccgaagctcttactttataagaactttacaagtgcctcttgcactttcagttgttcttttaacgaggcctgattttgtattttcatgcattgataattggggaaataatggttttgcattttgcagttcttccaatcattgctgtattttattataaaacatccctccgaattgcattagttaatatcaccactgatgtcatcagaaaatctttaggtttggggaagctaacaagcttactgtagcaggtataagttttttaaaaattattgttttctcttgagagttcattttttattattgataactaataccatccattgttttccttgaggtgacaggttcacctcattaat

SEQ ID NO: 57917 - DNA, 1569 bp, Bovine  19866880668582
  misc_feature (1)..(1): n is a, c, g, or t
ntgggagcttcagtacttgccaaaaaaattaactaaaaacatttttattaagagataatatatgctatggcacagaactcatatttaaaaagtacattaaaaaaaatctgttttctgcatcttttgctcctcagctatcatttctcctctctcaagggagccaaccatggttctttccaatgttcctcttgtatttcaaagtgttctatgtatttaccatcatacacacacatttgcaaagattcttaaaaataacttgtgtggagattttgtgtccctgcttgacctgttaattaacattctatctgctagattaaacccttattaattaatttgatgggccattttattctatagcttaaaagaaagtgtacgccttctattgcagataactatgagctcaccaaggatctgcatatcaaaaatatttggaagatgaaatgtgttaaattaaactatccaagccctgtcccttctaggaaagactattagcttaatgtctatctagagtcttgcttaatcttcaaaaaccttcctcaaacagtctcttggcatagtaagaaatctgcttatgtaatatattgtctgctaaaaggcctctatcttcactcaaaaatgagtgaaattctaagaaatttgttttaattttgctttaaaattagagaaaatgtttttgacctttatgtaatgattagttgtggcaattcctgatatgaaaacaatccagtttctattttcacctcatgtactcttctgcagtgaaaactttatggtaataattcctggaagagcagaatatatgatgctttcataaataaatattagtgcattagtcttcttccagcccaagccagattttcctggctgcttatttccccaggtggccagagaacacaatccttggtttaaaaaaaaaaaaaaaatgcctgcttcacatacatatctgatcagaagaaatgtgctcacttgcataatgttcttgcacttctgttgatgatatatggtgtagtgattatctaataggcattatgaaataacctcatatatgattaaaaccactgtatcttaatttgtggttgcattttacttacaaagaagccttccttaataaatacttgctttaaggaacacgtctttaaattcataaaaatttagtctaaaaatgattatgattataccatgctcaaattctgacatgttcttattatgatttgcagtcctagaggcctagaagcacattgagagaattaaagagaatatatattcctaaaaatattaagtacagaattgtcaaattatactctttcctccaataaccagctggctagcatactctaaaatgccataactttcttatatttcaagctgaaatactccaatttactgagtagtcaagtaatgttaatgacattttgcaaaatcattctgtttttaatatgttgggcctgaagttatattattaaactatacatattttgctgaattatttaatagaatcctctgtaccagttctctagaatatgtttatctgttttattaactactactgtatccccatcttagaacata

SEQ ID NO: 57918 - DNA, 719 bp, Bovine  19866880808401
  misc_feature (1)..(1): n is a, c, g, or t
ntgatgtatgattaccaatccgattgattttattatggcaaaaccatgcttttgccacttttctgttacagtattactttgcttttatcttttcttgatctacagctttccattcagtctggatcctccgtgactatagccatttaagtgttcagcactgtgtacaatacataatatttggtagcttgtaaatgaaattaaagaataaagttttatttatggctacctatgtgtttgtaagcagatatattatatattagtgtatttttttagttatataaatgaattttttcctggggattgtttatgggtgattaacagattaatccagacttttaattttgctgtaatgttaggacattagaaatttactgagtatttgatacttaaatattatatctatatttttgactaagttgttaaacttagtatggcacctaaacctgtgttgaattcaaatcaggttttaactgaagtgagcagctgatatttaagtcaacgacactgaaacttttaaccttttcttagattaacctttaatttttttaatgtatttacatataatatagcaaggtgattattccaagagatagcagaaaacaaaaagtacttgaataagggctatttaatagtgaaacttatgagaactatgaatatgtatatattatatatatatatacacacacacacacacacatacatacacacatacacacaca

SEQ ID NO: 57919 - DNA, 2157 bp, Bovine  19866880859873
  misc_feature (1)..(1): n is a, c, g, or t
nagggaatataacaaatgtaaatgatggggaaaagctggcaagtcctgtcagataggaatattagtggggaatatgtcttagtttgacttagtaaaaataaaatgtattaagtctgtaaatttagatactcttgtgagaaacagaaaagatgaaaagcagactgtatagaatttaatattgtgatgctacaaaatataagtgaaccaagaataaccgggttggagcctggccaatgaatgctgctaggactcaactattcaatttgcatgaaaacaagttacaagtctggaaagatttgtgcatgcctatacatcagtcaccacaacatactgtagtcttacagatctctcattcaaagaataaacccatctaaagttcaaaggagaatgctaaaatttatctaggtaaaggtgcctaggaatctgtctgtaaagacaaaattaaacaaacaccgagaacactttcttaataaaaacaaaacacacaaaccttacaaaaaagggtgattcaaaatgatccactaagagtaaattaaaaaaaaaaaaaaaagggagagacaaataagtttaaggaaaagatctaatttatctcttctcatttccctaaccactaaacagaaatagtaccttcctacaaaatgtcatcttaaattatattcacaacttaatcatatgatgaatcttaaaaaaaccattggacattgtattttcaaatgtgtaagaatgtattttatttttgcaatccttaatattttattgatttcaccagctaataattatagaattgttaaaatatttatatttttatatacgtctcatttgttttatagattgcatagattttcttcacttggaatatattaaaaatttagttgctgctaatttgtcttttacgaatctgaaaagaatcaaataaatactctacattaactaatactatttaccagtagtgttattttgcttaaatatgaaattattagagtgcattcccttgaaagctttagtgaattggcggtttcacagtttttctaggtatcttgccaggaaaagtcaatcaaagtaggcaacatgcatagatggagagttagcagaatcatctcattcagcttaaaaatggtatatacgtatatatagtgttctctagcactatctactaaaggggtaaactaaattgttgccttttgtctctgagtgatggaatttcagattttttaaactggaatcttcctactctaggataaagttttttgctcttgcttttacaatggccgtattttatttttacaataattatccataaatatgaaattgataaaatgcaataaaaatggactaacctgttgtcacagaagactcggactctctcaatttctgagatgctagaagtttttcctgcaaggctttctgagcaagttgtgcatcccattcttctagttctttctcaaatcgctggttgtcttcctcaacaaaatctcttaagtcagggggtagtgtttctattccaacaagggcctgcccagtttctttattaaactcctctgcaaatcatatttcaaaaactattataaaattaaggattaaaagaaaaatgcaaagttcaaaacagaaggtatttcaagtgttaaggtccaaattattaccatctagcaaatcaagattactatatattaaaagaaaactcaaacaaatgctcagaaaagcaagatgcaaatatgtgatcacccattacaggtaatgttctcagcttttatttttattctgaagagtaaaaaaaataaaacaagacataaagccaaaattgttgctactcaaacactgacatagtactactttttctactataaaataccagatacttgattattcatgaagtaaaacttaccacaaaatgagaagtaacacaaaacctcaaagctcaaaacagaactaaaattcttttccatctgaagcaattatttcaatatatttatatacaatttgaaatctaatcaatatagcaaagttttttttaaaaatcacatatatagaatctaaaaaggttactcaacctctaccacacacacataaattaaattttaggttttcagtcataaatccagcaagttttgctggaatgggttaaatacaaaagggaaagttgatttctatcagtctcaa

SEQ ID NO: 57920 - DNA, 926 bp, Bovine  19866880930420
  misc_feature (1)..(1): n is a, c, g, or t
nttaggtcttaaaaaaggtcactttttaaaagaagaacttcgattcataattaggaatgaataaactggctttaactacagagtaaatataatacttacctggatgtgccttataaaagaagtaatttccatatggtgtttagcagattgtgtctcagtagtcaattatacacaaacaactttactgttatggtagaataccataaaatgctgaagatactttataattgctttgatgatacacgtgaagtttctaaactttcaacatgacttgaaaatcgatgcagaatactaattctgctaagtagagaatttaaaatctaaaccaaagcacattctgatggctataatatacaaaatttaactttacaaagaaatagcaatttatcattaataccttagcagtacattgatatctttataaggagtattatataacagcttaatattttcttcttcttcttccatccagatcttttatgagaggcacttatacaaagcactagttttggtgacgctgtaacaaacatacacatagtataatgatatattttactatgctgacaaagtatcatttataaagaaatttttataaattcaaaaataggttgttggtagcatgattacctttaaagcattggatttcattcacaatattacttcattaatcttaaatagcagttccacctataaaatgttctacagtttttttcctttttgaaaaggaagtaaataaatgcagggaagatactcatataatttctagttcaacaatatcaacttccatttcacagcattgattagtagagaacatttgcaattaaagtagtatacaatttacaaaaatagaatgattatataatgcaaacaccatcctccattatgaagaatgtgtgtgtgtatgtgtgtatgtatgtgtgtgtgtg

SEQ ID NO: 57921 - DNA, 1461 bp, Bovine  19866880931587
  misc_feature (1)..(1): n is a, c, g, or t
ngaattttctttatgagcggatctcaaactgaacttgaagtcacttcagaaaaaagtaggtttgtggacaaaggaatccagaatgaaataaatattttgtatgactatttttacaaagacctccggttatttcagagtcaagaaaattctagatattttggtgaaaagttttcctgatggttcagtaataaagaatttaccttacaactcctgccagttcagcagattcaggttctgtccctgggtcgggaagattccctggagaagaaaataactacccactccagtattcttgtctggggaagttccatggacagaggagcctgacaggctacagtccatggttcacaaagagttggacatgacttagcgactgaacaccaccaccaccctgattagagttacctttctggagatccattaatcacaagaaaatgaacagagattgaatagtatggcagaagtctttcctacaccctgaaatattcatttgaaagtttttctagttatttaatggaatgacagaaagctaacctgaaattcacacttcgcctttgttgtatgtaagcagatgttgtgcaactccttactcaccaggaattattcctgttgactcttagtcacttgggggcacactccactctggagaagaacagagaaaagatggaagaaacacaacagctgactcttcagttcaagtgactagaattctttctcaacttttgtgttcagtgagaaatgttatcttaatctcaactgacaagaatgttcttaaaacaaaactcagaggtagaaggctagaggaatgctttaaagccatccaagaagaacaaactgaataggatctgcacagaaattacatttagcaactgaaatttgctactcacaattttagctactacatggaaagacaaattgttcctttctattttggggtgaagattataatagatcatcatagtggcttttcacattaaataatgtttttccatttctgtaaaaaatgccataatgtcaaaaaggaaggaaaatcacttagtcacactagtacatgctcagtcactcagccatgtccaactcttcgcgacctcatggactgtagccctccaggctcctctgcccatgggattctccaggcaagaataatggagtgggtttccatttccttcactaggtgatcttcctggcccagggactgaacctgtgtctcctgcattggcaggtggattctttatcactgagccaccagggaatccagtcacacgatgggaaaaaacaaatctatgtagcagcaataattcatgtgttcttctgtccagggatttctaaacacttattgtatacctggttttagtctaagcaaagagataattatcataaggatccctacagagaatctcttttaacttttggtggcacttgcaaacgacaaacagggatgagggaggacctctcagaaga

SEQ ID NO: 57922 - DNA, 663 bp, Bovine  19866880980487
  misc_feature (1)..(1): n is a, c, g, or t
nggaggtgactgtagctgccagtaaactgaaagtgagagagcattcagaccctgcatgaaccccagagaacagaatggaactgcggagccaactccagggttcatactccaaggggtcacggcaactagagagcattcttttaccatcagaaatgatctgagttctttccttttcccatgtataatcttcccatgctatcagcaagaggaaagtggttcttcttttaaacaataacaattgtgcttaacttcggctagttagttacctgtcttattgaaacgcttactttataaacaggattccctctcctcctccccaatagtactagttgcttctttttgttttcattttgtacccagagactcattttaggcaaggtctcactgtgtatcaaagaatgccaatttctgacttctttgccaaaaaaaattcttgccaaatggagatcagttttgaaaaaccaaagataaatgtacacatcttaaagatttaattgtattatttccctctttatactttgattactttgacagatgggaccttcacaatatactcattgttcagctggaaaccccatgaagctgtaacctgaatcctttgtcctgaggccactcgaaggcggctccatccaagggtgtctgtggaccccagcagagagaggg

SEQ ID NO: 57923 - DNA, 1687 bp, Bovine  19866880994827
  misc_feature (1)..(1): n is a, c, g, or t
nccagtttgtctttatcttaaaaaaaaagaaaattattcaaagtccagctttctgaccaccttttttgggctatatttctctttttccttttatgagcaattttgtttccatggtagttgtctctatttccttcttgcccagtcttccttaatatgctgaaactagtctttcatctccactggaactgattcagaaactaatcttggcaaatacaacagtgacttgcttattgctaaatccaataggctctcaactgtaagctggccagaggtgctaaattctggtaagtgaccagtaaacagcaaatattcagtaaatgggagttgttactattatggttgggctgaattaatttttaaaattgttattgctaatttttttaataagagggattatcgcaacaaattctcattttgtctggttatttcctttcttagtgaatgtgtgtctctaattacctaccatcaaaacaattagtgaattcagcaggaaaaaaaaatatttcacacacagtcacttagcatcctatgaaaggaataaaaatataaaccctataaaaattatttgactagaattttcaactttcaactagttatttgtttctttacaaagagagcttcaaaataagaaagctgccttcggggaatgataggcaaaagtatcttcctcaaaattttcttccttctaatgttttcttgcagtagccacaaatagctagtaatctttagtaagaaacagagatgaggaataagggtcatttactaaggggtgtgtttgatttacagtccagtagttgcaaagaattagtggtgtgtttatgtttcagtagctcacagcataaaaggcagagttagagtgatgagcagacttttaaatcatatctttgcctcagtgtaaaagggaatatgctttaatagaacagtgtgacctcatctttcagtctttttcagaggaaggaacacaatctacaaatgagatgtgataccttatttttttttttccagtttgcactttaaagagcagttctttatttgtaggcactttgaatgtgaaagctaagatttgacatgtatgtgtttgtaatcatatatgctcagatttaatcctcattcacagctgataaacctcatgctctgaagcaggaaaaccccaaggcaatcttgaagttgttagtaaactggtattttctgtaatgtaacactggaggttggactgtgtgagcatattcagggatcatttctagataaacataacacaatttttttaaattggaagattatattggctataataatcagtctcatttacattccacatgaaaccttaaagatgataaaatcccatgaaagaaggactttaggtatgactttataaatgcttaataaaaacaaatgatgttttaatttaatgaataaggagataggagaccaatatcatgtggtggctcagatgttaagaatctgcctgcagtgtgggagacctgggttctcccacagggaagatgccctgaagaagagcacagcaacccactttagtattcttacctggagaatccccacggacagaggagccctggtgggccacagtccatgggggtcttaaagagttggacatgactgagcaactgagcacacaaaacaacctctctttcatcacatggagaagctctaaagaaaataaaatgca

SEQ ID NO: 57924 - DNA, 728 bp, Bovine  19866881205319
  misc_feature (1)..(1): n is a, c, g, or t
ntaaatagtgctgcaatgagttgttctaagttaaaaataaaataaacctaaaaaaaagaaaaccagaacctcagaatctcagccccctcccaaatctactgagttagagtctgccttttaactagatctccgtgtgatttgtttactcattaaagtttgagaaggattgcttcagaatactattcatgtccaatgtaggaagctctatttgaataattaaaagcattaaattgtgtgattattttgttaaagttcattaaatattaatatgctgctctttcaataagtggctatttaacattgagttgtaagagtcaacttagaagagtttggcaaatcaaaattttaaaagtcctatttttcaagtttttcttctcctttcccttcaaaaaatacttcacttttacatccctatttaaaatgaatagtgaaatatatacaaacatattttaatgccttcctggtagaggaataatattatttctggagtcatacattaagtagtgtatttgtggtagaaataaaaatgtcgtaaatatgataagaggccttgagcatgagagggctctttttcatacattttagggatagacagctattttgtgaagcaaagtttgttagtgttctctttgatttggaaaagtaaaattccagagcttgggctggagcagattttgagtcagaagaattaagaagtttcacatcaaaatgaatctgaattttgctat

SEQ ID NO: 57925 - DNA, 2127 bp, Bovine  19866881340994
  misc_feature (1)..(1): n is a, c, g, or t
nggctgggcttgaccttctttcagcctcacccctgatacttccactttaggcttttgctgtagttataacagactttgaactctgcctgagctttgcccagaactttgctcttgaccagcttattacccctttcaagtcattattcactatttcaccttttcaaagagacctactctgacctttaccaaatattttaattccctatatcctgccccagccttcagacttcaccatcacttatcttcttatctactaaatatggccttattatttgttacttttatggtttatctttcaccattagactataagctccatgagatccatgagacctttgatttgttcactgttgtatctcagtcacctagaccattaccaggcacacagtaggtgctcagcaaatattcattgcactaaattgtgaacaatttgatttgccattttaactctcaaaatatggatgagattaacaaaggattaataataagtaaaaatgctgaacagttttactactggataaagaaaaacactctagcttcaaagtccttgttttccctcaaaacaagaacctgatagggcatattaagaaatggacacatgatttattcattaccatttgtagcatcttgactgagaaaattaaattgttttgtagatccttgatacaccctgggacctcttcaatttcttcactgttcttcccttgttaatttttcttgttttctttaaaggactacaggcaagtaagcaatattctgctcctttggcaaataattgatcacttggcctcttgaactcctctgcagaatgtgtctccacaggtttacttagcatcctgaatgacattatggaattggagagtgatttcttactggaaaccatgcaaaagaaataggggtgtaatgcttcttattttggccacagtgcaagatgaaacagatgaccagcaaaagacactttccaatatcactttttaaaaatgtattttactgatcttccttgtctcagcggggaaagatgctcatgaactcacccttcctgttgatattcatatcagcattagcatcaaatcacagatttgaagttgaaaggcacattagtagattttttaaattattgagctataatttatgtataacactatgttagttttaagtgtacaatataatgattatacatatgtgtatataatgtgaaatgattactacaataagcaaattcactgctaaatatgtctttttttttaacctctgtgctttttgtgcttcatcttggaattcttaacagtgtagttagatttcacattataatgaaaattgtacttaagtaccatcttatgttgaaatatttcccgtctacatattgcttttcatcatatttttcattaaacaaaattctaagtattgaacctatacaggttggcctttggagatctcataataagttatagtagcataagccatgatgataatgaaaaaaaagaagaaaagacacattagtctctaatttttaaatggcaaagtagtttataaagcacaaaatcaaattctcttgtacttaatattaggtaagccctattgaaacatccttttctaaaatatctttataataaaaagttgtgtataaaaaaatatttccaaactgtagtttgtgatctaataactttaaatagcaatatctaatacaacgagattctagaccaagaggtagcaaaatttgttgcctctttttgttaataaaaatttggggagcatatgtgtgttcatttttttgtgtgttatctgttaactgcttttgtgctacaatagctgagtttaatagctatgacagggattatagggcctgcaaacctaaaatatatactttctggccctttatagaaaaaaaaaaaaaaatgctgaccccctgttctagacaaataaaaaattgggggcagttctttataattcattacacctgaagttaaccctcatgttctcgtctatcatttaagagggagggagaacttggaaaaatttcagagctttctggctgtgagttggttagtataaatgaccagggaaagacagaatattggctccattggctgctcaggctggccacacacatatcctcatattattcct

SEQ ID NO: 57926 - DNA, 869 bp, Bovine  19866881361750
  misc_feature (1)..(1): n is a, c, g, or t
ntatactttttaggttgagataaatatacatttatttactttttagaagctaaaaggccatattgaggaatatgaatttctcctctcttataggtaaaaaatttgaaaatactgaaatgtttggtcagtacccacttcaggtcaatggatttaaagatctacatgaatgcctagaagctgctatgattgaaggagaaattgagtctttacattcagaaaattcaggaaaatctggtcaagaggtgagtttagcatcttcattccccttccctataagtgtcttctacagtgttgtgaagttaaggctctaactgtatagctacctaataattgagagaataatcagaaaatgtttttgaatttaattatggtaatttagacattttggggaaaattgcagagtcaatacagtctataatctacgttaacttttcgtttaaagtgttctctcaaaattttatgttaaaatcgtcatttaggacattgttcagtcttttaagactttttcagtcaaggtaccagccattacagcatgctagtgctggtagtaaggaaggaaaacactgatgttagagtggaattctgtatagagatatgttagaatatcaaatatcaaatttgatatatcaaatatgttggaatgtgtcaggcccaaggaggcaacaccacactccttttcttgtaaaattactgtgtaattgcctgaaagacagatggaaaaacttgcttcctcaagaaagagaattaaaatagatattacacacctatttatctgtctccactggcctctgtcttgtaatctatgttcatctctcgattcatctctctagctccgtctgtatatcctttcatccatatgttcatccaga

SEQ ID NO: 57927 - DNA, 1199 bp, Bovine  19866881423031
  misc_feature (1)..(1): n is a, c, g, or t
nttgtatccaaactctttgtgaccccatggactgtggcctgccaggctcctctgtccatggaattctccaggcaagaacactggagtggtttgtcattcccttatccaggggttcttcttgactcagggatcgaacctaggtctcctgcattgcaggcggaatctttactgtctgagccacaaaggaagcccagtcagaatttacagctggatttcattcagagtggttgaaacccaaggcagttttggttaatattttagtcgctactaggactaaaggaaattctaaaataagtgtctgactgttgttaaacaatatactatacagtccattcaaggaattatcatcatgctgtccttcctgtaaaaaaagtgatgctaatgaccagctgacagtagggcctacgtagtgacttgttttttcaagggtgctgggttctgctactctctcctgacctctcagtgagagcaatgaaagaagttaagaggccagagtgcagctacagagagaatatgcattgctctggcctcattaacaccgaaactcaaaccaagtgagtcaaacaatttggagaaacagttcccttttcaactcccaggtaaggtgaacctgtgaaaattgcctatggacctggtgccaagttaggtaaacaataaaaacagagagctggttcctcatccctgaaagatgaaaagtctcaaattgagggggaaggaggaaatccaatttttaaaaagtaatctccaaattgaaatgtataaaaattgagtgaatgtgatattgaatatgtaggtaatattgctgtaaccatcagtaaaatttttcagctctaaaaattgtatgatttaaaaaagtctatgcaaagatatattttctttctgaaacctgtagtcctcccctttacatagaaaagaagtttcctttctctttagacataggtattaatctttcattcattcattccccagacatttatggagcaggacatagctagtgtgtgaaaataagtgaattgtagctgttctcttgtcctcaaggaacttaccagggaaacaagaacgggtcgttgattaactcatcaatatgccttatgcaaagtttaacaaatggacacgcattctctagtttatcaacacaccagcatgaaatgtcacaaagagttgtaagcctcaggctcagtcttcatctccagcacaga

SEQ ID NO: 57928 - DNA, 1728 bp, Bovine  19866881436322
  misc_feature (1)..(1): n is a, c, g, or t
ncccccgtccatgggattttccaggcaagagtactggagtggggtgccattgccttctccggacttaccaactaaacaacagcaataaggggctactttcagctaatgaaagaaaaatactccatgggtaacaaacctaagatacttcactacaagagctggtaaggtggtaaggatatgtaactatcctggaagactgttttgactttttaaatatgtggaccaatgagtttttttaaagttaaaattatggaatatattcccaatatttcaattgagttagtgaagatttcctaaaacacaaccctttgtgtcactcccaaagacataatgatgctttttcatctcacacaaaaactgtgagctatgaactgactaagctggtactgcttctgcccaaatcatcattgaactttcatcctgataagctaatgctaaggggaaagttaattttgtttaacagaaagtatcatggcacccaacattttaaccaacagtgaatctgtttggtaatcactttctgagcaaggagtcactttcccacaaaagaagatttcaagcaccctttccataccactccagagataagaatactaatcttacagctgccaaataaagtacgtgtagcactgagtattcatcttagccccaaccagaagttcctaagaagtactgaagaaaaaaaaattctcagtaaaaatcaagtgcacgcttgctaagtcacttcagttgtgtctgactctttgcaaccctatggactgtagccttccaggctcctctgtccatgggatctccagaatactgcagtgggttgccatgcaattgttacatctcctgccttggcagtcgggttctttaccgctagcgccacgttgaagccagagatacatgcttaaaaaccgtatttggaataagggtgtaagaagcataatttagattaataataagatctttaaagaaagatacacaaatctcaagactgactttgtgaggcaaagggtaatagaaaaaaatactatttgtttaaccatgctcttaaaatttatcaccaacttcttaccccacaggaaatagactgccaaactccaatgcccatatttgacatttttataaagtttctcatgtctaaggaggcctgatcaactcaatatagttcttactattgatcttcaggtcagtcactatcagcaaatccatttgtccacttcataaagtcctgcattatggacagatatctagaacaataggctcaatgagtatttgctgaataaatgaatcctggacttagtaggtgttccatggttagagtcataattctggtgttctaaaaagaggaaaacaggtcagaggtaatcctcaaagacttctcttgcaatggggcttatttttgtctggatgtgctacaaactatgctatgttcttcacattcaagatgaaatacagtccattgggtaaatgttctaacaaacttcaccttgctggccttgaccttttaagtgtattttggttctggtcttggcttttggacaagagtctatatagagctcatctctcatggccagtttagtctggctgaacataatgtccagcagagggctcccagggagactgatttggcttagttgtccttttggcccattctattggcagggctaatgagctctgataggtccactctgatcttttcaactatcccagacctcctgtgtccatgaaagtagtcttttt

SEQ ID NO: 57929 - DNA, 1165 bp, Bovine  19866881531143
  misc_feature (1)..(1): n is a, c, g, or t
ncccctgcccgctttgggggcgtcgcgcccagttccgggctgcgtgtggaaagtggggtgtagttagcgggtttcagtccacttccttcttgccaattgttttcctgtaaccgacggtgctgggtatttgttgagcgcgatctcacattcctacactcctctgtatgacttcctaattaaactttatcttcctcgtccttttttttttttttttttttaagaagaaatagccggttgtcatcccttgtgaacccagttttctttccaagacaggagccttccaggtctgctattttgcaaaagcctctccaccggaattgagttgccaggtacaggaaccaggtggactcaatgtagaagtagaggatttggttggttcctttttctttttttcctttttttaaaaaatatagaaactgtcccttaagaaggagacctttttggccatgcttatttcaggtatattttgtcccctaagtttgaccttgttccatcctcaccctttactcttgcctgggtcacacattaaaaaggttgttcccttaaagaaatctgggtttgtgaagcttcaaatcttttctgttaagtatacttatgtgagagatgctactttccccccctcgattttgctttcagaatctcaagtgcacaatcaggggttgcaccatatcctggagagtcgttggctatggcttaatttttttgggagggggttattggtgtgaaaaacatttggggcaaaaggaaaaccattactcgtcttgaaattatggtggtgaccagggtttactgtgaaaagctgctaaaactcttcgatttttctgggagagtagtgtgaatgccccaccctgtggtgttgatatcagtagtttttttgcatcattatatcctacctgtgcttgattttagaataaggcctacctactgtcgtaaaatggactgtgtatactcacagcctgcgaagtttttgctttgagatatttttagaattttatggtagtacttgaagtaattgaagatgctcaagaattttggaaagtgagcatattgcattattattttaggcactttggggaacttgtcttggaactcttgtgtgttagttaattgttattggttaatttgggcatcccaggtggctcagtggtaaagaatctgtctgcaa

SEQ ID NO: 57930 - DNA, 1335 bp, Bovine  19866881725866
  misc_feature (1)..(1): n is a, c, g, or t
ntctctaaaggtcctaaaactccttgctcgctgccagcattgcaaagaaaggtatcccatcaggtcatgcttctctgggtcttgtaagaaatgttgcagctcacctctctctcctcccagctcatcaactcgcatcgctcttagaaattaaatgagctctctctccccggtactcatttggtcaccgaaaagtagagactcacttgaaccacaagagggcgctgtcttccttgaaaaggaagatggccatctaacttgtatactcaaaccgtaaacttggaatggcacaagaaaaagccaagcgggacctcaaattaaccattgcagttttcaaaaatgttttagtgtctgcagaggggccctgcccctggggagtctgacctttccaagatcctgagagagatgtggcagatatggcctctgtcacataaatatgctttgaactacccgagtggacttcagtgatggcttgaagaaagaaagcttcaggctgaagaaagcacagtgacagttcagatcctgaaggccaattgccacaagctcccgtggaatttgtaactcctgctttatggttattctggagaacttcacattttgacattttaaacctttagatgtttagaaaagacccttgatgctggaaaagatcgaaggcaggagaagaggacgacagaggaagagatgactggatggcaccactgactcaatggacatgagtttgagcaaggtccgggagttggtgatggacaggaaattctgcagtccatggcattcttcagtccgtgggttcacaaagagtcggacaggactgaacaactgaagcaagatgtttgaaaagaatgagcatgaagtgacatggacacatacacaaacacattcatatacacacagacacatcgtcatttaattctcatgatttatgaaggaggtgtttgtgttctcatcttacatacatagaatcatacttgggtaaattaattcatttcttcaactactaagtaaaaaaagccaagagttttactcagttcaggtgctttttcttttacttaagtatcctatggaaatacccagaattttggaagaaagtgtcctattttaagtagctgatagctcagaaatacaatacaggagagagccatatcatacaaactttgtaaaaacagatgtaaggaagttcagagaaaaaattagtagttttatatggagagattgcaaaggggaggtctctgggaaaggctagaagattcacagaagggaaattttgcaaaaatactcacaacattgcaatgagggaaaaagagagacacaccagtgatttagaaagttctctagaaa

SEQ ID NO: 57931 - DNA, 826 bp, Bovine  19866880362348
  misc_feature (1)..(1): n is a, c, g, or t
nttgactaaagtctaaagtcgacttgtatgatttcgatatgatgcagatcattgaggcaaagagtttttcaggaaatcttttcctcaattatcttgaataacaaaatttcaaggtagtgtattatccatacaattttcaaacattttactttacaatgaaaaggaagacataactcaagtagaagtgtttcctacttttttctttttttcaccactctcacatttcttttctacccagaggaggctgagactgtgtaaaaggaggcatcttacaatatcacatgaacaccagctgttgcatataggtctgaagcactatttcattttagactatatattttaaaaagaactattgtttaaccattaaaaaaaaaaaaaaaaccctgctgaaataagctgcaagttttagccttggggaaaataaccaagtaaaaacccattgagttctttatcctctaaactttaagatgctttagagaggtgttcataaaataagttatgtgcattttacccaacttggacgggctctcactttgctatactgagtgataaaaatccttcctctctcatattcacatttctcaagaaatgagtcaatgcatactcagcttccatgaccaacaaactggaaaccaaattcttctcatttgaaagggagaaaggtgtccagagtgactagttttatgagctgcacctctgtgataaattattcccagatgctgatgtggataaaaatagccttctttcctctgaatacctatgtaagcaggtggatttcaagcagacagctttaaataccacatatcctgcttgggggaatgccatg

SEQ ID NO: 57932 - DNA, 1335 bp, Bovine  19866880585836
  misc_feature (1)..(1): n is a, c, g, or t
nccattaagaaataaccagatcaactattttacagtctggttattccagttgtcttaatgactgaattggactgggttgcccagtgaccctggcaattgcttcatgattggcctgcaggtgattgagacagccagtcatccttggccagtgtaatctcactgataaagtggagctgtctcttcatatgctgcagaagcactaagaggcttgttttcactataagctgtggccccatctgacacaaggacattttctgacaattacgcagctgtatgtgcatttgaccagccgcccagcgcttggaacaactctaccaccttggtatgggaactgcagcgtgactgaagatgcaaatctgattaagtaaattgtagttggaaaccaggcatgttgatcaatagttggaaacttttatgaacatcgtgatgactgctatttaatgtaaatctctttatttttcctgccttcaaaagaaataaatgaccagttttttcattggctgacatgtttgatcaaagcataaaagaatactggagaagtagtgcttctgaaagcaatctagtcatgctcggactataaaaccttaattacaaccctagattttcctggcagatgtgtctgttaaatgaagctcttctctattcagcagatatgggccttggtttgcaaatatgatttgcttcccacagacatgaacacacacacacacacgacacacacgtgcatgcatttcatgaagagctcacctgctgttatcttacactttcctctctctttagtcagctctatttgcagagggcagattttaaagcagtcattagagatattttatagttcacatttgctttgtcattagcagtactctttcaaatatttatccatgttgtttctaaataaaacacccaagcaaacatttatgagtcatttgcgaatatatttaggagaaaagtgattgtctgtgggtcataagccattctcactataatagattttaactcagcattttatttgagggtgtgagagtggaaactaccatgctgactggttcatgacccaccggagcatcatagaacagaaattagagtaatttagcatgtacgtggagaaggcaatggcaccccactccagtactcttgcctggaaaatcccatggacggaggagcctggtgggctgcagaccatggggtcgcgaagagtcagacatgactgagcgacttcactttcacttttccctttcatgcattggagaaggaaatggcaacccactccattgttcttgcctggagaatcccagggacgggggagcctggtgggctgcagatcatggggtcgca

SEQ ID NO: 57933 - DNA, 4076 bp, Bovine  19866880760975
  misc_feature (1)..(1): n is a, c, g, or t
naaccatagccttgactagacagacatttgttggcaaagtaatgtctctgcttttcaatatgctatctaggttggttgtaactttccttccaaggagtaaacgtcttttaatttcatggctgcaatcaccatctgcagtgattttggagcccaaaaaaataaagtctgacactgtgttagtgatgccatttggtatttctctttctctatctgacttacttcacatgacaacctctagatccatccatttggctgcaaatggcattaattcattcttttagtggctgagtagtattctactgtatatatgtaccatatctttttatccattcacctgccaatagacatttaagttgcttccgtgtcttggctattgtaaatagtgctgccatgaatattggggtgcatgtatgtttctgagttatatgaaacatcttttccagatatgtgctcaggagtgggatcgctgaatcacataataaactctatttttggtttttgaaagaatctctattattctccatagtggttgcacaaatttatattctcaccaacagtgtaggaggattcctttttctgcacactctcttcagtattcatcatctgtagactttttgatgatggcccttctgaccagtgtaagatgatacctcatcctagttttcatttgcatttctctaatgccttagtgatgctgagcatctctgcatgtgcctattggccatttgaacgtcttctttggagaaatgtccatttaagtctgcccattttctgattgagttgtttgttttcttgacattgagctgtatgagctatttgtctattttggaaatgagttccttctcggtttcattgtttgcaaatattttcccctagtccataggatgtcttttcattttgtttatggttgccttcactgtgcgaaagcttttaagtttaattaggtcccatttgtttatttttgcttttatttccattatgctgggaaatggatcaaaaaaattattgctgcaatttatgtcaaagaggactcttcctatgttttgctctaggacaggggtcttcaacccccagggctatggaccagtaccagtctgtggcctgttagggatcaggccacacggcaggaggtgagtggtgggcagaaccgaaaccatgctccccctgcttccatctgtggaaaaattgtgttccgtgacaccagtccttggtgccagaagcactgggccctgctgctctgtgagttttatccaggcttgtatttaggtatttaattcactttgagtttacttttctatatggtattacagagtgtgctcatttcattcttctgcatttaactgtccggttttcccagcaccacttattgaagagattgtcttttttccattgtatattcttgcctcctttgtcatagattaattgagtgtaagtgtgtgggtttatttctgggcgttttctcttgttccattgatctgtgtgtctgtttttgggccagtaccatactgttctgattactctagctttacagtataggctgaagtcagggagtctgattcctgcagctcttttcttctttatcaggatttttttggctcttcagggtcttttgggtttccatacaaatttaaaaaaatatttattctagttctgtgaaaaatatcattgataatttgataggggttgtactgagtctgtagatgacactgggtagtatggtcactttaacaatatgtattcttccagtccagaaacactgaagtaccttcatccttaacagatgtaaagagtagttcttatttgcatatacacataatattattttacatctatcaatactatcgttaaatattccaaaattagcctcctctcaaacagtgggtataattgttaacatttggtgacacattcattagatctgccctcttctctaagatattaaatcatgctaaattataattttcatgaagataaaatcatggtatctccataatacacatacagtcaggaatactgaatatacccatacataaacacacacacacacataattcaggaatattgacatttgaaagactggttaatatcatatagggcaataaaatgtattctttcttattgaccaaacagaatgcatttgcactgctatgaacaagtctctttttcattattataagtattctaaaaggtaactctacctgtaaaatagtctagttgtagaaagtcaaagaggtaacaccttatagaatcaaataatctgcagttctctgcctgcaaacactagaccttccaagactctcagcagtttctccttaactcaggaaatctgctggactgtgcactgtggtctggaaagcctctctaggtggtcagcggggacaaccacagggctcacctcatttccttactctcaggcatcactgacaccagattgtaatattaattggtgcttttattttccatgacaatggagaaatgttagcatactttaatttacctcatctcaataagtgccattattgcaatatattttaactctcagtctatcttaacccccacagtatgttattcttattataattatcattgatttgtacatcactgttcatttagacttatccaataattgccatttaccttgtttataattccttccatcatctttgaccatctgggatcaatatccttccacttgaagaatacagaaaggccattagataacaagactaacacatgcaggtctcatctatacattgagtgactggataactagggattataataacagggatgtgtaaaaatgttcactgacactttgttgtaaagaccaaaatattgtcaacccatttttttagcatataaccttaaaattaggtattagctgctgtatctgctttcaaagatcacagaagttcaatatctatttccataaacagctttttatataacaaatagccactgactattatatcatatatatagggtaaaatatttattatacctggatttagacttaaccacttgactcaatcagatgaaagaaattctgtaccctattgattgtacaaaaggtatgtccattctgatttggatttaaaacttggtgctacttttctttctgttttagaaggaaactcagtttcttttcattgctttttatacatcaggtgccttcatttcagtgcagtatgtaaagaacaggtggtgtaaggagtactttgaatgttaattatttctttcatttatttcactgtgaggatttacctttcaatgtgtttttataatcaagatggaaacagttagggagcttgctgcttgactgtttcactacatttattttatggcatctgcttcaaatatttgtttaaaaaaaaaaaaaagaagaaagggagtaagcattttaacaatagcaaagggtttgagttgatggtatgttatcactttatttcactctgaatcttcaaaggaaaggttgagataaatcagtcatgtttctaaccaagaaatatcatctcatagttacagcttacattttttatatagaaacatgtcttttcgtttttcagaaatgtcataatttattagtctcagattttaattgaaaagaatagaaaaaagcgacaaagaaagaagaatggaagagtaaaaactggatatttcatcttaaagatatattttaaaggagaatgtttactttccattcattgtatttagtttatttcttaaatatacacaacttttaattcttatgtccttcatttttcttataatattgaacatagttcataaaataatattaaggatcaagaggtgtgaagttcatgatatattaagacacagacatataattccaacagaaaggaacacttttcaaaattaatatagtcatttcatgctattacattactcgtttttcccattaacaaaatattatagacaaccttaatcagaaaacaaaacttgcataaaatgtagtaattatacataattaggaggataataatagacaagatattgataaactcatatacgtgtgtataaggaggagagacagacagacagacagaaccagcaag

SEQ ID NO: 57934 - DNA, 1924 bp, Bovine  19866880764909
  misc_feature (1)..(1): n is a, c, g, or t
ntagtgtggcaggggtagtcggagaggctcccattaaaatatggcatatgttgaaaagctgcttcagatgttgaatatatgcagcagagagcatctagcccccttcttctgctttaacctttctccaaatgagcatccatagtacctcaacactgaaacggggtgagcaggagggctgggcagtagatacaagacacccaggcagacagcagtgataatgtggagacactaatgaaaaatacattgcagataagagagtttattctctctctgcaaatctgcatcactggaggaaaaaataaaagtcaagtttcccagttctaaatattagccatgttttctttcctctttttttttttttttgagagaatgtaccctcaagaaatgtttcttctttgatttcaggcctacaaattgccttcggatactatttcatcttccatccttcctatcaaggaggtcacggcagctctgggagcttcctggaatgtctagatttggctctaggctggaacttccaattgcccttcaaaattatgggcaagaagccctgggatcactgccaaaggacttaggactctgatgctcactcagcacatagctctgaggggctgaaagtgaagggtcaggagcaggtgacaggccatctctcctcactggcccaaaactactctccttcattccggtcgagatatcaagcctggaagaatcccttgtacacagtgtggtgggcactcaggaaataattgttgaactctgaataaatggactattaatattaaataaatattatcagtgtcaatcagggtgtcgcatttagtgggcgtgtattgaataaatgatgcatttttaaacagcttatcccctttatctctcccgaagcatttagtgttcctaagtttagtgtcactctctgattcaatgctaaacactatgcaagaacctcgtctttaacaggtatgctcacctaggatgtatctcagttccaagtccacattttcatcactgataatgacttctggtttatatcacagcagcttcaggaaagtcaaggttaccttccctagagaatgcaaacatcttcctgagtctgaccacaaaaaatgaggctaaggtctaatgattactgggaactttcttttttaaaaagagggcagagtacatttcctttttatgagttcttatatgatttatctcaatgctgtggtcatccttgatccacaagggaatggtttctgaaaacatgtggattcattattatccaaaatgtctttggaaatgctcaaagcagtttgaaaccaagccttgtgtggcaggattcagcagttatagcccaaattttcttctactagtggaaataattggaaaaatgtaactcaagattagggtttaggaaacagaactaaataatgcctgccatttattatggaagggttctctgtgagtcaaatatggtactgagcacttatccatgttttttcatttaatgtgcaaagcatttctgttgggttaaattatattatctccattttacagaggagggggaaccacagctcatagagataaaataattagagcgagagatagtatgtaaattctagtgagtgtgggtgctcagtcatgtccaactctttgcaacaccatggactgtagcccaccaggctcctctgtccatggaattttgcaagcaagaatactggatggggttgccatttcctactccagggggtcttcccaacccagagattgaacttgcatgtctcttgcatgaacttcaaaggcccaaatcatcacactacatccggcgcctcccagggacctgacacttactaacattgtgaaaagtgtatcttcaaatggccaaataacttagagtatcagccatatgacagggaaaggacaaaggagagatttccacagccaa

SEQ ID NO: 57935 - DNA, 848 bp, Bovine  19866880767329
  misc_feature (1)..(1): n is a, c, g, or t
naataattatgggtaatatttaaatatctatctatataatctgtttaactatataaatactaaggaatttatctaattactttgtattaagtgattaatactaaatctatacaaagtgacaatcaattaagcaaaagtaaatttctttcaatcatggtatcagtttaataaagtgaagacttctttttccatgcaaaagtaagaacttacttttttttttttcaatcagttctctgttatctggaaaatgtactaaaagacagcagttaatggtatagcaacttaaagttccatccctgtattttataaatttttgctaataaatgtaacttaagttatgacttcaaggatcatgtagttaactataacttttccataaattatccatgcaagatttaaaggaaaatccaatatttagatacatcaaacatcatttggcttagagaatattattatagtttatattaatacattagaaactcatcaaattgtatatctcatcaaattgtagatctgttgtctgataatgtacatgtcataaagatgcagggacagactcaaggattcaaggtggattattttccctagctggatcttgatttaatttgtatcactatcttggccaactgacttgacctacctatttctaatttcctgattcttaaagttcgttctgatgtttttgatgattaataaggctactcattttgcaatgcttcttaactaaaagcaacaaagcaatcaaacaataattatttggcagaatttcaatgtgcttcacgtgctttcttcctacatcttagatcgcatgctcgaaatattctacagttcatgttctgaaatcacat

SEQ ID NO: 57936 - DNA, 1005 bp, Bovine  19866880786559
  misc_feature (1)..(1): n is a, c, g, or t
natatatatatatagatatatatatagatatatatagatctctctcaaagtgacctcagaaatcaactggaggagtggagaagggggaggggtagactttggagagtttaatattcagctttctaaatttatgtgtaattgaaatatatatgaatatatacgtatatatgtaaatagaaagatttacttcatcttgataaaaaaagcattttcattaaaaactaaagagactttaggcttctaaaattcagtagaaagctcagaacagtaattttcttcatacgttcatctccagagccttcagtgatttttggtactgaatgttattgttccatcatattttttacactagcactttgactcttgctgcacaattgcctcaacatagaatattcagcaaacctgcatgtgatgcccattcttcaggagcccaagccctggcaatgctaaatcaagcagcccgatactgcactttaaaatattaatgatctctcttgtcagatgaaattagatgtggaaacattttgcaaactaggaagtacttgacaagttttgaaggatctaatgttgctattagaagcattattattgtttttactaaaataaagttttctgaatatgtgacccatgggtggaatgcactttgtattccctgagaggcagcattttctctctgccctcttattttctctgcatatgaaaagatcatgtgacaaactgttttgtgagtggctggacagaacaaacattctctctttcaggatgccacgaagcacttcatgcattatattcataagcatgatctttaatttaatttttttgacaagtgcactgaagggtaaaatcaggcagtcataattttgactttgccattgctcaaacgagctcaatgattgaccagattttaaaactaaaataagaaagaaaaaagcaggaatgaggaaaagcaactttctcatgaaggaaagctttgttttttatcctctagaccttaaaatactacga

SEQ ID NO: 57937 - DNA, 1913 bp, Bovine  19866880804174
  misc_feature (1)..(1): n is a, c, g, or t
ntctgttcagatgatcctagaagcttgagaagggatgaggcccgcctatgactagaagaggaagctcttccttcctgaagggggatcctgtggaccaagacagcacccactgttctgttgcttttgctggtcttttttcttgttccttgtcttttctctttttttaatgactcccttggcatctccctttatactattcaaatatgtgttttttgcttgttgttttatgtttgttttttgggtattttgtgctcggctttctttacaccacgtgggcttcttctatctgttgtgtggggggggcttctctggcggtgcacaggcttagtcgctctgcggcatgtggggtcttagttccccaactgggaatcgagccccatcctctgtatctccctgtgtctcctacatctcccacattggcaagcagattctttactaccgagccacctgaaaagccctcccaatcattcagcctgtgataaaaaaaatttttaatgtcttgaagtagaataggagagttttaggaaacaagagaaatagtctaatttaagtgcttcaaactgagatacttcctgtggagttgtttggtttggagatgtcacacctttacagaaacacaccgtgatgtttcttcatgcttttaggatctcacaccattaattgctcatgccaggatcagtttctcagaacacttttacatgtttctttttttacacgaaacttttaatggtggtaactccagtgagttctgaaatgtatcacaaatgccagttcctaataagaccgaatgtgaagtttgggggattcttttactgaaattgttaatatccattaacccctatatctaaggaaaagaattttgaagtgcacatttacatgtgatccagtttccattaaaattagaatatacaggttatgatttttaccttttttctgaaatagcaggtatttatggaagaccactattttaactgattatcattccaatgcttagactaagcgtctattgcttatagaactgcaagtgttggaaatattacatagtttagcttgattgatagagacatggcttagaatgaaaaaaaagaaatgaatttgccattgagatcctccaagattgaggtcgtgatgaggttaaaaggcattcatatgtgttgagaattcatttcaaatactcaccgtcatgttacatgcagaaatatatctccttggtgatttctgggctatttatgatctctgcagctataacactgcttataaaaatgcttattacactctccagtttaagtgccgagcattttgctgaccataggttctcaaggagcccctgctcttgtctttgtttctaggctttgcttctaacccagcatcttcttcttaggtcttggaatcaccaatattatggactggcctttttttttagtatcctttccaatataattctcagaaattttgagcctcgtcagttatttttagcttggcttattggttggctggctttatatttgttataattttggctcccacaggaacctcaatgtcttagagtgcaaggactaaaaataaacaaaaaactgagcaggctaatgtcacttggtttggaagatgccggggaccagccccggctgatccagggaattcgaagcggggacggcgtcggcgaagatcaggaaacaattgcttaattaaacgttaattaaggatataaagagtaatagaatgaggatagctcagtaggaaaattcagtggagaaaagaggctgaaataaggatagctcagtgaggaaattcagtgtagaaaagaggctgaataattcagccagaaggtaagagaaagaacgacatggtgagaccaagtttcggtgaacaaggcccgcactttattttccaaagtgtttttataccttaagtta

SEQ ID NO: 57938 - DNA, 1273 bp, Bovine  19866880819325
  misc_feature (1)..(1): n is a, c, g, or t
ntttctttttttggggcagcaccctgtggcctgtgggatcttagttcctcaccagggactggaacccatgtctcctgcagtggaagtgtggcgtctcaaaccactggacaccagggaagtccctaactttgtttctcttagaaaacatattccatattccaaacagtacacctgggtaaaccagcttgttccaagactggaggtgataattcttccacaacttgtttttgcaaatataagcaaataagagaactgatcatgagtggatgggcactagtctcggggtgtgattccagatgtacaactagaaactccattcactttatataatctcagtttcagcatcttaggacctgagggtgtctaggcagataatcccagagaaggcaatggcaccctactccagtactcttgcctggaaaatcccatggacggagaagccttgtgggctgtggtccatggggtcgctaggagtcggacatgactgagtgacttcactttcacttttcactttcatgcgttggagaaggcaagggcaacccactccagtgttcttgcctggagaatcccagggacgggggagcctggtgggctgctgtttatggggtcacacagagtcggacatgactgaagtgacttagcagcagtagcagcaggcagataatccatcttaaacattttataatgctaatctgctgaattgttcaaattatctcttccttccagacaactctgtaaacctttctactcttcacttgctatctgcctacttgaggttttacgtagatttcccctattgataaagtaaaggttaacagtgggggaagtggtgctgtgtgacatcaatgacacgctggctgtctttcattctgcgactccacaaaggagcatcacaacgtgaaacagaacagctggatatgaaaccgggttggaccatgatgggaaaagaaatgcttaattaccctttccatcaagttaatttttcccctttggcgatgtaaacaaaggcaaatctgctcttgtttggttgtctgtgacctgctatccttgacctccatcctccgatgcctttctgttcttgcctccctctcccttgctaagccttgcactgcaggctctctttattaaaaaagaaagaaagaaaactttgaccagggcacaagcatgaaaagcagctatggctccaaacacagactgacttgcaattctattaaaatgttcactgagggacttccctggtggtccagtggctaaaaatccaagctgccaatgg

SEQ ID NO: 57939 - DNA, 2131 bp, Bovine  19866880839173
  misc_feature (1)..(1): n is a, c, g, or t
nttgtactcagtcatgtccaactctttgtacccccatggactatagcccaccaggcttctcagtccatagtattctccaggcaagaactctggagtgggttgcctttccttagtccatcaaagctatttttattgttttgaacaagaaagaaatttcacctgccttgaagcattattgctgtgaaattattttatttcaaatcagtggatttgttttctacaaaagtgtaagcaaaggtgtgccgaacacagattgttttattaaaccatgtttttcagagtgatgtttaggataatgatttataaattatatttctgcaaaacataaagaggaataatagtctgtacaatggatactgggtagaatataagtaacgaaataacatgtgatgacgtttatctttgaaattatatggcttttagttctactatctgtttttgttatgttccttctaaaatcctcagcattgttaataataaaaatgtggctgacatataaatttcaattctacaacttaacctttttccagtactagtaagtggttaaaggaatagtaagtaaagtaagttgcatttgtcatctttcatgaggatatggggttctaaatcagggtaaatgacagactaattgtctcaaatatagtaggacttttcctttggatggctgtttcttgaaagccattttcttcttcagaagctattgatattttcaaaagctactctcttcctgatggatataatctttataggaaactttgcaaaacttttcaaagataagaagaaaaacaatggcggtgtttcagagaatgtcagttgacctcagaataatttttcaaggatattcatgatttatgctctatttccaaaaagagagtttagatcttttcaataaatattaaagaagattatcatattgaggatattctttaaaaaggaggatcattaaatatctcagatacctttttctatgacatacctaagaaagcaaatattctgtacaatgttagccttcataggaaacaagacaaaaacagcaagaagtgcttcaaaccccccttaagaaatggtcttaagttgtcctaatggtctgtctggtagcattatccgctgcaaaggaagagaaaaactgccgtgtttatccacgtacctttaaaagaaagaagtagtaatttccattgctcattgtgttttccttttctgcttgtggggatggggttgagttggggaagggaagaagtatggagattaattaatggaatcagtcagccaggaaagtgatcagcacataataaactctcagctgcatatttgtggatgttctgactacctttcattctaatcaggactcaaggctacactaagtagattgtacatccaagaatggatatgcaggctctgaagtgtgcacttcacagtggtgggtggagcaagctcatctgcctgaatgactgacagttgctgggccctggaggagtcttccggggggcttctcagagggattccagctgagtggtccttctacacccatgcatgcatgcatgctaagtcgcttcagttgcgtctgactctttgtgacgctatggactgtagcccaccaggctcctctgtccatggaattttccaggcaagaatacaggttgccatttcctcctccaggggatattcctaacctagattcatgtctcctgtgtctcctgcatttgcaggtggattctccatcactgagccagctgggaagtccatgttatatgcacctgcattaaataaaatacacacaaatctagacacagcacaccaggtattatttataattgttgttcttaattccttaccagaagttaaagattgtgactgaggtcaagcatcacaaatttagtccctctaaaataaaagtttatcttcgtatattgaatctcagtaagatcatgtatgaaagaagttgagagccattgaagaaattaaatatgcacttcttttaataaacaatgtccaggtgtgatatttatatttctttgtcattagggatgctgctgctgctaagtcgcttcagtcgtgtccgactctgtgcgaccccacagatggcagcccaccaggctcccccgtccctgggattctccaggcaagaacactg

SEQ ID NO: 57940 - DNA, 1011 bp, Bovine  19866880852319
  misc_feature (1)..(1): n is a, c, g, or t
ntaatgaaaataaaactctatatccaaaagtccacagtataaaacatgcaaataattttagaaaatgtttgatttttaaaatttgatgtttaatgtttagttaaatatttaaagttaaacacttaaatatttgtaatattcagtcactcaaagctgtaatgatggccacatttcttccttcaacaaaatgagttctaatttccagaagagggaaagggaaaaagattagagacactgctgcttccagaaaggaaaaaaaagagattctgacattaacaaactgcatggtcttgggcaagataaagaaccatttgcagtctattttaaaaacagttttgtagagagagaaaacgtgaccatatgcgctcaagattcttcttctggatcaaaatacagctattatggttttaaacgctagaaaatccaggtgaatttgtattctaactccactctgcatggccctgtctttatactacaaggtgagccaaggtgattagtagtacctgtcagggttggaagcagagcagggaacccaaaggtaggagagaagtgagaagtcaagcgatggggaggacagctgagtgatctctaagagaaaataccaggagcacatgtcacaaagagaggagccaacgagagcaagtttgaggaacattcctgacctattctattgtgcaagagatcactaggatggttatggaaagaaatctcaaataatttatctcaggagaagggcaggaagagaagggagtgacagagaataagatggttggatagcatcattgactcaatggtcatgagttggagcaaactccaggagatagtgaaggacagggaacccttggcgtgctgcagtccatggggtcgcaaagagcagaacatgactgagcgactgaaaaacaataggagtaatgatagtatttttgagaaaaaaaatcagtagaagcatttttctgcacatagaatggaggaattccagataataatgaatgcatatgtgtacaaatgatt

SEQ ID NO: 57941 - DNA, 1806 bp, Bovine  19866880911437
  misc_feature (1)..(1): n is a, c, g, or t
ncagatggtaaagaatccgcctgcaatgtgggagaccctgggctcaatccctgggttgggaagatcccctagaagagggcatggcaacccactccagtattcttgcctggagaatccccatggacagaggagcctggtgggctacagtccatggggtcgcagagtcagacacaactgagcgactaagcacagcacagcatgtggatggtatttaaagccatgggctggaaaaagcacatagagaatcctttcattttagaaaaaaataatttgtgagtttagctttcttaacactgtgtacccagctctttcccctgtatgatgcctccctacattggtggaatgttctgtacacagaaatgaaacaactatagtctttgccttctaagaactcaaaatccaaaatggccctgatggtatgaccaaggtagattccgtttctcctcttgtccctgagcctttgtaataataactcgtacaagtattacagtctccagggactttatattcattatcccattttgcttttttgtccttgtaacaatccatgaagtgtgaaggacgtgcaccgtctcccgtttgatggactgagcaactctttaaacagatattctcattcctccttttaacagaagagaatgtgggccacgaaaggttaattaagcaatttctctggatgaggtcacggaagtaacaagtgagattggcagaagaaagatacttctgactccaagggtctaaggcatctagttttagatggaaatttcctgaatatagcaacttttttaaagaaatagagccgccattgagagcaagagctctggagtctaacagagttcaatgaaatctgtgctctccacttgaccttggaagtagcatgctttcaatgcattgacttcctaatctgtagagtgaggatgctaatatctacctgtcaggttgttggtgaattcatgcatccgtgtaatttacccagccttccactaaccaatgaattcattcaccaaccaaacacaaaagctcctactatgtgctagcctccatattagacattggaaaagcattatattgcagaaaataaagctactgcccttctgagagtgccatctttggtgggaagcagtcaaggaccaatcagcaaagtgttacagagtgtacagatggtggcaagagccgtgtataaaggagagcagtgttgaggatcatgacaagtcagggaaggcttctttggcagggagctggacaaggatgaaatgagacagcacacagaaacatgtttagcacgggactagacacccgcttcaagccatgccatcctgagaaaaggagagtcagaaagcaggcatgggtggtacccaggatcacgggccccttgcccagcctggggagagcctctgccttgggaatcatttcatccactgactgagctacgagatagtctctggctgctctagctgatgccactgaatgcatgatgaatccaactgctctttttctgaatctgttcaccaaacgcattctaatcatgatttaacctcccatgtaaacctgcccacctggagggattttctgatcacatagacctccagtgctcatcttccattcgtagctcttctcattatgctttgagacacaggcactctaattatgatttggcttcctgtgtagcttggccacatggagtgcctacgctcatcacacggactttgattattctagctcctgttgcagctctcgctcattgtaagtttagcagccggcattctgactgaacacgttcgcctccgaacttgggtaacatcagcg

SEQ ID NO: 57942 - DNA, 1342 bp, Bovine  19866880917403
  misc_feature (1)..(1): n is a, c, g, or t
nacattgtgtcatgataatgtatcctgtcatgtcatttttctccaattatctgagtagttgcagggattctaggcttgtgagataaaagttgaagatggttcaaagaaatgaatttaggagtgttctctgtatagctaatcattttctctgaaaactcagggaagctcagtgcctcattttacaagggacagtcttgaatttttgtgtgtgtgtgcttttaaaaaaaatcaggggggaaaaaatccagcagaggaaataaagatattatgaaaactctctttttaaaaatgtttagggcttccctgaaggctcagtggtaaagaatccacttgccaatgaagaatacacaagtttgatccctgagccaggaagatactacacgctgtggggtaactaagctgaagtatcacaactcctaagcctgtgctctagagcctgggggtcacagctactgagcccacctacctcaactactggagtcacccaccctagagcctgtgctgcacgacaaatggagccattgcttcgagaagctcactcaccacgggggctagagagtagccccagcttgaacaactggagaaaagccagtgtagcaacagagacccagcaaagtcaaaaaaaaaaaaaaaaaaagtttatatcagggataaatagatgggaagaaacctcatgagatgagtcttctaggaaaatgtctttcaaaacttaagacctgctctgttaagttataacaagcaaactggaactaataaggcaaaccatgtaaatatacagtaagtgggcttgaggatgggctaaatacatgggtaggtctttatttctaagaaacatctatttaatgcttgtacaccctccttcagttttgttacacttcattggattaagagttaacttagcaggcgagctaattttgaaatcacaagcacgtgttccgtaatggtagacacagccttcagaagtattgtttgctgttcacaaactcatattatgcaaattacagaagaatgcctaatattaccttctagtcaacagttttaaaagacattagatctataccacctcacctcctccggctcctccccctcggtatttcttgtgtgattcacactagactgtcccccacttctgagctcttaggatcataatattaatcacttaatcctctcagcacacgcctgaaacaagtcaaaggtgaactcagcattatgtattaactcataggcatatcatttaaataatctgttgtcaaaacccttaccagtcttacaatgagagcaccttgtcacaacaggaactaattcctctgataaattccaagcctcaatttctctctgtcat

SEQ ID NO: 57943 - DNA, 728 bp, Bovine  19866880963356
  misc_feature (1)..(1): n is a, c, g, or t
ngccgccaggttactatcttttcatgggaggggtacctctttcttggggccaacgaacatcctttagccaggggcttgggtgtctgttccccatgccactgtctccaccctagacacagccatactcattggttagcaaggaattatttacatgtcatgtgcttcagacacaataaggaaaaagttttttccaccataggcatgagcacgcaagcttcaacctgttcagttcttttgtttgcttgtttagttgtttttggtttgatgatttttccaaattcagcagaggggtccaaagtgcttgatgtgttatgggttggaacataaggtccctgtagaaatactttatctttcaatagtatatacagtgttaaaaaaggcaacatgttgtagaatgcaactcattctaagatgtggcagtatactaaatataaatctttgtatagcagcatgtttctaaaacacctaaagcattgcatatgaggaatgtataaagactaaggatatgtaagttacccattttcaaataactgaagggctgccatgtgatagagagtaccaacttattccatgtaacacttaagagtaagattttggcaagaagtagctgagagagaatttcctgggggtccagtggctaagactccacactcccaaagcaggggacccaagcctgggttcaatcccggtcagggaagtggatcccacgcatctcaattaggagttcc

SEQ ID NO: 57944 - DNA, 2940 bp, Bovine  19866881003115
  misc_feature (1)..(1): n is a, c, g, or t
nacagcatattatacagcagagacagtactttgccaacaaggtccgactagtcaaagctatggtttttccagtagtcatgtatggatgtgagagttggaccataaaggaagctgagcaccaaagaactgacgcttttgaactgtggtgttggagaagattcttgagagtcccttggactgcaaggagatcaaaatagtccatcccaaaggaaatcagtcctgaatattcattggaaggactgattctgaagctaaagctcctataatactctggccacctggtgcaaagaactgtctcattggaaaataccctgatgctgggaaagattgaaggtaggaggagaaggggacagcagagggtgagatggttggatggcgtcaccaactcgatggacatgagtttgagcaagctctgggagttgatgatgggcagggaagcctggtgtgctgcagtccatgcagtcgcaaagagttggacacaactgagtgactgaactgactgacccagcctacaaaggctgatgtaacatagctcagcttctgactcagttaaggtatagagctcctgcccacactttgctgtcactcgcgtggtacactcagtacccttccagcaagaagacagcaccaggaataggtcttttgactcgaggttcttcacagtatagtccatgacatgaaattacccttccaatgatggagctattgtgcatcaggcactcacgtggtgcccttgtcaaccctgctaagccagctgcaatcccctattgtatatttcatacttcaacttctaagaacattctgtttctgttcccttttatttgatgaagaacatctgcagatgtggttcagctacaaaagttaataagtactcttttttgtgtgtgtcaccataattaaaaatttcaaggaagaacttgtcattcattgtagcttattgaggttgcccatggtgcagataatgctttaggaagcccacaaatcatgaccttaaaaaaagccatcatcaggagaaacaaaacctcgcctcaaaacagggatgctatgccaagccatgaggtggctctgaagcctgctcacatgtccagcgatgtgggggccacccgagagccttgcacatcattgtcactgcattctcattttcctgaggtttccatccgtatctggcagtcctgtggatgccagttatggttcaaaggaagctcattcacacagcatcccccaaagagcattttgtgaggacaaaagctgtttttctcaagctggtgtccctcccattcccgccagaaaggatctttttgttcaaaagacaaataccaagggggacaatcactctcaattaattttccatacgttcatgtctcatacaataagaaagagcaaaccaaagagcttctaaagtgtccccagagggctggggggtggtagcagttgggtgcgtgggtggcatttgtgtggtctgtggagtgtatagaagacaagggcgggaaagagcgttctgtttacatctctcctcccagccagcctcggacctctctttatctcctccatcagacactgtctgctctgaaccatggattgttagtttctatttatatagatatatttatctgttttataatggctattatacatattatacatttataataatgtttatattatatattacatatatagatatatgtttatatttatttatatatactttattgacatatagttgctgtacaatgttatttaagttacagatgaataatatagtgattacaggtgtataatacagtgattcctagtttttaaagattatactccatttatacttactataaaatactggctatatttcctttgttgtacactatatcctcagagcttactttgtatgtaatagcttgcacctcttaatcccctgcccctactttgcccctctcctctccccactggaaaccactagtctgttctctacacctgtgcgtctgcttctttctttgtttcaacttccaatgactctcttgaaatgtcagatgaaggaacgtgtgtccaaccacaatgtaaatccctgggggagacacaccttttactttagtcctgtttccatctagcgagcgatggagccaactgcagggttgagaaaaaggccctcagtcatactgcttcctggacaaggaggctctggacggcctgatgaccaagctcactgactacgggaccccaaaagaagggccatttgaggaaaaaggacggccctgactcccttccctctcccctctgtggttcatccacatccacgccatccttctcaaccacatcaccgtcatcccgacagtttgaaataaagttgatttccactttgtattctgaaaatcaaatacagcttttggctgtttatctattaaggttttttcagatgtctatcagagaatgccctcaaggggttaagtctctctcagggactcaacatggcaaaacacctcctgcaaaatgttatttaattttgagttttgccacatggtcttttgtttaatggactgcataaaaagctcacgctggtaggcatacagaaacagtgtttctcctcccagtgtttatagatcctcagatcctcaaggaagacgggctccgccttacaggagtttcaagtcctacctggcactgttgcacacactccataggggctggactccactcctgccagaaaagtatgactgcctgacatagagccagtgtgcctggtatactgccacatgtgcatgagagagagagactggtatacataaagatatttgaacttccagaagcatttgcctttagtactacagtgttaagctatactccagtcttctaaattctacattttaaaaccaaatccatcatgaatatcaaatcttctcagggaaacagaagagaaaggactaatagttactgaacatttctctg

SEQ ID NO: 57945 - DNA, 1931 bp, Bovine  19866881027027
  misc_feature (1)..(1): n is a, c, g, or t
nctttcttgttaattagtataaaaaataatatttggagtaactccttaagatagacccataaaaagtatattcctagccaatctgaataaatcaagagcatctgctaaaaaagaaaaaaaaaaaaaaggaatacggagaaatggaactcatatatttctggcaggagtgtaaaatagttcagccacattgggaaagtctgacagtttgttaaaaaggtgaacataaaactcagcctttgcaaaacccctaggttcttcaaaccccatctgaatgcagagttccaatagcaaggagagatgagagagccttcctcagtgatcaatgcaaagaaatagagggaaacaacagaatgggaaagactagagatctcctcaagaaaattagagataccaagggaatatttcatgcaaagatgggcacaataaaggacagaaacggtatggacctaacagaagcagaagatattaagaagaggtggcaagaatacacagaagaactatacaaaaaagatcttcacgacccagataatcatgatggtgtgatcactcacctagagccagacatcctggaatgtgaaggcaagtgggccttaggaagcatctctacgaacaaagctagtggaggtgatggaattccagttgagctatttcaaatcctaaaagatgttgctgttaaagcgctgcactcaatatgccagcaaaattagaaaactcagcagtggccacagtactggaaaatatcagtttccattccaatcccaaagaaagacaatgccaaagaatgttcaaactaccaaacaattgcactcatctcacactccagcaaagtaatgctcaaaattctccaagccaagctttaatagtacctgaaccatgaacttccagatgttcaagctggatttagaaaaggcagaggaaccagagatcaaattgccaacatccactggatcattgaaaaagcaagagctccagaaaaacataaatttctgctttattgattacaccaaagcctttgactgtgaggatcacaacatactgtggaaaattcttcaagagatagaaataccagaccacttttcctgcctcttgagaaatctgtatgcaggtcaagaagcaacagttagaaccaaacaaggaacaacagactggttccaaattgggaaaggagtatgtcaaagctatatattgtcaccctgcttatttaacttacatacagagtactcacgcaaaatgccatgctggatgaagcacaagctggaatcaagattgccaggagaaacagcaataacctcagatacgcagatgaaaccacactttatggcagaaggtgaagaggaactaaagagcctcttgatgaaagtgaaagaagagagtgaaaaagctggcttaaaactcaacattcaaaaacctaagatcttggcatccagtctcatcacttcatggcaaatagatggggaaacaatggaaacggtggcagactttcttttcttgggctccaaaaatcactgcagatattaactgcagccatgaaattaaaagatgtttgttccttggaagaaaagctatgaccaacctagatagcatattaaaaagcagagacattactttgcccacaaaggtccatctagtcaaagctatgatttttccagtagtcatgtatgtatgtgagagttggactgtaaagaaagctgagcaccaaagaattgatccttttgaactgtggtgttggagaagactcttgagagtcccttggacagcaaggagatcaaaccagtcaatcctaaaggaaattagtcttgagtattcattggaaggactgattctgaagctgaaaaactccaatactttggccacctgatgcaaagaactgactgacggaaaagaccctgatgctggggaagatgaaggcaggaggagaagggggcaacaga

SEQ ID NO: 57946 - DNA, 698 bp, Bovine  19866881082803
  misc_feature (1)..(1): n is a, c, g, or t
naaaaattttacttatcttttaaaatttttattggcatatagttgatttataatgcatttctgccgtacagcaaagcgaatcagttttgcatatgcatatatctgacaactcattaaaactggcagcttagatttgcatattcctcttagagatctcaaaaatcattatgaaataatttcacaatgcattttacaagtatccacccttcttacatgttaacaattcatgtgaatttttaagtcacgaccctttaggaaatagaatgaagaaatgatagactgtggatgtaattttagcagcaaaaggtctttgttttattcccagatgttccttcaagtgatttttgaccttagaaactaaaaggcaaatgttgcgtgattttccccctcattgcagtacatgtgccttttcagatccttcccagttctcttaaatctttccacttcttttctcatctaccagcatggcaacacacgtgtagtgcacgacccgtgctctttcatttcctttgaatcaggagaaaatgtgcctgggtggaagaaaagtcgtgggtccttctctctttgagcatactttcttctgctgtcttggggcatcattctttgtaatatagttttttttttttttttggtttcccatatttgccagagaaagatgcaaaatgaaaagacaatattattctttttcttctgggggg

SEQ ID NO: 57947 - DNA, 952 bp, Bovine  19866881089563
  misc_feature (1)..(1): n is a, c, g, or t
nttgccgagtacctttcatatttcagtcactgttttgtatgtctcatatatgacctcacttaaacctttcacaatcctcattttactcataaaggagctgaggcccagagaagtcaggccctttcccccagttcacatagctatgaaatggcagggataagaatccgaattcaagtttttgacgcattcatctatattctgaaccctaaacccatcacataccaccgactgaaataatcagtgagtctgtagttgttatattgcaaatgagcgaaagtgataaagtaagaacctaaagcatatgttaacctgggtttgcagtttggctatttttctaacaccattgtctctgaggcaaagacaggaaagtaatgtataattgtgtgtgtgtgcacctgtgtgtgcttgtatgtgtgtgcacatacaatgagtgtgtgcatgtgtgtgtgtgcatgggcctgcatgcatgtgtgtgtgtagaccagtaaatcaatcctaatttatttgcaccctttcttctgctgtttctaactcccaattttgaaactatttctcaaaaatcattatctagggacacagctactcacagaacaagatagttagggtcatttaaattctctcaggcagagagcatttaagttttctcgtctctggctcccagttacaaatcttcattaaatcttaaacacagaataaacaaagcatgaacagattgtgaatgcttcctaattcaacaatatgagattacccttttgtagctactgttaaatgttggaatagatcccaaggaagtgattttaaggaccacagtattttcatgggttttggcctctttaagtcagattcccctgtaggagtcgacattgccaaaaaagtatgcattttatggttgtctggacaaacatgtgtgcttcctcagctgtcttcattatcactcatgcaagtcagtcaa

SEQ ID NO: 57948 - DNA, 765 bp, Bovine  19866881114466
  misc_feature (1)..(1): n is a, c, g, or t
ngggtgacagtgaatggagtcataaagaactggagataacttagagattgaaaaacagcaaccaatatatacatcctctgcatatatatatatatggatttaaaaataaaaagcatgctgcttggcctgactaaaagaaaaagtacctaaaatcccactagtatgggctcgtcctccaggccttacgcactcttccatccttcagcatttctaacgttttatcttactcacagacgatgctctgcatggcagttgggatacctgacagagaggaagatggtcacagataagtgagagcaaagaactatggccttttacacgggatgtgtactcggggagcaggaatgcaagaaaagcagtggacaggtggaaaagaggaggaggccaagtttgtggaatctatcacaaactgcccctcatgatcaggtgaccctccctgctctgtgactgcacagccctgagcctctcctttcatgtctacaggctgtgtttttggagcccacctgctctcatagattatgccataatacatcctaagtaatttgaagcaaggtacagatcactagtcaaccgtgaaatcatcatagcactcagaatggaacaactttgggatattggtttcatttgtagttaagatgccaacaaggctaaacaccaatttcttcccactgacttaaatcaatagcttctctctctccccttctaattgaatgaaagtatggggaaaagattctgttaacatcttcaacactcccttagtccagg

SEQ ID NO: 57949 - DNA, 1220 bp, Bovine  19866881116505
  misc_feature (1)..(1): n is a, c, g, or t
ntgtcatctgcatatctgaggttattgatatttatctcagcagtcttgattccatcttgtgctttatccagcccagcattttgcatgatgtactctgcatataggttaaataagcagggtaacaatatacagccttgatgtgctcctttccctatttggaaccagtttgttgttccatgtctggttctaactattgcctcctgacctgcatacagacttctcaggaggcaggtaaggtggtctggtattcccatcccttttagaattttccagagtttgttgtgatccacacagtcaaaggctttggaatagtcaataaagcagactatttccgagtttcttgctaaaacatcactggcatttgtaggataaatgagcaatacctatatagtgctttattctttttctggcatataatatggtttctatatatatttgctaaaagaatgatcactttgatgagtgaatgaatgtgaaaagtagttgaaccctaagtctctgtggagaaagatgctttttttgtcctaccctcccccattcatctttggggcagccaactctcatccccacccaaagcccaattttaatctaacaagggtgagtacatccagaaatactttcagaacacaaactgcctttcccctaagacaccacgtggtcaactgtggttagtcaacaggctctttttaacggaagtacaggtatgtgaaaacactatacttccatctctgaaatgctagattttcaaattagatacttgggatttgttcctagcctgcccacccctaacatctgtaataaagcactgcctaacacacaattatattcttagggaaaaatgaaaaacttgttcgaagaactcaacccttattagcaccatttttttcgagtaacagtaaccattaaatacttatgtatttaacctctgtagtctttaagcctgctagaatgtctaattagttaattaggaaattaattatgtgctaaaaagggaaatttgaaaattgtctatggatatataaaactctgtttaaaataaacttctattttgaggctttagtgctgtctcattgtattaacattttgtgattctttgcattcattatttttttttttttcacagaaacattgggaaagtttcccaaagttctcccttccgacctcctggtgtatattaaatagagtattggatctatctagtcaaatcatacttggacttg

SEQ ID NO: 57950 - DNA, 869 bp, Bovine  19866881182772
  misc_feature (1)..(1): n is a, c, g, or t
ntcttaaaatgtcagcatgttctcctcacagtattgggcaattccacttcagcccctctacaatttcatggtatgaacttgaaaacactacacagaaaaagagatgggtttccacgggcacctttaaagtcaattctatgtgcaaacacctgactccctttcctacgtatgagagttaggtgagattatcttgacagttgcttggggcctaacccacagtgtggtttgtaaagaataaggactttaaataaaatgagttatgattacgcagcttgagtcaatatgtaaaggtaatacattcttctttccttagtcacaaaggaagacattaatcaagcctaatgcacactttatatttaacaagggaattaattaggggataatgactaagaaagaggtgtctacagaacacactctataggaatgactaaagaaaaagaaagcaagaaaggaaaagaaaaaaggaaattgactgtagtcatattccccaagtttaggaattgatactcatggcctgaaaatggctgtgctttttggaccatcaataacagtgaagacttttatcagctagagtctatgatggaaatgagcaaaaataataggacaaggagcagccagtctgcagggagatgtctggatacttaggccccaggaggtgagttatttgtagacatttcctggtgatcactgcattaatccaactagaattatctgagaacaaggaaggaagcaggcgagatgtctgacaacttaggccccaggaggtgggttatttgtagacatttcctggtgatcaccgcattaatccaaccagaattatctgagaacaaggaaggaagcaggcacctggccttccattgtgcacgtga

SEQ ID NO: 57951 - DNA, 1479 bp, Bovine  19866881228246
  misc_feature (1)..(1): n is a, c, g, or t
ngcttcccttttatgatcttgttttatgcacaaaacattccttttgaaatctccgcggccacataaacattaaagaaacagcacagtgttttcctagcacatgtgcgcctgtcactgatgcttttggcagaatctgtcccatagcaatcattgggtaagtggtttctaagctgccggcggtttgaccttcggagggacttcaaggacagtgatacattgatccacggagaccattttgggggcaccagctttttgccaacacaaggcaaagttttcttttcctgtagttattttactcatctttgtcatttccttccgtactcttttctagaaacagaattaaattgtattgggaattacgaggagggaaaagaattcactcatattttattgttttaatatcttgcatttgtatccctggtaatttatgtttcctaatcctttgtccctctggtttatatttaccatgtctatcaagggtgttgaatgagttagaaccagtaaatagacttttgggagagaatgcggggagggaagggaatggggagaggtgaatgaggtttgttttctcgttggtctttcatttggctttgcaaagcaggggatgctgtttgcaggttctgatgagttacagggagtacaagaaggcccagttgttacacgttgtatattactttaattgctgagatacatgagaaagtaaaaacggtgctgggcatacatggaaacctggacatttaacaatgatgcacttctcagtatattgagaaccatgtttctttctgcctagacccactcagtcctgactgccatgttagctattttcatttctctctgattggccctgagtggtagctgactatcctgggcagaaagaacctccatttgctctgagcccttcattgggtgtagtgatcccctcatatctcatcgtgtatacagtgggcacccggcttagggaaactgagtgtgcttttcctcacactgaatttgcctttgtgctttagtttcacaggaaaacaaggtacatatcagaatatttattcttagatgctgacatacactagtctttctgcacacactttgaatcccctcctcacaaccagctggaatcagtctctgctttcgcatgatataattcttgccaggaaggtttccattttgctagatccttgtgccattactgattcaataatctgtcctataaaaatgatggccctggtgcataaagatgtgtgtacaaggatatttactgtaactttaagtgatttggtaaagcccaggaaaccacttgaatgtccctcataggaaatagtagaactgtggtaaggtatggcataatagatgagaaggactgaggaaaatagataaattatagctagatggagtgatgtaattgtaaaacaaatgacaaactctgcttggggtgtatatgggaacaggaaaacgtggagggtaatatagaaagaaataaaccaa

SEQ ID NO: 57952 - DNA, 860 bp, Bovine  19866881244040
  misc_feature (1)..(1): n is a, c, g, or t
ntggcccccagaagactggggacccttgacataaatggctgctcataactaacatgcatctatgcccactggtgaccccaggagtgccctacagcttcttcaaaaaggaagcaccagtgcatttacagtttataaatagctcaaaatgtggacacagagatgtctttttaaatctcacccattccccaagaactcccatttaggtgggtaatcatgaattcataatttaattctcaagtcactttctggaaatgctggtttggagctgaattcccagcactggaaactctcctcttggtcccagttgcacacaatgcatttcggcacaagggagggtgagaggcctctcccagggatattgcaagtggtgctctgctcattttatgaatccttttgaacccagcatctgtgctcagtgagctgtttcaagcatctcatttctgtttttgctgaacccgttctgaaaggtcaatatctacccacacctggtgacagaaatttgggagagttgctaatgtagtcattggcgacatttttcaccctggtcgtggtaatgaccttggatgtgactgccttgcaaccacagaaggcctaacctagtgcccaaacccctttatagtccataatgccaaagtttttaatagcacatctatcaaatgcatttttctgttctgttctttttataataaatgggaaaagaaaaatgagtcaccataactctattgtatagagtcctggcataggtaatagttgctaagagagtgagaattaggcacaaaccccattatgtcttggtctcaaagaaaggcctgggttataaggatataaaaaagaatttaaataaattctccaggcactgc

SEQ ID NO: 57953 - DNA, 1799 bp, Bovine  19866881268932
  misc_feature (1)..(1): n is a, c, g, or t
ntgtctttctctttctctaatttctttctctttttcactctaactctgactccttccaacttcatatcacataaaagaaaacagagaccaatggaagtaaatgatccatctagttagtgctgggattaagacagaaatctgatttcttgtctcctagttcaatactttaatagatgtgagaattctttgatcatttttaagaataaaaccaagtaactttaacaaacattcactatttttcctaaaagctccagattttcgttcaaggatcccagagtaaccactatctaaaaagctgaccagccatgcatttagactatgaggcagatccactgtagcatctgtcatgtcatcaaactctaatattgagttctgtgatctatttggtttgatgagctatcccctcttcccatccaatctacataacacctgaaaatatgactttaacagacagatcaaggcaggtacaggagtagccacacttccattcattttctttttatcaatgtacaaaaaaaaatatatatatatatatatatatatatatagagagagagagagagagagagagagagagagaaagagagaaatggggttggaagctgcagtctaaattagctcctgaagtttcagttatcttggtatgtatagtttaagtgagattcttctaaaatgaattaggtgatagcataaaattcatattatattccaaatacaaatccagactcactgatgaaaatctaagtgtaattcccaatccttccctttttccttttcatctccaagtgccagcctttctcccacttcagagaccccttacctctaatgtttctttccttctttttttttttttaactttcttttttttccttgtcctcttcctcttgatactcctcaatctgtatgctctgtacaagtgggaaagccagacttagaaggtgtgggtaaggcagagatgagaagaggtaatgaccaattttgtatgtacagttctgggtcactggagggaccagaagaagctctcatatgccccaggcctggggacaaaacaagcactactcctgttagaagacattaatagagcaatcagggggtggattgctcagatggagcagcagcagggaccaatctgcctaagatctgagtcttggtttgttttgtgtagaaacttttggtatgtgtacttccagagagcatcagccttgtcaactagactcacataggactgatttctaaatctctgtgcctgtttactcaactgcaatgtgactgatctagttttgcagccacaatggtcctatctgtttgttcaccctttcttggcccaagatgtggaattagtgactagaaaattggaaaccatagaaaaaggattggaattcttagtatgttatttaatctgacctgtaatggaacctagaaaattattcccatccctccatgatgattctgttatatttttttaaatttctttatttggccgtgctgggtcttggagttgtcacacaggatctttggtcttcactggggcatgtgggatctttacttgcatcatgtgggctctaccagggatcaaccccagggctcctgcattgggagtgtggagtcttagccactggaccaccgggggaagttctgatcctgttataattaactgtgtgtctgttcattcattcagtatgtatttagtgtacttcttcaatgtttcagtcactgtcctaggttcttgtatttatcaatgagcacagtaggcgaagatcccttccttaattttctacatccttcagaacatgctttaa

SEQ ID NO: 57954 - DNA, 964 bp, Bovine  19866881423228
  misc_feature (1)..(1): n is a, c, g, or t
ncatagaaaacagataccgcacactcagtaatcttggagtgagactgctagtctgtgagaacgaaaaaccggtctcttcggaattatggggtcacctttaaaatctcttcttttccttctttcttttcattttgactgtatatagtattggaagcaaatcatgttttcttgtattttctgaaacatttgtgaccagagggcaaagctttgtactcaagggatagagagtttatagatctgcttggaaatgcattttgccatttttttaaactcaattttataaatccctggatttatcacacttcaggaaaaaatctaagtggcattgcacaccacaaagggacaaggcagaataaaaatccctccgcctcgaagactatgaagcggatggcccaagtatggaagagtgaaaaccttgacatggcaacatattcagatttgctccaccccatcaagtctttctggagaaggaaatggcagcccactccagtatttttgtctggagaattccatggagcctggcaggctacatgactgagcaactattactcattcatcaagtctttgaccgcacgtctcttccttatttttgaactgcattcttagtggaaaggcctttttctgaccgtggacacacatcagagtagcttatacatcttgaatttcaattatgtgccaggccctctataagtggttaaatttagaagtttcaacatttttgaagttcttctcaaaacctcaggaagttacccatcatatttgcattgcagaaatgaggaaacactctcaaacttccatagctattaagtgttagagcctggataatcagctttgtagcttggtttcaagggattgccacacttaacctaaaattgagaatggattaacaatgaagttgttttatcctgcacgcctgcaggaaacctccaaagaataaagaaaagaattcagattcacttaaaag

SEQ ID NO: 57955 - DNA, 1883 bp, Bovine  19866881581919
  misc_feature (1)..(1): n is a, c, g, or t
ncatcacatctggttaatgatgtaattaaggactctacaagacggaaaccataagcacattgtgtagaaagaaaagaaatggtgaagatcagtattaggatgaaagcaacactctttatctgtaggataatttctctgaaacttaagaccatcgggtcacttttgtattcatagtttgctgttttccttattagaaagggattctaaatgttaaaaggaaaggattgaatgtatcatggctccatagaaacgataagcttgatactctgctcaaaaactttccatccttgacaggaaaattaacctacacagatcgctggggtatttaatgaaatgttacatagcagttactctcatactttttagtctgacaaatttatgaggctagagtgagatattactgggtgctacaaaactcaacaactgatggcccaaaagactctgatggatttgggatagctgatcattttcagtttgtattgtaggtccaaggagaaggatttggatttgagaagccaagaggttgtttatgggcttggaggttcacaaaaattacacaggattcaaattacctatgggctaaacgggggtttaagaccaacaaccaggatgtaaggacctactgcctttatacatcatcagagatagaccagagatagatcaagaggaatgtaaagtgtctcaggtcagaagcagctcagaaaccaaatcataagttagtaaaattgttttatcaatgacttgaagaaaactagtttccagaaattcaaggaaggtagaaaagaaagactgaacctggagtgggtagcctaccccttctccagagatcttcccaacccaggaattgaactggagtgcagaacacagcaaatcagagaaacagatcaatagatctggtgtccagaggacaggcacgagtccatgcatcacacagggtctgcttgcaagagacctggaggaattcctgggatgacaagaggagccccttcagaggaggatcagagtctgcacaactgcaggcagtggctcacggacaaagctgaggggccagcccaccctgacacaaaggaacagggctctattcaagatcttctgtgccccatgactacagactttctccctctgttagaagaccagattactcaagcaagtaccacaggacatatcacaatgaatattacatttctgaaaaggcttctgtggttaaacaagttgggaaacactggatgtttttatctgtttaaacatttaaaagggtgtctttaatgtcttggttctccttcgtgttacatacagccctgtccatgaaaatctacagtcttagtaacatcaagagaaacacatagaccaagtgcatgtatgtgtgggtgcagacagcctgcattttgcagaaaacaaaccaaaaacagataacctcatgaactgaagccaaaaccccttaatctttgattcaagaatagacagtgaagttttattctggttttcatttagcaaggcaatcctcacaggcagtatctctctagtatacaatcagaccttatacagagaaatagcttgtggtctacttgctaagcttctgcccaattagaccaatatttcttccttgaaaactcctgattttcccataacattgcattgccattctgagtgcacagctcaagctcagccagatcacattaaagtggcaaaatcctgcagccattctcatgtcaaagttactattggatggtcattccctttcattgcatcatttattctcttcaagcaatttgtaaagcaaacaagaggagcattgcaagttacaataaaattacagaaactattttaaagctaaagcttatattcagggaatgaatgttttttgcccaaccacacactgctaa

SEQ ID NO: 57956 - DNA, 1378 bp, Bovine  19866881603578
  misc_feature (1)..(1): n is a, c, g, or t
nctgagccttacactttatgcctatcttggaataaacattcttaaggttgtcaagaatgtatacaaaggtaaatttgcatgtatttgaattttgcccaaggggaatttatggttggaggaaaataactgaatatttgaagtaatttggaaggaataaggtccttccacataccacatctaggaagcatgaaagatagtcagatttttcacgtgaaactctttatggtaagactgaaatgaaaatcatgtttaaagcctaaatttaaacattctttcatattaataaagctgcgctcattaataattcatagaagagacctgccactgtaaaatgaaccattagatttattcattaatttatttttattcttttacaacctaaagcaaacatgtgggtacatattgaaaaagagctgtatattggaaaaaaaaaaaaaaagaatggatagaggagagaaatttcagaaaattttatccctcaattaacaacaggaatattagagaattcttggcagtccagaggttaagactctgtgcttccactgtagcggacatgcatgcaatccctgatgggggaactaaataaataaaaggaatactgttctttcacagcaaaaaaaattgtatccacaaatgtaatattaaccacgtaactaacttatttctagactgtgttaagtaactatcacttttccttccattctgtttaaaagttcctcctttaagcaaaactgaaaggcaggtccagttcttggtgcctcactttgctgtctgtttcttccaatctccctccagaccccctttgaattctctgctttcaggctgaggagtttagtacttttatcatcctctaatttatccttccaaaatgaaaagtaatttgatacatttcctcaaattaaggtactaggaaattaattatctgctaatctcattaattatctgctaatctcatgcaattttaaaggaaaattgcagagaaagaaaaatgcctgaccatcctaaactactcattaattatggaatctcaggttttgtgagaagatattttaaagtgatgagaaagttacagaatactctcaaattgtacaatggacatggtgaccgggcctatttattttcctggattgtcagaagattgagacaaattatacatattgagacaaacactacatcctgtaggtcttcagttccagtcagttgctcagtcgtgtctgactctttgcgaccccatgaatcacagcacaccaggcctccctgtccatcaccaactcccagagttcactcagactcacgtccatcgagtcagtgatgccatccagccatctcatcctctgtcgtccccttctcctcctgcccccaatacctcccagcatca

SEQ ID NO: 57957 - DNA, 1138 bp, Bovine  19866881873914
  misc_feature (1)..(1): n is a, c, g, or t
nactatagattgacttttaaaaagaagatagccagcttttattaaattatcccttctttttccccctaatccctggatggtctctttttactttggccaaaacttgggagtaagatccattcttggggcaagaccagggctattatgtttaattaatttccgtagctatattttctaagtcttgggaaatgagttagccagtcgggagcaactgcatgctctggggctgggctgcatttagtccacagcgggcatcataggaaaccccctcctgttccctcttgctctggcactgagccttggctggggacctcttgccggctggtcttcatttatgctaaacctctccccttattggatacatacaaaaggtgcctgcagtgccagctctggggtttggcccaaacgattctaattgtccccttatccaatattcaaagataaggctcagccattaggcccttgtaaagcaatatacaaacattggcttccggacaaggttagtaataagatactttgtatgtcatacttgagggatgcaaaaacgatagcgggcccccattcctgttctcacacattttgtagctcgtatatgtttatatttcctgcttcaaatgtgccaggcggagctgcagcaattcaagaccctggaattgatacaacctgaccatctgaaatttacttcaggaactagttagccttcttatcaaaaggagaaaccttctgcttctgacagccttctcagttaaaattaggaaatggatcatgatagatcaatattgcaaccccagcaccactgtgcattaaagcttcaccatcatccctcacctcccacgacccccctcaacaaaacctctacaccttgctctagagagaccgaagtgtatagaattaaaacagtaagagagttaggtcagccacagggttacccttaacagaagatgattcgagaggtttcttttaaaatggagttgatgccttaaagatagcttattaacatcccccatttatcactgctgctaagctgctaggtcacttcagtcgtgtccgactctatgtgatcccatagacggcagcccaccagggtcccctgtccctgggattctccaggcaagaacactaaatgatggtaaatatt

SEQ ID NO: 57958 - DNA, 1016 bp, Bovine  19866881938694
  misc_feature (1)..(1): n is a, c, g, or t
ncctctgccgtccccttctccttccgccttcaatcattcccagcatcagagtgtttttcaaatgaggcaattcttcatatcaggtgaccaaagcattggaatttccgcttcagcattccttcccaatgaatattcaggactgatttcctttaggatggactgtttggatctccttgctgtccacaggactctcaagagtcttctcctacaccacagttcaaaagcatcagttcttcggtgctcagctgtctttatagtccaactctcacatccatacatgactactagaaaaaccatagctttgactttgttggcaaagtgatatctctgctttttaatatgctgtctaggttggtcataacttttcttccaaggagcaagcatcttttaatttcatggctgcagtcaccatctgcagtgattttggagcccagaaaaataaagtctgtcactggttccattgtttccccatttatttgccatgaaatgatgggaccagatgccatggtcttagttttaagaatatttataacactactgaattgtacccttaaaaatggttaagaagggaaactatatgttgcatgtaatttgtcacaatttgaaaaaaaaatggattttgcaattagttgaggaaataaatgtaagaaaacttataaaaactaaatacaaataagttgtctagaaagtaatttagcactatatcaggagacttaagaatgtccataccctctttaggtatatcttaagaaaataatcagaaatatggtcaggaatcatttaatgctcttcactgaagcattatttatgattttaaaaaggcatacttagtcctcaaccagaggttgagttaaatgaaggttggtatgtccataggaaggaaaatgcagctttttaaaacttgttttgaaatatacttaatgatgtgaggaatattaaaaattctgttatagaaaaagcatacatagtatacaaagctgcaagttcaatatattccacttctttaaaacgtaagg

SEQ ID NO: 57959 - DNA, 1610 bp, Bovine  19866880828520
  misc_feature (1)..(1): n is a, c, g, or t
ncagactttaaaagtggtccacattaaaaaaaaaaaaaaaaaatttaaaaacatgcaagagaaagaaaaggaaaccaaatggcccagaccattaggacagttctccaaatccaaatagcagtatgtgaaataaccctatccctgagactcaagcagagattagaccttcacaaggctacaaatcacctttacaagcttttgaactcttccgccactattggctcaccctaaacaatctgtcaccacatagcaagtatggcccggctgtttccagaagggcacattgtatgagtcatacatgacttagtgaataaacaaacaaaaaataaagtcatcagtccaccaggcctgatagatgggattgttaaggacaatggcatgttctatgaggtatcctaacttactaccaaagaatagatgttattagcagttaatattgtctattcttttcccagctgaatttttaaagactgtggaaagtgatgtaaacctcaatgttattgcagaatcaagaagcaactacctccctagttccataacaaatgctgatcaaatacatgtgaattggaaaggcatatttaatttgcaggtttctgtctacatggtctgcttctattttctttgataagattagtgaacaaagtttagaggactttttttagttcaaacattttcccataatggcaaatcagtctgcttgggcaaagagaacatcaaaacattaaccatcaggagctaacatgggaagttgatctgatttacacataaaaacacctgctaaaacttaaatgaaactttatagaggaagaaaactggataaaggattttttgcatcttttcaagcagtgactacaataattgcaagagtatggacaaatggtaccaagtctaattaatcttgtatatcttctgcgctgttgcaaaatacatttcataccagggtagagtaagtacacagcaggcaaaatgtggtagctgaagtcaagcatagctaatatgctgcttagaacaggtgagatctacagaattccctgatccatcctgattggctctggtatagagaactgattcctagcatgctttttttctatgacttttctgtccatgatatatataggctgcttggatctaaacagatacaggagatggtagcagtatgtgagcagaaagcctactctattttacatggcagtattatgtatgatagtaaggcaatttgtcatgccaagactggtaggtgggagccagcagcaggtctcagactctcccaccagagttaacaacagcttagagaaatgggccagggcaggggcaggatgatagcatggagaagaacaaaatggtaacctgacacccactgagccagcaacaccacaagatgtaacaaagtctcagagataaaggaggccagtcatcagaatgggcttctcagatggctccatggtaaagaatccacctgcaaatacaggagatgtgtgtttgatcccttggtcgggaaggtccctggagaaggaaatggcaacccactccaggattcttgcctgggacatcccatggacagaagagcttggaaagctacagtccatgggatagtaaagagtcagacatga

SEQ ID NO: 57960 - DNA, 788 bp, Bovine  19866881233146
  misc_feature (1)..(1): n is a, c, g, or t
ngtcctgtcttcagttctctctcccagttgctataacattttattataatgagtataaataagagatctctttattaaaaatggatagaatctcaattctcaactatgtccataccttgaaacattttattctcatgtgaggcattttgaagagagaggtcctttcatggcctctcttccaaagcatgaaacattaattgaccttgactgtggatgcccaccatttccactgcaggtgaaggcagtgggcagcatggttagcctgattgaactgtgcaatgccaagctgctcatgtgacctcttctaatgagactgtgtgtgtgtggagccctcaagtaaagaatgaaacattcattgaaatttggccagggtagtggtgggggatggtggtggtggtagaatataaattagagttggaaaagtcttacaaatgattaaattaggtcaaagcggtttatatatattatgataaagctggaattagttttctgcttctttactgaattgataaaatctgtcaactatttttgcattattatagacaaagtcttggtgtttcttttggttggtgatgtttttgtaaaggccaagttatttccataatttataatcacctgagatttggtacagatagcaattgttcaccaccgtctgtcttttgaaagacatttttgcattatttccaaggccttcagaattcatgtaaaataatacacagaaggcctgaaatacctcattggcttttcaggatatccttaggacagattacacttgccagaaacaggtt

SEQ ID NO: 57961 - DNA, 928 bp, Bovine  19866881423476
  misc_feature (1)..(1): n is a, c, g, or t
nagggggtatggcttgctctgttttcccatttcttgatgagcagactaatgcacactgcagtgatgtgttccccagtacaattatagccaggacttcaaccagagagccatgtctgggtctagccttgctagcatatatggctttgataacgcaggactaaagagtctcactctttggcattcattgttcctaggaaaattccagctggaatctccacactatgtactttaatagcacagggaataccacatcaggaaactaataatttctccccgccgaaatgacctcttctttctaaacaggggcccagtaattctccttggaaaattatagttctgttactagagtgtctcttcatctggaaggaaaactgcccattcatacggccaggcaaggatgaataaaacatgctggtggagaaatacactaggcgtgaggtcccattcattccattctactgtgtcagcacattctgcagaggtaagtttcctagactgccacaacattttgctatttcttacttaaaatagaggcggagggtagcatgtggcttcctatcatgttaaagcagacttgtatccaagaatagtgtgcaaaagtagaagtgttcctgtttatcaaagatatgtaagaggttgacacttcgaaaataatgcctctgcttagaagcctctggagcatcaatacaaatctgaagatctcaaagttatccagcttcttctaactaatcagtgacatcccgcagagacagtcttcatacaaagtggaattagtatttgcaaatcttgaaggtagtgttcggtccagtaagacaatgaatgactacaatggtccttaattgaggacataaggattaagaaagcagaagaactcattaccctatcatggcaactggataattatcatcaatagtgctatgcatattta

SEQ ID NO: 57962 - DNA, 1507 bp, Bovine  19866881866935
  misc_feature (1)..(1): n is a, c, g, or t
naaactgagttactttgctgtacagcagagattggctcaacattgtaaatcaattctatttcaatttttaacaaagaagaaacacttcatatatataaaagaacctagataaagtatgtttgcctgtgtatgtgtgtgtatgctctctaaactaataatcctctaaggacaaaaaaaccatgactttgaacaagtatataccttaaatgaaaataaaggatcaaaacatattggggagaataagaagaaaaagctttgtatttataactactataatggagtgagtccctggtaggaaaagtggaagctttcataggaaaacatatcgtttctgaaacatggaaacactgtcacactaactaaaacacagtctctgaacataataggaattatcccactttgtttaatgaaaggacaaacttgactctattttagtgagctcagactgtcagctactttcaagcacataagctctatttccttagttatttatgtaatttatgaataaatactagaattagagtttatttgcaagataaattgcaaaattggaaaggataaaaaattccatttacatagtagaaaaacccataataaatttggagctatacctaataaaatgtatgtcttttaaggaaatattatgagcttttattgaattccataaacaatgaacaaaatttaaataatagaagatatataccttttaaattgtttggaagattcaatatcatacataaatcaattctccacaaattaacttgcagttcagtgcaatttcaatcaaacgctccaacagtttttttttttcccctagaacttggcaaacttgccctaaaatctatgtggaaagagggtaaagattagtcaagagtctctacagcagaaaaacaatatgagactagctctataagatattaagaattgttattcacttatattaacaaaaatgtgatattagtacaaggacagacaagtgtaccaatagaacaaaattgaaattccagaagcaaactcgtacatatatgaggacttggtttatgacagaggagacattacaaaccaatagaatagtcctgggaaaattggctatgtagatggtaaaaaaaaattcctaccctatactatacagaaatgtaaactcaagatggatttaagatataaaagttaaaagcaagaattatttgatcctgaaaacgacaaagactaccttaatgatctcaaagtagggaaaggtttcttaaaagcacaaaatggaaattatacaagatagatacatttgccttcattaaatgtaaagactagttgatgaagtatgcaccacaaagaaaattttaaataatgagccacaggttggtgggagctatttttagctcttacaaataaagaaggattaacatctagaagggagaggggacattaatatctagaggagaaggggacgccacatgatgatatggttggatgggatcaccaactcgatggacatgagtttgagtgagctctg

SEQ ID NO: 57963 - DNA, 946 bp, Bovine  19866880421121
  misc_feature (1)..(1): n is a, c, g, or t
nccagagtgatggtagcccaagggcacaaagaattcccacccaggtgttctttctttcctagatgacactgacatctgatctaaagtcaaagcttctcatcctaaattagactcacaatccccccagctcctccttctcctttgcatcttctccctctggataaaaatgcccagtttacactttgctgtcctgagccatgctgggcacaacctctagtacctctaagtgctggacagacaatagatatttggtaaattatatttataataaaagacaatagaaatggagctctaagatttttctctcattaccctaagtttcttaaagtacagatcaaaagcaaggtttaccacatatccacaagtctgaaataacagcttgtaaggcacaccagcttttatgttccgaaaagaaaggaaaaccccatcaattaaaacatgacactgctgctgctgctaagtcgcttcagttgtgtccgactgtgtgcgaccccatagacggcagcccaccaggctgccccgtccctgggattctccaggcaagaacactggagtgggttgccatttccttctccaatgcatgaaagtgaaaagtgaaagtgaagtcactcagtcgtgtccgacttagcagccccatggactgcagcctaccaggctcctccgtccatgggattttccaggcaagagtactggagtgggatgccattgccttctccgtaaaacatgacacagtgcttccttattgtgtcgggtataagccacaacttgatttcataggtgttaaaatatgaaagaaatatgcatcttagaagagatgaaatgaagtctatttaccccttcccaaaagtacagatttctccttttgattctgatgaattcttaggttagcccacttcaaactgtctcagttttagccccagctccactccttacattgcatttatgt

SEQ ID NO: 57964 - DNA, 1129 bp, Bovine  19866880520727
  misc_feature (1)..(1): n is a, c, g, or t
ngatgctggtggggaacagtacagtctgggagagtcctaggtgctttcccggggtctgacatgaaaatagctctgagttctgcaacatttctttagtgtcaatgtactgacatcctgtgtgtgttaactagctcctgccctacttcaaggatcatgagttctgagctgtctttctcccataagagggaccctgtggagggctggtgctttgtggggtaagacacttgtttccttataaagctgagactctgatcttaaattcctgctgcctcaggttcagaatgaccagtgccagcccaatgcagatgactcgaggtggatgaaaaccacagagaaaggatgggaatttcacagtgtgagtatcagagcagccctctccctagagaccccagaaaagggaccaaggaacaaaggcctcttcctcccagtctgggcctccacccttctctccttggagggcaggagcctgacaacatgaggatgctgtagtttctctcgtgagttgacataatatggatgtgaactgactcgatcctctggcttgatcccaaggaccagagctctgcaggtttaaagggcccagttcctggggctgggcatggataaacagaaccagagaagaaaaaggagggagattccgccttgctgttgtcagtatcttcaggtcccttcattggtctcaccgcagaaatgctcatgatatatgtgattgagggagacaagggagaggacattgagagagttggaggaggaggcttcggaggagcgaggaactgagccaagggggcagaagggcaatgctgaggaggcggagggagaggagcagaagaggagctgccatgcaggctgcaacaggaggggtccctccaggaggctgatgcaatggaccagcagcatctgtctctgtgagtgaactctttcctgtttgtggtttttaggtcgagctaaatcgaggcaataacgttctctactggagaaccacagccttctcagtgtggtccaaagtctccaagcccgtgctggtgagaaacattgccataacaggtatggattgtagacagtggggttgggtctggggtctgatgctgacttctgcagggagggtgggggttagtccccacagccctca

SEQ ID NO: 57965 - DNA, 1066 bp, Bovine  19866880798104
  misc_feature (1)..(1): n is a, c, g, or t
ncagccttgaccctcagtcattgccaagtgtcaccaacagagactctggcccaggcttctgccatcactgggcaaactggagatgggtgagtggagaatcagctctagaatgtctgttctgctctggtcaaccgaatcctaaaggcaaacagaggcctggctcttgctgaagcagacttggctgtagcccagagccaagatccggggccaggagtgcctggaaatgtgcttgggcaggtggtggctttttttatataagattttttttttaatgtggaccatttttaaagtttttattgaatttgttacaatactgtttctgttttacattttggttttttggccacaaggcatgtggggtcttagctccttaatcagggagcaaaccttcaccccctgcattggaaggcgaagtcctaagcactggaccacaaaagaagcccttgggcaggtggttttagaaaagactcctggcagttgaccaagtttctgcacccacagactccagtccctctcacataaagctggaatcaagtcacccctgctgctgctgctgtgtcacttcagtcgtgtccgactctgtgcaaccccatagacagcagccgaccaggctccaccatccctgggattctccaggcaagaacactggagtgggttgccatttccttctccaatgcgtgaaagtgaaaagtgaaagggaagtcgctcagtcatgtctgactcttagtgactccatggactgcagcctaccaggctcctctgtccatgggattttccaggcaagagtactggagtgggttgccatttccttctccacatttctgtgtgacaatccctaaataactgtgttttgcctgcaacagacactccacaggtattttagaaaatgtcatattgttgtaaattgaagcaaagtctgctaatccaaactccaagctggtagagacatctctgattgacctgagagatggttagagcagttggttaacagagattcgaaagatctagaggcagaggtatgtactcttcaaattatttagcagacattggatctatactaaaatca

SEQ ID NO: 57966 - DNA, 1035 bp, Bovine  19866881610790
  misc_feature (1)..(1): n is a, c, g, or t
nttgcaaaatctgatgatctgaagattcttcctccatgacttcctccagatacctctgctgttaaaatcacctggtcagggagaaggaagttcagaaccagggtataatactataaaagtacatgaagttcctccaccattttcaccagacatttgttcaaaaattttagttccaaaagtaagaagagttataaaaatagattagttgatacactctcttcctgaagtattagtcttacgaaaaaaaatactgtcctgagacagtgcattgtatctatgaagataagcttgatcagtctgagattagccagtttccccaaagactagaatgttgtctttagacgtatacctcgtaacactaaacaaccaccgcataattatgaagagttttgatgcatcttagacaaggtccaaagaaaacaacttgtgtgcaaaatgccaatcttttgtaatcagtattaaattgtttcattttattatattgtaaatattgtaatagtaaactaaacatattgctgtgtatcactggaccattcaaatatcaacatctgacggccttgcacatggtattatgcacagttttgtacacgtatggtatagtctcaccttcccagagttctcaggaccaagtagccatgccaaattcagtccgaatgaatgtgttattgatgagatttgtgatatccttaaagttctttccatcagtcctcactgagagggaaaaaaaggacaaatttagaatgcagaggtcatgggcactgttgggtttgtacctagcctccctcactctccggcactcaccctcctgattctacccctccccgcggtggtgggcctaattagtggaaggaagttccaatccctcatgggtgacagggtcaggaatgaggaaaggacctagactgagccagtaagaaaaaagtgggagaacctgggatcaattaggaaacacacttaagacaatcacttaatgaaatggtctgtcttccttaaggattcagtggttcttaaccagggtatttttgccccatgccc

SEQ ID NO: 57967 - DNA, 3093 bp, Bovine  19866880408109
  misc_feature (1)..(1): n is a, c, g, or t
nccttgatgtactcctttcctgatttggaattagtctgttgttccatgtccagttctacctgttgcttcttgacctgcatacagatttctcaggaggcaggtcaggtggtctggtattcccatctctttaagaatttttcatagtttgttggattccacataatcaaagcctttggcatagtcaataaagcagaaatagatgtttttctggaactctcttgctttttcgatgatccaatggatgttggcaatttaatttctggatcctctgccttttctaaatacagtttgaacatctggaagttcactgtttacatactgttgaagcctggcttcaagaattttgagcattactttgctagtgtgtgagatgagtgcaattgtgtggtagtttgagctttctttggcattggctttctttgggactggaatgaaaactgaccttttccagtcctgtggtcactgctgagttttccaaatttgctttcatattgagtgtagcactttcacagcatcagcttttaggatttgaaatagctcaactggaattccatcacctccactagctttgtttttagtgatacttcttctctaatcatctctaaatatggtttctggacatctctgattgctttgtagaacagacatcagagaaattcctgcctacttctagttgttttctggaacttgctctgcttgtcttccagctccagtcacatagttactgtgggacctgacatgtgacatgagtgtaactctacccaagactctagctctaggggtgagcaaggcatgtacttgaactctgggctgatgagtaaggattacttacttactttgggatttttagaaagagttctttcacctgtcttattatctgaagctccaagatgtatgactctggagctcttaagggctatggttttgctttgtgtaaatcatgggcttccagtaaaagagaagaatgaaggtgtacacaaagagaaacagagacaggataatatcccagcagtattgtagtctctggttccaatagttcctgggctccaactatatccaacatttgcctagccttggagctgtgagatacctatggctgcatgttaaatggcttcagtcatgtccgactcttagagaacctatggactgtggcccaccaggccttctctgtccatgagattcaccagggaaaaatactggagtgggttgccatgccctcctcccaggagatctttccgacctgggaatctaacacatgtctcttgtgcctcctgcatggacagaaggtttctttacactagcaccacctgggaagatacttccaataattctctcgctttgtcaccaagaatataaactaataaatacatcttgatctcttttgagagctccctgagatgggatttattgcttgaattcaggacaaccagggtagagaaagttaaactgcaatgaagcatctcagattttaacatatagtttctaaaatatgtttatctgaagtctccactgggagagagcacaatataatgggaagattatgtgctttggagtcagacttggatttgaggccaactctatgtttcctagtagaaattgttactctagacagttgactgcactactctgagcctcgtcaaatggagataatattacccacattaaagagttattatcacatggtgtaatgaataatggattaaaggacttggcatagaatctggttcagcataggcacttggcattacacatttcactgagttaaagatgatatcagatgaattaggtatcatgatttgggatatcactgaaaaaggaaaacccaattaatctgtgacatgccattgatgatataaggcattctgattttaaaacttttaaattaaaaaaaaaaaagtgcgtcttagaattgatgaaatgcagtatatttattgggcacagatgatatgagcaataatgttaggcactagtgatataattgaacaagactaatatagcccctcaagatgctggggtctaataattaatacaattcagattttcaaaaggactcacaataaccttacatggtaaattcctggctttcaaaactgcctaggaccaagaagtaaagcaggagagaaatactagactttaatcctcttatatgctgttagatcctatagcagttatattttcatgctctgtatacaatccaaaacaaattgtctgcttacaattaaaatcctgctgagtttccaagagcccggcccccagggagctatttgaacaccatgtcttatccacaatgacgcaattctacttttaagggacaattaaggggtttccttgtaagtcaggccagactttccccaaaatacatgaaggaagtgcctagaaaagaaaatgtttgaggcttgttttcatactgtcatttaagaaaaacaatttccaaaaagaactggattaaaaaaaaaaattaaatttggaaggcttgtacttttatagccctttgcagccttttagtagaacagaacagtgtcccttaggaaacttaatgtaacagtaaccaaatgtccttgttaagcagccatttattggtctattaaatctgatctgaactgtgatattttgcggtaaatctcttcaacataaattgcttaagatgggcttatttaggcatctaccccactagagacggcttcagcatcatcccagcaacgacaaatgtgtttgcatcttcctggagagctcttccaatatgggagatctaaaaagaacattttctttgtctcttttgcttaggaagagttaaaaatggttttagagatcattcagcccaattttactgatgagatggagaccaacaattattcattataggctaggtgctatcttagaccctgaggttggagagataaataagatattttctctgccctcaaggcactcgccatccagtggggatacaagatcagtaaatagagccatgcaaccaagtgagccacccaaataagggcaggcagttgggagaggagaggaaaataaggagccaggattcattcagagagtttaaatgtagagactgtaatgaatagtcttagagaggacaag

SEQ ID NO: 57968 - DNA, 1141 bp, Bovine  19866880416880
  misc_feature (1)..(1): n is a, c, g, or t
nattctccaggcaagaatactggagtgggttgccatttccttctctagatcacacagctagtaggtaccaatactgagactagaattgatgattttccaagtgtaaaggcatgtgctcctgtgataccacgctgccttccccaatcctgtaaagactagcttctatctaagtacctcttctctgatcccagagcctactgctgtccctgcccgttggttggtggcctggaatcatgcctgacttttctcagctcctttccctggggactgggttctggagtctgtccttgctggttggtacctcctgcatgtggacagatcttccccaaaggtggcaaattcctacctggttccagagaatgcaaactggagttccctctccagacacatccacctttgagaatgaatgtaaatgggttagaagcaaactaacccactcccgtggcttccctgtttggtcttctaggttgccttgctcctgagctggcttgagtggggccgagaggtcaatccccccatcttgccttctcccagtttcatctccccgttcactcagtcatgctgctactgctgctgctgctgctaagtcgcttcagtcatgtccgactctgtgcgaccccatagacggcagcccaccaggctcccccgtccctgggattctccaggcaagaaccattggagtgggtactcagtcatgctaggtatccataatgccttgtactccagcctgacccatgacaactgtgagctgttgtttttcattatgtcactcaactccaattataaaagcaacagtctcattgtgccatttcccactcttatgacaaaccattcctctccacagcaaatgctgcagaagcatcaagggaggagttacacttaaagttttataacctacgtaagtactaattaaaactcctccaaggtgttcaaaggatgctaccaccggatcaatttgcaacagattcaacagaggaaaagcagattaagaaatagaatatttaaaccctgcaaatcatttccttggaaaagctctctgtatcttgtcagagaagcgagtcatcttcctgcgtgaagtgttcctactcacttccggtgagtaatgagaggggcattcaggtctggacacagccgctgtgca

SEQ ID NO: 57969 - DNA, 2481 bp, Bovine  19866880486110
  misc_feature (1)..(1): n is a, c, g, or t
naccctgatgctgagaaagactgcaggcaaaaagagaaggggaaggcagaggatgagatggttagatagcataactgactcaatggacatgaattcgagcaagctctgggaaatagtgaaggacagaggagcctggtgtgctgccgtccatggggtcacagagcgtcagacaagacttagtgactgaacaacaacaatgctgtcacccatctctctttttatgaagaacatcaagagcaccttaaatgcctgtgaactggcagatttcaaaagaatcacttttatgatgttatagtggcccaatatttgttcttgtccaatattaaatgagttgatattaagcaaaactcatcctctactttgtggaattcactagaaggtgggaaggactgctgtcaatcaagagctcatcaagaaggcttttccaacagcagagccaaggaggagagtctaccgtgaaccacactattgaagaatgagatttcacagaaacccctccctctctatgctctcagggttcccacttagaatcccagctctcttgcaccatcttagaatcaaatccaaaatccttatgcttactaagttctttaattagtgttcttaagtctatgacacccacttttaataataaatatttaaaatatctctttaaaaatcctgaaatggaaaccatactacccacccacccataaagctcaaaaacaaccacaaagaaaaaataaaaggaagatacttataataaaacaatatgtattttaaaaaagagatccttaaatatatctgcatttaactatttaactattaatagctctcattgtgatgaaggaccagtttgttttttaaacttttattcactgaatataataaaactatagctgtaacgtgcaactgctgtagtggttcccaaacaattatgttcactttttgtatgtacctgaccaaggactggtaatagttgatagatgagctctggtccgtggatcccattttgagtagaactgtattagatcaatgaatgttcttaacagctctaccaggtttgtattatgctgagtctccatattatagagaagaaaactgaggccctgagaagttaagtaacttgtctagaacttttctcagattcagatccaggtttattggcacatggccaacacaggactctcagtcctgaatctaagattaggacccctggggtgcacacagtctattggaagaaactgacagataagtaatgggttaattgtgtttttttttaatcttaaagtttttattatcaagtaaaaaactaggggcaaaactctcaccccactgaaattgccttcagcttcaaagtccttctccagtcagtttctcaggaattcacccatcttacctccaaatgaataacataaaccttggaacgatccgaatctctcattcctcattctgactctttgaccagccctcactttgtaaaggactgcgaggtgggggggtgactgttctcatgtccaagttcgacatctttttgagcaacatttgtgcccctcctgaaggagtgtggaggggacatgacaagaaattaattggtgcatctgttctcatgtctgctcatgagcagcctgtgatcacaaacaactcatttgggggcacgtcaatctctccctcagaggtaccacccccacaccatttgcggaccgcacactctggcgtgtgaatcacctcccaggatgagcgactattgactcacagcttcagagagcttcctattgaaacagcagttgccctaaagccttggaaagagagccaaacaacttttgaaggaaatgaacaccatccctttgtcaactgtgaggctgttacagctggaaatgggccccgcttcctatcagcaacagtatccaagtgtctgcaggctcccaaggcccagacctaccacagcctgatgggtggcttcttgagtcatgccagcagtgctcctcaaagggctctgagacctatctatttaggagaggcattaaatgagaacttactatgcgctgggcactatgcaaaataatctacaaacactactgcatttattctcaaaaaaacactaatataaggtagatgctattgtgatttccattttacaattgattgaaactgaggcacagagtggttaagaatgtatccaaagttagagtgttggaaggcaaaagagccaaggcaatttggccccaggatgctctcaagtgctgaactgtagtgaacattttgcctcagaggaggtgtctcatcatctgtgggagcattctttgacacttatggaacatctgctttggcctcagttatgctgcagaatgatgcaaagaacatggcatcacacctggtgagttcctcagcttttccatagcatctgtattctcatcttgtgatggggattcaatttctccttatagagtccgggggtagatccaaggagataatgtatcaaaagcgcattatacacaacgg

SEQ ID NO: 57970 - DNA, 1591 bp, Bovine  19866880496705
  misc_feature (1)..(1): n is a, c, g, or t
nctagagtcggacacgactgagcgacttcacttttcacttttcactttcatgcattggagaaggaaatggcaacccactccagtgttcttgcctggagaatcccagggatggcggagcctggtgggctgccatctatggggttgcgcagagtcagacacgactgaagcgacttagcagcagcagcagcagcagcagcagtatcatcaaatagctagtcattgttttaatttctgtttatctcagggcttccctagtagctcagctggtaaagaatccgcctgcaatgcaggagaccctggttcaattcctgggttgggaagatcccctggagaagggataggctacccactccagtattcttgggcttccctggtggctcagatggtaaagaatctgcctgcaatgtggaataccttgggttccatccctgggttgggaagatcccttggaggagagcatggcaacccactccagtattcttgcctggaggatcccaggtaactagtcattgttgtaatttctggttatctcataaatgtcatataaatatgaatagaaatatacatgcaaatatttatatacactgtttagtcagatccaaataaagggctgcaacccttttgaaagtgaaagaagatgttctcaatcattaatagatatcactgaggacttttgatttaatcaggggtgaataattacttcagtttattctgttttttcactattacagttatctgaacaagtgtttggcaaaatataaaggaagcctggctcttattattggttctacctcgctcctatttccctaggtctctctgttccctggtgtgcaaatggacatactctgcagagaaaggctgggacgacagtttctggaagatggttggtttggaagacttggttacagataattacagcaaaataggtaaaaaataatatacatttttctgattatgtgtatgtatacatgaagatattggtgtttgctttttgtttgtttttgtctaaattaaaatataggaacacatccctatttttcaaagagaagctagtaagctatgatgggtagtccatgactaataggcctttgtattggggcttacagtaattgagctatggtaatctcttagacatgccactagactggggaagatttttgcatggagcagctggaaataacataatcaaagttatttatggatcattccagtcagaccttggaaaatgtgttgtgatttaggttcaaggaaccaggtaaggccatgaacaggaaaaaaaaaaaaaataattgaagagatcaaaattggaaggatcaagaacaaagcataaactggaatgtgagccagttgttcctgactaaagccttaggacccctgacttccagttttatgtggcactaactaggtagtaaaggagtggatgactagtaggaatttacctgtaaaataattcagatactaggtatatataatggtagctgatatgttaaagtttcaagataaagttcatattcatgtcacagaaagatgcttatttcatatagttactacctacctttctagtaagctgtcttcaggtaagatattacac

SEQ ID NO: 57971 - DNA, 1850 bp, Bovine  19866880523131
  misc_feature (1)..(1): n is a, c, g, or t
ncagtattcttacctggaaaactccacgggcagaggagctatagttcatggggtttccaagagtcgggcatgatttagtgactaaagaacaaacaagtttgggggtacacaggtgtacctacaaattctcggagggggttcaagctggtgtgtggaaccattagaccatgagagagtgtggtacagcagcaggttatagtctctacttaaaaagccaataacagggcttggaacttagtagatccttcataaataactgttaatgggtctgtctactccgtgacttcagaagggggttacactgacaagtacatgggtctatggatatggagatactaggaagttagaagcttaggaggcactaggaagactgttacagtgatcagtttcaggtaggattctgcaataattgaatcccaatcagtatttctgctcagggccctgggattcaagacagcgactatccaggggagcaagcacaagaaaggtcaggattgcagaatcaggggccaaggccaaacaagggcacttcatttatttactcatctacacatcctgcccttcatctgttcatccatccaatcctccacccatctttttctatatgaaatctttccataaaacttagcatttgatttccgcctcacttccttctttctcctgccacaaatattttgcgagaagtgattgttagtaagacaggataaagataaaaaggttgtgtctgcacaaaaatacattgaaggtttactaagaaagtcaaaatgctggtttggctttgaatgccgctattccactcagaagaactgaaagatcctaaagctttatagatttactgctgccctttggattgaacctgagattctgggcaggggaggaggacatataggcaggaagcaagtgtagaaaaagaagggaatcgaaaagggaggaacaaagtccctggatcccaaatgtgtatgtcagttggactctggcatgggagatggcaaagtgagaaaataaacattccagatcatctttacatgtgctcagaagtaaaaagcattttcattttgatgatgagaaataaccaaaagctctttctgatattttgttcaaatgaggaccaaccattcttaagtgctgggcacaccaacacagattaagatacagccctgctctggagtacctcacattctaagggagatggcagacatgaagcaaagcaatgtgatggaggagagttgtattgataagatgggccatcgcactcagacttggactttcaagaagaattcccagaagaagtattatggctgaaagctgagttttgaaagaaaggctggagttatccaaacaaagaagtaacaagtgttgtagggagtaggagaagaaccagggcatggaacagtggtggtggtttgtgcggttagagaaaaggtataagcaagaaggagataggtgttaagggcaagaattaggtcatgaagggtcttgtatgcccggatataagacttcaaactttattctgactgctactgagagccatttgaggagtattccacagaactaggatcttaagtcactgagatggaactactggaatttcttggatgcctccaaccatttacctctgggtcctaggctctgatgtctggcctgaaactcacgcagcctctggcttcctcttgtgccttgggagcaagtactgacacccctggcccagaggatgggctcctttccatggtgctgggccacttgggtggagcctcgctaggcagggccttccagaaatgagttgcatgcacatgatgtcagaggggtggcgcatggggaatggagtggggtgtaacctctgctatcactgt

SEQ ID NO: 57972 - DNA, 760 bp, Bovine  19866880569730
  misc_feature (1)..(1): n is a, c, g, or t
ncattgtctgtcggacatttttctggacagacagacgtgggtctgggtaccagttctgccactttctagctaggtgacctttgtgtagattccttcatctctctgagctttgctgtcctcatctgtaaaatggggataatgatacccatctctaaaatatgttctgagaagtagattagataaatagagattatacatattaagtatttagtgccctcaatgtcaattaacattgttattaattatattgttattacgaatgactaataatgacactcaggattattactaatgctactataagtaaaaaaaaaagcccaattaaaattttttactgagggaaatatcaacagttttatgagaggtaaataaagaagagtaacactgggtaagaaagtatatgcacgtggcctcatttaatattcaagcagcttcacaaggcaggccttattatccccattatacagatggggaagttgaggctcctggaagttgcctccaacacacactgagttagtacctggtgtcctgacctcctttcttcaaagtgtctcttaagctccagctactccacacctgccagcctcagcagagatgcctgtatctattagggaatgccttttcttcccctaggctcaccgaattacaggaaaatgggagagctctagaaagtggataaaggttacctcctccaggcagtttccttattctctgcctcctccccttgtagaacaaaccctccctctttgttcttccggtg

SEQ ID NO: 57973 - DNA, 2705 bp, Bovine  19866880609290
  misc_feature (1)..(1): n is a, c, g, or t
ntagctcaactggaattccatcacctcccactagctttgttcatagtgatgttttctaaggcccacttgacttctcattccaggatgtctggctctagatcagtgatcacaccatcatgattatctgggttgtgaagatcttttttgtacagttcttctctgtattcttgccacctcttcttcatatcttctgcttctgttaggtccataccatttctgtcctttatcaagcccatctttgcatgaaatgtccgcttggtatctctgattttcttgaagagctctctagtctttcccattctgttgttttcctctatttctgtgcattgatcactgaagaaggctttcttatctcttcttgctattctttggaacgctgcattcagatgtttatatctttccttttctcctttggtttttgcttctcttcttttcacagctatttgtaaggcctccccagacagccatcttgcttttttgcatttcttttccatggggatggtcttgatgttttactgccctaaaaatcccctgtgttccacctattcacctctcctttcttgcccctgaaccctggcaaacatcgatcttttaccatcaaatacccttttgatttgctagaaaattcattaaaagtcttgcctaaagacaagagtgttttttcaataatgaaactgatagagaggttacatgacttgttcaaagtcaccaaactaataagtacaggtttctaactcaggtctagctccaaatctctgttctcttcagggtgaccaagtcttttttttaactagaaggagatatttgagcttctgaactgcaggagaggttcagagttcttggtaactattacccctatggatagtgtgtgcatgtagtggtatgggggttaggcagagagatagaaaccatctgacctgcagaggtccccaagaattcctaatatgtgctacagtgggagctgtagctgaatctccccacgccaactgcttctgcacctcagtcaagccagttattaatacgatttacaaatgggaacttagaaatgctaatggccctgattgggctcactaattactccttaatcagctgctaatgagtattagctgccagcctggggtggccgatagggcttatacgcctccagctggccaaagttaaagggaagctggttgtcagtgtcactggccttgaaaataggagaaagccatgggtgagtgaaaagtgtcctcttttcaccttcttctctgtctttttgtctggatgtttgggcccagtcatgcagggatgggaagcaaaggttatttggaggacgtgaggaaccaggaagagcaaggagtgagcagctagcaagcagaggtcagaagacagtcaacaaccaactgttgaatgtggccaacgtcagggattgtgctgagtgctttcctcctgatgctgtcaaggtcatggtttcagagggacagaaaggaagtgaggaaaagttgaatgtgtaggaaagtgaggggaacatgaaggacagaagtcaagaatcagaggtatctgaaggttggcgagaaaaaaaacaaagagaaactaacatttacagaacatgttttaaaaatacttgttagtcatctgaaatcgaccactctctgtgggagatattttaacaataacacctgccatgaattgtgacattcccagcatgtgctgttccccacaatgactatcttcaatagagatttactgtacctattctacagatgtagaaattaggattcacagaggttaagagtcatacctgtgctcgcattgctattatgtagctctgtggtatttctgattgcaatttttaatagctttactgagatagtattgtcatatataaagtatatatgtatttaagatgtacaacttggtattttggtgtgtgtatatattgtggaatgatcaccacaaaacagctaacatatttattatttctacaaagttaccacttgtgtgtaagaagatttaagatttattgatttatccttttagcaattttaagtacatactgcagtgttagattttattttcctggactccaaaatcaatgtggatggtgactgcagccacaaagttaaaagatgcttgctccttggaagaatagctatgacaaacctagacagtgtattaaaaagcagagacatcactttgccaacaaaggtctctctagtcaaagctatggtttttccagtagtcatgtatggatatgagagttggatcataaagaaaactgagtgctgaagaattgatgtttttgaactgtggtgctggggaagactcttgagtcccttggacagcaaggagatcaaaccagttaatcctaaaggaaatcagtcctaaatattcattggaaggactgatgctgaagctgaagggccaattctttggccacctgatgcattgagctgactcattggaaaagactgatgctgggaaagattgagggcaagaggagaaggaggtgacagaggatgagatggttggatggcatcactgactcaatggacatgagtttcagcaaacttggggagatggtgaaggacaggggagcctggcgtgctgcagttcatggggttgcaaagagtcggacgtgacttaactgaagagcaacaacagtgctgatcactgtcatcaccatgtgtgcatcagatctctagacttatcttagctaactgaaa

SEQ ID NO: 57974 - DNA, 1613 bp, Bovine  19866880615311
  misc_feature (1)..(1): n is a, c, g, or t
ntacagtaatgttcataacacacttggtgaccagcatactgtaaattgggtgctttactgtttgcatctctcagtatgtgagaaggaaagagattcagaacagttagtgatttctctagtctccaaagcaggtaagcaataacaactcaattttgaaatcaggtctacctctgcagcccagtacctttctccaatcttttatgccctctttgtattagaattataccctttccatatgacttcccatgaaagtgggcaagtatacttcccctacccagccatactgagttttatcatggacaaaggaatggtgggcagaaggaggaaatgacagtatggcagtttgggactgacatacgaagagatatcagctgttacatcacattcttgtctgcttacttgctcatttaccatgagaatagtgaccagagcctacctttcagcttggcccacagaatgagacaaatggaacagacccacccctgacccacgcatcactgaaacttgtagccagaacccaggccacccagccacccctcaagcccatgagttagaaaaaaaatgcttgcagttgtaagtgactgagtcttgggaaatctgttaccttgcattattgtggcaatatcttactaatacacctccatgaatgaatacagacaaacctggtcagttctgcaagtatttcttgagtacctactaggtgtgatgggaagtaaaaaggaatttaaaaccatctctgacctcaaagacagtcttattgctcccttcatctcctttaccaaatgcagtaatggcaaagaaatcacaaatcgttgctttacaaaaattaaaatgcatgcgtgcctgtgtatatactgttaaaaagcatagctccattaaatgatacctaggaatatcaaggcatataggaactcagtagtaggtattaaattagcctttctgggacatgaaataactcagctagggagtggacagggggttccagacaagtcacatagcagaactttaatgttcagctttctctactggggttgggaggaatcagaaactaggattcaaaccctcaggctgctgctttctggctgagtgaccttgggcaagtcatgtgtctctggccttcagatgagcttctagaactctttcctttgcctgaaatggccccgccacctttgtctgcctgtgaggacctttgtagaccacctatctaccaagaagtaagacctcccctctgttgggttccagctacgcttcactgaaagatgttggccccgtggatactctggggtcttgtacacatatctttttcttacaatggatgacgagctgcttcaggacagggcaataccttccacacccttagaccccagcaccaagtacagcgcctggcacaaaataggttttcagtaaatactggctgacttttaactaaactagatggaattgcccctgatatcatccagggcttaaagtattttaaagtacactttctacattgtttttaaaaagggtctcagggctaaatacataaataaaaaagagacgtgcttgaaaaacatgtctacataaacacatatgtatgcaaacaaacttatgccaaacacaacgggagtttt

SEQ ID NO: 57975 - DNA, 1987 bp, Bovine  19866880642913
  misc_feature (1)..(1): n is a, c, g, or t
ntgggttgccatttccctctccaatgcatgaaagtgaaaagtgaaagtgaagtggctcagtcgtgtccaactcctagtgaccctatggactgcagcctaccaggctcctccgtccatgggattttccaggcaagaacactggagtggggtgccatttccttctccaatgcatgaaggtgaaaagtgaaagtgaagtggctcagtcgtgtccgactcttatcgaccccatggactgtagcccaccaggctcctctgtccatgggattttccaggcaagagtactggagtggggtgtcattgccttctcctgtataaggctacatacatataaaaatatatgtacatatacaaatgtgagtctggaaagattttaattcagtattgccagaggcatagaggacgagatggatggatggcctcaccgactccatggacgtgagtttgggtaaactctgagagttggtgatggacagggaggcctggcgtgctgcagtccacggggtcgcagaaagtcagacgtgactgggcaactgaactgaaccgagatgatttaagagttcaacatgtcaagagtagaaaagagagggtaaggaattcgagaggaagggtcagcatgaggggaagcctggggaaaactctagggtgccccaagcgtgacgggaaggcctatctccttggattcgggtgagcagaggagaggagtgagcagtgagattggtgctgaccagtttatacttttgtcctctccaatgctctttctccccttcagtttcactttattttcaccactaccctgcatgcatcattgttagtaactgtttcacaggaacagaagctgaggctcccagtgagttttaagagtttctgatgaggctcctcatccagtgactgacagggccatgattaggtccccagccatcaagaaccatatcgttctcctctgttgttccacaaaccagatggcctggtgatcccaggacaccttgattctacagtaaggaccctcaggaactgaattagtcatcagaaggttctttgatgtgcacagcatctgagcaaaggtaatcagatagtctcctgggatatttcatccatgctagtaacgcctaatgaactctcctcgccctgatgcaaacccatccactctggagggaccagaaccctgacaatttcttgctatacaaacttccttcatgtacatccactaaaagacattgcctgatggttgcttcatcattccttcaaaaaactgggttaccagatcactgagttactgccttcttgggctataaatattcactagctacttggacagaacctgggtgtttcccaggcctccttgggactttctgtacattagcttctgctaatagcagatctcttccagggtgtatttgattcatcctgtattcatgcttgtaggaaggaatatcctgaccttatggcaaatcttgaaaaaagataagcaggcacctggaccattatataatcaatcacgctaccagttaggatgcttacacaggccagtaacagaaggcacaatttaaacaaggtcccaggcgaatatagcagctcagcaacatcatcatgggctttcatcttttcctttcaccatcctcagggtgtgagagatgctccttgtgtggactcaagacagcaccaacagggacttcccaggtagtccagtgattaagaatctgccttctagtgcaagggatgggggcttgatccctggttgggaactaagctcccacatgccttgggacaagctccatgtactacagctactaagcctacattccacaaggaaagatcctgtgtgctgaagctaagacctgatgcagccagataaataatgattttttaccaaataagtaaaaatcaaggctctgatagtaagaaataactgagttggaggatggcttttggcactggtagatagtcattattgctctccaccaggtatttccagttttcctcttgggta

SEQ ID NO: 57976 - DNA, 1277 bp, Bovine  19866880662773
  misc_feature (1)..(1): n is a, c, g, or t
nattcctgcccttctccctccctgtctgtgtaactcatccctttaggtctggctgggcctctgccctctgcgatttcctctctcaactgaagggccaaatgcttgttgcctgagccactgacaaccccagcccccagggccctgggcacgtcacgtcagtcctttccagatcccacaaaaagaaggaggttcaggggggttcatgtaggcgtgtgatgggattctaggtccaaaatgaaatacctttttttttctcttccataccttttgacttagtaatagacacatgatcactggagaattctgaataatgagtttattaggacctattgtcataaagcagtaggaaattcaagcattattctaatattgtacatggaccagttggttaatttgctccaaaaacaatcactgctcttacagttagtaaaacattaacttggttttggaaggctcattattcattcataatggactcttccaatgacatatgaaacccacatacgaaattgtgggtgaactctagcttttcaatttccttggcatgtttgttgattttaaactgctccttttcaaaactttccttgttaattaaataagccagtcagccatattccctgcttctaattccgcactcaaatgtaagcttagttctggagtcggctttctaaccttggcttaagggacattagtcactgggagcaaaattcggcatgtgaacagctgtttcaagctttcagagtccagggcctacaggtttggagaaggtcggggaaaggaatcagtatttacttactaaatacctatcatgtgctgggcacctttataaagtatagctctttcaattctctaaacagcccattaatatgtgtgtgtgtgtgtgtgtgtgtacaggtttgagatatatcttcttgaggcacagcaaggttaagaacttgtcaaaaatcacatggcttatgagtggtggagctgggactcaaaagcaaatcaattctagagcttaaactcttgaaaactgtccaatgggttccatgtttaactttcccaaccccgagacattattattgacaattattatcagacctgtcttccagatgagaaactagaagctcagaaaagtaattttcccaaaataaactaaattcacacccatctgaactctgtggtccagggcaagtcacttcatccatccatccatccatcacctttccactgattaattgaacagacttaatggcaagtgcttattctgtcccagagattgtctagtccataga

SEQ ID NO: 57977 - DNA, 3435 bp, Bovine  19866880673779
  misc_feature (1)..(1): n is a, c, g, or t
nccgctgtgcacgtgggggaggccgcagcactccagcttccttttcggaaagcagaggtgctgccgccagggccccattgctcctggcttttctccaggcttcaaaacagccagagcttccgaggggcatctgctggtggcatctgccagctctccatccagtgcatcgtggtgtctgtgactgaaagcaagttcccaccagaagccattgccctgggtctctgtgcagggtctgctggctgaaattcatgccagccccaggaaagctctgtgatgctggcaggcagcaatcgcgagcaaaggagagctgcaaggacccaaccttagcttgggccgcagtggcacttaagggaaaaaatacaaaccgacacaaatggattcatgtgatgaatgggtcagtctattcagtaagctggaaaacacatcccacagatctggtggagaatgcaaatgcatgccacccacacagagaaggctgtatgttatctaggtcaagcacggtatttccaaggagataaggaaggaagagaacccattgctcggaacagtagatgaagcaggacaacgggagacatgatgtattagaaactcccattctacttctaatttaggttaatcataaaaccttcaaatgaccccacagaaacagcctgggagggcagttttgtcccctccattttacacagcctgaggctcgaagatccaccagtagtcagtggtctggcagcacaggaacccacatctctcagactcccgggctctgagttacttcaaaactcattttgtctgatagatttttattgaaaaccacctgtatgcagtacccaagcttggagcagacatcctcatgagatgttgagtgaaagaaaaaaagaaagggagagaagaagatgtcccaccatttttgctttccaagtgtgtgaccttgaaagtgaaagtcactcagtcatgtctgactctttgcaaccccacagactatacagtccaaggaattctccaggctggaatattggagtgacccactccatgcctttcccttctccaggggatcttcccaatccagggatcgaacccaggtctcctgcattgcaggcggattctttaccacctgagccaccagggaagcccaagaatactggagtgtgtagcctatcccttcttcagcagatcttcctgatccaggaatcaaataggggtctcctgcattgcaggtgaattctttaccaactgagctatcaggaaagatcttgagcaagttgcaaataacctgccaccactctcgggtatcctgtgaagcacagggaaccacggggagggtggaaccagatcttgacctgactccatcagcaaccagaagggggagggacatccagggggtcaccagccccctctggcctccagttattcatttgtaaaacagtggacttatccataaggactcttgcacctctgacatggttttatgattgagaggttgaaattagattattgtaaaaatctaatttttgttgtaagatccctatcatctcagatttttttcataggtgtggtgatagactaaagatcttacctttatataagagattgcccccttagcacgtaacacttcacagctgggcaggattgccacctctccctccttttctgctttgtaatttcatgaagtcctgggttgtgtctcctccaactgggttaacacacaaaacaactctcacctggaccactctgattgcttccatttttgaatcaaggcccatctctgatctttaaggaattacagcaatatacgcagggaattctatgggaataaagtctttgtctgtttgttatccagctcctagcctgtgtgtagcaaatgctactactgctgctgctgctactactactaatagtagtagtaatactactattactggcccagtgcacggcaaagctgctactaatactattgctgctatactcctgtaactgctgctgctgccgccactactggtactacccgttcagcacatggcaaggactactgctattaacttctactgctgttactactgctactgttgacccggtgtatggcaaatactgctactactagtagtaataataataacaataacaacagcatcagcaacagcagatttagagttcaaagcacattttagggcttcccaggtagcgctcgtggtaaagaacccacctcctaatgcaggagacataagaaacacaagttcaatccctgggtgggaagatcccctggaggaggccatggtaatccactccagtattctgcctggagaattccatggacagaaaagcctggagggttatagtccataagatcacaaagagtcagacacgacggaagcaacttagcatacacgcgtgaccactagcatacaagcacatactaaacgccagcctttatgctacttgctttatacgcatcatctcacatattttccttcaacaactcttggagggaggtaccattatcatccctgctttacagatgaaggaatagaggtgtaaaaaggttaaaatacctgctcagagttacacagcatcaggtggcagagttgagattcaaacccagagagcctgactcccaagcttgtccacctagcctccaaagacactgagctgcattttgaataaacaagtgaatgtgggcaaggacgggggaagggtaggacacggcttagaaggcactcagtcctggggtttgaacgtcagccctgttacttactgctgctgctgctaagtcacttcagtcgtgtccaactctgtgcaaccccatagacggcctcccaccaggctcctctgtccctgggattctccaggcaagaacactggagtgggttgccatttccttctccaatgcatgaaagtgaaaagtgaaagtgaagtcgctcagtcgtgtccaactcttagcgaccccatggactgcaccccaccaggctcctccatccatgggattttccaggcaagagtactggagtggggtgccattgccttctctgagatgaacaatacaataactgaaatgaaaaatacactgaagtagtcaatagcagaataactgaggcagaagaatggataagtgaactggaagacagaatggtggaaatcactttcatgggataaagaaaaaagaatgaaaagaaatgaagacactctaagagacctctgggacaacactaaatatgtcaatatttgcattataggggttccagaaggagagaagagagaaggaaaggacctgggggaatatttgaatattcaaaaaatttgaatagctgaaatattcaaaaatatttgcaatattcaaaaatatttgaatagctgaaaacttccataacatgggaaatgaaacagtcacccgagttcagaaagtgcagagaatcccaggcaagataaacccaaggagatacacgt

SEQ ID NO: 57978 - DNA, 2454 bp, Bovine  19866880710152
  misc_feature (1)..(1): n is a, c, g, or t
ntggctctctgggaatagaaaagtcaatggatgtaagagggtcagtggaagcagcccctcccattccgggtgtgagcctgggctgtgggtttacagagaggggcccttggtgcttgcaaggataagggcactgcctaagggttcccttaatgagcgaaccaagcctaggttctggagctcagtgtgcttccctagggtcctgcttccctgtctccactcatcgtgcagcaatcagagataagattaaatgaaactggccaccagggccagcctggcttccaggatgtgtgaattccggtagaacgctctgtgtgttgataccctgtgtgtgtggtgtgggcttattcgccattggcctagcaatctgagaatctggctctcacctgagggacagatgtcagggtaaggagtcagagctatttttccacttcactggcaggctgtcggagggtggtgactgagcacacagccatggtgggaagagacactcctcaaccctccacaatggcctctgggggatacagagaggggagcgctggttaatggggtctggggctggtgagactccttcctcaaggccaaatagtgccataaaggagaggatttcggttgagccagatagggagttaaaacttgtgtggtgagttattaaagtgaaaagtgttagtagctcagtcgtgtctgactctgtgaccccctggctctgtgatgaccaggctcctctgtccatggaattttctaggcaagaatactggaataggtagccattcccttttctaggggatcttcctgacccaggaatcaaacccaggaatcaaactccctcattgcacgcaggttctttaccaagttatcagactctggtgaatcctggtttctttcatgtcagtgacagacaagagtatttaccttccagaaggttcaggaatattacaggcaacagagagaaaaccctgacatggtgcctgcacacagtaaataatcaacaagcgatagctgattatttaacttcctgaaccaggaaatgttaagccaggcaacgtttgatctacatttttctgagtgaagagagcagactggcctggttaatcctgctcaggtgcaaataactgagatgccggcagagggtgtgaatggctggagatacagtagggtttgggtggaaggaatgtgggtctcatttgtttttagccagaccgggaggatggcttggatctcaagttgtgtccctaatgggttgatggtaaaaaaaaaaaaaaacccaactaatgtttacacttgaggcatttctgttaattgaggctctgcactcatctgtgaagagcttccgcagctgccttctagagctggggctatgagctgtgactgcatgcaaagcacctcgtgtggtttctgacacccagcaggtccctaagacgggggaagagaggagggcccaggcaacacctggggcctctgtggaatcaagattctctagaacagagacacttcacacactgcttcagcaaacatttaattgagcacctactctgtgtcaggccctggagaaataaagatgaaaagaagtctgtctttgtcctagtctgcagtgtcgtcatgatgtccaacagccaaccccccagtggcaagagactctgataaacttttcaataaaggcataagttcttagcataataatggcttggctagagtgtagactagatagtaataataacaaaaatcatacaaatgttgaattggcacaaggtgtgagcaaaagactgtgttagtggctttatctgcactatctcatgtaataattattacaggcctgtaagatagctatctgtattcccatttttacagatgaaggaactgacgctcagcagggttatataacttgcccaacgtcaggccgccatggaggaggacaagaaaatattaaatgtcagacctatgagtggacagcaggcagaggtcggatgatgaaagccttttcacgacatgctgaagagtagagatttttttttcttgcagacaataggggaaatatattcccagtttctgttttggttactttgcagctggaagtccacaaacccactgcttcccccatctcaagcacatattcgggattaccagaggccaaacttgcatagtggttcagtttggtttgttttgattcacaactgaatgcataatgaatgataattgtctgttatgtggcccgaaagttcctgtggtcacagcctacgtaagtgtccacacagagcccgaccttccccggcctcaggagtctccaagctctggatcggcctcctggtgcataaggatgtgtggtttcttctactttgctaagtcaacagttctaggcagggtaacaggcgttgcctcaaatacatctccccagaaagtccttcatctcatttaatccatctactcttcccaaactgtgccctttaccaccttctgcca

SEQ ID NO: 57979 - DNA, 1073 bp, Bovine  19866880752228
  misc_feature (1)..(1): n is a, c, g, or t
nattgctacaggcagagtaatgtaccatattcctgggacaggaaaatggcacaggcaggaatggcaggtaaaaaggcaacttctctgtgatatctactttagcaaaaatgagacaagaaaccttttggtccaagaggtaaagcaaacagatgaacaacttacacatggtagttgataaatatttaatgtcacttggtacagtggttcttcaaaaatgtctttcagctctgaaggcccttccataaatccacatttcagcagtgtggccaaggctcagaaaaaatacattttgaataaggactgtgccaacgtgaaaggttgaaaatggaatataagacccacaggggacctcacactctagggagacagggtcctaatgtgaaaaaggaaataaaaagaggccagaaacatatatatatatatatatatatatttatattctagggagatacacacacacacacacacacacacatatatacacatatacaaattctagaaaaatacatacatctatatatatattcttggagaaggaaatggcaacccactccagtattcttgcctggagaattccatggacagaggggtccatggggtcgcaaagagtcgaatgtaactgagcgactaccacacacacatatatatatattctagggaatgaggccctgttagaactctgtcagaataattagaacggattttttttccttccctcagtggatgatctagtcaggttaaggggcatcatattccagacaaacacgctcaggtcacaaggcactgactactctccaaccgccgacggcatctcagctgcttaacctgtgcatgcggagtccagcaccacatcctcagcacacacggccctcaggctgaggactctctccacccctcactcctgtctcagtctctctcatacggtgttgggcccttgctactagtctctctctctctttttttttggtcttgttttggtgtttgaatctgatgctttacccaggggatagggaagattagggacagcaggaagccgctcccactcgtgggcggaaaggacaaaaggaggaggt

SEQ ID NO: 57980 - DNA, 2176 bp, Bovine  19866880760178
  misc_feature (1)..(1): n is a, c, g, or t
ntggtgtgaaacccaaccttctctggctaccgcatgtccagagcagacaagtgattatggccctctgtcctgccatttctggagcaggcatccagggtgcttctgaagagtcactgccatcaaatgcagtgacgtgccctgaaacgtctctgtcatctgatgggggcgggggcactttcacatatattccaagatgctgggatggcctgtgctgtatgtgattctgatgggaaagggagctgagctttagagatactaactcaagttcccagcttccaaaaggcagaatcaggatttagactcagatgggatgtaagagtccctaacttttctgagacattgttttagaggaaaaaggttgtaagaacacaggagacagagagccctctcttccatatttggtctggagcaagcctggtgccttctggacctcgaatggaatatgtaacttgcaaattcaacaggcatgatgagattttcctatactggggagagaaagagaaaaaagagaacccacatattccagagtatttttttcctcctctctatgcacgcagagttctcagttgtgttgactctttgcagccccacaggactgtagcccgccaggctcctctgtccttgggattctcaaggcaaggatgctagagtgggttgccatttcctcctccaggggatcttccccacccagggattgaacctgcatgtccagtgtctcctgcattgcaggcgggctctttactactgagccaccagggaagcctccgatctatactcaatagaaattctttaagaatattaagggagtttcatgtttagataaaaataacttacttaataaattactttcctatttaaatgagatcttataaaagagaaatggcttgtaccacagaggcaaggggactaaagaagaaaggatgctgaatgctcagaggggaagttgattgagggggtgtgccctctgcctgtactcttatagaagaccacgctaatataggcaatatgtaaacactgcagaacaatcagaaacaaatgaaaggagggctgcagagtaacaaagttcagctgtgggcgatggccgggaggcagcttttgttatgcacagatcatctgcatgtgaggaaaggcctgatttcaactaggctataggctagttagtgtatgagaatggatcagggcccatctggatttccttaggaaaaaagcatgggggagtgggtagaaaaagagaaaaaagcaggtatctgcaaaatataaaataaatgacctgatgtaggtcagggttacagttctggaagagtggtttaaataaagtttctgtgttatagatcagtcatgtatttagcctgtgctaagtcgtgtctgactctttgtgaccccatggactgtagtcctccaggctcctctgtccatgggattttccaagcaaagaatattggctgctgctgctgctaagtcgcttcagtcgtgcccgactctgtggagtgggttgctatttccttcttcaggggatcttccttacccagggatagaacctgtgtctcctggattggcaggtggaatctttaccactgagctacctggaaagcattatttagctcacaatgaaacaaatgacaattactgggtttgccaaggagtttgttctggtttttccattacatcttatggaaaaatgaaattattggccaactcaatacaatggtttatatatttatatatttaaaggcactgcaaataaacacaggggagaagggaagggaagacagctaacatttgccaaacagttactatgtctgatggtttttacatatttataggttttcttcgatttacagagggcctccctggtgtctcagacagtaaaagcatctgcctacaatgcgggagaccagggtttgatccctgggtaggtaaggtcccctggagaaggaaatggcaacccactccagttctcttgcctggaaaagcccacggattgaggaacctggtaggttacagtccatggggttgcaaagagtacaacacgactgaacaacttcactttgttttacagatgaagaaaccatagctcacaaaattcaaagccctgttcatggccacacaggtaccaagggacagaaaggggattggtctgggtctgtctgactccaaaagccatgctcttcctata

SEQ ID NO: 57981 - DNA, 2222 bp, Bovine  19866880795228
  misc_feature (1)..(1): n is a, c, g, or t
ngcaagagtactggagtggggtgccattgcagtaatgtgtactcagtaacaaatgtgtagaataataagtgtccagacaatgatctccttgcagctggaggtatgcacacagcaggtggaatcatctctttataaatgtgtttcaggggaggtttgagcatcaaatcacagttgactggatgacttttaaggtttttttccttcaggggagtctctgagattctgtgagtctgtgattctagggtccccactcatggtagaaaaccctgactacttgcgtgactcacctatggcccaggtctcgggtctcctggctccaaggacacaacccctctcaagaggcagctaactccaggctcctctggcagcctggtactcacatcaagcacagggagaagctatattggaaaccttgggagcagctgcctgggggctttagtgattggaccctctgtggctcctttaagacgttttacaaggttaaggtttgctctaaaaataagctcacaaggctttttaaaaagcttctaaaaccatatgtccacaacagccattttttgaagggccagtgaacctttaaaagcttcaaaaatcactacttggcctgcctcccacagtggagaaagttcaatatgcagtgtgcttaaaaacagacctgcttttaagtcttctagaatctccacctgaaacactctgctccctatcaaaggggttcaaaatggagatcagtttgtgtgtggcttgttaccccagaggctaggttctttccacagtgatcaagtgccccaaataaccacaacatttccattagttgcctatagagagattagttcagggttttctttcctgttccttctttcctcctataggtctcttcatattatggggtgctgtggattattctgttaagtgcatacacacagattcacaggaaccatggtgtgtccaagaaaatgttcacccagattgggtgtctatgagatgactggtagcaaacgagaaagggcacttatttgttaaattgttcttaagttcaatatgtggtacataataggtaggcagttatgtatttatagacatagaatacctatatttcaggtaagaaggcaggagttagagatgagtggaaagcaatagaaacgatatctcaatgaatcataaatacgttcttctctagcatgaagattcctcaaaaaacgaaaaatctacttgctataagatccagcaacgacacttctgggcatgtatctggacaaaactctagcagctcttttcgcaatagctgaaacatgggaacaacctacatgtctatcaacagatgactggataaagaagatgcggtccgtatatacaatgaaaaattactcagctgcccccaaaagaaagaatgaagtaatgtcatttgtagcaacatggacggacttagagattatcatactaaacgaagtaagtcagaaagagaaattcaaatgccgtatgatatcacttatatatggaatctcacacaaatgaacttatctgcaaaacagtaactcacagacagagaacaagcttttggttgataaggggatggggtgggggagggctggattgggagcttgggactagcagatgcacacgcatatatagaacagacagacaaggtcctactgtagagcacagggagctatattcaatatcctgtgctaaaccattatggaaaacagtatgaaaaagagcatatatgtatctctttgctgtatagcagaaactaacacagcattcaagagcagttatacttcaacaaaaaaaggaaaagaaaaataatatgttctcctcaaagacattttataatttgcagggaggactagagagaatcatgtgatacgatgaaccgtatttcaagctcctcgaatccttcaagcctcagtaaggaattccctattgacccctctacataatgaaaaaatggaggcccagagaggttacgatgatcccacaggactgccaccctctgcacccaggctcctcatattggtgtaaaagggtaatgtgatggctctagacacagagtactgaggtttgactcccgacttcactacttcctaactgtaaattttggggcaattttctccacctcacagaacttcagttcctttatctataaaacaaagataatatctaccatgtcatggcctactcttttgggaccccatggactgtagcccaccaggctcctctgt

SEQ ID NO: 57982 - DNA, 2407 bp, Bovine  19866880817863
  misc_feature (1)..(1): n is a, c, g, or t
nccatgactgaaatgaaaacattttccattaagattcaacgaggtctcctaggacctgcttcttggtcatataagggctggcaggtcctctctgcgggctggagaaaagttttgtttccccagctgcactcacaggggaatactctgcaggcacggcgttgggaacctgtttggcttggctcagaggcctgtcagcacattcaggaagtgaagtcagaagaggcaggatttcaaacagccagctgcacatgaatgcccgagcggtgaaatgccttatccaagcagggtgcctctcagcctgggttgccctgagagctgtcaaatgagcctctgaggatggctctggaccaggaaaggaagaagcgattggtggcacgcagagaagggccatgacttcacagcaaagcagccagaagggctgtgtggcatcatctcagccatctcttctctctcaggttgctgagagaagagttagcttcatccccagtctccacgtgatagtgcccagctgctcccactctctgcccataggaataagtgagatggaggtagcagttcctcatgtgctcccaggatggtgtttcattgatctgactgggcctcatatccattcctggaccaatcagatacaggacatactgttatagtactaggttggctgagatatgtaggtcaattgcccacctctaaaacctaagtattgatgggagttccattaaaccacatggccagagaagagaataagggagaagatcttcaaaggacaatcagaacctacaaaaaagtaggttctggaggtcaaacagattattattatctgttgttattattatcaaacccataccaggatgaaggggcatctacttcacttccaaaatcaggttggcactcacgatccacagttttacctcttttaatgaattgatgagtccagatataaatcaagaacatgcttccttggatggaaaatgctcaggagggatgtattcaatgatataaacacataaaaatattctgtgaaaaaattattaatcttagttgcggttatgatattcactgtaaaaacttgacataagccaattaaaagagagaattgaatatcctccaagcaagattttgaaacatcaagaagccctccaggtatatctctggtctgtgtttttctctacttaccctacccactgaactgtatcagtatcagtttctacaccaggatttgcacaattcaatcattaaggtagtagaagtagaaaaaagtctgagatcaattatcatcatgaccgaaccctgaaaaaggagaatccaatataaaatgaaatatactttttccctccctacaacaaatcaaagatctttactcccaagaaccagaatgtgagaaggatctttgaaaatccttagaactgactataaacataagtgaatgataaatccagtgttgcaagtaggaaatgccaagaaaggttgatgagtatctactgtgtggcttaaaacgttgctgggcggtaatatagtaaccagttcttgacataaatagtcttaaaatctttccacctgaggatagcattatgagacttaatgattgtcactctctcagaaggtcacgtgctctattcattcaccccgtgcttattgaattcattcatctcctctgtccaggtacctgctaagcactgcaggtgagaatttatgtaaaacctggatcctgctatcaaagtcaggtggcttcaatacataattgtcacgacagagacaaatacagggtacttcaggaataagaacccaacctaagggaattcagcaatggcttcactgaggagcctatttagaattgtatcttaaaagagatgagtaggcgtttgataggaaaatggggagatagtgccccagggagatgggacattggggactaaggtaagtgtcaactattcacagacaaaatggagggagttcctacccacatattgtcaggtaagaaaaagagagagaccaaataaattattaaagatattatcacaattactttatccagcccagacctttacagagtgctgcagaaaatgtgtacagcagtgcctgcagagactgggaagccacaacccaagccttcactgagggatgaggaggggctggcctcagtccaggaaattagggaggcctcctggaggaagcctgaaggaattagttaggcacatggggtgagtggggacagcactgctgtcttaggctagagcatatgttagaagtaacaagaaggggctcccctggaagctcagtggtaaagaatccacctgccaatacaggagacacagggtttgatccctgatctggggaagattccacatgccttggagcaactaagcctgtgagccacaactactgagcctgggctctggagcctgggcat

SEQ ID NO: 57983 - DNA, 1693 bp, Bovine  19866880822382
  misc_feature (1)..(1): n is a, c, g, or t
naaaccttgggggtttataaggaatggagtttagagaagagttccatctctagtcttcagctccaagatgttccaactacaagggcgatgttaatgaagcttcagcctcagtgcccctcacttgcacaggaaccctcttagagggaccctagaatgtttttgcaggtcagatactagacaattttcagaagtgtgatattttaacttcagtgggtgaagactactgcctccttgcacccacctccatctcctccatcacccctgctgggtgagtcggagtagctatgggcgttttcaatttgtaattttctatttcttttttgagaaagctccccaaattgtatatgtttcaggccctgtaaaacctagctctgctcttgctgtgctacactcacagggggcagtgcccttccatacatgccatgggcagttggccttgcagtgccctagagcccacaactcttcctgttcagccttttgactttttactctcagagcctctgcccctttgggagggggaagagtgctatataagagtgggatataagtccctccttctggaagcagcagctactacagtttattttgccatcttggaaaacccctgccagggtcaggccattccccttttgaactagccttgcccacccctgcccgcccagaatgatatatccctatttcaccaggaagtaagggagaggatgtatagggctgcttagatcctcctaaagacaagagtgtcctccatgcttgtgagaaaaggtattccacagtattcaaggaagcagaccaagcgatagatgtattgttgttgtttttttgtctctcaccaggatgtgtagactgaaggggagagggcttcctggaagaagtgacatttgaactgggctgtacaaaacagaagggtttctgcggggaaaatgggtggggaagccacgattggaaagggtccagaaacccagatgctttataaacacagagtcagagtcagaaaacagaggaaaggccagcagtgagacagcaggcatggagcatgcggttgtttttattctcttaaataaagttcaaagcaaaggtctctgatatcccctgaagagaggacatccaggttgttttcctgcccagagcaaagtaaacaggattatgggaaccttcagtggcctcagcaggacacggctgcccggctggcccgggagagagggcagtgtggaaaaggctgagattaggcaccgcctgggcctctggacttggttcctaaggaaacgcctctgttgggacaacctgtttcagccgcttggaatctatatttcaggtcagaaaaaatgcacagcctttgacccagtaattctacttttagagatgcaacagaagagatagttgctgatgtgtgtaaagatacatgtgcatggatgttcaatgcaatgctgtttatagtagagaaaactggcagtaagtatctagcaatgggggtaagttaggagacttagagtacatctacgtgatgaaaaatattaatttatatttactgacatggaatattcaggatattttgccaaattaaaagctggctataaagcagtactataggctctcagttatgtaatatatattacactggcatttactgaacacttactgtgtgccaagcaggctcgaggcatttaaaatacattaatatctttaatcatacaac

SEQ ID NO: 57984 - DNA, 1673 bp, Bovine  19866880848740
  misc_feature (1)..(1): n is a, c, g, or t
naatctaaaataggagaaggaagcaaaagaggggcggggggaagccattatgtagaacagaatgatgtaattccaagaaacatgctgtgggattgtagaggaaagactgattaattatgatctacccaggaaaggctctttggaggtggccttaggctaggtgagggcaaaatagggcatcagcaattatctagagaattaggtcactgtgggtgtcaaagtggatgatttcaagctaaaaaactgcactttatgctctgaatagtttagaattggccgcctacactgctggaatccactggaattttgccaactctcctgttctccctgtgacttagaccctggcttaggtgagcttcctgctccagttggggttggggcaggatggagaagtggaggaagcctgcctctggttgggagccctagggttcattccagactctactaccacagagagtgaccccagggaacccaccttcctcccagattctgtaagaggaatataccaaagttgatggtccctaatggccatttgaagtcttgagtctctgtctttggaatttgcctaggagagaaaatggatcagcatgctcagatttcatgttcctggacatgacccacttgggagcctcttgtaaatgaagcttcctcctgttatatccatgacagtcagtatattcttgagatcatcctctctggctctgtatctcccacgtcggaatctatgtggtatagtaggaagatctccgactttggaatctaagaatcctggattgaaacccagaccatgtccctcatcagatagatgagtttcaacaaattatgtaacctttctgttgtgtttatttctgcaattgtaacatagtgattctgggcttccctggtgactcagatagtaaagaagggaaaggcaaagatatacccatctgaatgcaagagttccaaaaaataacaaggagagataggaaagccttcttaactgagcaatgcaaagaaatagaagaaaacagtagaatggataagactagagatctcataaaggaaattggagatatcaagggaacatgtcatgcaaggatgggcatgctaaagtacagaaatggtaaggacctaacagaagcagaagagattaagaggaggtggcaagaatacacaggagaactatataaaaaagatcttcatgacctggataaccatgatgatgtggtcactcacctagagtcagatatcctagattgtgaagtcaagtaggccttaggaaacatcactatgaacaaaaatagtgaaggtgatggaattccagctgagctatttcaaatcctaaaagatgatgctgttaaagtgctgcgctcaatatgccaacagatttgagaaaactcagcagtggccacaggactggaaaaggtcagttttcattccaatcccaaagaatgttcaaattaccatacaattgtgctcatttctcatgctagcaaggtatgatgaaaacccttcaagctagacttcaatggtatatgaactgagaacttccagatggtataagttggatttagaaaagtcagaggaaccagagatcaaattgccaatattcattgtatcataaggaaagcaagggattttcagaaaaatatctactactgcttcattgactacactaaagcctttgactatgt

SEQ ID NO: 57985 - DNA, 1576 bp, Bovine  19866880866594
  misc_feature (1)..(1): n is a, c, g, or t
nagctcttggctttgtaaagcactctagagcgtgacctttgggaaccaagctcatacacctaagtcaccagatgagcacaaggactctttgtagctgcatggtttctatcttcatgaagttgagaaaaggcagaggagaggggaggggtccaagaggttctcttaagaaaactctctatttgcttttgtgtttttcaagctgacaggtgtttattttttctcctgtctacccaggaaaccaagtgctgcctcctggagcttctcttggaagtgggctcacaccagaggcagcaaaggaccttggccttcctcccggaattgcagtggcagcctcactaattgatgctcatgcaggaggactaggtaatttctttccccgtgtcaccactagcactgtgttcagtcactctctaggatcgaacacactgcttttctatttttaaagcaaagattgagagctagtgattctagttagagaagaaagccttttcatacttaagcatatgtatagaattatagaacttttcatcaactgtagaattcatttataattttatcagtttacccatacaaactaatagaaaaatgatataaataaatacctggatggctctttggtttactgaaaacttgataaagatatgttaacttccaaactagcatgtatgacaatggtgtacttacctatactactttttctacacatactccaaagcccttgcaagtctaattttattttcataatatatttggcttatatcccatgtccagttacttgggtatattcctgatttaatcttttaagtaaatctacaacctggcatgcttgtattcatttattcattcatcaaagaaccattgaacacttggtgtgtcccaagcatggtgctaggaaacaatgaattaaaaaaaaacaaacacaaggtttcatcccccagtgggaggcagaccgtgaggcaaagtttactgtaaagtgtgatgactctatcctcttcttcattctcattgctgttttgtttttttttttgggggggtggatttttcatattctcaatatttcttacttcaactatagacaaacttttttttttcccctagcctttctttctaagtgtttctttttaaattatggttcaaacttcttgagatcaatttaggagatcatgaccattatattttcagaacagaatggactgaccagaagagcacttttttgtagaacatacatttccactgcaattgtatgtatctgcatgtgtatactgctccataatgaaagtgaatttcttactatggattaccatcaaaaactttgaaaaatattttagtccatacttcatattacagtcaaaagttatctatcaaatgcttacatcaaactctactcacagacctctgtctttgcatttttatttccatgtctttgcacatgtgtttctctgcatggggataactcatcctccactttgccactagctaacttctactctaagttgaagacgatcttggatgctttatcctctgtgtagccttccatggacaactcttccatttatatctaaattctctaagctgt

SEQ ID NO: 57986 - DNA, 1865 bp, Bovine  19866880911635
  misc_feature (1)..(1): n is a, c, g, or t
ntcttttcaatgagtcgctcttcgtgtcggtggccaaagtattggagtttcagcttcaacaccagtccttcagttcttccagtttcaccaagctcatatttcctcatcacatgatgggagcaaggctaatgctacaccacaaagttttggagaggctcaaaagagaatatttcagtgttgttgacagggccttgggaaaggctggaagaagctacagtaaaatgatcagtatacctcagtgaagctgtttttctatataaaacagatgtaactgtgttgtgagataatcctttttttcactatactttttctgtattccagtttccctaccatcaacacaaacatccacaaaggctattaataaatatgttggtgtgttagtcattcagtcctgttcaactctgtgatcgcaaggactatagcctgccaagctcctctgttcatgggattctccaagcaagaacattaaagtgggcagccattcccttctccaggggatgttcccaacccagggactgaacccaggtctcccactttgaaggcagattctttaccatctcagccaccagggaagcctagatatgttggtaccagcctccaaattattattgttggctaatattgtgctctctgccttactgaggtgtggaaattagcagccacagcagcactgacttgactgtggaccatcttgtgtcatatcttgtgatgtggccatagcctcgtttctcagttctcgtctcgtggaagcctctgggatcccccagtgcttctcctggaggccaaggctgttcccagcagttagcacattgtgttacaattccttcctctactagcctgggaccttctttaggtcatgctactatgttttattcatctccttatcaccagccttgtctcctgtttgtcaatgctgccttcattcctgttgcccaggttcccctacacctctgcagggagttctcaggctcacatactgtagcttctacaatggagaacaacaagttccaaaatcccagggaagaattttgattattttcatatgagtcaggtccaccctctttattgattaaactatacccatgggcgtgaggtgttataatggtctcagctttaggcaagtgtccattcccaggggaatctgtcatggccagtggcatggggtctatacaatcatatcaactcttacttaaatccatgggttgcagtagaggaggatgaatcaattaggaatgcattcagcttcataacactaagaagctctcatttaaatcagtgagttgcagtgaggaagaagcatggatcaggaatatatctgcaagagtgcaaacattggtttttggaggatgaaaaaatctcaggcattaaaatggtttgtggtcttctaaaactcagctgtacctgacattgtaaacagatatacaggtgttaaaacttgataggggcagggatatccccaaggaatgtctgaaaattctctttagtggggttgatggtgaaaaactggttgagaaacactgagttctaatgacaacaataatacctaacagttatgcagtacttagcaagtgctaggaatttttttggatgttatattaaattaacttgtttaacaatatacccatcaaaataccattttacagtggcttaaacaagtaggcttgatttcctactctacttgatttttctgctcctaaatgaaagtccaaaggtggtttgaccatttcaaaaccagcatatctttagttctgtagacttttccttcatgctaattatctcatggttaggggataattactgtagctctagacattacatctacctttaatggtagaagaatggggaagaaatgaagaaagcagtgt

SEQ ID NO: 57987 - DNA, 783 bp, Bovine  19866880922934
  misc_feature (1)..(1): n is a, c, g, or t
ntgattgcacaccagattaaacattttttaaagcaactaatcctcacaaccatttacctagcacctactatgtgtcaagcaaattcacttactccttcctgcttaatcttctcaacaagcctagaagcaccccctcttacaatgagagaatggaggctcagaaatgtcatgaacttctcaagatcatacagtgagcaaaggctgtcaccaatatgggacctcagttttctgtctgattccaaccttctaggttttaaaatctgggttagaagaatctggaaagtgttctaaaaggcccacgagaacaacccagtggaaaaagaacataatggcatttacagaccatccagttctttctccacccactttagttccactcctaaagctgaaataacttgttttctgtcactccagtatccagagctgacactaacagttgggagttaggctcaagagagttcaacttggaatgaaccttttagcccattcagtctagccccaacattttgaactgtaacccaaagagcttaagaagatcacccatttaatcaggcagagtcagccttgtttctaccaaatcctaagctttttacctgaaagggggcaataacacgtgtatattaaactgtgactatgaagaccaagtgagataatgtcttcaaagtgctccgcctggtggctcagcaggaaagaatccacctttcaatcaggagacacgggtttgacccctgggtcaggaagattctctgaaagaggaaatgggcaacccaggaatattgccaa

SEQ ID NO: 57988 - DNA, 1060 bp, Bovine  19866880924242
  misc_feature (1)..(1): n is a, c, g, or t
ngatttttcggccttaatttggacctggcataaaaggagctggagatgttggaaggctctgatgcctggggggcaatggttacacctcattagtcccagagcaggggctccttttcccccttgcccttgtggtctgcaccttccctcctggcccagggagtagactgcgcatgccctgggaagactgaagcgcttcccaggagagtacaaacagacacacacccgccctcaaactcctgctgcagggatttcatctttatttttattttgtctgctcatggcttgtcctaacttcagagcttaggtggattctctgaatggaaaaggtgatgtttgccagaaagaacagtgaatgagggagtgaaaagtgaacaggcgggaattctggctttgcatttattggtgtagtgcatttgaaaagtccttgtcctctctgggtgtctgtttcatcatctgtaatggtgggtaaggatccctaccttggagggctattggaaggatgaaatgatacgcaacaaaatgaaataaagataatggaagaggaaaggcttagtccagggtatgacacttaacaaatgttatgctgcctcaggcaacggttgttcttggcgatggctgtgctgcaaacacacggtgtctggttttgaccataacatctgctgtaggtctgtgttcaaaacagttgctccttcacatggatactagcttgcttgtgagggtgcagttgagaatgtgaccagggaccagggctttggtgcctgcccgaggaggagatctgtgtgattcctggtcatcacggccctttgctatcagctgcagcttaagatgactatcacaatctgtactatatctgagatcatatggccctgtccacgtcctgcctggctaaatgagtaggacagacagactctaaagctgtttctaaagctatcgaatgatttaaacacaaaatctggggtctgatgattccccttcagattgcgcaagcaagaaggcttaaaattacacaagaatgatttaagggagaaaacgcactcgtttctgttctggcaaacacaag

SEQ ID NO: 57989 - DNA, 629 bp, Bovine  19866880993731
  misc_feature (1)..(1): n is a, c, g, or t
nttcaatccctgggttggaaagatcccctggaggagggcatggaagaatactactccagtagtcttgcctggagaatcccgtggacagatgtgcctgatggactcagtccatggggtcgcaaagagtcggacacaactgagcgagaacgcacagcacattcactgaattatgctgaacccattccgccgtcactgctccctggaatgtaggtttctgggttgtggtggcagggtacagatgcgggcatgaaggaagacaccccccctcctcacctccgctacccgaggacactggtgtgatgcacagaccttgggatgtggcaccagaacgaacttggatctcagcccatattcaaccgctcactgccagctgtgtagccaggagggagttatttgcaacccaagcctcagtttcctcatttaaaaattggggttgatgataaactcccttctctcgggagagctctgtgagactccattgagccaagagatcaagtgctctgtaaactgtgaaaggtcagtcctgggcaagggattaagcctggatcaaggcagcagcacgctgggaatgccccagctccagggctatttaaaggccaccctgaatcctgggaagatgcctggattgg

SEQ ID NO: 57990 - DNA, 1640 bp, Bovine  19866881078786
  misc_feature (1)..(1): n is a, c, g, or t
ncaccacagtttgaaagtatcaattcttcagcactcagtcttccttagggtccaactgtcacatccgtgacctagtactggacctagtagtctagtcaaaccatagctttgactagatgaacttttgttgcaaagtgatatctctgctttttaatatgctgtctagcttcatcatagcttttcttccaaggagcaagcatcttgtaatttcatggctgcagtcactgtctgtggtgatgtcaaatacattatcttactttaaagagactagagtctcctctctctctcacttttcccaccccaccagttgtgacattctttcatcttcaaccctctctccctttaaaaatatttattttcttactatatagagatcagggcatggggcacacagccacacacctgagcaaacagaggggctaactgatttgctggtataatgaaaaacattgtttttcagctcattactgtgattccacaatgggcaccaaatcccatttgggatccacccgggaagccttcaaagggacactgttccaggtctgtacctggcaaacgtgccgactctcagagtctttgcaaaggaataacccatgtttggagacccaggcctgtcagatcaaaaccagacctggcctccagaccttcagacaagtcacaacagtgaactcaactcatccattttcaaaatgcggcctgttctcttcacagaatggagcagagcctctcagattggcgctggctgctatatttgatatattagggagaatcctgactccttccagatttctgccggtctgttttaaatccaaatagcttggctgagtgtggtttttagttattttttcatttgaaatggaattcaaaacagcaggggcataaagcccagatacgaatgggaaagaaaataaaagggtccctggagtttccccttcaccttccacattaaggaaaaggaatatcattgcaaaccaactttctgtcaaagtaccaggcagggagggtgatattgctgagctgttggaattttacaatatttctaatgcttttggttttctttagaggtggtttgatggagggatcaggggctcagctttggagccaaatctgggactgcctcttacagtcccagggccttggcccttttctgtaaccacccagtctcagtttcctcacctgggagcaagcttgccatagttacctgatagggcgattgtgaggttgaaacaaggtaatacagaaggcatttagcatgggcctgggcacatcacaagagcttcgtaaacagttaatgttatggtcagtctctcatagccagaaattggagcttctgccctgagaatgaagagtgtgactttcagacaaagactgggcagaggtttgttctaaattttcaatagttacatcacttgctttctaaggataaaacaatgacagttcactaaactcctgacgtatctttataatatcagcagagagaagtcatgaatattagttgacttgattgaaatcaagacatattcaccaacacccaagaaaaagtataagaaatgcttcctggaaaaatcatataattaatttatgtccatgtttactaaatgattagcctctgttttgtaaaccacagaaatcacagttct

SEQ ID NO: 57991 - DNA, 809 bp, Bovine  19866881125996
  misc_feature (1)..(1): n is a, c, g, or t
nacaaaggtccatctagtcaaagcaatggtttttcccagcggtcatgtatggatgtaagagttggactataaagaaagctgagcaccgaagaattgatgcttttgaactgtggtgttggagaagactcttgagaatcccttggactgcaaggagatccaaccagtccatcctaaaggaaatcagtcctgaatattcattggaaggactgataagctgaaattccaatactttggccacctaatgcaaagagccactttattagaaaagatcctgatgttgggaaagattgagggcaggaggagaaggggacaacagaggaagagatggttggatggtatcatcgactcaatggacatgagtttgagcaatctccgggagatggtgaaggacagggaagcctggcatgctgcagtccatggagtcacaaagagttctacaccactgagtgactgaacaacctgtctctggggacttctatctactctgggagccagccacataaataacccaaaatcagaagtgtgtagaaatgctagggaaagtcagcagtaagactggccatctcactatgttcatcaaggcagtgtctccaagacccagtggcaatattttttcatctcctggtaaactcactctatgtaactgaaagaaatgttagcattttaaagcagtttaaaactatccccaaacatttaattgtgttaattgggggggcatgtttattatagcagaagacacaccaggggttgaaactgagcctatggctttcatcttctcaaggacattgtcatctgtccctctccggcag

SEQ ID NO: 57992 - DNA, 1185 bp, Bovine  19866881139270
  misc_feature (1)..(1): n is a, c, g, or t
ngctctacctatcgccgcagtaggaccctcattgtctgccggatgcccattgagttagcccccactgagacaaggggtcaggtctttgtaactctgcattggatgtgaactgcccctagacagtaggggcaaaatgtgatccaggtagctcctttgttgaggggcagttccaggggagaggttcaggtgggggccaccagcagcttccagaagccagggaaatgaataccttggtcctgatgtgggccacacaatacaacattctctacaatactgtgaaattataggaacattcttaccaccaccattcacactgccagagaatgtgaaatgccatcttacgagtgaggcctctcccctagcacatgctgttcctctcactctgtttcatttttttccactgggctaatttccatctgaaactcttgtttatcatttatctcttaccatcagaccatatactccagacttagggtacccattacccagaagaggacctggcacaaggcaggctcccaacaaatataaatgaaattccaaatatgtatatgaacctactctgtgcatctcactggaatttctgtgaggactaaaatctcctacatgtaagaatagagctcacagtatacacttaagccaaaaaagtatacaaaaatataaatgttgggaaagaaatgtttgtgtgtgtgtgtgtgtgtatgtgtgtgtgtatgtgtgtatgtatatatatatgtatatatatatatatatatatatatatatatatggcattgggataaggaaatggaccttttttcttttcttttaaaattttctggccataccattcagcacatggatcttaggtcccaatcagggactgaacccatgccccctgcattggaagcatggggttttataaccactagggaagtccttggaccttttttcttataggaaagacaccacaatttgagcaattcagcagcagggaacagagacagaacttcttatccagggcttaagggcaagcctttgactctctataaggtagggagacttaagactagcatttatttcttccagcaccagcatttaattccagacttaacagggactgagacctataaaagattcaccttgtttctctgaatgtgtacattatttaccatacagtttataaaatatttacccttttatcaaccg

SEQ ID NO: 57993 - DNA, 1913 bp, Bovine  19866881163951
  misc_feature (1)..(1): n is a, c, g, or t
nctttctcccaagatctcaaaaggcctgggtccatttatctagatactcaaattctcaacagcggcgttagatagatgctgagagggaaatgctgttttggaaagaatgaaaccattcttgcagtgtttatattcgattccggagacctggttagaaaaatatttttaacaaacggaaggaagagtaactatgcactcacaaaatgtgggctgctcatcgcggtgaacctttgccctgggagtctattcccagggcagggcatgtgcagccccaaatggccgttagaagatgaaagggaatctttcaccatttcctcccattgtctgagctttctccctgctttgtcaccataacattcttttttggaattccattaacatgaagtttttccctcccccagaaacaattaaaaagaggagttggcaaagccagccaggaaagacctgtggctcactcctaagtgagtaactgtcatgtgtcttggaaaggtttgctgcttccagtcgaagaggttggagcttgaagaggaaaacacagaagtatcctctctactgactgcaagatgttctttagactctacagtgaggcgctgggagggctgaacatgatccggggaccagaagacctaggcccagtctaaataggaagctttaagcactggcaactccatttaactaataaggtaactaacaatttcaattggctactacatttgtatatgtgtatgtatgaagcagtcatttgtaagtaaaagaaaaggatacttgattgaggctatctgttcaataatgtggttttcatcattgatctgagtactaatcaggatgagatatatatatatatatatatgactatatagaatatatatgtatattttctgtgcaaaataagtctatcatttataaagtacttgttgtatcctggatactttgtgaatattatcttggttaaaccttataaccatattatgtagtaggaatttttatccaaaggtcgatataaggaattaaggctaagagatctagtcagtagtggagttagaatatttttttaagagcagttttagatttacaacaaaattgacaggaagatacagaggttgctaataatagccctgccccgacacatgcacagccccctgccaacatcactcatcagaatggtacattttttaccaaggacaaacctacatggactcatcattatcacccaaagtccataatttaccttagagttcactcctggtgttgtaccttttatgggtttgggcaaatgtataatgattatgtctttcattataatttcatacagactattttcaggaccctaaaaatcctccatgctctgtctattccatctcctcttcctcctcacccttgcctactccggcaactagtaatcttttactagtctccgtagttttaccttttgtagaatatcatagagttgtaatcatagtgtgtagccttttcagattgatttctttcacttagtaatacgcatttaagtttcattcatgtctttgcatggccttgatagctcatttccttttagcacctgagtaatattccattgtctggatgtaccacagtgtatgtatccactcacctactgaagacatctcagttgcctccagatttttttgcagttatgaataaagctgctatgagtatccatccatgtgcaggtttttgtgtgaacataagttgtcagctcctttggttaaataccaaggagtgtgatcgctggaccattcagtaacagtatgttttgtttttataagaaactatccaactatcttccaaagtgactgtaccattttgtattcccaccagcaatgaatgagaattcctgttgctccacatcctcactagcatttagtattgtcagcattcttgatagcacacccatt

SEQ ID NO: 57994 - DNA, 1165 bp, Bovine  19866881213466
  misc_feature (1)..(1): n is a, c, g, or t
naaaacttttgcacctgaagattccctaacctacgtgtcatcaaggccaggaggttggttcagtctaagtgagtctcttttggctctaatgacccttgctttctgccctttaaaggtaaatgaaggactcaaagaagcaatggtagcctaaaatcaggaagaaatacagaacaggaacaaacacagaacctgtagagcctgactgctttgtgtttttataaccttgtgtatattatgtatgctgtttcatgggcttcccaggtggctcagtggtaatctacctgccagtgcaggggacacaggagatgtgggttcaatccctgggtcaggaagatcctctgaaggagaaaatggcaaccctctccagtgttcttgcctagaaaaatcccatggacagaggagcctggtgggccacagtccacaggattgcaaagagtcggacatgaccgagcaactgagcatgagcatgtatgctgtttaagagtctctgcctcagtttacatatctgaacaataggagtaatgacagaatcttccccttagggttattgtggggatcaagtgatttaattcctgcagtgtgcttagaatagggtctttaataagtacccagtcaattgtagtggttgctgttgccaatagcacattattgctggaaagtcagtgtcctgtatgacacccgttactagtggagtaaaatgtgctccttcccgttgagtcccagagcagccttcaggccaagatagccatcagcagggaaagggctttcacaaaatttttctgaagtatttaggtttactgcagaggattaaagtacacataaatacacgaatgtgcactcagtctaaacaaactcttacttgttttctcccagagtttgggagtaattggaggtgctctggggagcatatttctgtatctgtttccttgctgtagtcaggatgtccagtgagaagcgtgtgcccttccaaatgagtgaacacaagcaggaatcaacgcagagcattctggacagtcagacagagcctttactgccatttctgagcagcagagtccagtctgccagtggagtttggcaaaaactgatacagaaacatctttaaatcatggggtttgaggtgcagggacagttggggggtgggggcgggagtaagcaaaatcctcct

SEQ ID NO: 57995 - DNA, 1702 bp, Bovine  19866881223101
  misc_feature (1)..(1): n is a, c, g, or t
ntgctatgcgacaagtatgtgccatatctttatgcacattatcttttgttcaatgagtgaaaaaaatctcagttaatccatctaggcctggttatccccattttatagagaagaacactcaggctgagaaaaattccccaactttttcagtatctctgtactgaaagagcattcctcgttaggtctgcttggttccccaaatggaaaaaaaatattccagtgttttccactccacaaaaccaaccaagtgaggaaaaagcacttaaattaactaattttaattaaagtgactagaggcagtgagactataagcagataatagccattatgtagatgcatatgataattatacctgaaattatatgtcctgatttccaggaggcataccttaaaaaactgaagtatcatttaggcttatttcattggttctttgcttgagtatatgtccagaaaagtttttcttagatataagggataggagaggggaaaagttgagagaatgaatggcaatactgtataattaatcagtgaatcttgactaggattttgtgtagacatttaaccttgaaactatattcaaagagtacatctcttgaagggagatccgaggttcgggtgggatgtactagtcggtgctggtggtgttccctgttgatgtgtgaaactatagaagcgattgtgaagatttctgcccttgggaatccacaaacacccccttgaattagaatgacaaggatgtacctgtgtcctcactttccttgtttttgctaggggattcccgtcgaaacatcatcatgtggctggatcaccgggcggtcagtcaggtccaccggatcaacgagaccaagcacagcgtcctgcagtacgttgggggtgtaatgtctgtggagatgcaggccccgaagcttctgtggctaaaagaggtgagtgcacaggcttggggagagattgctcataatagcagaggattccttccagggaatctgtctgtaccaggcaccctgctcgagtctgctgtgttggatttttccagcaactcccagaaggttgatcccattttattgattcagtagcagttaagtcattctgcataactcatgcaaggcactgtgataagtttttgacagagattatctctttgaatcctaacagcaaccctataaagtaggttttttttctttttttgtgtgtgttttgtaaaaactaaagctaatagagattcatcagctcaccctaagcaacttaatcttagcagcaaccctctagttttctttttcttttttatgtgttttgtaaaagctaaaactaatagagatttgtcagctcactctaagtgactcagaagcatgcaacagagccagaatctgaacctaaaactgactctgaaattgatttttcataacacccactactctactgcagttcacagaggttaattaccattccagttagaaagtggcagagctgggattcaagtcctgattttctaacgggaacattctctgcatacttttagcccccaatgattaatgtttgaccttggtggcattttatggaatgcctttctcatctcacctgaacctgagtttccatgtccttgtgtgataaggtgatctctggacaaagcacttgcaggtggttcccatttccagatgttaggatcatttatgaagtgcggagaatggtgatgtcaacttaatgg

SEQ ID NO: 57996 - DNA, 1116 bp, Bovine  19866881247266
  misc_feature (1)..(1): n is a, c, g, or t
ntagggaatggtttttaaaatgatggtatattcatagaaaggaatggaaagatgcccagattctaaaaaatgaacacctgtctccccaggagccctcgatcttctaattacaactctcttctgatttgtccctgggggtgtcacaccagatacataattaaggaacagggatgggaaggggatgagactccccctcccccatttatatctgtggtttcctttcttcccttcttccttccttcattctatcctatcttttattctttcttccttaagtctaataaacatgcatttttgttatcaagattactttatctttttttttttttacaagatgctggtacccagcaaggcaaagccagacttgtgaacaggtttagttcagtaataaaagtatggacaaaaccccatgctaatacagaagagaatgtaaaacaaacacctttccaaaaacacaggagaagatgcacagaagaggaggctcggggagttaacctgagctcggcttgggcatctcttaggaagagatgctctccaggggaagacaatgaaggcaaagcttcctaggcagaggaacgcaagaacccaggcctagggcctgaaacagggtgggctgtgctgtgtttgcagctggaatgtgaccctcagtgctcagatgctgtatttagtcctgaaacaaggcaccagaagaagcacaggctgaggagtggcctgaatttagttctagtttggaggagcagccacggaggaagaaggcaagagagatgggtgaacgatttgcacatagttttcatctgacctgctgtggaatgtggctcataattcatctacatgggcagctagctactggaatggacaaaggaaacccagccagtggaaattcctgggaaactgtcatggggcccaaataggaaatgccactcaagagattttactggtgccaggcttggataccagtgtcagaaccatgctcctccaagaaccatttcttcctgtcagccaagagagagacacttcggctgatacatatgtggataataagcagggtcccatccacattattcttttcagccatattacattcaccatctaacttgatacttcaagaactgctga

SEQ ID NO: 57997 - DNA, 930 bp, Bovine  19866881310096
  misc_feature (1)..(1): n is a, c, g, or t
ntgcaatcattacaactcacctagcaggcacgtcaacatgcctgttgacatgtgctcacaaatactaaaaatgcatgcaatgcgatgcagccagataaaatgcgtggcacccttccacatacattcagtgaaatagtagagcagaatggaaagagcagacgctttggagctgggtgaatgtgggttccgacttgtttctgtcttttaatagtggtatgatcttgagcacgtctctaggcgtctcagtccccctcatctgaaacactatattcacaattcttagcttttggtcttgttttgaggattgtataagacaatgtatgtaaaagaatggtctgatatgcaacagatgcttaaaggtatttattgcagaaatgccaagaatctgaaaagggaggagagagggagagtccagtgctggactcaccttctttatggtgttttaccttttttctgtttctcagctccttaggagctttttgcctcttgacagtaagatcttgaccttaattgattttactgttatgctcctgtttccattttacctcatcaaatgagccaggagacgatctgagtgtgaatgctgtttcccttccacatctccccacctcccacccacgatcccaaatgcccggcagagctagagacagcaggtcctcagtgaaggctgagaaacgagcattggatttatctttatcctcaaacttcttgccatggtcctaatcccctccttcttccctctgcctctttgagcctagttgggtgagagggactatagtcagcaagaagggtgaagataaagaagggcacaggatttacagtccagatctggaatacatattttggaatgggaaacaaacaaacaaacaaaaaaagtgctccaaaaagagtaactctccccctatccccctcctcatttatctgaaacat

SEQ ID NO: 57998 - DNA, 1678 bp, Bovine  19866881374863
  misc_feature (1)..(1): n is a, c, g, or t
ngagtacttactaaccagcaccttaagtacgaaatgtccctttatctttgatttttattcccatcaagtccttcctcctctttttccagaactggaaaaagcaggagttgagtggcacttgcttctttgatctttatcctcctgttcccaggcttccccggagactgagagtccaggaggctttctccaaagcagaatgttgactccttctgccagtcagaatttgggatctgcagcaggtcacaccaggtcagcacttgaaggaaccgtaattgtttggggcttgtgtgaggcctggatgacatccaattccaaagccagatccttaacctgactcttggcaatctctcagcatggagttcatctaatcagatcttgaggttgtttctgacctcaacctaaacagaatcttaaagtaggaaaccctgcattcaatgaaagaggtttggggaaggaaatatagggtagagattcaaggaatcagatgacatccagaagcctgggtggggttcttctccgactgcctatgcaaagggaagataattctcctggatattaactaagagaacttcccttaataaggctcctactttgtgtcaggcactgtgattccagagtgagaaaaatcaaaggaagatagctcattactgcatgcctgcgatgtgccagatgctaagccagatgctccacttatgtacatcctaacatatctatgaggagagtattgctatctcctactgcctgaggggaaattcagaagtatgaagaggtatgatatttgacccaaggtacacaggtagagagaatataaacatttaaatccagatcttcaaactccatgttcagagccctgattacagtatcacaatacatctcaggggatggctgtctcacaccaataccgttaagtcacaaacatgcaggccaggcgagaacaactgaaagctttgggacataggctgcctggttcactgctgtaatctccagcacctggaccagcactcagttgtgtccaactctttgggaccccatggactgcagcccaacaggctcctctatccgtggaattctttaggcacgaatacaggagtgcatcaccacttccttctccagtaagcaccaggtttgcaagctttcaatatatatccttactaactacatgcttggatgggtgaatgactttttaagacacttgagcctctcttctcctcccatcctgaaaggagcataggcaggctgggaaacaagagggaatatttgctcccaggcttcctttctttccaagacattccaactctaaactggctatgagatgaagaggagagatggaggtagaagaaggataaaacttggtcaaaactgctaaatagattaacttcctaggccctccttagccacttctggcttctacatttaaccctttaagaatccaaggtcctgtcctctctttctgcttaaaaaacttacttttggaaaagaaagggggaaacattaacgtaagtgcatttatgttttaaaagcaacaaaaacatctgggccaaagcttctaaataaatagctgagaaaagaacagaaggtaaagccaaagtttagacacatttgaatgcagagttccaaagaatagcaagcagagataagaatgccttcctcagtgatcaatacaaagaaatagaaatag

SEQ ID NO: 57999 - DNA, 770 bp, Bovine  19866881397431
  misc_feature (1)..(1): n is a, c, g, or t
ncatgtctcctttctgtttttattttattttattttgttgccccacggtttggatttctgtaatgctacttattagtctcacttacatcacagtaattcatgggctcattttctctccttcattggactgaggactgagactcatgttttatctccatgctcctgacacctccccacagaatttgcacttcatagccactcaatatattttattaaattgcaatttgaaaagaagcctgtgtgcttttatttaaataagcccataaattcagcacaaccgtcttcatgaattcaaaattctcagaaacgttattcttcaggattgttcttttgttgagatccaagaggttggctttacagtaaataaaatgaatcacagaatctcgggaccagaataacaacagcaataaggatggaaactagaagtcatctatgtgatccattcccttctcttcagacagttcctcagtcacctgaaactgttatggctgtccttttgcaaagatcccctttaacggagaatgtcatctcataccagctcatcatggcttctagtcttgtaagttaggcagtgttctctcagttaatctgaatcctcccttactgaaatttatgctcattgctttcatagaaatggaaaccagctgctttcaactgaaaatatttccctttccaaagatggttattccatcattccacatccttctcttcccctggtgtaattctcccttccatctgacattcctttccgttctccatttcccaactat

SEQ ID NO: 58000 - DNA, 1248 bp, Bovine  19866881423787
  misc_feature (1)..(1): n is a, c, g, or t
ngcactggtgacctaaggcttcctcctcctcgttctaacaaatgccactcccctggggcctgcggagacaaataaacagttcacatctcagcagctggccctggctgtaagtctgcacgatttaccttggctctcactggcattgtgaatgaggtcatagagggaggggacaatggagaagacctctaggagggcagcagtaaaacacgccatcggaaggcgggagaggacacttgagtcatggggtccttggcagctgtctttgagaggtaaataacttcaaaaagtccttgactggaagataaaatgtgtgcttttatgcttactaaaggccatctctagacttttctctcatttatttttatgaaatcaatttccttaaggcccaagagtatggtatggtaaaacgaacgagacctggagtggtgagaagagagatagatttccagcaccatacaggggtctgtggtggatgaggaaatctagtccatgcttacctctctgggactctcctcctcactccccatgtgccagttgtactggaattttcccatcagttttcctgagatgcgtaccctctgagtccttctggaaatctctcctcatcactcttcctttggctgattcctgtatagtcttcaaatttttgacattctacaaagaatgtcaaagaatgacaaatatgtcattcttcagggtcctttcctatttcacttcttcttttttccttttatccttcatgatatctgaaatgcaggtgtgattactgagatttgagcagccattttggaccatgaggtaaaggttaaagctgtacatggcagaactgcaagatagaaagagtgtgaatccctgaagttgtcataaagatgcataccagttttaaatttccacctctggatttatttttttccaattgaggtaaaatttatgtaacataattggccattaaccattttaaagtgtacaattcagcggcatttagtatatttaccaggttatgaaataatcgtctctgtttagttccaagatctattaatcacccccagaaagaagcatcatacgcattatgcagtcactatccattccctcctttcctcagtcattagaaactatgagtctgctctcagtttctatggatttgcctattacggacatctcatatacatggaatcgtagtatctgtgaccatttgtgtctggcttctttcattcagcataatgtttttgagattcatgcacatcagat

SEQ ID NO: 58001 - DNA, 1414 bp, Bovine  19866881494387
  misc_feature (1)..(1): n is a, c, g, or t
natatttagtaggcattcagtgttgattctcttcccttctagtttccttctgttaccttgcaaaggaaaatgtctctatttatcagatctataaatagactgtatcaggactatagcactcactatacttcggatcttagaaccaaataaggatagttgttattatgtgaagttggttatttggaagggacaacaaatcccttggaatgaaaaactgtatgcctcttttggtgtgacttggggctctctgaaaacagtaatgcaggtcacccctatctcagagcttagcatcagcaaatcctatttgaaaccatagagacaaatgttgataaacagacttagtattttatactctccatgtactgtactcctagagttcatcctgaagaggactgttttatgagcttatcaagtgtgtaaacagtaactagatgtaccaatgcatgtaaatgacaacccagagtctctttctatgtggggccaaatatccacatattttactgctttgccagagatcactttccattgattataacttcagctcttttcctctagtctgcctattattttcttacttctcttaaagactctttaccagtgtttcagaatgaggttatggtgatggcaggatttgatgggaagataataatccacaagtactggattcaaggtcgacagcagagccaaggttaaaatttgggtcctcagactgtctgctaattgtcttatgaacacttatggtataacagtgaacaagaaataaataagtccctgttttcatggaaattatggtcatgcacatacacatacatacatgtatgtgcgtatctgcagagagagagagagaacacatactccaggaattggtcagcattataaaggaaaaattggagaaggcaatggcaccccactccagtactcttgcttggaaaatcccatggatggaggagcctggtaggctgcagtccatggggtggctaagagtcaggcacgactgagcgacttcactttcacttttcactttcatgcattggagaaggaaatggcaacccactccagtattcttgcctgaagaatcccagggacgggggagcctgatgggctgccgtctatggggtcgcacagagtcggacatgactgaagtaacttagcagcagcagcagcataaaggaaaaatagagatgagtaaggagacatagaatgagaggtgttaaggtgatggatgggagctatttcaggtgggggagccatccttcattaggttgcattcaaagaggactctgaataaggagagggaacgagccatgattatgcaaagaagatccctttggatgaaaaaaacaagtcccacggcctggaggcagaagccagcttggcaaactcagtagacattgtaaaggtcactatggctgga

SEQ ID NO: 58002 - DNA, 1649 bp, Bovine  19866881545052
  misc_feature (1)..(1): n is a, c, g, or t
ncggcaaacaggaggtgcagggaaggggttaagagcattccggcagaggatgaggcctggagggataacacactctggaactccaggtgatcaagtcagtttcaagtgtggtccctgagctaaggcatggtgagataccaaacagagaggcaagcagggtgtttaaacaaaagacaccacacatgaagggagccagccagtcagacctgagttcaggtgctgaccatgtcactagcaattcattcttctctgggctctacttcccaggaaggaattgaccaggaggtgaggggagtgagcagctctcactggggtgggtagaggtgaagagctagaaccagaagctctgaagaggcttattaggtttaaaaacaaaatattgaagatgggatttccctggtagttcagtgttttaagactctgcgcttccaaagcagggggctgtgggcacaggttcgatctctggtaggggaactaagatcccagatgccacaggacatggctgcaaagcaaaagaaccaacaaaaaacctgaaaatgtgaaaatgctgtcgctttgctttgttttgaatcataatatttattttgaatttgaaactcattcagaaaaggcttttgcatttatctacagtgacctggatttcataaagaggcagagaaaccctggttgagggcaacttaaagtcccctctgattcttgcctccaggtctaagatgactgacagccaggcatatggaaaaaagaagagaggtgcagtgaattagctgctgaatttacgattagaccaaaattgcaactcagattatagtacttactccctgatgagacaggcaagttaatgaactttttggagtgtcaatttcttcctctatacatgatgttttcctcacaagttcattttgcaattaatttgaaataatggacttataagcatctagcacatagtaggcattcaataaaaatcagttgactggaaaatcttcagtggtctctctgcgtcccagtccctaatcataaaggcttcccttgagtgtctaccatttgctgaaccctctccacagctatctcatgttcaaggagaaactcacaatttaatgctttgtcatcagttgagctcattgcattgtctaaaggtggtttaactctcagaatacagcattgctggatgatgggaatttagggcatgctgcttggaaccagaccaggattcaaatcttctgaaatttaaagcttttttttattattattactctggaaacctatccactgcatgcctttatttccaaccgttaagcacttttcccccttactttccacatttaagtcaaggcttcatatgcaaaaggcaagcttgaaacgatcataacatttaagcaatgaatataacgacagcttacacttgcatcgcaggaagatctacattctatatttaatagctttagtcatttacagcaagagttatcacaggcgccccaaagagggagggctggagagggagaattctgcacctttgattaaagatgtcgtagtcataagctgttttggaaatgattaagtgataaatacagtaagttcatcctcagttctgggaaccccacagcacagacagtaattttcagaggcagaagccatcattattatttaaaggt

SEQ ID NO: 58003 - DNA, 1215 bp, Bovine  19866881555165
  misc_feature (1)..(1): n is a, c, g, or t
ngtctttctaactccgagtctatacgctttctcttgcttgccctgcaagaatatttatgtctgtctagattatatctatgactttacttacattagcctgcagttacacaaacatatgtctatatgtaaagcagaagatagagtttctataatatttaacattcttccaggtaggtgtgtttctaaatccattttatggatgagagttgaggcacagagtggagaagggacttaataaaatataattaagccagcacagatttctggggatctcccagttgtggggaattaagaccaggcttaatgatcaggctggctattttttgactgaatgctggagagatcagtaatactaaagttgataagatttcattgattatttttttgattaatactgaaatggatattgacactaaacttaacttgtgtagtgccttgctgttctaaccaccatcatggtatttttacctccatgaatggttgaacaaatagactccagcaggtaaaggaattttcttagggacacagggtgaaggattgtattcaagactatgatactgatctctctctccccttgactttttgtctactttggtgaagatttttcatcaaacaatggagcaagtgcttcctcctaaatagagcagaatgttttaactcagtgtgagttcctgggcccggaggccctgatttcaagtaaacctgtgaccaactcatcagcttcagaaacttatctggtatccagagggaatttttaaccaggaggctctacttattctcttctgtattaatatgtgactgaaaacatgagctgttgttttcggttgctgaacttgggaacaaaaacaaagacacagaataacccggtcctaggttctgacacctccaccacctgttaggaggacttcccactccaagttcaaaaggtagaaggctgctggaaaagtgtttgtttgggggcctgagttctaagattgcacttgcgtcactgactgtgtgagtaggcttaccctacgggcccactgtttttcatggcacaggaactcaacacatgatgcttcacatccatataatatccccaagtgctaatgtttactttggggctcgcacatccgcagctgttggtgggaaaatgaacatctccagttattgctcagtggcggcagcctcacatctgaactgctggctgcttccttatcatctctccacgggcct

SEQ ID NO: 58004 - DNA, 931 bp, Bovine  19866881556971
  misc_feature (1)..(1): n is a, c, g, or t
ngagaacagagtatttgaatagcatatagttatatctatatagcatgaataaataaaagtactttgcttaagtaggtatatttatgaaaaataaactatgactcagaattcagggaactgattctcctttcctttagtctccaactccctttccagagcagagcaactaagcctcactggattattgttattttggagttcctaccagctctgagatcctgaaagccatgactcactcccttcaaatgcactttctaacatgcacatacatgcaatctttcatgttatttcagggtttagagccctcctgtagctcactcacagatcacctctagacaatgagtccttagacagtgatgcttgaccttctaaaaacttgttttcatttctggttgatcttcagtttaggagttcctaacactgaattctcccctttctccttccctaaccatccaatgctttcgtttaagcacctatttataaaaacaaacattttcatgttccaaggaagcttactatttaaaggaaccccggactggatgcttttgtaaagtgaacaatatcacatattttataaatctggacattcttaatgccagctcttcttaatgcacaagaacatggcatctgcttgcttgcttctatttaattgaacttagaagacaaagtagataaatggtaggtaagatgttctaagattttaactccttccagttctcagctatgtgaagctattagtaaagtagataaagatcttcagaatttccttctggacaagcatctatttttggcaagctccctagaatctctgtcacaacagcatatgatgtatcctgggggatatgcagtctcaactttatcaatagacctaaatctctttaaaaatggcattcaagtgtcttacagcaatagctgaactgggccaggtaga

SEQ ID NO: 58005 - DNA, 1601 bp, Bovine  19866881613808
  misc_feature (1)..(1): n is a, c, g, or t
ntacccaggattccctccatctgtgtcatgatctctgggtctgatgagttgagaaggaatcacaggatcttgacatttcaatcagggctcaaattcccaccagcagccagacacctgcagctcccaccatagccaggctcggcaatctttcttcaagatggtttgcttatcacttccgccagtcacttgccctgcactgttacagatccaaaccagggcaaggtcatggtgtttccataacaccctgtgcttttctcactcaaagctcttgctacactagatgtgatgtgtctgttttctgtctgccttcttccacagaccctgagctctctgggggcaagaatcatgttttcatttctgtatcttcaatactacccaaagtggggtatgagaagaggtactcaagactcttaagtaaatatttgaaaactaagatctggcccttgccaacttctcttatttcttaccatcatccagtagttggatacacatagaagtcacttttcctggtatgacaacagcagttaacttaagaaaaaaatcattttaacataaatgctccaaataatatggcaccccacctatatcctccttttttctaccctgtctagatcttggccacattcatgtgctgtcaagtctaggataatctctactcctcctccccatacttaccagttatgtcggcgtgcatttgcacaaaaaggggattcttgctgaggccaccacacaggaaaagggtgctgatcgagtgccctgctgactccatggcctctataatgaggcgcgtcccgaacttaaaaggaaaaatagaagaaagcatcagcatggtagcaaagggaaatgatatagaacatttgctaagtgtttacccagcagtagaacctgcacttggagcctgacatatatatactctcttagaaagtcaggactcaaggagattacattgctcgtgataatgccattatattaagttgcagagtgggaattccaacctgggtctgcctgattccaaaaccttctgaattattataccatttgcttctatcagtagtcatacgttgacaaaacaagttgacagtgttaacacagttcattcaactacacagatttgatgagtatccactatggtccagatcctctacgataaactttttggcaccaggggctagttttgtggaagacaattcttccacagactggcgtggggttggtggtttctggatgactctcataaggaacgtgcaacctagatcccttacatgtgcagttcacagcaggattcgtgatcctataagaatctaatgctgtggctgatctgacaggaaggagagctcagttggtaacatgagtgatggggagcaactgtaaatacagatgaagcttcgctagctcacctgccactcacctcctgctgtgcaacctggcaggctggggacctctgctctataagttatggggaatggagtgactggcagctctgctccaaaaaactctgtttcaaaagatcgctgctggagatctctaagtcagttttccttccttaaagaggaactaaagaagttagttccttggaaatggcgccaacaaacttagcagca

SEQ ID NO: 58006 - DNA, 1789 bp, Bovine  19866881619369
  misc_feature (1)..(1): n is a, c, g, or t
naccaaaagagcaaggtccagatgagacatttaccccaaacccccgctcctcgttgatggtaacaagatgacggtgactaattgcacgttctggggtcaagttcagaccactcctccagagccctctccccagagaaaggtgagtacctgaggtttgccaaggccatttttatatgcatgtgaatcccctctactctagcatttcacgaagaggaggggagagtaatcaacaaaatgaataaagtgcttgtgaaatgcatcttctactttctggaagcccctgctgctgaatgaactactagactcccatcaactctccactagttaagtccaaatcacacaaaatgggacaaacggaaagagcacagggaaaacgaaactccccgtcccagcttctcattagttaaataaaaagaaaaatggagaagatttaaaagagaggaatttaagatacacctaaatatatacactgaagcaggtttatccgtcctttgggagatgatcttctttcttatatgcaattatgagtcattttcaagataagaagacccctgcccttgtgcatcccctgaaatttgaggtcaagatgacaacaggtttgcatgcactgagagttcatgtcctatctgtccaaatatatgcacatctgtgcacacatccactctgtttactgcagcagctacaatcacacttgagtatttttttaaattgtcaggtgtgtgccagatagcacatgacttatgtataacattcaaaatttattaagaaatactattgatatcaacatacatacctttatcctctgggatgattcaggtacattgatacaaaaagcaaaatagcttcattaacacaccaatctagttaaagttaaaatcagcttccttaaaaaaacgtatctcttgccttaattttaggggcctaaatgtttcttttcttcatcatgtaaaaaagtggctttggaaaaatagtcacatttcacaatggactattcacatctcctttaaatgtgtccaattttaatgaatggtcttcaccttggatacacacattccaggcctcataaaaacaatggtgtttgggcatgtgcagtggaggtggaagatggattcaagatgtttcaagtatgcaaaatcacatgcagatgtacaaatagtacatcgagtcaaagcgcgttaagaaagcaatatatatacagacacccaggaatggatgaacgcaaataaaatccaacttgtaattaacataccgtgctgtgacacctgttgccttccacgataagaagtctgggagatcaaagaaatgtcccgccttatcccagcaagtctctctcaagttctgccaaattaaatatatattagaatcaattacaggctattttttctcctcctctcctctctcaataatgtttcaaaattttcaaaacaaaagtacagccaacaatgcccaagaaaacatctgtgcaggggctgggaagtggtggtggggaggggagtataaaagcagtacacaggaaagaaaaattggcaattattgatccttccaaaaatgactataatttcccttttattcttctttgccaacctggtgtgggaagaagtacactttgcaaggggatgcaatccatcttgcaaggggatatatttcaagacatataaaaagacttcaaagctgaacagctgggaactggggagaaaaatcacactaggaaactacctgatgaaatgtgatgtgtcctgccatgaaaacgtctccccacgctaacaggttccaaaaacaacaggaatga

SEQ ID NO: 58007 - DNA, 726 bp, Bovine  19866881859403
  misc_feature (1)..(1): n is a, c, g, or t
ncccccgcccctcttttgcttccttctcctattttagattctaaccaccttgagggcagagctcttttggtttagcagagcactcggaaggtcaggtgaggaggtggggaggcttgggtgaggatcctggctttaccaatcacagggcttgtgacctgggcaagtgattcaatttccctgctgcaatatcctcatttttaaaaaggctacaatcatgctattgaatatttttctcccaaagtggttgtgagactcacacaaggtgatacatataaaaggactttaggattctgtctaccacatgggaaatgtttaataaatgtagatgtcatggttcttgtgactctgtattgctggtgtataggtactgcctggaacacagtggttactcagttcattctggctgattataaagctgaggagagagcctcaatgttagggcatgtggagatatatgctttggggtttatgagaacaaaccagagaaactgtgaaaatctgttaaaatattcacagtaatggagttcagttttccagcacaaaaaagtgtctccccacggctgtgtctccatggtatgtctccagagtgaaatgttttaaaagcgctgaaaggtgttcccctcagagttattttaaggaccaaatgtcttgcttcaaaaggaaaaattatgattttgtcagtgaaacgcttgactgttaagcatgaccaatgattttaaaacccag

SEQ ID NO: 58008 - DNA, 1418 bp, Bovine  19866880488702
  misc_feature (1)..(1): n is a, c, g, or t
ngcatgggccggagactgttccctccctgtgcccacggcccagctggcagagtctgcagtggatgggaggccctgagcagcggggaggctgggcctgagcccaggggctgggaggtggaggctgagtcctgcctgagtgtccctttaatagctgctggcttggccctgcttggcgcctgcttcagctccctgttcagctgtggctgcagctgctgtgctgactcacgcagcctggccgccagcaggagctgggaacatgggctccccaggcaccggggtgggctgggggcttctggattacaaaacggagaagtatgtgatgacccggaactggcgggtgggcgccctgcagaggctgctgcagctgggggtcgtggtctacgtggtggggtaagagaagagctcccgggtgtgctggccggaggggttatggctgggctgaggggcgagaggctgagtcttcagggtctgggctggtggtcggcgtgcagggcaggaggtggggagaaggaaggctctccgtccgtctagaggctgggggagtgtcagagcaggtcctgtgctcaggtgcctctctgcatccttccctgggccttcttcccagccccgtgctggactccggcacccagcagaatgggcccctgccccacaccgggggcccttggccaggcaggaggtggtccctgaccacctgagagctgagagctggagcactaaggaccccggtagagaccaccctttcaagctgggtcgggggcgtctttgaggaggaagcggatctagacagggcaggggaggctgttggctggtgaaggaggtgatggcgggcgtccccaagctcacaggtgcctggcaagggccctggccctctgacccatggccggagctccggcctgggcaaggggtttggtgtgggagaccaggtggagagaaggcggggtccctgagccccgggctgggagccaggagggtgcgggggagaggtggccccgggggcacaccgcgctgcctgtccgtcccctctaggtgggccctcctcaccaaaaaaggctaccaggagcaggacctggacccccaaggtctctgtcatcaccaagctcaagggggtctccgtgacccggatcgaggagctggggaaccggctgtgggacgtggccgacttcgtgaagccgccacaggtgggtgacctgccactgctgccgggcgctggcccctctgacacaccccctactgtgagtgtgtgcaggggcgacggggtgccagctctggcccaaggccatgcttggggcggggcctcgcagagcagtggccttccagtggaggaggagatggtcaggaagccaggccggagggacgcgttcagcaagcctgcatccggagcgggtagagaagacgcggtgggcacggcggaatgccgc

SEQ ID NO: 58009 - DNA, 1300 bp, Bovine  19866880533551
  misc_feature (1)..(1): n is a, c, g, or t
ntcctgtgaggtggagacgagggtggtggtgggcagccacggggaagcagaggcgcgcgtttctgtgaggctgggaggcccgggagccgcggaggggcccggccggcccgcaccgccctcctgcccggcggggcactacctgccggcagtcgtcccccactttgaagatggccgcctgccaggagatcttctggccgtcggcctcctgcatgctgccctcctcctcggggtctgagcggcaccgcaggcctgtggggagaggccctgtgggggtctgggggcgccctggtcacgtgcctgaaggaaccccaagaaccttagggatcacgcctgcaaagcccaaggggggctaatgggggcctggcagacacccgggtcagcgggtggggccacagggccgtgtttcttcctgagaacagctgaagacagagcgctctctcgccggagcgaggactgggggccctgtcagggctgggccccgtgaggggtgcccagcaggagccggggccacaccctggctggtgtcctctcaagcccacaccacggggactgcagagtgtgactacgacacttggtggagtcagcgtggccctgaccagcggtcgtgccttcccagagacggaagagcggggactcgggccgaggcagaggccgcactgacagtccacggccgaggaccaaccaggccccgtgctgggaggaggcgcaggaccctgccaggagggagcggagcctcccgacactccaggctcagcaccaggagacggtcgactcctgccatggaagccggcctgcctgtgggtgctcacactgaggccaagcagacccgccctcccgggcccgttactgcatgtgtgcccactgaccccggccgaggggccacactgatccaccagtgttcacaaggaccccagaatacaggggacaaggcactgaccttccttctcaagctcactaaccccgcaacgtttcaccttgaacttcgccagatacggggccttggcggcactagaagacgagagagggggcgcaggtgatgggggaggggacgcgggtgacgggggagggggcgtgagggacgggggagggggcctgcgaggggcagctgggggtcgcacctctgcatgggcgtcccagacttgtagtcgatgtccagcacgatggcctcggggttgctgggcaggtagcagcctgcaagggacggagggacgtcacgggcgtgggagggacatcacaggcgtgggcgggacgcaggaggacatgccgccatccagcacgcaggccggccccgggcagacag

SEQ ID NO: 58010 - DNA, 840 bp, Bovine  19866880567312
  misc_feature (1)..(1): n is a, c, g, or t
nccttcacagcatctactggtaccagcagaggcccggccaccgcccgagattcctgctgagatatttctccccctccgacaagaggcagggccacaaggtcccccctcgcttctccggctccaaagacctggccaagaacaccgggtatttgagcatcgctgagctgcaagccgaggacgaggctgtctatttctgtgctgtggggaccccggtcatggggcggaggcggaagatacagagagagagggcagaaagggagctggccaccctgggctccccgggcccccgggccacactccccttgcattaaaggccggaggccgcatccctctggggtggggtgggggtgtggacaaggaggctgggcggtgggctgcccagggccagaagacactcctgtgaacccccttggaggctggatttggggattaaaactgcttgcatcttgggaagttgttctgccgagtggtctgaattggttcggaggaggcccaggatgctttgtgaacagtcagaatgagtggaacgcacctgagaaccagccagggtgaaggtcccaggagactggctggccatggtctgcttggccggagcccctgggctgtgggtcttccgggacggggggctgacatggccccttggaggtgcccctgccaaggacagaacctgctgttgtacctgactgtgggcatggagtaagcagtttagaaaacacctttgctggccctctggggagaagagcgatgcccagggatgggtgtggactcggtcccccgctgggccagacggttctgtgccatgggggacggcctgtgcactccagggggtccagcggcatc

SEQ ID NO: 58011 - DNA, 809 bp, Bovine  19866880587904
  misc_feature (1)..(1): n is a, c, g, or t
ncgctcctggtaaatgtacccgggacagcaacgctcgcctctcgctgccccacgggcctccactggacagctccgtgcatggaggcgaagccacggctctcggggccgacactcaggtgtggttctggtctgacgggggagtccagcacccgctccggcccgagggtgcaagcccttcctggcgcttgactgggacacaggccaccctctaggaagaaccaaagaacccaacttgtgacttctgggctgtgtcatcagagtctgacagaacaccgcagacctgtgatctgaggagcatgtcagaactgatgctctgccgtgtggaggaaaaaacccctccacaacgctgtctacatggccttacacaaacccaggtgttcgggcagcgcccagcagggagcgggcccgctgggcttcctggtctaagcacagcctgacctgactgttggttcggaccccacgatccagaggaaatcgacactgaatcttaatgtgagcaggagatagaggacgcccgtttattttcaggaatgacaagcgcatttccgtttgtgttagcaggcagtctttatataacccactctccactgctatcaaaatccaaacaagaaagaaaggacagctgagaaatgaaaagctgagaactgaggaacttttcctaagtgatctgctggagagcattttccgtggaacacaactcagaggtaacaacagagtctcgtttcaaccacaggtgcgtggcacgtggactcatctccgcacagaagctgtaacagtcatgcgaggggacagtgacggctggacaggca

SEQ ID NO: 58012 - DNA, 1225 bp, Bovine  19866880590727
  misc_feature (1)..(1): n is a, c, g, or t
nacagtccttcactggcatcctccttgggccctgggatgctctgtgccttggggtccctgcccgggaggggtccccgtcacagcgtctctggggcctgtggccccagggcagaccgctcactctgaggctcactcacatcgggtgcccaccctctactggtcaccactgcccaagcccagggctctcccctgcaacctctgtggtcttctactcccggtccacactctgctcctccactgtcctgggctcggaggctggggctcctgtcctcagctgtcctggggcctggcttcctccatcgcacgtgtggtcctgtggggtcgcttctttgtgtcccaggcaaacatcttcttgagggtcctggacatctcgtacaatggctgtggggattctggagcctccgcggtgggggaggcgctcaagaccaacaacgtgctggaggagctctacatgaggtgagagcagggggcccccgtccccgtccccaggccccccgccacccagggactggggctcctcctgctgctgttcaccctcagggctggaacctgtcacagtcccagggcatgccgctctgtccccctcactcaagttcatccttgctacgtgaaagtgttagtccctcaatcgtgtccgatgctttgtgaccctctggactgtagtctgccaggctcctctgtccatgggattctccaggccagaatactggagtgggttgccatgccctcctccaggggatcttcccaacccagggactgaacctgggtctcctgcattgcaggcagatcctttaccgtctgagccactagggaagcccatccttcgtacctggggactcgtaattcctaccgcgtggctggggggtgggaggtgtagcatgtaaccctcttcagcagagctggtgcgggcgtggtgctccacgtgcgtgctcctccctttcaggagggtttgtgctctgtccagcacgtggctgctgggggcctgccgtggctgggctgctcctccaagcccaggcagggtcccaggcttcctgggaacaccagagggaagggaggaggtgggggtcagacaggtcatgggctgtccgccgttggcacaggcatctgctccatcctacccgttttcccctcccggtgggggaagctggggtctgagaagatagagggaagtggggctggcctggagacaaagtagccaagagcagtgaggggccctgagcaggag

SEQ ID NO: 58013 - DNA, 996 bp, Bovine  19866880643503
  misc_feature (1)..(1): n is a, c, g, or t
ncgcccggccccccagacgtcagccggctgcggcgatgcaggaagcggtacgtgctgtcccactgcgtatagccccgagggcccagccttcagggtgctggccagcagccttcctgggcggggctgggagcctgtggagtggcttcagggatgggggttaggggagctgtgaagtgggtcagggcaccctgcgcctggcccggcgtgtcagtctgtctgtctcttcccagctgctctgagggccgagggcccaccactccgttttccccgcctccacctgccgacctcacctgctttcctgtggaagaggcctcggcacctgctgctttgtctgcctccccagccgggaggctggagcctggcctcagcagccccttctccgacctcctggggcccctgggcgcccaggcagatgaagcgggctgcagcgcccagccctccccggagcaccagccgtcccccttggagccgaggcctgtctcgccctcggcctacatgctgcgcctcccaccgcccgccggcgcctacatccagaacgagcacagctaccaggtgggcagcgccctgctctggaagcggcgggccgaggccgccctcgacgccctggacaaggcccagcgccagctgcaggcctgcaagcggcgggagcagcggctgcggctgcggctgaccaagctgcagcaggagcgggcgcgggagaagcgggcccaggccgacgcccggcagaccctgaaggagcatgtgcaggactttgccatgcagctgagcagcagcatggcctgaggggcccgtccagcagcacttggcctgcggatccacctggagagggagctgcccctagctgtgtccgccacaataaaggggatcccagaaagccctgctctctggctcagctgagggctggggccccgccccctgggtaccatgtccatctcccctgactggctgtagcccccagagggctcggccctgcagtcacggtgattcccaagcccc

SEQ ID NO: 58014 - DNA, 1576 bp, Bovine  19866880646423
  misc_feature (1)..(1): n is a, c, g, or t
ntaaccacagatttttgccaccaacaaaaggctgtgatccaggagctccagttgggaaactgcactctagaagattccactggtggtgccccttcgggtaaatggaatattaatttgtctccaagatcaagttcatgacgctgtacatctcttagtgtgatttgaatgacaagagtcctaatggcagtggagggggtctgagtctccctgtggagccaagcctcattgccaacagcatgggcagagaggggtccccttagagagatggacacaccgaggagagctgggaggagacacgtggccacggaccaccggacaggagacgggcccagagcctccctccccatggggaccctgacctgtcccagcccctccctgcctctcctgccactaagcgctgagccctctgagcacaagggcagattttggtagcacttcccccatgggctacatcactgtggcattgtaactaccagttcccagaccacagtaatagtcggcttctacctcggactgggcctccgagatggtgagggtggatttgtttccagagatggagccagagaagtgagcagggaccccagaatatcggctgcttgtgctgtagataagcagtcggggagcctggcctggggtctgctggtaccagctgggcagttactggtagtgactgacccagagctcagtccacaggtgagggtgaccgtccctcctggacacactgacagcgctggctcctggaccacagtctgagcatccacccctaaaaggaacaagagagagacaggggttgttatggagacaagggccctcagaccctgcttggaggtgccccaaggatacagagtcccggcccctgacctgagccgtaagtgaggagcccgagcagaggcaccgttcaggccatggtggggaccctcccaggatgcagcctcctcagcctcctgggctgcaggtggagtcctgggccttttcatgcctccagcccgtcaggagatgcaggggcctcatgcagatcacttcctcctctccctgcccacatcacctgatgtccccttgggtgggcgttcttgaaggaggcagatgctggacctcacgcagagtggggacagttcggggaggagcccctgagtgatggggtgacgtctgccagcaaatgtgctcctgtgaccttggtgaccttggtcctctgtctcctccccgagtgtctgaggctgaaggaggagtttgcaagtcttcctctgctgctgctaagtcacttcagtcttgtccgtctctgtgcgatcccacagatggcagcccacaaggctcctccatccctgggactctccaggcaagaacgatggagtgggttgccatttccttctccattgtatacacgcatgcatgctaagtcacttcagtcgtgcccgactctgtgtgaccccatggacaagctcctctgtccacaggattctctaggcaggaatactggggtgggttgccatttccttctcctaagtcttcctctcttgccccaataatccagcccttcccacacctgagcctgtctttagaatacactctgtcttctcag

SEQ ID NO: 58015 - DNA, 1778 bp, Bovine  19866880697174
  misc_feature (1)..(1): n is a, c, g, or t
ntacgtctgggggccctggctcccctgcggggactggctactcttggccgtgctctcgggggccgctgcctccaagctgcgtcttcctgcgctcctcggcgatctgtgggggccgggcggaggcgggctcgagtgctggcccaggcggggctccggggacagaaccgggccggccgcgggcacagccggtccccccaggcctctcctcacctgagcatcggcctcttcgtaggggtccacgaacacgatggtagaatcaatccggatctcctcctggcggggaggtgggcatgagcaggccccccacctgccgccgcccacccagctccaagcccaaggggagggccctctgctctgaggcacataccttagggcggtcagttttggggtcactctccacgttctccatggccgtcagtgtgtcaaagcccccaacaaccctgcagcagggcaacggggcacctgagaacgtgcccggcacgagcacccctgaacgcgaggcacccctgcagactggggcacagactgtgagcaggtgggccggctgccagcacagactgacaggacccaaccacacacacgtctgcagaggactcggcgctaagggtgaacaccgagtcctggacaaaaggtggagagacaggacatggcccagctttgagctttgggactgcaaagggagagcctgcggggggcaggtcttgggtctaagggtcacccctgcaacctgcgcacagaccggacaagggggcacaggcctggcctgggggaggcggccacccacccccaacacagaccctgtccagagccttaccgcccgaagatggtgtgcttcttgtccaggtaagcgcaggagcggaaggtgatgaagctggggaaggacggggtggtcagggagagcccatgcctccctacccgcctgcctcagtgcccccaggccaagctcccacatgggccagtgcactgtccacagtctcagctgggacagacacacggacacggcagagaggctgacccctcagggttgcacccacagcctacaggaggaaaacacacgaccccagggacagatgtcccaggaacacacaaactccgaaacctcgcctggaaaagcaggcccgggagccgaatcaggtgacaacgctgctcaccggccccgcacagcccatccggagggacccgagtccacccacccctcaagctgagaacacaagtgtccacaaagccttgactctctcagataaggacccggatagacgccactcagcaactgcgccccccgtgacctagatggacccggtagtttcctctacgtgagcgaccaccaccccagaatgaggaaagagaagctccatttccaagctgtcccaaaccacaaaaaccctccaggagcagctgtccgcaggaaggcagggcacccgtgggcaggaactgtgaagtcacattaaaaagatacaagacgtccttggaaagccgaggcacgtccccacctggaggctctcacgctgcctgatcctctaaaacacgccacacggctccgactggaatcacgtccacgtcggaggataagcaactcagcaaagcagacaggaaacagcacggggaccgccctcggggaacgctgtaggccccacagacgctggcgtcgagggtggcccgaaggccctcctcgtggtcggcgggaggtccctcttctgtgggccgctccccaggggccccgctgaggtaggtccagggaaaaccactggacaagtcccccgggttggtcgccacccttc

SEQ ID NO: 58016 - DNA, 1763 bp, Bovine  19866880707643
  misc_feature (1)..(1): n is a, c, g, or t
ntcggttctgcagcgagtgaatctgttttacggagtgttcatcctgtacctcctgtctccccgtccaccgctcccagtctcccattggctgcttctggaagtcacaccctgtattctggtttgcttcttatttgaacggactcctctctacccacctccccagacacagcctgaaagcctctgcctcaggtcatctcagcttttacgtgtattttgtctggtgttccggctccaccgtccaacttatacacgtggagggctcctccagctctcgttgcttcctcaccgctgcacagaaccagcctgcggtggtgagcggggcgtgctgcctgctgccaggcgggtgcgtgccgctgtcctctgcccactggctttcttgcctgcccgttacttgtgcagagaagggtgttgcgagtctccagctctgttagtctatttctcccctgaattctgtcaagttttccttcagaagcacacgtgcgcgtgctgatggggaatctctcctcccctcctttcgcatcaggtctgtgactatttaagagcatctcttgtcgacgtaatcgggcctcacgtttcatccacgtgtagaactcctgcctcccagtgggcgggctcagcccgtggacacgtgcctggtccgtgtggctgctccgcccgtgatggcctcccttcctggttagccccacgcctggcagagcccctgcctccccacccgctgcctctgtcttcctgtagctgagcgcatcctgtgccagctctggggtcccagcccgctccccgtttctttatgcctctccaggtgcatgtcctctcctccacgcgccttcccttcacctctgtctcacatgctatgtaccagcctttcgggcgactcatttctaggtgttttatcgtttctttagtttcaggtctttggagggtcgtgggggtgggatgggagccgtgggggcagggggtcagtgtgggaggacagtgtggttgcagagcagagcgacccgaagatgctggagacggacacggcggaggcaaggccaggaagggacggccgctggccccacgccggcagggagagcccatgtgctttggctccgcgggcgccgtgctgccgtctctgtgcactcacagtcgggatgccgggggcggccctgagccccttgctgcccacccccagctaaacgtgcacttaggacccagagtaaaccaggttccagcacagcggtgcttttgtttttattttgctcacgttggttaaataccactgttctgatttttgtgcctaagaacgtgctccctgtacctctgagacaggacgggtggggggaaatgtgtccagtgcagaagagcccgtgcccacacagagaccggctctgattgtccttctggccacacgggcggcacccgggaccgtgcgtctccggcttggcaggggcacctccagcccatttgtcctcggatgaagcggcggcctgctcgcctgcggagcttgattgcggccgccccgccctcagtaggggatgtcgttctgatagtactggatcatgtcgtaggtccggctcctgtgggcacagggcaaggggtgctgtgaggggccgacccctctgagctgccctggaggctcagggcccaaccgcggacctctgccccaccagcacctcgcccgctgggacccgtgctccctccctggcagactatgggactcttccccatctcctcgactcgtgggtgcctaacgtgggcttgggtagacgcctttcctcagctgg

SEQ ID NO: 58017 - DNA, 1465 bp, Bovine  19866880735669
  misc_feature (1)..(1): n is a, c, g, or t
ncagcgagtccccgtgggaggaggcctgccccaggcctctctgcagagagaaggggaaccctcagagatgtccgcgggcggccaagcaaggcctggtgctgggctcccggctggggtcagccccgcacccccccaccgggtccgcagcccctgacctcacccctcggttctccagctgcagcagccgtttgaggctcttctccagcaggagttggtccgtcacgggtggcagtcggcccaggccctgggagcccaggtcgctgtcccggctgtggcagcccggccagtcggcggctgtgcagctgctgcgggagtcggacatggagctagagcgggaggggtaattgttggggcgccccacgcagaggccgggccgggcgcggtgccggcggagggtgctgaggctgggccgggcccgcgcccggcgcccgcccctcggcacctccacggggtcctgcacctccaccagcggcactcccgcctcggtcttcacggtggccatgcgctccgttgcctcctccaccaccgtctgcaggctttccagcacctgaccctcgacaaggaaatccaggaagctcctaaagggtcgagggccctgacggtttctgcagcggcctgaactgccagaggggtcatgcgaggaaggcgggtgtggcctgtggcccggcttggaggcgtggcccatttccgagaacagagacttcttaggtggctgcacctgagcagacaggcatgtcagggtgggcaaggatgccccatggcgggggaaggtgttcccgggggtcctcctagggcaccaggagctgggtggggactgggcagtaaaatgaacggggttttggagccaggcagctcaggctctggaccctggctctgccagcttcaggcacgatgccctctcttgaggtccctctcttgcagaatgggggtccgttcagggtggccctgaagcttccctgacgtgtacgcttcacatacacaagatgtggctgggcagtctgaaagcccgcttgtgccctcacccagggcatgactgggcaaccacaaaacctctcggcactgccccactgccggtctcctcagaccacctgcggtcctgagccctgtgcgccccatagcggctgctgcatctccagccagaggccctcaggagactctgttctcactctggggtcctcccaggcccctgggggtcgggggggggtgggcacagggaaagagactgacagaggtgaccaggacccagcagggcggcggcggagtgctgaagacaacaggtcactatgcggcccagagaggacatccgtgggggatgagaaacgggggcggggggagcgggggggctgtgggctactggggaacacggtgggttccccacttacccgggccacgtaggtagggtggccggcctcatcgtccgccaggtagcccgaatggtggcggcagctggccatggtgccgatgg

SEQ ID NO: 58018 - DNA, 717 bp, Bovine  19866880816583
  misc_feature (1)..(1): n is a, c, g, or t
ntgccccacccccgcctcccacgccctcccaggcccagcacccactggccattctccaggtccttgacgtggcagacagcggcctccacgcagtcctgggcgccggggtaggggtgggcggtgggaaggcgctcgtccgcgtggaagtggcgggcggcgccgttgccctggtaggcccgggggctgcccctgctgccggtggacagctcctccttgccccggtccttctcgggcagcaccacctcgatcttgagctccactgtgggcaggcggggtgcgtgtgagcctccagcccagcccacccctcacctacccctccagtgctgggcagagcggaggtactgggggggccctgggcaagctcaacgtgatgtctcatgcatttttttcctcactaacaaaatgagccaggggcaccagcagcgcacattcgccccagatgcggccccttctccaggaacccacgtgcgggtgagaatttggggctggaaccctgctgaccccaagggcgcggccaccatggaggatgggggcggcctgaggacacagcccgggtcacggtccctgagtgaatctgggtaacggaggtctgcagaggtttgaaactttttcaaaattaaaagaaaaaagtgtatatgctatgtaatttcaactggagatagctgctctggccagctggagaacccctcattatttgccaggtgctgagtgcagggg

SEQ ID NO: 58019 - DNA, 2280 bp, Bovine  19866880831954
  misc_feature (1)..(1): n is a, c, g, or t
nttccgtgctaggtggaccacggccccacccccggccttttctgagccgctacgtgccttctttctgtggaagcgtacacacacctcaacctgttgttctgcgccaagaacgttctttccgcctccggggatggctctcaggtgcggccctgagcaggcggcccctctgctccccggaggtggacacgccggccgagccccgcccccggcagcagctggcccgttcccggtgttgagctttgcgaccctgcttcggcctctggtctgacataggccagcttgggcccctcccgccgcctcccccttgtatcttaggggccaggtgtcttctccgtggggggagccttggccaggcccaggggcagccccgtcttagcagggctgtaaccacctagcactgggcactgagtgatcttgattaccaatctgtttgagtctttttgagttgaaatcagcttactttggaacaacttttatgtttacacaagagttgcaaaggtagtccagcccgtcccagcctgcgctctacccagcgtgcccactgccgcccagcgtgggcctgtgtgcttgccaaaattaaaaactggtaaaagtacatgcctttataaagctctttatgtccagagcctttgatccctccctgccttgtcagggcccgccaggatcctggggcggggggcgaggtggatgcccacgaggacttgctgcgcgggagtctcttcctccctgaaaaactgatgagggaaggtagtttcaaatatgaagaagcagtggaagttctcctcctcatctctgacactttatccagagtcgtttggttttaactttttagaaaggggttagattggctgatcagcaaaacctgcaggagtggggagagtgtggagagaggggaggacggagcaagcgctggacgccgggtccctggaggctgaggctccagggaggacagtggggagggtttggtccagttgggcgctgggtgacacccctgcggtgactgcaacactgggcctgtcgctggccatggagtcaggccgtgtccacacccaggcggcctcaggaccagggatccccgtgggcgctgttaggcatggacacagcccttggccaccgcgcagcctacctgacgcccggagctattctcggggcgcctgggcccattttacaggtcgggtagcaatttggcttgaggccccccagcttcccctcatgtggctttgttcagtcttggtccgtctgagtccccccacccccaaccctcagctgcacagcctctgctgagcaccagccccgttctggctcctctctgcgtctctggttttcccatcccttcctcgacaaaaggggtgcttggtgtttcaatgagcacgaggctcctaaaatggccaagcgtcccagcgtctttcctcctctccctcttggagctgaagagaggcatccctgcctgtgtcttcccttctgagcagcaagtgggcgacttctgctaggaggcacccaaggactcttagttactagggggagaaattaaaacattgtatcagaggctcttagaaaagaaaggctgggtgccagcgcactgctcagcaggcaggtgggcagggcggggccggcagcactcacaaacccacgatgggccagaggggccggagcccacaccctcccgggagtcagccgctcgcttggggttctggttctcaggtttgtcttccgaatggtgaagcaccatatggacatgggcctgattcacgttctcaaaataaatatccatgcttattttaggaggaaaacttctggaatccagaatgttatttttgctctaaaaacttaccccacactagcatcttaggaggatggtggctgctccccaaacccagggacacagcagccacagcagtgaggccggtggtgtgtttgctcttcaagtgctaagatgggtcctgacctgtcagcaggtctcctcgaagagcgcgctgtactggtggctggagaagtgggcctcggggatgcccagcccaaaatcccagttaaatcacaacacgcttctctgtgaccaagatccaggctgggcccctgctccgctgggttccccaggggtcagcgaggagggagggcaggacagatggcagaacacgtgggctggaggcacgccggcctttgaagggtgaccgtgggcaccgaggatggacggggcctggcgctccaggggaaggggcctccggggggcggcagtatgcgggaggcgatctacaccgggagaaattcaaagaaacagaaaag

SEQ ID NO: 58020 - DNA, 1225 bp, Bovine  19866881042546
  misc_feature (1)..(1): n is a, c, g, or t
ngttgacactgagcattaagcatccctttttcatttgcttatttgccttaatattttgctcgaggctgcttttgtgtaaattatgcaaaacttgagctaaagaggtggcctaggattttaaaaataaaaggtatttgtttttttaagtgtctgcttaaaaaggacagggtgctaatacacatttttttcagggtgagatgtttctgactttagagatttgctgaccagatagtagtctcagctctgaacattagaagctgtcatattaaaggagtacgccctggatgcttctgtggactagaggtagagagcaaataaagccctcatgctgtaatgactaggagattaactgctgaactaaacggactttaaaagctgggagaaagggattataaatcagatactgtataacaaagacccagacaccacgaatctgattggcgaagcctccaggtccccgaagagcctggtagctagagtcagctttcagcacgacgtgattccagtgtaagaggccggaggggctctcagcacccgcagcatcgagacttcaaatgcatttgcctctcccagcgctcctctcaggcactggctgagcctcgccgcgccgggcacctcagtgcagctgtgagggagcgactcgagccccttcttggtggagagaaaggggtgcagccttggcttcccagtacccacagacgcgacccccagcttccccttcgtgctccttcccagatgcttgtcctcaccccctcccgctgcttccggggagcccgccctacacacccactcacacccctggacctttgctcgggccccacccgcccctcacctgggcagcgcctccctgctgttcgaggcctttccctgacactgcccccgcctcgggtcagctttgcttgtttctcctcccctgtgccctctgccctgggcgtcctgctgccgttgagtttttccttttccctggtgtctccgagggctgtcactgcgccggttgaattagatcctggcaggatttaccttgttacactgaatctgggttgcctctccctgagccagaaatccacggatttggggtgatgtatttattactcacctagtatagaagacaaggctgggccagctttggccaaatgcagaaatcaggccacgtgctttcacgccccaggcagggtggatgaagggttaggctctttaggcctcagagctagctcctaagccagag

SEQ ID NO: 58021 - DNA, 1449 bp, Bovine  19866881117747
  misc_feature (1)..(1): n is a, c, g, or t
nacagcgggcatggatggagccctcagctcttgagtcacttggtccgtgtggggtgcagtttcctccgcactcagtgtgagccgggtctcccccaggcacgactcggggcatgcggcacgcaggccgctgcaggagcaacgagcaggcagcatggcggcacgttcgggcccgcggcaggcaggccgctgcgggagcaacgagcaggcagcgtggctgctctaacggcagaagccagccctgctgacttgggcaggaagcccactgggaggcccctggccccagcctggtctgccaaggccatgcctgggcgtcagcaccactgcccccacggacacccagccacacgcacgcccctcatgctactcgagagcgccacgaggctgagctgtagcctcagggcaccgggaagcgataacgcctgccctcgccccagcctggccctgggcacttgggtgctgcagacccagagatggcaggtgtctgccttgacctcccgttggtccagcggctaagggaagaggagaccccggagcagcaggccgagaagttgtggtctggaggggaggggagactcggacgtgcctggtccccagaggccgagagagaccagggaccctccgtggagtcaggaggccaccctggggtcaacagtcagggagtgtctggggcatttctggggagggtctgaaagaggcaggactcaaattccagagtgaacacagaagtgtggagaacagccctcgagcggtctccgagcactgtggggcggcccagcctcggggaagctgcgtcaggcctggcctgcctgtgcccctccgcaggcagcatgtcctcgcgcaaagggctgaacgggacctgctcggtgcacgagtacagcggggccttcgaggggcagccggcccgcttcaagatgacgtccgtctgcggccacgtgatgacgctggacttcctgggtgagtgccgccgccacccacgcccattccaccgaggagccccgccccgcgccgccgcggccggaggaagcccggggtgggctcggggcagagaggtttgtccagaaccggtgagtctgaggccagcaggctgtggggggctgccctgcagtccccgccccagcagtggccctcgtggaggcggtggcccgcatctgagcgggagcctggcccgtgcgggtgttctggcacaggccgccgcctgccaggggtgcccattgtcttcggtcacttggaggttggcatcggaagtccagcgccggtgacccgtgggctggctccagggccgcggttgctgtgggtccgactgggactctgggcctcgctgcttgtctagtcctcactgtggaggggctgaggacagagccgtcgcctgccaggatcgtccaggcctcctgcaccccgagcctcaagtagagaagcggggggcagtgcacgggacaaggggcctgagga

SEQ ID NO: 58022 - DNA, 1248 bp, Bovine  19866881377397
  misc_feature (1)..(1): n is a, c, g, or t
nccccgcgctcccttgccctccgtgctcacaccctctcctcacagcggcttccaccctccatcaggaggtgctactgcccaggacgcaagagatcccggccgctatgcccaccttctcaaggggagcatggggaggggggcggcatctgggagaccctccagcaataggaggaaagagagacgggagagaaagcaaggcagcaggcgggtagcagcagcagctccaggtcacagcccggcgggcctagggtcccggagcccagacttgctcagagtctgcgggccacgcagcttcctcacaggggacgacagtgtccaccccacatggagggcccaggggaggcgcaggggcagggccaggagagggccccgagcaccagcggggtcacagcccgaggggctcctgcagagggaggcctgggagtggcacccgccctgggggtggcagacgtggggcaggcatcatggtggagcacagagctggcaggggtggggagaggggcgaaggggtatgacagggcactcagccgccaaggcagaagtcccggcacgggcccgggcccgacgctcagaacccacgctccgctccgggcagccctccgccagggtaaatcctgccccagcacttcctcacaagctgcccgctggcgatgggatgctcctgccccaggcagagcccctgtaccatcagcatccacgggatctccagagctggggccctggcccccatcgcggcagcccgcggggtgcaggccggccggctgcgcgggccccagcccctcacctcgaagcagatgttctcgccctccttgtcgcagtccagccacagcacgatgcagtcgcagcccctgccctccacctgtacagagacacggggtgtgcactgcccggcccactcgtcgctgcctggcacagagtgtgcagccccaagccccccagactgccctcaagaggcctggagcccagggcagtagtcaccaagtggagtcactggccggcttggcctctcagcaaagagtgtagttcagaactgctagtttttagaccaaaaaacacaataaacgccatgagatcttaatccccaaaactgaatcaaaaaaaaaaaaaatactgaactggaatgactaaacattaaggccgttgtcttagatggtgagattacagagacatttgtttcttcctccttactcgtcttttctaacttttatcatggttttgagttatttttatcattcttcatttcttagt

SEQ ID NO: 58023 - DNA, 976 bp, Bovine  19866881414196
  misc_feature (1)..(1): n is a, c, g, or t
ngccccctcccttggttccccgtttccgcgtgagcccccctatcccgtggcctccaagctttcctcggccctgggcagcagggtgggcctggggtgtggggggtctctgcaggtcagctgagcccacaggatgagtcccagtggtgccatgctaggatgaagttacaggagtaatggctgctgcctggtgtccctcagaccccaaacaaccaccccaggactctgccagggcctccccaggagcaatgcgaatcacatttttccatggctgtgttctaggcagtggggtgtccagggccctgtgactgccctggcagtgggtcttgacccttccctgcagcactggccccgccctggacacggccttcttcccttctacccacaaaagcacaaacaagcagcccgctcccaaaccacaacccttgtcccacgtgacaccgtagccctgggagcttcaagctggttgatggggggacagggagagccccgggaggctgtgggggcagcttgaaccaaggcctccgggacatctgctccctccccggggcctccagcacccacgctcactccacttcccgcttccggatggtgcggccggaggccagaacctcagccaccttagacacgataggatcgtagttcatgctggccacagagatcacctcgtcgcccctgcagggagaggtggccgagcctaaggactgccagcagcagcccctgtccttggagacccggatgcagctgggcccagggaggctcccactcggaaccaagggaatgctctgaccacctggcacccccttggcccagcacagcttctggtcccgtgggaccccgtgaggctcctgcccagtggggttgaaggccgacacctgtcctgggaccccgccctctacctgtgtcactgtcctcggtgtaaaagtaggccgtcaacccccatctccaagagctgacctcagattaagtgtccgcctcc

SEQ ID NO: 58024 - DNA, 926 bp, Bovine  19866881424573
  misc_feature (1)..(1): n is a, c, g, or t
ntggtccctccttaaccaaggcactccatccttcacatacagctcagagcctacttcctctgagaagacccccatgaatttccatggtgctgaaatgcatgtttttctacagcttcatggaggtataatttacataccacacaattcacccattataagcagtgaggattttcagtgaatgcattcagatgctcagccagtgccacaatgcagtcttagaacatctccatcacccccaagcaacactgccctcccagccaatccccacttccatccccaaccctgggcaaccacgaatctgctcgctctccctataattaggccttttctggaagaatcatataaatggaactgtacaatatgtgtccttttgtatctggcatctttcactcagcacagtgtttctgagccagctgggtatttttaaacgtacatggggatttggtatttaaaggaatgctggctgaatccagccataagcaaatgaatcacttctcaatgtgactcctcctccccctcacatctttatcttgtaagtatggtgtttgcatcttggtcctctccagccaggcttgctttagaggtgccctgactccccaactcctatacatgtgaaaggtttggcttgactctaccataccgcattttttttgtatttttttgtagattttttttccctataagtcagatgccataaacactcaaataacccaccttataaaaagtatgtttacaatgtcagaagaattcaaatgaaatgtaaacccttctatttacaatttttatacacataaaccaaatcacaaataccacaaataaatgtgggcttccctggtggctcagatggtaaggaacttgcatacagtgcaggagacttgggttccatccctgggtcaggaagatagatcccttggagaaggaaatgg

SEQ ID NO: 58025 - DNA, 1143 bp, Bovine  19866882202574
  misc_feature (1)..(1): n is a, c, g, or t
ntcaaagactctcctcacacactcagtgctgttaccaggcacccagccctcatccctgccgttctcacaccaggtcttaaggggaggaaaacacacaccccaaactcggctctggcctccgaaaggggggaaaggaggaactcgcagttgctctccctgcggggggctcgcagtgtggggccctagcgtgccgctcttctgctgcgcgggcgcccagggcaggggagcccgggtctctggttctccgctgctgccctattgccacagggaggcggcctccactgctcctgggggagctaacggatccgtgcgcgctccccctccgcccaggcaggcagcccctgccggactcttacctcatcgctcgggtcgtagtactgctctaggtaaggatgggccagagcctgctccacctcgatcctcttgtgagggttgaacgtcaacattttgtccagtagatccagagctacagagagaaaggttttgcagagatgagaagccaaaggagcagtcaccgaacagactgcgcactccctgtttaagtcaagacccactagacgggggagctgagggagccatgcgctcaggggagcctgcttcacctgagtgtctgatggtagagaccagactcaggaaggcggcgtgctctgcagaggctgcacagggagccaggattcaggcccaagtctgcccgtaaaacccgggcctggtccgaaagcatggccccactctgcagggtcacgagcagaggctgcgcgtattacagctcttgggtcagctccaagcttgctgtggccctggttacttcctgccctgtggctgcagccccctccttccaggttccggctgacaggtgtgtgtgaagcgcagggccctggaaacatgttccctgctgggctctgcccctgctccccaccttcatccaagcagtaaaccacgttggacgtgaagagaaactccacacaatgaagggcgtttttcatgtccataaagcgaagtgtgaaaagcagcaggatcttttttaagtcctaaccctaactctaatttctaccaacagcacatttcccggaatagcgacaggggagcgtgggacgcctgctgagccccagcagccccggggcctgcccccgcccctccctatag

SEQ ID NO: 58026 - DNA, 1280 bp, Bovine  19866880352023
  misc_feature (1)..(1): n is a, c, g, or t
naaaatcccatggactgaggagcctggtaggctgcagtccatggggtcactatgagtcggacacgactgagcgacttcactttcacctttcactttcatgcaatggagaaggaaatggcaacccactccagtgttcttgcctggagaatcccagggacgggggagcctggtgggaggccgtctctgggaccgcacagagtcggacacgactgaagcgacttagcagcagcagcaacacgaagtcagagctgcaatttggtcacagactgatgatgatgtgagtttgccaccatcctgggattataaatgggaaccccaaactgcagtctttgaagtctcacccacagagccgaccgctacctacgaccctttcccaactggtactctagatgtgctgtaacacgggacttcccagcgctgtttaagtctggatgttggtcaaaacccaatttggtgatgtattctctggtctatttctctttcttttaatgttagtatgttgaaaataagttagacaattctctaataaatatccgtattacttatttgtatataacgagtggcttattttgttaacaaatcctgtgaacctgagatgaaagtgaaaacttttgcaaccagtaagtaactctattaacctgagtcccagtttccgcatctgtaaacagggacgataggggcaccgacctcacaggaccatatgaagattaaatgaggtaacacggggcacttcagccaaggaagctgataaggggtcccacccgcctctgactcacagtgtcatttgaagtgagggcagacaaagaatatcactcctggaggcaggcaagctaggttcaattgctatgtgacctaggctatgttcatacccaatctgagcctctttttcctcatccgtaacatgaagataacaatttctattttatagattcagggaaagggaaaatgctttgacaactcaggaaaatgtgggtgattaggcttccagaagcccacatctcctgccatgctcacctcctagccatgccccagccactccctacttctccaagcctgggagacacgacgcaggctttgggtacccctggcactgcttcagcaggcaacagctggcagggcagggcacagctgccaggtgagaccagcccacagcaggaagtttgcttagagggcagagggtgcagtagccctcacaccatctcacctagccagctgggcccacccagccccaggtcaccacagtcatggtcctgaaagccagaaacttgggaaacatgaag

SEQ ID NO: 58027 - DNA, 1633 bp, Bovine  19866880402820
  misc_feature (1)..(1): n is a, c, g, or t
nctgccccatagtagaggagccagaagccaagctgggaggtctgtatggccaccagagcctgcacgttgaacccttgcactgcagttaggcagtttcacctcgggacagtactaggttcaaacaccaactgccctggcttttctggctgtgtgaccttgggcaagttatgtatccgtgtcttcatttataaagtagggatagtagtgcccgccttacagggttccctaaatgagttaatacatatcacatgtttaaaatagagccctgcatgcaggcaccattcgtaactagtggccaggtgggcccatgaccttgaagagtctaaaattcttcaggattctaaaatgccagcctgtgggatcctggaatcccccagtggcattctgaggcctttgggctgcagtagttacctgcttcccctggctggatggtgcaggctgcctgtccatccagctcagccccacacagggaaatgaggtgatgtcaaagcctgggctggggctcagccctggaacctccccttccctccgtctccctcactcggattcccacacgctccagagggccagagcggaggtgagaggggtgaaggtgggggcacacggccacctgtgcgtaactcctccagcctggagcacggggtgtgcctggtggctgggctgggcctgcagggagcctgcctccctcttggcttaagtcctgatcggcagcgatcccagagcgtcactcctcaagtgtgagtgcgtgtgtaggtagctggctggtttgctggcacccctctgcaggtggctcacaggccaggcctggccaggcagccatgacagatgagaagaccttccgcatcggcttcatcgtgctggggctcttcctgctggcccttggcacgttcctcatgagccacgaccggccccaggtctacggcaccttctacgccatgggaggcgtcatggtgatcgggggcgtcatctggagcatgtgccaatgctaccccaaggtaggtgggaacagtgggaacaggtgggctgggggccagggcccaggagggtctggggctgtgcctctattccaggcatcagtcccccatccttcaatcatcttgtcatcctctcccctttaccatttcttttcttatctccactctcctgagcctccatccatccatccatctatccatcccttagcataaagattaataagaagtcccctgaatctggagccctgaactaggtaccatgcgggagacacaatccaggttcttgaaaccagagttcctgagggcttgctgcctgccaggcacacctgtgtccctggtgaagttcagcatccatcctgagctttttggtacctttgaagttctattttatagtggagaagcctgaggctcagaaagtgaggttccttcagctcctgggtatccgggttgggatcagagctcagatgtgtggtgcctaaagcataaccttcctcaggaggacggtccctgtgtcccagagctgctgagagatctgagtgagtcagctggaacctcatggcttgggcagtgctctctctttttggagttttaatgagtgacttaatgatgggaagagcactggtttgagagtctgagttctagttctagctctgttccaa

SEQ ID NO: 58028 - DNA, 892 bp, Bovine  19866880513226
  misc_feature (1)..(1): n is a, c, g, or t
naatacactcaggtagcttttaatgatatggaatatcattaaatataatgtcaattgaaaaaagagggcacaaaaatcatatagacaataaaatcccaattatgttaaaatatacacacagaaaataaaaaggaaacgtgagagaatattcatgctgatcatcataaatggtgagattctgcattttttttattcatttaaaaaatgagtctatactatttttatgattaggaaaacaattaaggttattaaaagaagcaaagcgcctgggagcagaagaaatgctttcctaggtctcaactgcaggctcgcaggctaccacaggtgttcacgaggtcctaccttaatgaaatgcagcatggtgaaggagaaatgctcgttacagaaacagcagtacaccaccatctcgatgagcgccagcagtgagcccgtcagctctcgcagagcaaacattacctagtgagggtagaagaggagtctttcttttgtcacagttccctgttaaaacgctgtttccgactttcactgaaatctactcagatgaaggaccatcaacactgcctcaaaatagtttgagtctgtctgagagttaacacaatttgtgcaaatgtgtacctttttctcacttttatcagacttttaaaaggggatctcccccattaaaataaccactgataggtccaaaaaatacatgacgttaagcttaaaaaaaaagagatatagcacagcactgttgatgtaaataaaaactagtatgattatgttcaccaagtcatgcatataaaagtcaagttacagaacaaggattggaagattacattcttaaggtgcagtagctctgggtggaagggagagggacctcaacaggaggttgtgaagagctcacttctat

SEQ ID NO: 58029 - DNA, 2765 bp, Bovine  19866880513898
  misc_feature (1)..(1): n is a, c, g, or t
nagtcttttaatttcatggctgccgtcaccatctgcagtgaatttgaagcccccaaaatagtctgtcactgtttccattgtttccccatctatttgccatgaagtgatgagaccagatgccataatcttagttttctgaatgttgagttttaagccaaccttttcactctcctctttcactttcattaagaggttctttagttcttcttcgctttctgccataagggtggtgtcatctgccataagggtggactcagtctagtcatttgcaaaacaagaatttcttttcctgcccggccatctgcctctgttgtggtcagatgagatgccaggtgtgaagggggactgtcaagtgtcaatatataggtgaggggttactgttaccgatttgctggggtttttttttcttccagcttttccttctgacagcctctccttgctgtctttggagagagtgtagtgaggttctttttctcccccagagaaaatgccttgagctggagacaggaggcacttgccccactgacagattcacaggaagagaaccaaaggtaatttacaaatggcttgtttctacatgcttctggtggcctggaggctcataaagattggggtccactcctcgagcacctcatttcatgtatacattttatctttcttgctcacatgtgtacatacaaacacatacacactatttaaaaaaatttattttttaattgaaagataattgctttacagaattttgctgttttctgtcaaacctcaacatgaatcagccataggtatacatatatcccctcccttttgaaactcccctcccatctccctccccatcccaccgctctgggttgatacagagcccctgtttgagtttcctgagccatacagcaaattcctgttggctatctattttacacatggtaatgtaagtttccgtgtcactctttccatacatctcatcctctcctcccctctccccatgtccataagtctattgtcttatgtctgtttctccattgttgccctgtaaataaattcttcagtaccatttttctagattctgtatatatgcatacacacgtttttaaacacatctggaaatatgcccttttgaaatctaaagtctcacctactagatcttgaacactttgccatgctcttcagctccctgcgcgcgctttcctggtggctcagaggttagagcgtctgcctgcaatgtgggagacctgggttcgatctctgggtcaggaagatcccctggagaaggaaatggcaacccactccagtactcttgcctggagaatcccatggatggaggagcctggtgggcggggtcgctaagagtcggacacgactgagtgagttcactttcagctccctgaggactgtgtctctgaatgactgcacagcagggcgttgtgcagttgtaccctgttaggctgggcaagccccatttggaaggctgaccattagtcttcctgaggtctacgagtccctggccctctccttccctggctcaacctgtggaagaggagagggggactctgtatagatgaggagacaggtcaggcgcagttgggaggcttatcccaggacatggctggtgagctgcagagtagggaccaaaaccagactccaaggctgggtgctgcagcagctggcgtcctgtattccctcccctctcccaatccctcccagctacgagaggggcatttcacccaacaaggtttattcagcaacactgtttctcatttaggagaatttctttaacacctgtttatggagcagctactatgtgttaagcactgggggatagagctgtaaacaaggctgatacagaccctgccctcagggaacttgctgtctggtgaggacaagacgcaaagagaagtcaaacagacagataacagtttggtcaatgaaggcccagggaactctgagtttaaagtgtcccatttgaaggcttcttgggtgagagtcaagctgagcgtggagaggacattgatgatagcaagttaccagggagagggaacagtgtgtacaatgacctggatgttggttttggagaaatcccttcccgtctgtataatctggagccagggttcctcccaagtgtttttttccaccccctgggcattttgtttttcctcactgagataatactgtgtgcttaatttggcacctaagttggaaaaagtcagatatcataagaatttccccctgttgttaaatatctgtgctgagcttgatttttttttttttttaaatcagtcatggaatataccatctagattttatgccatgctttattcaccctttccctatagttggacatttaggctctttccaaattatgaccattaaaaataagctcacaaaaaccatctttttgcatgaaattttgttttgtgttgtgaatctcagctccaggcttctcaatgccctttccccactggcgccggtacctgccctgggtttcagtgtcttcctcggtcagatggagatttgttgtagttgttgtttagtcactaagtcacgtccgattcttttgaaactccatggactgtagcccacccggctcctctgtccatggaatttcccaggcaagaatactggaatgggttgccatttccttctccagggaatcttcccaacccagggattgaacccaggtctcctgcattgcaggcaaattctttatcaacttagccaccagggaagcctatcaaatggagataagagcatcaccctttcgagattgtgac

SEQ ID NO: 58030 - DNA, 820 bp, Bovine  19866880587361
  misc_feature (1)..(1): n is a, c, g, or t
ncagtgaagaaagtggggggggggagctataatctgtaattgtatttgataaaatgataaattgaaaagataagtaactttaaatgtttagacgttacctataacctattaatcacttttatttatcttctgataaaaatttcactacaaggatagctaattaaaaaaaagcagttattctgataggcaaattctgaacaacctgataaaacgataatttttactgtttgtatgccttagatcacttttgaaataagtgcaaaatggtttatcttacctgtaccactgaggaattgaggtactctgcacatacccctaagggctgcactagtgctgagactgcctgaaaaaaagacagcaaatttgagaaataaatgtgagcaagttctttcctttcaacattaaacaaatccttttttatatgtcagagaacattttatactcttgggcaggaaaagctgatataaagatgtcagttcatttaaattattgtagaaatttaatgtaacttaaatcatactatgccaataaaacttctttcaaggcttggatgagatgattctaaagttcacattgtagaataataaaaatttttatttgaaaaacgagagaatagtgggggaaggaatgaaatgtgcctttaatgtgcctttaacaaagaaaacatttaagactttcattaagaaatctataaaactttacagaaatacataaatggtccaaataaatgaggaaagatcatgttcttgaagggaaaggactagtactatagacatgtcaattctccacacatgatcttggggcactttctgcaggagat

SEQ ID NO: 58031 - DNA, 3534 bp, Bovine  19866880597579
  misc_feature (1)..(1): n is a, c, g, or t
ntgttcctttatactctctccccaagtgaactcatctgcatacgtgcttcagtgatcatctatgtaataataatactcagatgcatattttagctcaatcctttttcccgagcctcagatcaatacatgttgacatttccgttggaatgcctcaaaggtattacaacttcagtttatttaataccaaactcatggtgtcgtgtgtcaaaactgacctttttttaaaaaaaaaaaaacaatatctgttctggcaaataactctactatctatccagaaatgtagcatcattctcaatatcttctctgcagtctccccaaacaccaagtcctgtggatttttactcatagctctctccagtctgatcacctctctccttctccagtgcaatcgtcacttccccctggaaccatggtgatggactgctaatttgtttgcatatgttcactgtcatctcgtctccagttcattttccacagagcagccacagctatctttgcaaactagagcatgccccatgtccctcctttgctttggatctttcactggctgcttgttgctctgagcaaaatccttaacaaggccctaaatgccccagctccatcctcccacatcttagcccagcccttttcactctatcccttgctctgacacactgactttctttagtggttcctacttctgtgcttctgttcaggacctgtggagtgctaatccttcctagaattctccctccccttttgtcaccaaatgaccttaatcgattttagatctcacttcaaatgctgccttctcagggaactcttcctgaattctacactagatacgaaccttcagtcacatgctgtcacaacagcttgcttatgcttttctttctttgtgtacgcttgcatgattatttgattcctacctgtcttcccctctatactgtgctgctcatggtatctgagtccacttctgttttctctctatgggactcatagtgcttaatgcagtgtcaggcacatagtaggtactcaataaatatgttctggaagaaaggagactttgtaatctggaagggctcagggggagagtgactgagggtaagtggtttatgacatttggaatgacttgggtaaaatgtggggaaagcttcccaagtagccctagtgataacccacctgccaacacaggagtcataagaggtgcgggttcaatccctgggttgggaagctcccctggggtagggtatagttacccactccagtattcttgcttggagaatcccatggacagaggagcctggtgggcttcagtccatatggttgcaaagagtcagacatgactgaggtgacttcatgcatgggaaagaggtagaccatggaaacctctgggcaggagagaactgaaagggcctgttggggacagaaggcatgtctgcagatgcactctgagcctctgaaaggctgtgctatgtgcccaaactgtgtcaggagacagagtttttaaggcctggatttgatgcttttaaggcctggatttgatgcttttaaggcctggatttgatgctaactagctgtgtgtttttccctctcattcttaatttaatttgtaaaataacagtgctacattattacagcagtcagagttcttagttgcaaagaacaaatattgcctctgggcaatttaaacagaaacttaactgattgaagggctatcagccagctcacaggattcccaggaagccggaagaaccagatagagagaactggtaagaacagggaagattgtatgggcaaagcctgggccagcacctcactgaggagccaggctcccttgaagccagcacagctacaataccactcagttgtagcatcacagcttgtgtccctgccaggagtgggcacgggctacccctgttggcaccactgtctgtgctgcccttgggaactggatcttgctgcctttgcttgctaccctcggaaggaatgctctgctctctttcctttgcgtcattagcttctgattcaaaaacctgagcagatgcatctgccatgcctggtgtgtgggggcaggtgtggggatgagggtgggggactgggaagacagcttcctagagatggaggcaggctccgttgaccatcaaccctcctaaaagggggactttcccaggggaggaatcagaagattcagatcctgagagccagtcaacatctaatgttcagtcttaacgatcctgccaatgttaacaatccatgtgtgcgtcagcaaaataagaatggatccagtcatcaccccaccccacctttccattaacctcagcaacttataaaagctactatatcatcactttgcctagaaaactttctccaggactacaagcccttacttccaggtactttagagactaatctgcatgtccttgcattatgtgtttatttgagctgctgaagccagccagtgtttcctggctccacagccctaaaaatagggcattattgagtagcctaataacctgctcagagctctcagaatgcagcaaggcctgcgctggtttgtatttttagcagatgctctttctattggaggatctatttttaaactcaccaaatgtcaattctctctcacctgtccattgtcattctcaaagacatgctggtttgtttgtttgtttcttcctggtagaatttactctgcagtatgaaaggtacatttcagtcattgatggttctttttggacagaagtaacattttcttgcccacactctacaacatcttttgttttttactgaactgagatctaggagaatcaatgaaaagggaattctggaaggaaagggtccaggatcttggaactgatttatcacaccttcttttaatgtagtttccatcatatctgcttctttaggcacgtagcttgcatttaaagtcgtcaagctgtgggagcaaagcaagctttataaaatcattcagcgtgaatagctgattctggcttaatttgttactactccaaggtaaccaagtgctgtgaatgttaagtgacgtgactgttgctttaaaaaccaccatatagcttacacatccaaatgaacatggaactccctgaagagcctcccactttggaagtcattgtgcatgatctgacaatattttttcactcaaagcagtttttggaattacttttccagaattccctggtggctcagaggttaaagcgtctgcctccaatgcaggagacccagattcgatccctggattgggaagatcccctggagaaggaaatggtaacccactccagtattattgcctggagaatcccatggacggagaagcctggtaggctacagtccatggggttgcagagagtcggacacgactgagtgacttccctttcactttctttcttttccagaattactgtcccatgtatggatcgggttctgaaatgtcctcaatgatcatagctctgtgtccttggggagcatggggcatttgctcaggagaagatgcagtcccattccggtggtgtgtgtttgtgtgtgtgtgtgtggggg

SEQ ID NO: 58032 - DNA, 1705 bp, Bovine  19866880604611
  misc_feature (1)..(1): n is a, c, g, or t
natcatgcagtgtcctctcccactgcatgctgtgtgtaaggttattaaaatgcacagggctgtgagttttctcagcctcgctttcttcatttagtgtgtcttggcagatttttctacttcctaagcagacttttcttatatttcacttacagcgtattgatctcagaacactctaattagcattctcatagctactcaagaatagtcaacaaaacagaataagtataaatgaaatataagtacaaattgaggcctgtttagtgactaaaaaccctctcccttcctttctgcttctttccctttctccttcctaatttcatagtgaaatatcatggagggttatagcagcgagggttgtggtattgtttcagtccccagacttagcatttggggaactgagacccagagaagggaatgacttgcccaaggtcagccaggtggtggtagaacttaggctggagtcccagcactgttgattgccactccaacctgcttttcactgaagacttactggaatctttgtgcttttaaaaaatatttcagaaccaactagaaacagctccaccccatgagttaaagaatacattccaactacttcatgagatactggtaagtcatgaatgttttgattcacttgcatttagatatttactaggcagcatgcatttgcaaataaaaactgtatgtccttgtgttgcttttgcattcatttggtctgcactcaccaagtcctcttcacatcaccccattctccttgctttaactgattcagaggtgagtggtaataaatttcgttatgtttagtgaaggagctagacaaggacacaagcaattctagtgcagaaagcaaaggctttacttaccatgcacagaaaatggtgctcagctcaagggtgatcttgtgtgaacctcgcaagaaccaggagaggtgaatggctggctctgcagcctgtccatgtgctactgaaaatatctctatgagccacggaactgaaatgtaatccactataaggtgcaaaaggcaggggaaaaaatacaactgcagtcagtgaaataaggtattattagaagctgaacttagagaagtggagtgacctgcccaaggacatcgtcagtaactgacagtcaggatctgagccaggtgactggccgtggagcctgtgctctctacaaatgcctggtttgctcagtgactggaagaggtaggactaaaaggagtggaaactggtggggcttggggaaggagcccagaccagaccaggaagagttccaggttccagtgcctgtggactttttccctggaggccagtggtgacacactggtagccaggttccacctacatgtcttgtctatttggcccaaattgttctgttctttaatttctggatgccaacctgtcttcagaaatcaggtcatctggccaccctggtctgtttcctgcgtgctccagccacccagagcagtgacagcatgtcctttccgtgaagcttgtggtctccagttcccactgcctcagcactgctgttgtctgccacgtggctcatttcttaccatctcggactctagacatttaagtcagtaacttctgccatcagtgatggacaccatggaagggtttgcggcaggaaagtgatataacctgatttatgtcttagaaagattaccccagcagtgtcttaaaggagggctaaagaaggaagcagg

SEQ ID NO: 58033 - DNA, 2505 bp, Bovine  19866880632380
  misc_feature (1)..(1): n is a, c, g, or t
ncaaaatgattacataaaaatttggcatatgaaagagttattggaaaattgacttaagtgacccagctcatttcctgatgaagccagattaatggcacaaccaaaaccgaattcctcaagaagtaaatgactcacctctcctcctgctgggctgcctggagctttccttgtgcttggccttctgccctttctgaaaacccagctgctaggatgggaaactcaaccggtaaggagaaaagtgagaatctgttgtttacctccaggttctccatttattagatcctaaactaagtggcatctgaacagccaaagtagacacccctctcaccaagttgcagagtttacaccaggtaataacctggagcttactgaggaggcccaaggtgatcaagatgcccaggtaggtggggtattgaaaagaacaagattaaaggatggtgtcaaggagtcctggggatggacctctcagaatgggcacacgacaggaggctatctgtgtctgtgtacatgttcacagcttccctggtagctcaactggtaaagaatctgcctttacaaaaatgttcacaaaaaatattcatgaaaaaatgttcacaaaaaagatacagaaagatgttcacaaaaaaaaatgttattactacaaaggaacactcaataatcagatagtcaaggtatctcattctatgaacatgcagcttcttttcccagccactctgatgctttttcaatggactcagtaataaggtggtcacagtcgcagaaatggaggtgagcagtcctgtggccagatcaacattggtcacagaagtctatgttattgaacctgtgcatgtgttcaacacagcaacagcagagaccactgctgagcctcagatatggcattatttcaagggagaccattcagtcacatggtctgatcacatggaggtgctttatcctcacttcagcagataacaacatgtatatgaatttgacttccctgcctgacaacatctccatctataagcataagaatgtcttgttctctccatcatggaatccatcacaacattgcttctcatcaaagaactcattttacagagagaaggaggacaatgagcttggaaccatgagttttattatgaacttaataactcagaagcagagagtttgacagatagaatggtgggaagggtggaatggcctattaaagactgagttatggtactggcatccagtcccatcactgcacagcaaagagaaggggaaaaagtggaaagtgacattttattttcttgggctccaaaatcactgtggatagtgactgcagccttgaaattagcagacatgttctccttggaaggaaagctgtgacaaacatagacagtgtattcaaaaaagagacatcactttgctgacaaaggcccatatagtcaaagctatggtttttccagtagtcatatatggaagtgagagtcggactataaagaaagctgagcaccgaagaatcgatccttttgaactgtggtgttggagaatactcttgagaatcccttggactgcgagaatatcaaaccatttcatcctaaaggaaatcagtcctgaatattcactggaaggactgatgctgaagctgaaactccaatactttggccacctgatgcgaagaactgactcattagaagagaccctgatgctgggaaagattgaagacaggaggagaaggggatgacagaggatgagaggttgcatggcatcaccaactcaatggacatgagtttgaacaagctccaggagttggttatggacagggaagcctggtgtgctgcagtccgtggggttacaaagagttggacacgattgagcgaatgaaatgaactgaattggactgaggaagaagcaaggcattaattgaattctgaaagagacacaagtgcaatattttcaatgtatttcacattgtttaagttgtaaagggtgcatagtttgtagtgtgaaaacatatatgtgcaaactatagttacataaagatctcatttattcttaataaaatactaggaggattgaaggttaagtagagtgttatgttagaaacacaatgtagaaaaaaaggacacaataaaatgtgacactttctaagaagtcaaaggagtattgaatacaatggtaaagcacattagagaataattagaccgatgggaggaagggaagctgtaaaaatttgtgttttgtttaaacatgtgaagacattttctaggtttgacaagtgtcaggattttaaaatgtatataatacaatatgtaatatataattttatatgtaatgtgtaataagatcacattataaatgagtagatttatttttttaaagggtccaaaaattaaaagatgctgttctccatgatatcttcataaaggcaagggctgtacctctttgattccccacctgtctctttggcacagcactgtgcttggcacttaattatgctcaccaaatatttgaggaacagagaaagtagatgtaaca

SEQ ID NO: 58034 - DNA, 1096 bp, Bovine  19866880648444
  misc_feature (1)..(1): n is a, c, g, or t
naaaaagtagttttacctttaattaaaaagtagtttacctaatgctttctcttgtaatttagggtaaagtaaatgtgagaaatccgtttatgaggtgacaatacagtgtggcagaaactacttgtctattacaaactcgggtgactttagatgccaagcaatctcagagtaaaacaccagaacacaactgatgagtgaagatatttttctattttttggaaaacaatattactgacagctttgagaaacaaaaagccatgagccacagaactgacaattatattttcgatcaaagacaaaagatatttatttttaataccatatcatatgcagttatgttaggtgatttactgaaagatatacccacaaatatcaatcttctaaccttttacttcgaggtggttttattaaagattaaaaactgttccatcatgacaaagacacctcatgcttcctctttagagttctttccaataaatattacttttatagttcaaacgcaaaaagatcaaatggatgctgtaagtcatgcaacaacagcacaatgccaggtacctcccggtaggtatatcgaccatccactagcgttgagccagttaagcctccaggtccagccacggctgctgcaagccgatgacaagctatcaagcttcctgttaccagttttactatttcaaaatttttcttcaagtcttgaataatgctcttggtgaaaacaaacgaacaaaaaaaaggtatgagaatgtgcagctactttgtcagtttaatacaagcttctatttgagcatacagttgaggaacagcaaacataaaaatttttcactcacatttcctacgtaaaagtaaatgaaaacaatctcatatgtacatttacttgggaattactatagaattaataaacttccctcgaaaatttctggttctaaaggaattttttattatttttttaaaaaataagtctttcaaaagcactatttcacttcttgcatacttttccagatctttcttcccaagtctcttacactgaagagcctgtagttccttaagcgaactaatgttttttcacaatataaaacaagtcttgcgaatcttttca

SEQ ID NO: 58035 - DNA, 1650 bp, Bovine  19866880661749
  misc_feature (1)..(1): n is a, c, g, or t
ngaggctcctggttggttttgctcgcgttgttgctgcagtgaacatcacttgccctttgccagtaaccttgatttccccatggctgcagtctgccaacctgctgatgactttttttttaatgtcatacaacaaagtgacagttacgacaggcttaccttggaagaggttcatttttactgccaatctttttggatgaagatgtttttataaatctttcaaaatggtctgcaagtcgaataggaattgcacaactaaacccaatgctgtgtgtccttaagaagctcccttcatgagatccttcttaggatggccaagtcagtcccttagagacgtcctgggaaagaaagcaaaggagccttcggacaggcatcccagcctgtgacttccctggagcccacacgtgggcccagagcacattgtcaccagactcaccctctcttgctccaccctccctgcaaacatcaaggtgtgtgcagttaccttttgagcttggaacaggcagactggaattttcctctgctacctcttgtgtacaaaatcttgtttatacaatttcaaaaagaagtagataaactaaggaagaaacttcattctaaatttggttcactgagtggcagagttcttagcttctaaaggtataaaataaatttttcaaaaacagagttggaggctcactgacatttttctgtgtataccagaaaatggctgtggttgggggaggggtgccaggggccggtgacctggaaggaaatagtgccgattccttttcctactttgtaccaatgatgtgaatagggtccattctttaatgataaagggcagtgggtctttttctaagctttagtccctctggatatcttgaccatttcaggattcacttgcaaagctggataaggatgtgcagagctcagaccagtggcctgcagctgtcttccccttagctttcaggcatccctgcggtccccagcataaatcacatccctgatcaagctggatttcttgttggaccccacgggtctcagccttactcctgatgccctgcctctgcccacatggttcccctctcctgggctctttgctgatccatctactctgcagtccacacccattcctccccggctcccagtgaccagctatcatcgtctgcaaaaaccaggtgttcccttttctcaaatcttagagccttctgggtatgaacagctaaggagctaaactctggctcttgggtgatggggagaggggtctctggcatgtaccacagatagggtgccactgggcccacttacacagatatcctctggcagtcgggtccttagcagctggcaggttttaaacactttccatgacactaagttgtccaagtttgagaggacttctgcctttgcaggtccattccctgatcacttataatatgagctgtttcgagctaggccttgctcaaggcagcaacactcgccagcctcaaagtggggctgggggtggggggccacattgcatggggtgattattatttttgcaaagtggaaagttctgagactgttcttaatttcaaatcatgaaaaatgaccctggacataattgtcattacagatgcctcagccactcatttaaacctttgccataaacattgactctgtgccaggccctgg

SEQ ID NO: 58036 - DNA, 2019 bp, Bovine  19866880710789
  misc_feature (1)..(1): n is a, c, g, or t
naattaaataaagatttatggagggaatttgactgtttagtcagtttgaaaaacatggagtgactcgaaaggttgagaaaaccagtataagttgccacttacttgtaaattttctttggctgttgattttccacgcttagcattgaggggtgtggagcagggcctttggcgctctagtctttggtctggtggtccctctgagtccagcttggttcctccgatccatattgtagtcagagtgagctcccaacaactcatctgatcatgtcacttcctgctaaaatcccacaggacatgtaattgaaatataggagggggcccaggggcttcagtgtgatgtataatgttttatattttcatctaggtggtaggttcataaatatttataccacttatactttgtgtctgctgaaattatttttttcaattaaaaattcatgtggaggaagtaccaaggctaccatgctcattgccttgtcctgacatcatgcaagctgtctggaaggggacacagaatcctccagggtggtgggaacaggagggctctgaatcaattctttaggtcatttgagatttcaagaacgtactattttctagaaagaaaccaaaaccgtgttcatgaattggagtctttctttcccatacggtgtttgatcgttttcccagggagaaagaaaaaggtggaaaaagtagaaatataccccaaatgcatgcagtcacagcaaaggagaaaagggtcctcatttcccagcttcagtctgaaatgcagaggaaggccctaattgtctcccaggccccagggccctttctaatttatagagggaagggcccaggaggtaaatcttgatgtcattttctaagcctcctaaaatgagcccattaaactactggctcatgaatggaggcgtttttcccagggttggagccccccaccctcctcctatacccagtatcacccaagcaccgccacttaagaggctgagtggcacatctgacaatgcagcattcaggaaggccttcctggatggggtaggaagactgttttatgccctgttaattactgcaacaatttataaaattcatgacaaacataaagcccttacagagattgtatttcaaatggtatttacctgtaacagaatcccctttgtttgtaattcctggatttatgagctgttgcacaacaaaatggaaccaccccttgtccccatggtgggcactggctgcaggatcttgattgggccatggagatggaaacctacccaggcttgaactgagacactgccatcccagatcgacttctagtccttggcacttctcgttttcatggcctgtgaacttgggagaagggaggttgggacctgggcaggtaaattttcttgcagagaatctccgtgtctaaatctggaaggaccttgggcatgagctagtccaattgtgtatccatcataggagtcctccctacggtttctctatctctgtttgcatactccagtgacagggagctccttacctgaaaaagcaccccaggtgattgcctttggtttctagtcttgtccctttctttttctccccaaccttcccttggccataagagtgattttcctaatactcacacctaatctagttgtcctgcttaaaatccctcaatagcttccctttgctttggagataaggcccaactatgtaacaaagcctgcaaattcctgcctggagtggtccctgtcttcttgtctaccttcatcttcttatcatccatttttcagcaaagccaagtgagtttctagttatgcacttgcattaaaagctcacgataagaaccataaaacagagaccaaggacttaactttggggcagcaagtgagagtgtgtttgtggagctgggggtggtgccttctccagtgtccagtgtcggggtgaggagatcagagccctgcagagggaagaggatgctgacagctccagagatgagagggaaggaggaccctggcaggaaagggcaaaatggaggagggtcag

SEQ ID NO: 58037 - DNA, 1395 bp, Bovine  19866880793546
  misc_feature (1)..(1): n is a, c, g, or t
natagcaggtgctgggggctgtgaaaggcattgtttccataggaaataagggacagaagtggcaatttcactcctgaatctgggttcctgagtgcagctgccagcgccatatccttgtggctggcatttcaaggtcacattccgcggggtcgctttgtgaggaggagggcagagagagggtgggggggcagcagggtgtgggtattcacggactcaaaaatccactttaaaacatcacatttaaatttgcaagaacatcagaaccacataaaatctgccaaggacctccggccctttctctggggcgcagctctgctctgaggtgttggccctccacccagctggtgtctttgacagacatcaccactggccagtcctgcaattacagactgcagcctggccgcactgtaactgcaccttcggcggtgaggccacagagtctgcagtgcgcggcaggagcagctgtcagccccggcatgcatcctctgcgcctctctgactctgcagacccttgactggggctgctcagtgcttccagaggctcccctagtcctgtgcgtgggagcacagaacaaggcagagcacgcaactaaagagaaacaggattgaaaatgtgtgcagtgactcaaaaccccaaaggtacacaatatatgaaccatgtcggcatcccttctccactccagaaaaaggagtgggctggcagcgaacctgaaacgagtgaatggcgccaagacctgggaaacacagctaaatgggtggttgttcagtggcttgtgagttctttcttatccatatcttttcagtgtcagtcaatcatgatgaggagaaatcaagtctcctattccttctctgcggtaaaacgtccagaaactcacaaagcagtgtctctcaactcaaatatttaacttcatatacaaccagtaccaagggttttagtaattaaatttccagcaaaagcaaatgattgcaggtcacatgatttaagactacagtttattcaatatgtctccaagcattaaaaagattttatgaagtcaaactaaataaaatcatatcttaaagtgctttttattttgctctttgtaaaatttgttttgggaacaattagtgattgatgtcaaagaatgcactctatacttctagagaacacagcatttttttaattgctctttcaatctcaattttatcagaaaaataccttaaagagcttaatttcccaatttttgatcctggtaacatttcattaagatccaagtttatgcccagggctctcatccagacccacctgaaattctatacaaatagggagacatattaaatacaaaggtctgtgtaaactgaattctttaactactattttacagtgaaaaggaatttttgtcacatatttttaca

SEQ ID NO: 58038 - DNA, 1841 bp, Bovine  19866880828003
  misc_feature (1)..(1): n is a, c, g, or t
ntgcactgttctaaatgccccttatattatctgcaccaaataggactcaggaacattcctgcacttacaaggtacagagctgtatcagaactaccaacagtgagtttgtcagtgtgcagtctcctagttttgcatcccgtcttagtgtctgacccgtcttacagtatctgacacatctgtttctcacaaaacctatgttggctccagaagaaattgtacttaaaattgtcactgatgtcagagaataggctgcatagacaagtacttcagtgacaacatttctgcccatagtcactctcaattggttaaaaaaaaataatttgcttatataattatagagctgaataaaatataagtattaatcacttttaattttagattaattctgtaactttttttcagaattattgatcatacctgaattcagatcttgttagtggaagccaaaaatgtaaactgaaaaaaagaatgttaattaaaactaaatgtcaaaagctctctgattgtattacaaagataactctaatctctgatagtcaaatcatgaggataacaaaataataatgatagctaagtaaatacagataatgaagttgatggaagagcttaggagatgatgagaatcaggacactcctaaacagaagacaccaaagccaaagagaaatagaaataatagcagagaataaggtaatatgtaacctcagtagagcacacacataggtcagaggtcaatagtggctttatttggatggattcattatgtcttttcatgtgtcttgttaaaatgagctgtaatctcattcatttgctttggcaaaagacaacttaaaaattatataaacctcttcatgtgctatacaaggtcactgacttcaaactggtcattgaatgtcgtcaactcaaaaaatatttaacattagtcatatacaataaaacttgaaatgccctgaaaccttatagcttgcatatgaaagaaactttatagatattcccccaatttaatggttatcctggaaatttacatgacattctcagtaacaagttgggctgctaaaactttttctaaactacccataagaaaaacaaatttcaagggtccatgctggaggaagaagggctcaatgatctttttgttccctctgcagaaaatattacaaaattgttattgtgtgaagaggtgatcaaagagtatgcagccaaaaatgtagggaaaaaagctaattaacaaaaacaaaaatttgggattttatggtatttgtcagcttttaaaaatttatagtgtatggtcatttattttctcattctaagtaaatattcaatcttgaattgacttttagattcataattctgtattctttttctttaagagggctcccacgggaacaaaccatatgaacttcaggctgcaccaaacttaaatcagcctcctccagcaggcaagaaatcgtattaatagctgtggcttctttggccctcacaatggagaaacatgggaagaaaacttgtccagcagggtctggagaccaagaagttagggatttcttgtgtaaggtacaagataagacacttttatttgttgaaacaattagctaccccttagagttggactgtgaagaaagctgagcaccaaagaattgatgcttttgaactgtggtgttggagaagactcttgagagtcccatggacttcaaggagatccaaccagtccattctaaaggaaatcagtcctgggtattcattggaaggaatgatgctaaagctgaaactccagtactttggccacctcatgcaaagagttgactcattggaaaagacttgatgctgggagggattggggggg

SEQ ID NO: 58039 - DNA, 1165 bp, Bovine  19866880883150
  misc_feature (1)..(1): n is a, c, g, or t
ntatatacacacttgcttcttttcccatcattcctcatgtgtcatttcatttatatcataaatgctgttaaaagccccagcaacccactccagtagtaggccgtattggttatctgtccattagtagcctgtgacctaatactgtctcgtgtgtgttgccagtgccttatttctggcatgatggttaaagtagtaagcattcatcttttcattcctaatttgtgcttgttgaagtttaatacctaataaagagtgttccaaaagcataaaatgctactgccctcaaatgttaaaaagttaaattttctggtagtgaatatatgctggcagtgaatctgtacaggagttcccaggttgtgactttcatccaaatacgtgattataaaaacacttaaagtactcaggcaccctaaataagataccgtgtaagtaataacacgtgtagaacagtcattctcaatcagagattatttgacctcccaggggacatttggcagtgtctagagaccttctagttgtcactagacaggtcctgctggcacctggtggccagtgggtagtgagtacaagtcagaaatgccactaaacgtcctacaaagtccaagacagtcttccatgacaaaacagcttccagcccaaaatgtcagcagagctgatgttgagaaaccctgatgtagaataatttcttgtttaggcagccagttcggcacttggtggccccactctgacacacgctgtgaccagagcaacaaaaatgctgacagccactgccatgccaaccgtagccacgtcagtccagtctccttacaggtaagcgactacagaagttacagcagatgcacaacacacaaagatcggtcagcttaaaagtaaaattggaatcttttttcttcctttggagatctctgttaattgttcatttcctcattttatttcatgtatttttcaaatagtcatatccttgaaaattatgtattccctgtcatgtattttatcatttgactcattttactttaactccgtgtaatatgagtagcctactctatgattgaaccaagatatattctttgtatgaagaataattttttttcagatttgaaatatttacttagacataactttttgaatagacaaatcatgacacagtgtaagcaaaatgaagtgg

SEQ ID NO: 58040 - DNA, 744 bp, Bovine  19866881041843
  misc_feature (1)..(1): n is a, c, g, or t
ntatttaagactttttttgaaaatgtgaatctgtgtgatcatcgattaaaaagacaaggagctcagttggtaagtagcattgtttgcaaatctagataatttggataatctagtaaaacttgatattcagcaaaaaaaaaaaaatattctaattgagagaagacatgaggttttttaaaaagaatgggctcctccttgactgcagtctcctgcatcattcagagagctcctcagagtgtgagggcattccccttcccatacaggtgacttctcagattcctctttggtttttgctgacctgagagagccagtggcctcctgtggctgggtgaacgcagaatagggatagttctagcccagcttctaacctctcagatccaacagttcacaggtacctgagaatgtaccaaaatcttcagttttgaggtctcagaggcaaggatttggagggaaatttttagaacagacagagaagcaggaaaatgagaatgtatacagcttacatttatatttacgtgagtagctttaaaaaggcgaaaaataactcttgttccagatctgtttcattcatgacctgacttcctagaatttttacaagatcttgtaagccctcgatctggccatttctaactgagctttgaaaagaccagattgagccctgaggattagtaaccacctctagcttgactccctttcctttgaagaaaagctcctgcagggggtgcccatgttattcctgtatgt

SEQ ID NO: 58041 - DNA, 1045 bp, Bovine  19866881054817
  misc_feature (1)..(1): n is a, c, g, or t
ntaaggctgtcttgagcacggcaatcattccatggattagggatgtagagtaggcgcggaagatcactgtctacggcgaagaagttaagcgactcgggccaacatcacatattctggtatacagtgggacagtaactcaaattcagtcactcagagaccatccccagttccaccactaccagtacccaccctccaactctcccctttgctcctggctcatgagatgttaaacacacaaccagagggcaagggattgaatattctgggccaggatcatcatcaacctaaataagccatgcttatttattaatctagagttgaatgctaaggtttttttccaagatgcaggaatgggaagatcccagcatgctcactggaaggaaactctcagttctgcagaagcaggttttccaaaatattcagtccccatctaaatgcaagcaagcccatgccacattcctatgctaagtccagaaccaaaattttaatttcttttgtgggaataaggagtggcccctgtgagaataaaatacactactgaccaaaggggaggggatgaaaagggagtcaatttggtcattgctaaaataaaaccagggagcaaggcccacagctgcctccccaggaagtcctattactacggacaatggcccaactgttctcccctgcccaaagaaaccatgcagtctcgaacctgggggccactgactgtctttttctatttctttccttgaaacacaatttattggaaatacttccagatctccagggggaaaacaaaaggctggcagtaaaatgaaacacctaattaacagagagaactgctccactgtttccagagaactttctgcaagactcctggcttcctgaagagagaattaggggaggggaacccaagcagcactgagcccctcttattgtgcacaccatagtgccagaaggtagcatagagtaatggtgatgagcactggctttagagtcaggctgcctgggttcaaatcccacctttgccacttactaggacaaagcccataacctccctggg

SEQ ID NO: 58042 - DNA, 762 bp, Bovine  19866881072984
  misc_feature (1)..(1): n is a, c, g, or t
ncggatgacaggtacgcacgttccaaattacttcgaggtggtctccagccccatttactgtccccaggagtcctatccagagtttgatgcggacacattagaagcacacatgaagacaatgatgtatatgtgtttagtctgaacttgtccagcatggctgcgtcactgtggagagcagctgcctcagaaagaaaagaaaggtgggggtgttaatcatcatggcaggcccgttcttacccctaaacctatctgccaaggctgcagggctgatcaccatctgaggagccttcatttcacccttctctaaaaatgacatggatatcctctgcgttggagacaatttcaggaattcaactcaagtccatttacttcaacatttccagaatggctgtgtttcacttgtttaaaaaaaaaaaatcttttggggggcactgaagctcaaaagatgaggaaaggaatcatgagcaaggagagagagaccttgtcctcagggaacctaactgtgccatgccgaatctgtgctcaaagaagaaaaggcagagtggatgctgctccctgtgtgcctaacagggagcgcagctgggcaaaattgatttcatgcccaacactcagtcgaatattatacatccatctcccaaacaatcctttcaagaaggtattattctggtaacagataaggaaacagcctccaagttcttaggagacttcccagcttaaagtcaggaggcagtagaatagattcaaaccaaggccattcagctg

SEQ ID NO: 58043 - DNA, 1011 bp, Bovine  19866881098558
  misc_feature (1)..(1): n is a, c, g, or t
naataaatttttagttatttgtgatttgaatatatgatttacaggttctgatctgctgtgacttgttcaattagaaaatgtagaatctatttataagttttacagttaaaaaaataaaataattcccaggacttccttggcaatccagtggttaagactctgtgcccccagtacaaggggcagcagttccatccctgggctgggaactaagattctgcataccacagggcaaggccaaaaaaagggaaaaaagaattccaaaattcagttgaaagtacgtgaaaaatagggactctgaaagattaattttgaaataaaaatttctttataatctagtatatatgtgtctcctttgcgaactaggcatatgagttcatctgacttgtaattacgtgaccatttgctattagaatgaatgtaatttggcatgaaagaagtaccttttgtgtatcagtgaggcatattctagtgaaatcatagtaggtagggacagctttatgcaacataataatcctgttagcttaaaatttgaaaccaataacagtattagaaaagtaaatgttgttttaataatttgaggaaagaatttcaaccgtaatataacctaaatagcagacatcaaggtattccacagcttcgtgcttactgctcaaaaagcatataacatggattttatttgaatttgagtgcaaagatgaaaaattgttgcttttaataagaattattatattcaggaagatttggttcagtaataattttcctgtctgtggagttcagttttcgcagaagttttttttatttgaaataccaaagagaaatgagaagtaaaatatataagattaaaccatttcaaaacaccctcatattccacatgcactcaagaacctgcacttcactcgtttgtgttttagtttttttattttatttattgaattgcttttgtttttgactgttctgggtctttgttgctgctcacgcttttctccagttgcggcaagtaggggggctgct

SEQ ID NO: 58044 - DNA, 638 bp, Bovine  19866881203198
  misc_feature (1)..(1): n is a, c, g, or t
ncctagggatggccaagcccttaggacactgtgcctccttaagcctgagggactcaggatttctagcctgtcaggggtaatcagagatgccagacaaatgaagtctgcagtccatcaaacatgcagacagatgtggttggcagtgagtggggctatgacttagaaactactggagtctcattatggagacacatgatccttgtgtgctttgcttacgagaaagccagacttttttttttttccccttcttctgtatttcaaatcggcctgcagccctgagattgctcattaggagagaaatgtaaaaagacataaaatctgatcttgttagatacagaactctgtttacacttgatatttaaaagtctagggttttggtctcagtgcctttggctgggaggaggagacattcaggtcctctctacataagcctgcttcagctcattgccctgttctacattaagagaaaaaggctgattcttaatctattttcttgtcacagatccctttggaaatttgacaaagtctattcctcagaaagtgaatgtgtttgcactcctgctttagcctcatggaaaattttgtctctttctttctttacaataaaactagggcagtttttccctgcttctaaataa

SEQ ID NO: 58045 - DNA, 1359 bp, Bovine  19866881283239
  misc_feature (1)..(1): n is a, c, g, or t
ncccacctccccgcatgcccctcccccctccccccagccaaggggcttcccaacacatttggaataattgtatgtttttacttaccctcatgaagttctatgtgatttgtcacttttgtgaactggtattgcaaccccatcctgatttccagacacacacacaagcctccagctgttctgaccttccttttaatgcttgaacatattaagcttatcactaccataacttctttgcttagaacactatgctctctttagcttaatatggacaatttctattctttcctaagctatcatccaaggaaaagagatggtagttatcaccatctgaaattgccttgttatttttttgattatctgttcattgcttgtcttccttcttgagaatgagagtaggaaccttgtgtgttgtattactgatgtatacatacacatctatctccaacacctagaaaaatatttggcatattctaggtgcttaatacctttttgttgaataaatggccaaataataggtgtcttaattacagtaattgttaacaatcttcacagttaaatatttctctattgctatgtaaaaactcaacaagtcttcttaattctttctcccctcaatgttttacttggccctgtgctctccatagtgatgaaacctttaaacattttaacttctttattttcctaccccctcgtgaaacctctccccctatacccccaactcctacctcttgggttttgccgagtaaattcagtgctttcattctattatcccatattttcttacaatatgcctcttctgtttcaataatcctcacttaactcatattacaattcccagtcaagcattaatcatttgtttttaaatttaataataaaataccataagattcattgcttactactttttcttatacttgtcatcctctgtatcttgagacttttgttttaatttaagtttcctttggttagaatccttctcaagtggtttctcagctaggggtatgcctttttttaaaggcacataactctttgacttctttaatgtttgaaaagttctttcaataagaatagcaacaattagaaggctatatttggtagtagtttgtgctgttgctgggggaagagggtatgacagaatagtcaagggccttatcttcacagagctgaagtttttttcttggtctttgcactggtggaatagcctagttcaggaattaacactcccaccctcaatctcaaaggcttaaaaaatcctaagtgtcctttttgctcatgcgaagtttgctgctgatgccagggaacttactagggagcttatcgactatgtgaaggctcagtgttttgagtctatatcaacag

SEQ ID NO: 58046 - DNA, 1660 bp, Bovine  19866881290553
  misc_feature (1)..(1): n is a, c, g, or t
nctcctttgttaattcctattcatcatttaagactcagttcatatgtaacttcctctggaaaaatttaggaatgatggtaaatccaatgaatctgttttcatattcattctgtgatctgcacagggcaatgataagactgatttttgtccatcgttctatcccagtgcttggcaaggtactttcttacttgatggacacttaaaaaaaatatgtgctgtgttgtgatgactgattttagttccaatctgggttctaccatctttcatactcaaagtcacttcaatagtaactttatcacctttctcatctgtaaaatgggcacaaagacacccactctgcagtattattgtaagaatcagagacaagataataaaatgtacagcccataattatggatttaatttcctgagtgcctattctcattacaaggttttggggaaagaagaaaatttctaacaccatgcccatcagtcatagtaaattaatcaatattggctaatgcctaccagagaggcacagcagtaaattcctggatcagggttctgtttacccttggaagggaaggaatatcagttcttagttttcaaatgagacctcctcttgcatggcagcacataaaagagttgcctgggcatgagtccaagtttctgtaggcaacatatgtggatgttcaaacataatttcatttattcatgacccctacctgtcaagagtccacatctaaatcaagaaatacaaatgattagtctttatggtaaaggtgtaaagggaatgatagtcgtgtagcttactaattctattatttttcatccctctgtctttatatgctcatctattttgtaggaaacagcaaagatggctaaagatcaaactctcctaaataagcatgagaaatttctctagttgccaatcttcttaccaaagccaccgagagttttggatctgggcaaagcacttacaatggtatctgaagaaattcttggccaagtgggctggcagagaaccccaaggcttggagattagaaacaggctacaagattattataaaagatcttttcctaatggtccactatcttgcagttaaactgtgtgtccacttggattaccttgtgtgatctttgtgcaaaactctgatactgtacgagttggtattatccaattcatttacagagtaggaacaggctcagagattcacccaaggttgaccagttaatgctactgccaagacttcactttggttttgtggctcaaaatcctctttttgtcctacatgtactttatccaggcaggctgagccccgagtccctggttcttatccctgcctcttccttcagtcctggaggtctgaggagggagggatgctttatacactgtcccctcttctctgctctcggtctcagcccctgaagcctatcttgcccacttctccagatagaactcatcactccctctctgctctgttcatctggtatgataatgagtaacaagtaggtgtgatgcaatgtggtctgagccacagggaagtatgaactacattgtgggtttctgcttaactacatggtatcaagagagagggctggatagggaggatctaacaatagttgggtagattctaggtatcttacttctcataacggtgcacagtatgcatttctatct

SEQ ID NO: 58047 - DNA, 1299 bp, Bovine  19866881341901
  misc_feature (1)..(1): n is a, c, g, or t
ntgctgtatgatgcagggaacccaaagctgttgtctataacaacttagaggggtgggatggggagggagatggaggggggttcaagagggaagggacatatgtatacctgtggctgattcatgttgctgtatggcattacatcaatgtttataccacaacattgtaaagtaaatattctctaattagaaaaaaaaaagaaatgctaggctagagggagacgattccgaaagagcctctatagacctgcaaagaaagctctgactctatgaacagagtctaggactgctattagaattggatgggattagtaaatccaattcagaggaggagagaggagaagagagaattaagcctcagaatagagttgagagcttgaaaggactcccgacttttcctaggtaagggcaatggagactgagaggggacagagacttggccaagtcggagtcaggacccaaggcagctcctgctctctgtgagggcggctctcttccctcgcgctccatctcagcacattgagaatcatgctccccagcgacaagagagcttaccgtatctttcccgggatctgtgggaacagagggaacagctgggtctttcccagaatctgcctccttttatgtgtctattcccagaggtcagccctggagtcaaggctgccgccagccctccatccacaagcctttgtttgggttcccagaccacatttcctcccctgaccggcgtgcatctcccccacccttcaggcctgctggcccagcctcagcctgcccagaacagaggccccagaatagcctggggctggctcacttgggcagaaaatgccttccaaggaagctgaggccttgaggttctaatgcttttcttacccacagacagtagtttccttttttagaacatgaactcagaggatgtggctccctgcctcttcacgaatagactgtctcccaggcacagcattccaggaaccacggggccaccagagacaacggcctctcaaggttgactgcagggggagagtgtgtcccttgttgtgtagctggagccggctccaagggtctgaaaacttcatcctggcaccaagtctggcccaactctggacccaacaggaatcttgaggatttcccacgacaccattcctctaccctcaaatcatccacacttattcattctgcccttcatgcaacaagtgtgtatcaagcatccactatgtgctagcttctttgagacagtaaaactttttggacatatcagataaaacagacaaaatcccagctctcaagaaatccatattttaa

SEQ ID NO: 58048 - DNA, 891 bp, Bovine  19866881422192
  misc_feature (1)..(1): n is a, c, g, or t
ntcccatttgagccaggtttgctgtgagaagacccagctggccggtggaggatcgtgtttcctctctggatggcctccaaagaggggtcttctgaggaggccgagtgtggccagccgctctgctcctctgtttaatcacttgctctgtttgctgtctcactggttcctcgtccagtcactgccccccacacctcatcagttaccctgggctcgaggaggaaggcctaccacactgctgtggagacccccaagtgcttggtgctgacaacgcagagctggactctatctggcctgatgatctggggacagataagggccattaacacctctcttaattacagaaccccaaagcgggcctgctagtccccgacaggcagagctgggaggaaacgtgaagatccagccttcatctgattttgtttattttattgaaatgagttaatatctgagagccctaggaagagtgccgagcatgcagcaagtgccaggcaaggccttggtactgttgtcaattgtgcgtgcttagtcgctcagtcatatctggctctttgcaaccccatagactgttgcctactgttcctctgtccacggatttttcaggcaagaatactgattgccattttcttcaccaggggattgtcctgacccagggatcggacccttgtctcctgcatcttcctgcattggcaggtggattctttatcactgcccacctgggaggccccatgggtgttattagtgctcttattttataggcagaaatgagacttgctcagttacacagcaagtgacaggctgaactgggacgggtccaggccagggctccttcctggacatcttgctgccctcggaagggctctgagggcttgtttccaccttgtagcggcattt

SEQ ID NO: 58049 - DNA, 1885 bp, Bovine  19866881424937
  misc_feature (1)..(1): n is a, c, g, or t
naatgaggtaaagcaacacagctgctgacatccatgcttgactttagagcctatgatctcgttaactctacccttccaaatacccgattctggcactcggggcagagagcaattctgtgccacgagaggcaagtccagctggagactcaaggagagcaccaccacatagccacacagcttgccgtaaccccttctctttctttgaccatagggtttgccagttttaacttcaagactgatgctttcaaacaagaaaactctagaatgtcctggaacaatttggccaggttgcaatcattcctcttacaacacaagattcattggctcccttctcctctgataaaggagagtgctgactgatccatgaccccagcatcctttggcttaattatctttatcttgatagaggacacactgtaacaatgtctactaccactctgtaaccaccccccctccattttcatttttcaaacctcaattatttgcttctagttattctcaaaagttttccgtttggttttgtatcatctagaagcatttttctttcattcaacaaatgtttacttatttaggaccaccatgtccacagcagcatcttccctggtggctcagagggtaaagcgtctgcctccaatgcgggagactcaggttcgatccctgggtcgggaagatcccctggagaaagaaatggtaacccactccagtagtcttgcctgggaaatcccatggacagagaagcctggtgggctacagaggagcctggtggggttgcaaagagtcagacattacatgacttagtgactatacaacaatttagccttattatactctctgaagcctttctttaaactctgggaagaacagactgcctcttccttgaagtcccactataccctgtgcatctctgacactctttaagggaattagctgcttatatattcatctctgacatcgaactttgaatccttggagagcaggaaatgtgcctgactcaccttgtatctgcagtatccagcacagggcctggcacaagaggaggcacttagaaaagactggacaagaatacaggttttctggctccctgttggcccacgggccccctgtcagcctcctgccttgatagaatactccatgactgaacgaacccagggcatctggtgcccctcccccaccattctcccacatctggctgtattaggtgtgaatgaatgaaaaccataaggatcccatttgctctctccctgcttctttttaagctgcatgcatttagaattaatcagccaagcatgactgagagttttgacaaactcaaaatactagagaaagagttcaagatgttttgatgatcctcaatgcaaaaatggttaagccgttggcctaggcatttgttgtatctgaagtcagtgaagttttggaccacagcagcctgcccagtctcctaggtgaagtgggagatgcatagagggacactgagggtttgtctcttcttaaccccaggattcacactgcctgggcagtagtcagtaccagatggaccagaaagtcagaatgttgagcatctttccagcgtcagagcttatgcccttggctcaggactggaatcccaaatgctgcagtttgggacaaatctgataccactcactgctcccagggtttatatttcagttctggaagttcatgatgacaggtgtacagccaggcccagctggatgagagagtcaagaggtcacatgacttaaaaattgatgcacagccttctcactaagaaaacaaatgaatttctttttttcttataacaaaaacagtaactgcttttctgttatggaaaaataatcatagaacgatttattgggaaagaaatccgcttcaattccaccgtgcagag

SEQ ID NO: 58050 - DNA, 942 bp, Bovine  19866881551402
  misc_feature (1)..(1): n is a, c, g, or t
nccttttaggtagcttccatttgatgtttgcttctttgggcagtagagaattaaacagctgttataagccgagccttgtgaaagtcactcagtcgtgtccgactctttgcaaccccatacagtccatggaattctccaggccacaatactggagtgggtagcctttcccttctctgggggatattcccaacccagggatcaaacccgggtttcccgcattgcaggaggattctttaccagcttagccacaagggaagtccaagaatactggagtgggtagcctatcccttctccagggaatcttcccgacccaggaattgaactggggtctcctgcattgcaggaggattctttaccaactgagccatcagggaagcctgtggttgcaaagaggaatcaaatacagctatgtacttttgggaggtgacatttgggaagataaggttttttacagaagtcactaaccctaaccataatatatggaatgcttcacaaatttgggggtaattttagacacagataattaccatccagcagacatgagtgagtaaaaggccagggacagttacaaggaatatccagaggcagcatgctgcattggcaagagtctcaactctggggtgaaagcatggttcaaaatctggttctactgtttcctagctgtgtgacctctggcaagttacttaatctctctgagcctcaggctcaagaaagatatatcactggaacaagactttgaagtttatacaagatttgagcatctagaaatattaaggaaagaaatacattaaaattattagagttataagattatgagtaatttctttaaacattttttctatgtagggggacaaacacacatgaaaacaatagcaagtatttctgagttctagagttggcagcagaatgattttttatttttgtagggagatttcttttttt

SEQ ID NO: 58051 - DNA, 1423 bp, Bovine  19866881567930
  misc_feature (1)..(1): n is a, c, g, or t
ngggttttttatagaggacttcccctgtggctcagatgataaataatctgcctgcaatgcaggatacccaggttcgatccctgatttggaaagatcccctggagaagggaagagttacccactccagtattcttgcctggagaattccatggacagaggagtcttgtgggctccagtctcatggggtttcaaagagttacacatgatttagtgactaacacatgctttttacagatacatggaaagcgttaaaggaatcaacaaaggatggaaaggtatctagcattggcaactgcaggaagctttttccacccctgggtctaagggagaaggggagaaagcagtaccattgaagcttggtgggaactggagccacagaagaggccccatctgccagggaatgtgagaggacagaagagccagcccaacaataggacatttgggatgggctaacaagcctgcagacatggatggtgaaaaagttagtggaatgtggataattattattaacttactgaccacagatgtagtagtaagttttttgtcacccaaatatcattgactggagatgtatccatattcatttacataaccgatcgcattgactggagatgtatccatattcatttacataaccgatcgctggcaacgggtgttagtttctgcaaaaatcccttggtcaataatgttttaagaggtcacaatctattgggttggccaaaaagttcattcaggtttttgtgtaagatgaaacaaactttttgcccaaccaaatatatttgtaggctagggagatgtagacataagaattacagcaacaaactcagaatctaagaaactcagaatcttagaattttaaactatatatagtcatggttaacttggaaaaaatatatatttgggtgaaactgaggctctgctttccacctctgtggcccactgcattttcctctgactcaacacacaaagtttgctgagttagtttatgtgtgttgccttcttttcagctttcctcagatgggacacttgaaaaccatggtggcaggtttatttgcttaaacatttcctttgaatgagcccacccagagcatcaaggcttttgccttaggtggagtgcttctaccccagctaaagagaaataggccatcagaccccaccacgagccccaaccctgatttcattccaggaacacccaaggaactgttgttcttggggcttgggtccccatgtccttctcaaaaatgtgcttggaaaccacaggggtgcctggatgatggcccagaatgtgtggaatgtagggcccaggattctgtggaccaaaaaatggatgcatacagtcagatgtctctgagagtggggcctgcatagagaaaagagaaagatggccaagagaagatgatagccatgcccaaagccactacca

SEQ ID NO: 58052 - DNA, 1112 bp, Bovine  19866880347103
  misc_feature (1)..(1): n is a, c, g, or t
ncaaagaatatgttgagtctggagaagatggttgaagagagactgctctgtttgggtacatagtaagaaatagtagagttcttgtgtaataatataccttattggtgctcatttgtgggacatgagaaggatggtgacagtttgatgatgaagaaatgccatagagttagatccccatttacaagacaatgttctcgaagaactgagcctagatgtttgcagtatttaacccataaatgataaggagaaatgtcattatgatggtgaagggagaaagtggtatttattaatataatatgtttaaccaaagtgcctcttacgtatactttatagaataaaagaacattttgacaatgacacatgaggttaaccctcacaatagcattacacaatgaggtcctaaatgtaaattgtccagaaggcattttattagcttcctaagcagcacctggtccaaacaacgggaatcccttcaaccgtcattccagagatgatcttagagatggccagcatcactgatcatattcttcttcttctttttttggccatgccacaaggcatgcaagatcttacttccccaaccaaggatcgaacctgtgccccctgcagtggaagctcagagttctaaccaccggaccaccagggaatcaccaatcatattcttctttgatcaaagaagaaagcttcagctctctgacatcttcagttctgtgaaatgaactgcattgcagtccatctcagtatctaaaaatactgtttccagggttaaaaaccaaggaacttgagtgagcttatttgaaaagcctcccattgtctttctgagaaatgtggtttcaccaaatagcggaattttcagttgataagggaatatgtcagtagtttagtgaccaatcttccaaaagttagtacatgtatttcaagcagaaataggtcagcaggaaaagaacctgacctaaagactccctctcaagtgctgtctgggattccctctcatgcctaggtataatctggccaagctggacattctggtggactggagatttttagaaggtcaacgactcagtcagtaaagaaaccgcctgcaatgcaggagatgcaggttcaatccctgg

SEQ ID NO: 58053 - DNA, 2610 bp, Bovine  19866880543389
  misc_feature (1)..(1): n is a, c, g, or t
nggagccctccagaaaggcgagttacatctgatgtgagaatttaaacctagagttaatacttgcaatgaaaaataattatattttctcctttgtttaatttgggaaaaaagcttcccacccagggttcatgtgaagacagaattggttcagttattactttcagagaggaaaaggttaaaagtgcttctaagttttttctgtgtcagttttctttttatctcaactgtaagagttactgattgtaagcagctggggtcttgcccaggtcttcagttcaatgattcatacagcttctcatcgtaagaagacgatttggaactgagtttgtgagcagccccctttctttaaaagaatgtgcttagaagaaaggacagtggaaacttctgccccctgctctcctcttccagggagaagagaaagaaaaataccccatgcctgtttatttaaagcatattttcagagtccttgcagagtagatcagaacacatgtggctgttttactttttaattttccttctctaatctatagattgataaatagcaaagctcagggtaagatatcaagagtttccagtttggaaagtctggataaatcaagagttaaaagagagtaattaatgagcaattctttttctttctctaccctcatccttacctgtatttcaggaagataataaaacatgataaaatttcaatcttatcattatcattaaagttcaaggtagctttgcaggcagatttttgggagagggagcatctgaatctttggataatccctttcttctttagggtatatgccaatcagccacagaattgactttttatctcaaattttaatttaaattgtagattatgagtgagccctgtttagcttggataatacattttttttccccctcctttctgggttcccaggaactcaagaataagcatataaagagaatgatttaagatgttttgtattaatatatattgcctttctggtttccaacagaatcattttttttcatatttagatctattttttgtagtcttcatttcattgtagtaatccatatatgtgaaaatataatattatggtgatttctttaatatcttacaaatgccaaaaattgcttagaacactgttttcaaaaataaatattcagtccttttaagcttctctttctctctagctcacttactcttcaaaaggtccttggataaaaccaattgcagcataatgtcataattgtggaagcttggccttcatccatgctgaaacttcatcagaagctgctggtacagggagaaatttagtagtgagcatgtccagagacactagaaatattatattatgggtgtccctctagtattttagtctaaattaaatatctaaaagggatatggagatttcagattcatatttaacaagaaacaaagtggatattaagacttaaatgttgtagtttacatttaagcccagtgctttaattctagcgtgggaaatggacatacaattaagaaaaacccccaagcatatggtcagggcacccatgacaggtatgtgtatatggcagggcaggaggaactgaggcaggggcgtggctagaagagggaagcaggagagggatctgatacgcatgtactcagggcagcaggattcattatactctgctgcttcatgttggtgagtctaagcccacaggaatgaagactctcatgatgaggactggctcagggtctgagctgagcaaaacttaaaagtttagtaaagataatgcctgcagattagagaagttggagaaattaggcactaactcgtccatcttggaagcaacccaggtcagaacaaatgacctgggtgagtgtgtctctgggtttatatgagatgcccttccctcactcattgtcgcctttagtgtccttcaacccaatcctcacaatcaggtcacatagaaatgtacagatattgcaactgtctcaagtgtgatagaacaaaaaaatataattatagatgaaataaagaaacccacatttcatattatttgttttgtgacagtgtgaataaatagcataacattttcaccaaaacagaaactagtaagtcatgataaaagtgccacctcctagagatatttactgatactgtactaatccatcttctgtcaattatgaagattgcattatttggggtagaggatgttgttgtttatatcttttgatgttattgaccagaccgaatgtaccccaaagaaagtatatctctataggaaagactcctggtggtcataaattccattttttcttcttgaccagatataaaaagcacattttgcagctttcttcaaagctgggatggtgctgtgtgactgagtttggtcacaggatgtggcaggagtaaggtacatagttttgaatcctggtgataagagccccgtgtgctaccctcctcaccttttcccatgtacagatgtgaaaaaatgaaacacattgttgatccttggcttagaccacctcacagccatgaaattaaaagatgcttactccttggaaggaaagttatgaccaacctagatagcatattgaaaacagagacattactttgccaacaaaggtccgtctagtca

SEQ ID NO: 58054 - DNA, 2787 bp, Bovine  19866880580668
  misc_feature (1)..(1): n is a, c, g, or t
ncccataacagacaacatggcctctgccggccgtctccaggactacctgctctgatggaagtcagctgccgtgtctagaggtattcgagcagcactatggaaatgtccttatgctgaggaacaaagacccccccccctgcctgctaacctcaaacactaatttgctaggttcgtgactcaccttggaagctcaggctcacgctccaatcaagcgatcagatgactgcagcctcatgacaaaccctgagccagaaccaaacaaactaagctattcctagattcctggtccagagaaactgcatgagacactaaacgtttattgtttcaatccactaagttttaaggctatttgtcacattgccattaaaaatacaccattctttgaaaaaattatttcataaagaaatctgaggaacactgggtgacataaaaataagtgtctttcttgtgggacttctcagagattatgcaatgtgattctccaaaaaggagacactgcatgcaggatttcccaaacacacaagtgtgaaactgtttgaagaatactgagaatctgagaaatagtcctttattacatgtaaatcagtgcttctaaaatacttgccaaaacaagtcaaaaccaaatcactctcttttctgtctagcttgttgttctgtatattttacagaaatattttaatatagcttatgtatgagctttctttcagtggtaaatctatgaattatgttgctgacatagtaaaattcctttacttcgtagaagcatcaacaactggcattttctttaaataccataactgtgttcaattttatacaaagaagttgcacatggagccacacaagtatgcttactgggaaaattccattgatgcgactaggttttcctttgggatacggatttcctgggattgttccacaagaagatatcatcgcatgaggagctttgcagccccctttgaaagcctgtaacataacaaagaggaggattgttaaaaaacataaaataaactcacaaaatttagcattctggatattgggaagccctgctaaataggatggattaaggaagagcatcacattcaatctgttcatacatcagtcagcacttccactggtgaacatgactaaaattagtaagtaaaatcacttcacttaaatggaattatttaaatggtaaccgaatgtttttatcgttgcaactagtagactcctacccaaagacctcttcacgatggattctataaattgtgtgcaaggactaaatacgactgggctgcagctcctgggggaacagtccatgccctcctcgagcaggtttctaacctctaatccagtttccacctgtcaaaatcctaagaaataactaccttgaatgacgaatcaagttttctagacttgggcaagtacgacttctcccactattagagactttaaatgaacaaactggaatttagccttataattattcatcttttctaagtttgatgaaaataagcccgatgacaaataagtcaagttcctggtggtggtttagttgctaagtggtgtctgactcttgtgaccccatggacggtagcccgccaggctcctctgtccattggattttcccaggcaagaatactggaatgggtttgccatttccttctccaggggatcttccccactcagggatcaaacccatgtttcctgcatcagcaggcagattctttattactgagccacctgggaagccccattattagataacaccccaaagcataaaatgtacatgaatccatactgatatggatgtgactgaaaaaataaatgatgaataaaagaacaatatagtatctttgcaatgttcctataaatttaaaattatttcacaatcttaaatttattacaaataatgtttataaagatatttcataagtagaaatgttctcaacattttgctaagtatgctgaaaaactgaataaacaatataattcctatttagaaaatgtaaaggaaaatatatcaaattaaacccctcaaatctacagcaaacatttttttttttctctaagaatgacaaatgttaaaatgttggtaatcctgagttgttcagattacaaagaggcagtttcacagagacacatggaggtagaggtgcaattggcatgaagtatctcttggagggcaatttggcaacatataacaactgaaaatgcacttattattttacttagagggtttcctaataatttttcctacagaaatctttgtacatatgaagaatgccctatgcacatgaaaactcactacagcaactttctaatatccagtgtttgcaaataatctaaatgtccaccatgatgactatgagtatatccacccaatagagtacgacatcagagaaggcaatggcaccccactccagtactcttgcctggaaaatcccatggacagaagggcctggtgggctatagtccatggggctgctaggagtcggacacgactgagcaacttcactttcatttttcacttttatgcattagcagcagcagcagagtactacatagctgttaaagaggttgattgttgttgttgaccggatgccatgatcttagtttcttaaaggctttatatacaccgatatgaaaattcctccaaaatacattgtttaggggaacagcagtaagttgctaatggtctatttggcttgattacgatatatgtgtacgcacgctcgctctctctctctctcgctcgctctctctctctctctctctctctcgctctctctctctcacatacaaaaa

SEQ ID NO: 58055 - DNA, 1132 bp, Bovine  19866880667461
  misc_feature (1)..(1): n is a, c, g, or t
ntgaaggcgacttagccagcagcagcagtagcagcagcagcatgtgattataataaatagctataattacatttataaatttataatagtacaataaggcttcccagatggctcagtggtaaagaatccgcctgccaatgcaggagatgcaggaaacttgggttcgatccctggatcaaaaagatcccatggagaagggaatggcaatccactccagtattcttgcctatgaaggaaagaaatgtatctatatattttgcttgcatttcttataaagtattattggaattattaaagtactctcacatagtagacatttaataaatattttggggtttgaattggaaggtagtaaatagaaatacaaattttttcttctggagaagtaaattatgatgcttaatttaaaattacattaattacacttagtttgcagatggcagcacttaagaaacaactagaagacatatgcatttctgtgagagggtaaatttttttctaataatattacattgaatataaaccaagaaatgaaacgttttgtaagaaagctttgtaatccattccaagacaaataaaggaagaatgaaggctaattaaaaaaaaaaaaagaaacaagatcttttcttgtttggtcctcattttaaaatcaatacgtctgagttaagggaaatttttctgcttggtgcaatcaattttacttcctaatatgacatagaaattaactttaggtataacctttccacttaattacaaagtaaaaggatttaaggaaagtttaagaacagccagagttaatctttaaccgaggtaaaatagcaatccagtcatgtggttcaataattaatgaatacaggacatttaaataaatgtggtatcttgtttgctttaatcatgaatttaaaccaaatgactttgtatgctatgatatcagatacttagaaatttaactaagtatgtcccatccaaagagtaaatttaatttattttattccctattcattatctttttttgtggtcctctgaaatgaatcttttcctcattggagcttaatggtataaatctttgtttaagcctgttgactctttttttgtaagtagtcttgaaaagagtgtaaagaatcagaagaga

SEQ ID NO: 58056 - DNA, 1334 bp, Bovine  19866880679425
  misc_feature (1)..(1): n is a, c, g, or t
ncaggctcctctgcccatggaattttccaggcaagaatactggagtcggttgccatttccttctccaggggatctttctgacccagagatcaaaccagcgtctcctgtttggcaggtggattctttactcctgagccaccagggaagcctttaagatgcatatggggttacatttcggtgagaagcatttatccgtttaaccgtttggtgcttttatccggagctcctccagcttaggtttttgatccctacctgcagcattgagagctattttccaggacccagcaccacttctacataagttttgttgagtgatgtcagagtcactccaggaagcccactgggcagcctctgcgcctgggagtggagagggagagagtttaagtgagcctcttatccaaacaaataacattttgttagcctaatatgtttcagcctattgtactttgaactcctgtgtacaactcatacatgcattttacaatttagtacaaaatggacatccaggaacacagaagggatgtgactaatcttttaaacatgagaaaatccccacccaactcttcatcaatttctgatctgttttggtattattattttataatttaatatccttgtttattattatgtacagaattcaaaagaaaaattctatgatgttctgttcacaaaacgaactggaagatgccaaatgaaaagggacatcattttcagaatatggttctttatgtgttttatttcaaatcctggttatggatcttgattgaaaaatgtcaggcatcgtgattgtgggttcgttctgagaagtgagaccaccagcctgacccctggtgcttcccaatgtctggagggctttcctttcttccttttaaagtccaactctgtttgacttgcaagtaatgataagatcagcatttgaggtatggcagtatgcctgaagggcagagttcaatattttgtttcatggtaagaagaatagaggtccacatttattttcaagtagcctaaggaaatcagtaaattataatttttttgactttttaatttagcttgccttgattgaggtgaaagagtgactcttagaaattatttttggtaaatatcttgggtacttgggtttttttaattacatagaaagtgacacatacgtttatttacttaaatgtattttgcattgatgatcattgacaaaatagtaaaatattaaattctcatctgaaagcaaagattattgatagtaatgatccctcattaggataaatacctcagtgttaaaatatttctatacttaaattggcaaagaaatattttatgaccaacacttgcaaatctta

SEQ ID NO: 58057 - DNA, 1007 bp, Bovine  19866880768649
  misc_feature (1)..(1): n is a, c, g, or t
ncccgggccgggccttgctgtccccgggatctcgcgggggttgcaggggtccccgcccgaagaagccatagtgctggcgaaccgcgggggctcgggtgcccttcggccgtgaggtctggctggatccgttgcaggacctagtgctgcaggtgcaaccgggggatcggtgcgcagtgaccgtgctagacaatgacgcgctggcccagcggcccggccgcctgagtcccaagcgcttcccctgcgacttcggcgcgggagaggtgcgctattcgcacctgggcgcgcgcagcccgtcgcgggatcgagtccggctgcagctgcgctacgacgcgccgggtggggcggccgtgctcccgctggtgctggaggtggaggtggtcttcacccagctggaggttgtgacgcgaaacctgcccttggtcgtggaggagctgctggggaccagcaatgccctggacgcgcggagcctggaattcgcctaccagcctgagacccaggagtgtcgcgtgggcatcctgcctggtttgggcgcgctgcctcgctacggggaactccttcactacccgcaggtcccgggctcggccagcgagggggacagccaggagcccctcctgatggactgtacagcattccaggaactgggcgtgcgctaccgccacaccgccccaagtcgttctccgaacagggactgggtgcccatggtagtggagctgcgatcgcgagggtctcctgtgggcagcccggctttgaaacgcgagcacttccaagtgctggtgagaatccgaggaggggctgagaacaccgcccccaagcccagctttgtggccatgatgatgatggaggtggaccagtttgtcctgaccgccctgaccccagacatgctggcagccgaggatgcggagtgtgccccagacttgctgatcttcaatctcacctctccattccagcccggccagggcttcctggtgagcactgacgaccgcagtttgcccctctcctccttcact

SEQ ID NO: 58058 - DNA, 2595 bp, Bovine  19866880892641
  misc_feature (1)..(1): n is a, c, g, or t
naatactggagtgggttgccattcccttttccggggtcttcccaacccagagatcaaagccagttctcctgtattgcaggcagattcttttcccatctgaaccactaaggaagccccaagctgcatttaagctgagccctaataggtgagaaggatttagaccaaggaagacttgggagaaaatgagacactcagaatgaacagtgtgggtcatttctgccaaggcctgaggtagaaaagtctcacctcttcagaactgaaagaagaccagagtagctgaaggaaagtgaagtagagggaaagtgagtggaagccagatcattcagagacattaaccctcttaacaggcttcccaggtggctcagtgctaaagaatctgcctgcaatgctagagacattggatcttccctgggtcaggaagatcccctggagaaacaaatggcaacccactccagtattcttgcctgggaaatcccatggacagaggagcctggtcggctgtagtccatgagattgcaaagagtcagtcacaactaagcatgcacacaaccctcttaataaccatggattccatctaaaatacagtggatgtcatggagagtttctgagcaactgaaaacattcatctaatttacttttggaaatctatagagaactgatctgggcatctttcaagctcaagtaattggataaacggcaaggctttttggtggtgtggggatgtaatttggggaaaatgaaaagttctactttaaacacagcaagactgagatgtttccaaatgaggcggcaggtgtgcagtttcatatgggatctaggacttactgaggtctgggcccattttgaaatgtgggttttattattatttatatatggtgaggccaacagattagtctatgactgctattaaaaaggtagtttgggtggtcctggtggtccaggagttaagacttcaccttttaatgcagagggtacaagtttgatctctggttggagagctaagatctcacctgcctctgggccaaaaaaccaaaacattaaaaaaaaaaaaagtttgttactcacagtccccaagaggcaggagtacatcatgtcatgtggggccatgtggagacgcaccagggttggggaaaggggaaagcatgggtaggagcctttactgtttcttttgcacatgcaaggtggagtaggcaggcttaggacaggccagtttgaaaattttcagcagtctctggagaacacggctgtctctagcagtctggtacctggccctgggatgattaagcagaggagtatgcttcctagagtgtaagaacctgatggaggagttggtaaagagtacaagctctggataagttgctttgcatatgaaaagcctgtgactgggagcaagaccccagattccagaacatcaagaatacagaaaatcagggaagactcagtacttgcttcctatgcagggggcgcaggttcaattcctggttggggaactaagatcccttatgccacaggatgtggccaaaacaaactacagaaaatcagaaaatatagattgttaatctaagactggaggtatgaatttgtaagtggcatctattatgtgtttatgagggcaggggtgctaagtaaaggttgagaattattcactatcccagatacctttgtgctaagtcacttcagttctgtcctactctttgtgaccctatggaccgtagcccaccaggctcatccatccataggattctccaggcaagaatactggagtgggttgccatgccctcctccaggggatcttcctgacccagggatcaaacaggcgtctcttttgtctcctgcattggcaggcagattctttaccactagcaccacccgagaagccccttcccagatacctttggtaagtgctaaaaatgatatctgaaagactggtggaaaaatactttttgttgctttttttcccccctccactagaaaagagtctggctgtagggagcttagacaaagaaattgcaactgctttcttgttgcccaaactattcttactgatgttttagcctagatgtgtgattgtgggtagaaaaaaataaaatatttacccagtatgcatataatgaacttaacagctgttgctgcaccttcatttggaatccgatagctgtttctaaaagagttaagtggtggttcagctaatcggtaagactactgccaagttgctaggtattttaattaaaatagtttaaatgaaaggtggtgattgtcaggtctgacaaagtaagattctttcctgactttaattaaggtgcaaagaaagtattgttttaattccccaaagattgtcggaggtagtttttatgctttaggtacaatttcagctgtactgaaccagaaattttcctctattgcaccaaaacatctctaaattgtaggtatttaggttttagcttctaaaggatagaaatctgtaccatatcactgatacaagtaattttaaaagaattcctctgcatagtgtactatttgatttgtttattttaaatgctatataagatacagatctaccttctgcttttcaaatgcattgaaaatgtttctttt

SEQ ID NO: 58059 - DNA, 1598 bp, Bovine  19866880924164
  misc_feature (1)..(1): n is a, c, g, or t
ncatgtttgatattaactctgggtcatagactgaatctctgaggtcaagtagtcaggcagtaggatgaaaaaaatattaccagatataaactctgcttgattctatctttacatcatcttgttagaacagaggttctcaaaatgtgcttctgaatcagatactctaggggtggggccttttaatcggtgtattaacaagccctacgggttattttgatgcatgctaaaatttgagaaccgcttctcaagcaatgtagacttagctgagtcagtcaaatcagtgttaaaaaaaaaaaaaaaaagaggtcagaattccaggcaggatttagaatttagaatctaagtcagtgtttctcaatctttggctgcatattaaaattactggaggagttaaaaaaaatagcaaatgcttgggtctcagctccagagattcaaattcctgggactggcttgggctttgggatttttaaaaactgtccgtgcacttttgatacctgactgggactaagaaattactctctctaagctataggtagtattcaggaaggacggtcagtgttttcattttcagagtttgattttctggcactagtagctttgggcaccataaggagataatgagtgtgtatttattccactaaaatgtaagagtaaacattacttaatttgctgttacttggaataaaatttggcagatttcattcaaatgactggattcagcagtgctaaaatgttattaagagttaaactagtctcagaaataagagttatgaaaaaagtcaatattttttcccttgcagcttcacagtgtgttgaaattgtgttgcgtgaatatgcatactctttctcataaaatgtgccattaacctggcttttggatcagcatcagtcgatgtcatctttgacacatccatcattgttctgatacaagtgatgagactgcacattttttttccctaagattttttctgatgtggaccattttttaaaacatttattgaatttgttacaatattacttctgttttttgttctggatttttgcccacaaggcatgtgggatttcagctccctgaccaggggctaaactgcaccctctgcactggaaggtaaagtcttaaccactggaccaccagagaagtcccagtggaactgttcttaaagatcagtttaccactgtcccacagcaaaggggctccccaggtagctcaaatggtaaagaatctgcctgcaatgtgggagacctgggttgggaagagcccctggagaagggcatggcaacccactccagtattcttgcctggagaatcccatggacggaggagcctggagggctacagtcattgggtttgcagagtcggacatgatggaacgactgtcacagcagaagcacccagtggctataaagctgtgtggctggcatgcctttctgtccccggcggctccctctgcctccctcatctccctctggtctgctgtcttgacccaaggctgatcctctcttcagggttgctctgtcttgccttcctggtccctacctatgcgcccattactctcttccctctgatgtcttatcagttaatctcagtttcctcaagt

SEQ ID NO: 58060 - DNA, 1160 bp, Bovine  19866880968280
  misc_feature (1)..(1): n is a, c, g, or t
ntgtatctatggctttctattgaatggcaatagttcactatacaaatggaaacaaagctccaacacattacagggataaactgatttacatgtccagggcttttattcaggttatctttagctggatttcaaaaccacaaaaagaaatttatcaccactgctttccttggagcataacgattcatgttttttatgttggaagttgttttatcacttatttgaagaagtcaaatccattaacccatctcatcaggcaactgcatcagtggagaagtaggaccgtgtggtctatgtgatttctttaaagaaagtggtgtgttttgttaagcgtcatatccaccgccacccagtagggttaaccgcaattcttgcagtgataaagatttctagaccacctgggtttagtagtcatgctcaactcttttagactaggcagacttgaaaaggagaaatcagtgaaccaagtgcatggaattatttcaaaggaacaaatattagaaacaggtgtgagatactccctagggaaaataaagcattaattcattctaactggcagtggaccatgccacatttcctgaagaattagctgcctgaaaacattttgataaaggagttaattatacatgttgctagttatttttcatttccggcccaatttttctgaaccataaaagtgcattaaaaacttttatgcaattatgaagtctcaaaaagcatttttattttccatctatttcccagtaattatattttctgagcatctgtatatatgaagtgaattttttattatatggaaagcttataatccatgttttatacttgtcctatggctcaaatcctacagtaaaatgtatagcatcatgtatatatctaatgtttagttttatgaaattttttacccacttgcttcattcctgaaaggatttgaggttgtggcattgaggaagttgcttattgattaccttagttttaactgcatcacatactcttttaatatttaatttttatatgggaaaaatgctcttattttgccaaaaaattattgattaaataattacttgtttgataagagcatagcagttataatcttataatgtcaataaaacattaatcactataaatgtttaacatcagaatgtttaactatctctatggctcct

SEQ ID NO: 58061 - DNA, 1336 bp, Bovine  19866880996074
  misc_feature (1)..(1): n is a, c, g, or t
natatagtattatgagcagaataaggaagctttcaacaacttaattgagaaaaataagcccttttgatggaaacatcacattttaaaatccataaaatatagtattataaaaggcaaaaggacaaaaaaaaaaccacactaaaagcaataaataagaggaaggttattaaaagtaaactgaagagtttctgggtataatggtcttttgatgggtctacttggctaagctacaatgcccaattattcaatcaagcaatcatttagttgctgatgtaattcaagttcaaataagtcgacattaagtaaataatttgggtcggcctgattccatcagttgaaaggcctttaagaggagagatgaggcttaggtaaagaagaaactcaactggtagacagcatcttcagctccagagttctagcctgcctgtcctgacagcccgcctgtcaatatgggacttgtctaccatccccaggactacataagccaattccttgcagtacatgtcttaatacacatctcttactgctgttccttctctgattgaacactttctgatacaaggcatgcaaataacaatgttaatgcttttatataaaacatctatctcagcccctcattttcagtggcaaaggacttgctataattgcatcctagaaaagaaatttcctaagaccatggacattttaaaaataaatttacttaaaaccatttcggagagctttgtgttaacaggggttgaaaactatatatttaaatattttaaacaaaacaccttaatactttgtaatcaggaagccataaccaaggaaagtgttttttaattcatttgatgtaacatataaacaacagccaaataagaaagtttcagcagagtgtttcaggtcattactttcataggttttaagacaagtacctaaagtgatagttagcattcctagcttatttgtttatgcaatgagagccattaatcattccatttgcgtccaagtatttgcaattgaatctagaactagagtgctcatagagtatatacttgaagactgaccctgtggaatttcttttcttactttaacaaacaattcagttcagttcaaacatttagtgaatactcattagttactaggaatacaaattctttaggaataagctttggttatttgcctattgaactcgaatataaaatgaatgtcaagattcaaatacttacacgactgagaaatgttacaaaattagaaagtcaccattattcatattctgaaagtagttttcttccactgacactcaagtgaaactatttctaatattttcccaatcttaaaccatacctctgtcctt

SEQ ID NO: 58062 - DNA, 1877 bp, Bovine  19866881120205
  misc_feature (1)..(1): n is a, c, g, or t
nctgaaggagatcgccctgggatttctttggaagaaatgatgctaaagctgaaactccagtactttggccacctgatgcaaagagttgactcattggaaaagactctgatgctgggagggattgggggcaggaggagaaggggacgacagaggatgagatggctagatggcatcactgactcgatggacatgagtctgagtgaactccgggagttggtgatggacagggaggcctggcatgctgcgattcatggggtcacgaagagttggacactactgagcgactgatctgatctgatcccctaatcgtgtgattggagtacctttttttaataacactattcagtaccatggacttcactagaagtgctgattgtgacataacctagcactccaactgagaaattacgattgttttctaacttttcaagcagtgtgtctcccttatttgtaaatagcctctttttatatagcctttctgaggaaagtagaatatatatattttttaatagatgaacatattgagagatgtggataagaaagagcacataggagaacttagttcttcaattaaagtaattacattgaaaaagcctagttttaatccacatagttgttaggacttacttttgattaagcagatttcatctaatatttatattaagaacatttaattacagtaccccccacccccaaaaggcagattctggcatgaaaatttctcatgttgaaagtagaattattattttttattaatagaaaatggtggctgttcacccaggagaagtggtcaatatactcaactgtttcaccttcagtaaagacaaactagttgctcttgaactgttagcttcgtaagtatttcttcttctttttactcagaaaaatttggaaaacttttcaaacgtcttttaactcattagtgtatgttaatgtgtcagaattatattggtaaatggaactaatgaaatgtatgaaagcatagagctgaattcttatatctaagtagctagtgtgctcattacacatgattataaacttgtaaaattagtggtgcttattgagtttagttattgtgatttggctgcgtatcggtgacttgctttgccttcccactgggaataacttgagaggcttgttggtaaatccagaggacgtatggctggatgggttttccacgctctgacagtgtatgtatttttttgcttcctatacacttattctctccggatcttgttttcctcaattgtgaaaataaggatcttatctatgtggtagggatgcagatttttaatactacaaaatttaaaacacccagcacagcatttgagaaatgattgtgaaataaatttgagaaatgaatgttagagaaaaggaacctactctcctataatgtatttatgagagtctacaaattgctatgtatttccagcacatgcagtttttaagtccctaatatatttataaatgaccacaaaaacacaaatttaaaataaaacataagataaaacttcatttttagatcaaccttgatttttatgcatttaccacaggggtttgttttattgccattagttctcctgacacagacagggtagatttgcaagaatctcaaaatagtgattttttttgtttttaatttgaaatattgctttgttactttcaagtagccagataaacatcattcagttactatatgtaccatatttatataaacatgttaattacactcatcaatcaaaactgaataaccatactcttcttgttacatcatggaaaaaagcttactcacatatatctgtgtataaatgtggtgtgtccaggttcttaaatgaaaagctaaattgtatttccttgggtagaaacattggttgatg

SEQ ID NO: 58063 - DNA, 887 bp, Bovine  19866881197485
  misc_feature (1)..(1): n is a, c, g, or t
ntgagttagtgatgccatccaaccatctcatcctctgtcatcatcttctcctcctgccctcaatctttcccagcatcagggtcttttccaatgggtcggctgttcgcatcaggtggctgaagtattggagcttcagcaccagtccttttaaagaatattcagggttgatttccattgggactctggtgtttttaagcctgattaatattccattgtatgtatagaccacagtttcattatcaattcctcccatgatggacatttgcattgtttccatcttttggctattgtgaataatgtttctatgaacatggatgtgcaaatatttgttcagtttctgttttaagtctttaaaacagaagagaaatttgctgggtcatatggcaattcagcttaaattttttctcacaattatttttatgcctttttttattttgtggtgtgtatatttttctttttaattcattggcattaaaccttgaatctaatgaaacaaaacctcacttattttaagggaatgcttttaggaagtaaatatcaaaaataattcctgttggcaaattagcaaatctgttgcaaagtatacataatccacttgtttcattcaaaaaacccattagagcagtcacagaaacaaaacttcatcctgctaagcatccctgaatgtgatgtaactattcttggaatcttgaattaaaaaaaaaagaaaaaaaatcaggccacccaagatacattgaaaaaatttaattattgaaagggattgtaatgaataatctgtgcaggggggagatatttgctattgctagaactggctttcagttgataccagttttttttttctgagcctgaaaagtagttggatagcacaagtctccctttggactcaa

SEQ ID NO: 58064 - DNA, 633 bp, Bovine  19866881247891
  misc_feature (1)..(1): n is a, c, g, or t
ncgcgcacacgccaacttaataagccgagagaccatgcttaatgcttaaatctgtaattttttttaacgttcataaatctttgcaaataggttagggccttgagacatttttcttgggttaggcagcttttggaaacaatccaagatttataataccagaagaggaacattcttcaacagtggcaaggatgaaaagattaacatagcaaatagggattttgtaaagaaggtttttttatgtcgggatttacattaaacaaactagccatgtgtttaccatcttctgtctttactcttagagtctctttactccttttactcctcctggcctagtgtcctcacgttggcagaatcagacatcttgattttaagaaatacacactttgccttactgtacaccagaggatgtgtatcaggtgagaaacaatccaagggaacacctttggtaaaactgaccttttagagaagggacatgtggacacagcggggaaagggaaggacgggatgaactgggagagaagcattgacacatatacgcaaccacgtgtaaagtaggtaactagtgggaagctgctggataacgcagggcgttcagcctgggtaccagtgtgataacctagaggggtgggggtt

SEQ ID NO: 58065 - DNA, 1619 bp, Bovine  19866881263369
  misc_feature (1)..(1): n is a, c, g, or t
nttgctcatttttaaactttttttaattgttaaatttttatatgtttttaaaggttactgtctcatttacaggtattaatattacaagatattggctctatctccatgtcatacagtacatccttattgcctatcttgcatccaatagttttttcatctcccacttcccaatccttatgttgaccctcccctctgctggtaaccactcatttattctctgtgtctgtgtcatccactcattttttaagtgaatacgttagactgtgtggtctggagttctctgcagccctgacagatatttacctgcacatgttcccttaagagttgcacagagtattttacagagtgctttacacaaagccttgcacagactacacatatagcgatattaaatatattaattctgcagactaaattaaatgattattcatgatctctgttatgaatttctcttgcagagagttgtgaatttttagattgccctaggattaaattttctaatgagtagaattgtgtttctaggttgctctgggtcgagaatggtacgtacacaccatctacacagtaagatcgaaagacagtgccaaccgaggcattggcaaacgcagcgtggagtaccggtaccactctttggtgggtcaagggaagccccaggcagctaccaagagccggaagaagagggagatcagaagcagccctccgctggcgtgggaaatcggggctgagaacaatcggggaacgaacatccagcacgtcgccctggaccgcagcagcaggaagcagatccttcacgggagggtttcccctgacggcgtcctcccccgggagctcaacagtcccagctctgaggtcagcctgctcacggtggtggggggcgtcgtggtgggactcctggccgtcatcctcactgccgtcgcggtgaggatgcaccagggcaagaagggtgccaggaggaaggacgcacccaaggaccccggcagccgtgagcccatgatgccctcagtgagccaccacagcgacagctcggaggtttgatggctgcaggggaaacccagccttttcctccagtgcccaagaaaagacaatcaaaaccaacccagtgcttctgttgacagcagagaattggggacttctgtgacaaagctgctcagaggacctgcctgtactagtgaacattgactggcattctgtctactcattcaggcatcagaggacaccttcagaccgtagaccacatctttcctcttgcccagaaggcatcaagtgcatatccaggtgtacacagagccatggtaggcggcgacgaatgtactcaccttaggcattttctctacgcagtggagatgaacctggtgctcacagactccttcagaaacttaacaggagtctcttgttgctatgttggtgtgaatcttgaaggtgcaattatcacactgtttattcattacataacattttagtactcgaaaggttttcatcagtagtcttgaagaatgataaacacattgtttatggtgacaagttttctaataggcgaagacagcatggaattatgaccaagggtagctcaacccacaaatcacctttttttcctacttgagagggagtggaaggaaaga

SEQ ID NO: 58066 - DNA, 895 bp, Bovine  19866881344594
  misc_feature (1)..(1): n is a, c, g, or t
nctacagaggttcatgatacgcattcatcctgtggaccgcctccctcccgagctgggcagcggctgtccccttcggatggtggtacaggaatcccagctcacaccactgaggaagaagtggctacgctacacggacctggacacggatgaccgagaactccgttacacggtgacccagcccccaatggacacagatgaaaaccactcaccagccccgttgggcaccttggtcctgaccgatgatccttcggtggttgtggcccattttacacaagcgcaggtcaaccaccataaaattgcttacaggcctccagatcaggagctgggagtggctgcccgagtggcccagtttcaattccaggtggaggaccgagctgggaacgtggctccaggcaccttcaccttttacttgcagccagtggacaaccagccacccgaaatcctcaacactggcttcaccgttcaggagaagggccatcacatcctgagtgagactgaattgggtgtgaatgatgtggacactgatgtggcccacatcaccttcactctcatacaggtgcccaaacatggccacatgaagctgtctggacaggtcttgcatgtcggtgggattttccacttggaggacataaaacagggtcggatttcctacgcccataatggggctgagtctctgaccgatagctgttccttggaggtcagtgacagacaccacgtggtacccatcactctcagagtgaatgtccggccaatggacggtgagctgcccatgctgagccttcctgcaggcactctggggtcctatctagacgttttagaaaacagggctactgaaatcacggccaatgttatcagggggaccaatggggacgctgatgatttgatgttgactttc

SEQ ID NO: 58067 - DNA, 817 bp, Bovine  19866881425973
  misc_feature (1)..(1): n is a, c, g, or t
ngattcttgcttttctaaatttacagtcagttagggagacaagaccagtaagcactgttcaagataaaattcagaggtttacagaagtctggagatggggaaatcatatagagctaaattagcataagcaaagataactttcttgaggaggtgagactagcgtttgatgtcaaaaaagacagtgtttgtacagcgtaggggaaaaacagatggtttctgagatgtgcgaagcaaggaaagcaaagggagcctggtgtgtatgggaactgctgaaacagagcccagattgcatgttaggaagccgtgggaaatcatgggagaccagtaggtcgggccagattctgatgaggcttttaaagttactgttaactaaagtttgagatttttctggtagctgaagcaaatgattgattgatgaagcagggggtggggaaacattgcactgactaaatgttgaccattataattttcagcgcaacagctgctactgaaattgcagtcattcaaaacgaaaaatagacactgttgttctgaaatagcttggactatttggaaccctggagcctgagtgctggcgatgtggtttcactaagaacatgatggagtgcgggttcctgtttttcttttttttccataatgatttgttctatggattgagaattcaaactgagcaacaatttcacagtcggagttggagtgtgggttgtataaagttgcagaagcatttttccaaagacttgaaaactcctccctactgcctaattgcactctctaactagaatgatgtttaaaaacatcaatgctactttcctgactc

SEQ ID NO: 58068 - DNA, 1136 bp, Bovine  19866881974092
  misc_feature (1)..(1): n is a, c, g, or t
nactagtccctgtgggctctgtcatttcagtgcctctagacatgtgtgtgttcttcccttttcttcctttcttcctttatttcttcctcctgcactcccttccttccttcttttcccttcttccttcctccctttgtttctttctctttttttctctctctctctccatttgtttatttattgatttttacaaagcaccctagtagagattagttaatagaatctatataaactgatgagaactatttgcattttacacttaaaacacattcagtaaaatcatgcatcacttttgtgggatattctttaaaagtataaactttcacatttcatcatcaaaggaaaggcaacaagaaaatattttgtgtttgttagtttctttttttttttcactttatgcttttacttagataccaaccagaacaatctttaaaaagtgtttactgagaaccaagtagagcttaatgagtgtgaagcctatgctaggtgctggcgataaggtgataaaagccacagcccctaaggaactctgaccttaacggagctcctttaatagctaatgttggttagtttccatttcccttttgacttttagttccactgtacatactgaggtttgttagtctcatcccaggttatctctgctgactgttgctctctgctttgaggacctctcctctcaaactctgcttgtgaacttgctcaagaagaaactgtcgaagtctgcatcctctgactccacctggcctgagccatctgctgtaatcactgcaggactatgaccatgcttactggcagctggaagctgtctctcttctggccaaacttagtgttcaagctgttgccctttgattttttgcaatccattaaaattctatgtcctacaacaatgcaaggaaggagctataaatgactttcactgagaagaacaacttcaaaatgacaagtatatcaccattatgtagtattgaatagcaacagaatttgactttgattgatgtgagttgaaaaaaaaattaggcatttcacagaatcaacaggagggctggagaaccaggcttagtgttacatacctggaagaaacaacagcccacatcacacacagaactgatctgctaaagaaacttatttccaca

SEQ ID NO: 58069 - DNA, 765 bp, Bovine  19866882137369
  misc_feature (1)..(1): n is a, c, g, or t
nagaagaaagagaaaatctatttaaaaacaagccagaaactcagagggcacaatggagtctatttagtgttaagtacagaaagccttgtgcttctcaataagccaagaggcattgctttattacagagtagtgtaataacagctgttcataactgtgttccggagtctctaagccaagcactgtagcaccctttactctctgattatctcagtccttaacaagcagaacaataaagatagctctctatgcgctttcccttattacatcatgaggtggctttttccatccatggtcacctagcacaatgcctggttcatggcagccacttgtaattacttgtacagtaaatggcttaaaaaaatggctagccatgtagaaagctaggtaggtaggtaggtagacagaaacaattacatgtaaaggttacctaagaccagagaaatacttacaaaaatatataaagacaaattctcctaattcccacagaaatgggagaggtggaaaaaagacaaagtgaacagaataaacatgaagaggttttgggtttgaagagtgtcagctaagaccataaactaccaacatctgtgaagtcagaagaaaagcatctaaaatattttgttgttagagctctagtttacagattagtggcaaaccttagtttttctttgagtgactccaacttgtttctgaacttaagataatcccaaataattctataaaaaaagaagccaactcttcaggacaaaggatgccaccttccttat

SEQ ID NO: 58070 - DNA, 2053 bp, Bovine  19866880353521
  misc_feature (1)..(1): n is a, c, g, or t
nctggaaggtctaaattctttactgcgctttatacctttcttctcttattgaaacagaggggggaaaagtcaataaattcttcattacagcaatctgatggtaggtcaacaaataagaagggccatgggacactccaaagaaaaattatcaaaacaatgaaatttggtacatgtgatctacttcccaggtaattaatttttcacagatgtatctctcttgtccaatttagtatttatgacattaacctacataaagagtgtgttttgtgcagtatttttgcccaagtattatgttgatttttttgtagtggaaataaaatgttcctaagcgtctgttgctccactttttgacatttcaaatatttgagcacctagatccaaaagtgtttggatatacacaaatagaacaccaaaatattattccagttttgaggggattaggagtggtcatttatttttgaaaatctcttattactgtacaaagagtgtttgacaataacttggttactgccactggcttttattccaactaatgaaaatattgttcattttttatatgatatagatttcaaggtagggagacatgtaagtaaagaattattaatccacagggttattaacattatttccatgcatgaatatataatttaatcttctgtgcccattatatagaaaggaggccctaggcctttgtctcaagcatcctaaagccgtgctaaacacagctgttaatagcattgcctatgccccagaattacaaattgagtctgccttctaaaggcattcaattaaacaaagtgttctgtggtaccgcaatgagaatcactaactataggccttaaatggagtcttttgactatttgccttctgaggaattttgctaatatcctactgttattcaagcaattaaaatgcaaataaacatttaagggtactagattgggagctcagatttgaaaaagatatcattctatactcactgaagctgcttgttttttttttaattggatgcttctttgtagatgtgccttctgattaatactattcacctcagacagtcttttttatggcagatagaacttttgtttctgtgcttttcatactaaaatctgattcttctcacttccatgccagcaagaaatgttcatcaaaaaaaaaaaaagtgaaattgtgctgtgcatgaacatctcagaaatttaaaatcctacaattaggtttaaaaatctctccaggatgtattgaaaaaggaggcattgatgtttgcttgaagataaaggaatagcagcaagttacagttgcattgttttcatcaacttaactcttcacccatgaataaatgtatcataaagtacattaatctgtgaaaaataactccttaacaaagagatatccagatggtgctatggcaatctaaatgttcctaatggaattatgtgatgcttctgcaactgatgtcaaggtatttcatctcatcttgtctgcaaatagtctggtattatctcagactataattataaaagctatcataattgttcaaggaatcggtaaagataaaattcctttcataacacttaagattggtaagaggaatttggatttcatgacattttcagaaaatgatataacaggttgagtgcaattgtcaaatatagtttcacttctttgtttccccatacagttgttccccacaaacaacttctttgtttcaccatacaggagacacagatagacatagtgttatataggatattcaaaattgaaatgtcccatttttttttcctagttacattatattatatacctactcttgtgtgcatgtgtgtgctaagtttcttcagttgtgtccaattcttgtgtcccaccactggagtgggttaccatgccctccttcaggggatctttctgaaccagtgtcgaacccacgtctttatgtctcctgcattggcagtcagattctttaccacttgtgccacctgggaagccccatacctacccttactatctcttttaccagttggcagaagtagacatagactataaggtttatcaatag

SEQ ID NO: 58071 - DNA, 1577 bp, Bovine  19866880385366
  misc_feature (1)..(1): n is a, c, g, or t
ntctttgtctttcttaagaattattgttctgcaaaaagagtgatagaatagggctatttttattgcaaaacaagactgaaatatatcttacatgttcagtcttattttttttttaaagaatatcaactcttttcctattactcaaacctaaagctttatctcagctttgagggaatgtcaaagtatgtgatttggtttctaaactcaagacaggttctggttgagatgcagtggctagcttctccatgcccagacagtgaaggacattgtgcaagcagcaaatagctataagcactttcttgttcaatcttccaaaagcatcacatactttgcctctggttccaaatggtaactctggagccaaaattaacgtttttttgtttgtttgtttgttttgtttttaacccccaatgaagagaattaaatccagtggctatccacctagcctcttcacacacactttattatagaatctcaagctttgaactgtcaagagtttatctctaggctagagacttgagatacatatttttaactcaatggcttatgcatgtttctctgaagaagaaagcatgccgttctttagcttgtattaaaattatttttatttttaagagagagaagacatgtattctgattggaaaatataaaatggaaatgatatttttattgaatttcaagattcctttagcattgggcaattatttaaataattgctttgtgtaactgtgtatctgtcatctttctgccataatagtttataagttccaagtcaatctgcttgttcattctccattgaatccctaccctctaaacacagtgcctggacccataagaggagatccttaaatactttttattaaaggataaattaataaaataaatgaacaagatatattttcagcttttaagtggtggtttctcccagaaatcaatgccatggagacatttaaatgtatagattcagtaagcaggatttcagctattgggagagacaccctagatatctgcagccaatcaaaataagagaagttaaagtaatagcaatattcttaaattttaaaacacagagttgtatttttggatacagaaaataccagtataagaatgaaatagtcaatagaataaatattgtgatatatatggattgtgattgtgggttttacatgtgtcaattgtacatatacatttgaaaattccagattaacattttttggaactcagaatggggcaggaccagctttgctgcaccagttttcatatgctctaaagaaatacaactaatcgttaaaagttagcccaagcaagagaaaattaggaaggcagttctaagataagatagtcttaaaaatatgtgtttcttagtttccttccaatttttatttatctggacttgactgtttatgttaagctctcacccttcactgtaaagttcccaatgagctcagagttggaataggtagtttcttaccagagatcatggataggagatgggtacttctaaaaacagtagagagaactgagataaaaattaaacaaaaagtcaatttctcagaaggagaaaagagaacccaaga

SEQ ID NO: 58072 - DNA, 753 bp, Bovine  19866880431392
  misc_feature (1)..(1): n is a, c, g, or t
ntctacttcccattgccatttcctcaaaacctgttcctcttctgtaaagatatataaaatcaggagaattataccatctcaggcttattttattcccacttcttatttttgttctacaagcttagccatcctgaaaaccctaatggaatctttttttttttccccaaaaatatgaaaagcagaagcgagaaactttacatacttttcaccaagttcaaataatattaaacctctaaacttttgaagcatacaagtaagttaacatcaggattaaaaaatatgctttttggatatgcacttttttttccctcagatgaagtgtaataaataaaccatgtcagatataataggattcagttgaatagtatttcttcaaagagcaagtaaagatggtttttaaattagaattaaatgcatctaattatcagctattatagtgcttaatttggggccagttttaaggaacaggcagtcatttataacacatgtttttaaacaaattgtagaggaatagaaatcactaaattattaacaattctttctagtcttcgaaagatttctaagtgtggcagtagtccctggattttcaatgcctctggatcctggaataaaacaaaatggatgccttggaaaaacctgctatttgttcccttttatcatggcattgtatttaataagcctttagttgaaaacacataatgggggagaaatctgttctgaaatttaaattaatgaagcttttcacagtggctt

SEQ ID NO: 58073 - DNA, 2146 bp, Bovine  19866880436499
  misc_feature (1)..(1): n is a, c, g, or t
natactaaattacctaatgtcagtgggtgtacattaaaaacaatttgtcccctaccagaggacacttggcaatgtctagagacattttttggttgtcacaaggaagtgggtactactggtatataggggacacctgtaaacatcctacaatacacagaacaagcccccaggacaaagtgctaactggctcaaaatgtcaatcatgccaagcttcagaaaccctcccctaaacttttcaccttgaccctaattttccatgaattctcagctcaaaaagaagcacttttccgtggaaaataaaatgttgcatcctggtactgactgcctctcttcctcagtgccacttgatgggtaaagcatttacactagtaaatgtgaattcagaataaaacaagggcaagttatcatttcaagataaaatgactaagatgaaacttcaatagccctaagtgttttattgctttttttactttctctgacaataaacatcatatttacgcttactttctgttttgctaggtgtgaagatagaattctaatgagccatcaaatatcataaaaaaggagtgcgaacaagctcttggctcaaaggtccactgcctgctcatataaggtccccaattcactctggcagtctctataaaacaaatgagctgtagagaaatgctttttgctggcagtatacctataatgtaaaatattttttcaccatgagaaaagtaaatcacacacatagacacacacacacacacatacctataacaaaatatttttcaccaggagaaaaataaatcacacacacacatacatacaagagcaaaactcttattctattggctaaaaaggcaaaatagacacagttcaaagtatgcaagtaatatatttcactgctaaattatttcaagaaaataaatcctgagaacagaaagtgaaatatacaagacttaacacttctaaatgtcaatgaatgatactagttgaaaaaccagcctctcaatatacatcaagaccagttacctggctacaacctacctatgtacatacttatctttttaaaaaaaccgcttcaaaccgaaggatgtgttggaagatattctacttgttaaactatttccatttggccttaggagtgaaatgctgttagtctatcattaaatttttaaaagcttaaaggaaaaggcagaatttaaactcttaagaatttagagtctttgtttttcttttatcaccagccttaaataaaaattcacaaggagaaaggtgccaagacatatttgccattctggatacatttgaaaaaaaaaaatatttagggaaagttttaccaaaccagcatttacagactttacgttttatatttaaatatatttcaaaaaaattttacaggtcacttcatggttaacaaacacggacacaaaatagcaacagaaaatataaattcgaaattttataaaattaatcaagaatataaggaaaagggtaaattaagaataatgtttcttattaaaaataagaaacaagggtgaaataaacacaacatacagttctagggattttagaaatgacccatataattgatttctgttcatttagtaatattttttaaagttgctgaagaattcacacatgcaacagagaaagattaagatgctatcttttggattccgaaagggcgtaagattcaattagactaacattcatgtaccctaactcttttacaagccactagaaatttgggcaaagtctgcataaatttcaataagtgagtaccaaatatgaacttagcacatcccataatcagctaaaatatcccagtctctaaatttagtaagactctagcctttgtctttacattgccttactgaaaaaaataacccagtcctgttaataagcgaataattccctttacctcttctatgccatgctcctcagtgtgtgactctgaggagtcacatatatattacaccaaaacagatctattttctcaggttcagatccattcattcaactgcccgttgggcatttataagaccacaaggtacctcaattcttattcttgctatctctctctacttcattctacgtatatgaatatactgacagccttctatgttcactacctccatgcaagtccaagatactataa

SEQ ID NO: 58074 - DNA, 1341 bp, Bovine  19866880444230
  misc_feature (1)..(1): n is a, c, g, or t
ngaattcacagtttctaccatctgcttctgtcttctgcatataaaaacataatcaagtctggttgtttgggggtgtgtgtgtatgtgcacacatgcatgcctgttctctgtgtttgtgtgactgcatgtatttaattctagaggaggaggaaaagataaagttaaaagaatctattctatattactataactcaatatcaaaaatatggaatgaaaaatctatttttcatgtattcactatcatatactgaatatattttgaaatggtattccaaaagtaagcatttgacatcggttctttttccacttgttaactctatcttaaaactttattccctaaatacagtagtatgtttcttctaggatcatccctttaaaaagtccaatacttctagggatgcttaaagagttttattatgttgtgcctctaattttctcccatcttatgctccagccttcttcttagttcgattgtagaccacatcccaatatctttgtcactactccaacagattacctttaaataacttaattattctccatctatgctctcttctgtatctcagggctagaagcctagtaactctgtatcccagaattcctgagaacaaggcttctagattcagttttaccagtgaaagatactcatgagaattctagcaagtagaagacaagaagaagcctctgttgcaagaagcagcagcaggcataagggctttgcagaccaaagacaagggtttccccagcacattctgattacctgagtcagctttctctggccttcactctgcagcccttcctattctcccatatttaatgattttctacatgaactacttggaactattaacagtttttgtttctctgatggatactgaattctacaaatgtcccagaagaagcagactttgaaatctataatgattttatcatatgaataattgacaaatcttcaccttgtttctgatgagtactcaaaggcaaaagatcaaagttgtgatatcacaaaaggtgctgaattaggcaatttttatttattttttacctaataggagtctaaggaaaattctaatcctgtatatatctttttcatgtagaacttcatcaatatgtttaagtattaattcttgttatgatttactgaaacaagatatgaagaaaaactgaaaacaatatggatatcgggaatatataattcagtcctatttataattgatgatgcactaatgaacagtgctaatcctttcgtgttgcttttatataagaaatgaatcaccagtccaggttcaatgcaggataaaggaggcttggagctggtgcactgggatgacctggagggat

SEQ ID NO: 58075 - DNA, 1300 bp, Bovine  19866880448372
  misc_feature (1)..(1): n is a, c, g, or t
ntgaggtttacacaggggcatgttcaataactattcatcaacgtttgttactacaaaaccatgtcgattcatacaaaggaaaccagctagacatttagccacaaaccaaataatagtgttgtatttactattaaaataaataaattgtaaactaaacaatagcattccaattatgcaacagtgatactgttattaagtagaggaattcactattagtctgaaatttagttgagaatatcatttaatctaatctctccctagtaataccattatttcagtaggaaacaatggctttcattttgatcacttgtatcacagcaaatagaaaatccctcaaaatgataaatcttattgctcttttaaattatctaccatctttagtggaaaggcagttaatacatatcaactcatattttccctcattattaccacacatttcttctcaatcacatatttgtaaagctaaaaccctcttccaaattgatatcagtcttggaatgcatgggtatctcaaaacctccacattgccttaatgttaattgagaaagtaggtgtttacactgatctcctaatgttaaagcacaagctatgattgcggcaacaaacacagagtgtctctatattcatttctcagtcaaaaaaaaaaatcttatcgcttattttcatttatttttagtgtagagcaagcttccaagttagaatgctcattaatatttaataccttatggaaatatatttgtttatggtgatcacgcatttccatttttgttgttgcaaaatgtttaccagtttgtatgagatattatttatgtttccatatttgggttgttaggaattctcccaatcagacataagcataaacaaccaccttgatttcacaattatctcatttgttctgagtagtagaaaggggcagaagttaaaatccttcacacagtactgtagcctaaaattggtagattcccttaggtgactggagaggaattaatcctagtttccacctttctaaaaaaaaaaaaaaagtactagattcttctgacaaatgttgaaagtgtcaatcacttagtactgtctgattctttgtgaccccatggactgtagcctgccattaccttcttcaagggatcttccagattcagtgatctaaccagcgtttcctgcttagacagcggatatttttactgtctgaaccacaggggaagcccctacaaatattaaattgcctcaaatttatttcaataggaatcattttacatcttacctacaaacaaaaaaagaaataacataaaaacacctcatc

SEQ ID NO: 58076 - DNA, 1480 bp, Bovine  19866880452939
  misc_feature (1)..(1): n is a, c, g, or t
nactgggatactggtgggctcagcccgccgggcacagcccctcccgatggggatgctgcgcagtgaggtgtgtttctgcctttgcttcgtcctcttgccgggggagcccgatcctgggggcggggacctaacgcgaagtgcttctaacttgtcaccaccccaccctcccccatgagagagaggggaggtggatatagaaaaagaggaagaggagagagcgggagagggagagagagagaggaaaaaaaagaaagagagaaacacgtagcctactgagcatgcccaggcccctgctagacccacggaaagctgtgtggagattccacttctccggggtttagtcgtgattgggcaacggtatctgagagggttggttccagggccaaaaggaaggggccaaggagtccgtgattaagatgagctctcgctttacttgtgcactttgatctcttgcttggaaccctagaaaagctgcagctcttcgaggaatgcagagacaggcaaggttcacacagtcgctggcattcccccagatccacggtccctgccccaccccttacagtggccccgggatgggtgatcacttcagatcttcacgatctgcccaagctttgccaaaaagatgcaaaagggacccacccagttaacgtgccagtttaagagcccagactcatctattggacaaggtactttggtggtaacgtctcctcatcccttctcctcccccagctttctgtgctctgccctggcatggacatccggagctgaaccaagttctgttcctgtttaactcttcgctctatctcctccttccttttgcagctggtaaaacctggaggaagtgaaacttgatacaaggcactgaccatatcactgggcatgcccagtaggcattgctgagtttggtgacaaaggagttaaatctaaaggaagcttgcaaaaataggtggtagagaagtctgaggtgtgtggcttaattatagtttgagtcctatggacatttaaatttctaaccctattatattcctagtctgggttagttttagagcataaaaagcagacatatttatttcagtaccacaagcctaatagcttcagccttaaatattgttaaggtaagactattttctgcatttcggccctatatagcaaaactgtaagaagtagacaaatttaggagtactaaaataatatacattcctaatctgatatccatttcctgccaaagaaaccagaactcattccttttgataagcctatttatactttcactgcttgtctaagagtctaaataacttggagacaggaataaattatattatttttattgggttcagaaaggcagtgtggtcaagtaattaaatgtgtgggaactagaatcaggttatctgggcttgaatttcatctctgccatgtagcagctgtgacccttaagtaaaatgcttaatcttgcaatgcctcagtcacatcatctgtaaaa

SEQ ID NO: 58077 - DNA, 2064 bp, Bovine  19866880463169
  misc_feature (1)..(1): n is a, c, g, or t
natgccagtgttgtcttcacttcaagttctatttctgctcctttgtttagttttctaagacacctcgtaggatatcttcaagattgctgcaagccatttgatttatggttgcttttctcatgacataagcagtagcctgggaaacattcctgttctgtcaacataaagctctttgcttcattctgtgagatcaggcacaccaagggcactgaaatgtgtgaagtgcaacatctaggtaagagccctacatttaatatagggagattttacatcattttcccaaagcattcataatatactagacatgggacaccatttgacctatagcttgctttctagtatgaatttcactcatcactatagagtttcttttaatattaagagcaaactgcagggctctggttcttgggaaacagagatgtgctatttttgaactaaggcaatgaaaaaggataatattgttacttaatgtgttttggttgcattacttatattttagatcttattgaatgtttgttcacaagttaaggtctatccaggtattgtgaaagaggaccaaacacaatacagccttttttcccccagaaataagaactagttcaattacataggattctctgacaagagatattctagcatttttctgaacaggcttatgcatgatttgatatgcaagaagatgggctccgaggatcctttcagatacaaatggtgcaattctgtataggcctattgattatgtgaataaaatattatgaaaataatgttttactttgaagattaattaagtcagtttttaaatatatgtttcaatgaaatttcagtctctgttaagatcttcctctctctctttctgtcctctcctatacacatacaccacactacatcacacacacacacacacagacacacacacacacactctctcacatactgctttaaaaatagccatgacatttattttagtcatgtttttactgtataatttattaagggatcaaaaattttacattatttataccatttcctttgaaatatcagaaaagttaagtataaacattttaaatatttaataatatgtaaacagaattcagattaaatatcttgggtaaaaaagagacaagaaacaaagatgatacagtacctgaaatattcttctcacaaagtgttactctgttgtagtatatcaagtacaagccctgtaaagattttgattattaccttacccctttcatcctaatcaaataacaagttgaaaagcatacatcattctaatgggaattcaaaaaaaaatatgtcaatagatcttttataattaccactgcctttgttgtcacattgtctgacacacctgtacactggggactcaattctgtcctgatctgtgtacacaacatacataatgactcagagtgcacttgctttaaatgatgaggaagtttcaaaatgtaacctgctcatcataaaggaaggaacaggcttttcaacaaagatgaagtcggacggttgtaaatagagtcaaagtaaatatctgtaacttgattgtacaagaaagaagtaaaaagatgtcaattcgtcttctaatgcaacataattctaagaattcagccccatacacattctgattatatgacataattctaagaattctcttccatgaacctgctcaatctatgatataaaaccagagtgcatcaagatagtcttttcagaatttttctgaaactgtctctcccttcaagataaataactgaatcaaataaacagtgtccactttattcccatagaaatgctgctagctaaataagggggacacaaaacaagattttaatttggtacttgaccttaaaaaataataaatttgagaaaataatggttatcttttttatttgaccttttgcagatctccattagattattaagagtaacataaatgtttatacaaagacattcaattcactacaattgatttaaatttgatgtcagataataaatcttagtatggcttttttttttctcctatgaaagagtatcagtcctcttgacacttgtctattagaatat

SEQ ID NO: 58078 - DNA, 1444 bp, Bovine  19866880608650
  misc_feature (1)..(1): n is a, c, g, or t
ntaggactttgcataaagctggagaggttcaaggaccacaactctggcattcacacttgggaacccaggcttacttagggagttttgcatgtgaacagctcagttgtgttagtttctcagcatggatttttcatatgctctttgtaccagcagaggcaaatctcaaccaaactacttacatgccttgttcagttgctaagtcatgtcctagtctttgtgatcccatggactctaacccaccggactcctttgtccgtggggcttttcagacaagaatactgaggtgggttgccattttcttctccaggggatcttcccagatgagatattgaacccatgcctcccgcattggcaggtggattctttaccactgagccacctaggaagccctacttacatgactacaacttctttttgtcttctttcccctcagaggagattccttttctctaccctttgttagtcggttgtaagctactgttacaaaagattccaacattttactactttcacatgagaaaggttcacttcttacttatgtcatagttctatgtaggctgatgtgtaggagggaaagatagatggattttgatcacaaaggcatctaagtaccctagtttcttccttcttgcagctctataccactgtagatcctcagggtctttctcattaaggctacagatgagaaaggagtgtaagatttggtactgtagatttttatggatcaggccgtatgtcacaccccaaagcagtaagattgttatatacaaccaaaatagttttgttttgtattttgcccaatgccagccatgtatgattatccatataaaacaaattgctgtcacatttgctcattgcaattttctatttattgcatttagccataattcctcatctaattggtaatgataacatttattgagtgaaaacctatgcctggcacttttctaagcactttatataaatttatctcatataacctttataatgaatctaatgcggttcagtttaattttaaataggaaagtgaggtacaaagaagttaaatcactcatgcaacagcatacaatggtcatgtgtggtagaactgccaaacatctaagactgtgctttaaatatatacccactctagttggatactgtgcattcctattaaagttacataaagtacaacaaacaagacttatggatcagagacagagaaaagattatcacttgagcaataatgtcatcagagtatcaccatttttacacttccttgagctctaaatcccatagggctgtgtgaagagggccagatggtccctgtacttgcaatgggttgcattataggagataaaaccctgagcttaggaaatttgactctttttaaatgagtagacagaaaccatgcctgcctgtcctttgctatcaagcaagacactatatcatccaaggccatcca

SEQ ID NO: 58079 - DNA, 1115 bp, Bovine  19866880629619
  misc_feature (1)..(1): n is a, c, g, or t
ntttttctttatccaacaagtattaagtgctttgcatatgcctgaatcataggcctaagtgatacaacggtgagtaaactcttagaaatagttcctactttcataggaaggtaaaagcctcacattccagtgaggaggctcagtaattaaaaaagtaaatacatgaaaactttaaacaatagtatatattttgaaggacaagtacgttgtactatgagaacttaaaattgtatgaactgaattaatcaaaaaaagttttcctgaggggtgatacttaaacaaaaatctgagagataaggaattagccaggtaaagacacaggagaaatgttaagtcacagcctggtgtaggagctgacatggcacattcaggaaactaagggaaggcccttgaatatggaactcttagtgcagtagggccaggtcctgtaaggccttccaacacagtgttgagaattttagtctttattgaaaaaatgatggaaaaacaatggaaggagtttagtgtggaaggtaagggggaggacatcattatcaaatttacatttcagaatgatcactctgactatagtgtagagaacagattgataggaggccagagaaaagcattattttctgtttgtcactcaacaacatttgttaagcacacacaaatgttttgagtgtctacatgcacacgcaaactgtagactgaaccaggggatagagagggaagcaagattctttttctgaggaagttagaattttttgtaagtttggttctgtatagaactctgaggccacttgtttggaacacttttggttctacctgtaaaatgcattatctgaaccctttatgtggattattatgtgatttctttcagatatgcccattgaatctgtaggcttctggaccccattgatagtgccctatttaactatatgcccaaggaccttgctcaatatgccttccttgtgatatatatatgtagatagatagatagattttaggctttcagtattttaactgctccaataaagggaaatactacatagatataatcttcataaggataaaaaaattaagtagttactatatagggtaagtactggacaaaaataattcaaagattttgc

SEQ ID NO: 58080 - DNA, 2142 bp, Bovine  19866880650019
  misc_feature (1)..(1): n is a, c, g, or t
ncccctgaagaagggaagggctaccaactccaatattctggcctggagaattccatgggctgtatagtccctggggtcactaagagtcggacatgactgagcaactttcactttcacttttccttaactgcctatctcacatggcaaatctgtgagcctctactccacagctgaggatagggacagtattctccttttccttggatgataccatcccattatgagggtattgagtgagtatagtagacttctcagcttacatctctgaatatggaacttttgcccaataaatgagttgaggaaaggccaataaagaccagaaaaatctcagcctagagtaaatcctctgctcagtggaaagggtgggttgaggaaggaagcccctaagttgtttcaacactcaccaggagtttagcctctgctgtttgggggtggagtggagaagaaaaattcaagtggcctgccccttatgttgaaataccatatctttgactgagaggtaaagggagagggaaaccctattttactggttgtactgcctagattgatgtttctattatcatacttttttttttttttttttttaacagtcaagccttattactttaatagagataaacatgcatatcagtggtcagggcatgaaactgagaaagtaagcccagattctaggctgctgataagcctaaaaatgttgatgagagaaacttgtcagagggaccaggcatgttgggggctgtgctcaccacagaagggtagggagaataggggaatgagggaacaggtcatagtcaagtgccatagacttgcagtgttcttaccaaaatttagtaaattttctaaaataaatgcttcttaattttctctgtgtcattagaataattttcagagtctttgaattgttatctttcttaaactttttaccacttgtcaccagtgtttccctgggactgggtctgcagagatactcaagtttctaccatcccaaacatctaaatttgataagagcattcttaatacagccattggagcagattcagattcttgagagatagttgagatatcaagtttatcaacccacaagaactgagccaatcaaagcaaattattttataggttctcaaaaattcaaaaataaatcttgttcagtccaatagttaatttttttgtgagtcaattttgaacacctccaagcatatttatttggcttaaaattgttgatattaaccatatccttccctacatgctaattttctttaataaattatggtctataaaatttatgaatttagtctaaattatcaacaaaacagaaatcatgtatgtggtatataacatactatttgtagactggaaaatacagaactcctgcattagtctttgtcctacccctatgatctaagtgactttgaatgattattctttcaagttatacccttatctggaacttgagatttgcctagatgatctccaggtcagttggaactttaacagtctttgattctggaagataatagcctgacattcaaatagaaatattaaggagagagttggagataagggattagaagcttactgagagttcagaagtagagctttatattaaagactgattgttattgatttttttaagaggaaacaagaatagatttgctttttgtagaaagacaaatggaaaaaagaaaatcatcagaaagacagacacaagtacaatgaaaaatcaggacactttaaaagtctttgaacttaaagatagtttcaagaaggaaaactgttcaaaatggtcatgagacaatccacagcatatttagaaaaaaggacttttgatctaacagttttgcaaagcatatagcagttttgagagtggggagagaagtagtaagtttgtcagaaataaaggaaaaactaaataaagaagaaactaaaactttgattatataagaaaaaggagtgataagactgtcctggagctttgattacatatacattcgcaagcagctagtaactatggcaccccactccagtactctcttgcctggcaaatcccatggacggcggagcctggtaggctgcagtccatggcgtcactaggagtcggacatgactgagcgacttcctttccttttccttccatgcattgga

SEQ ID NO: 58081 - DNA, 4462 bp, Bovine  19866880749163
  misc_feature (1)..(1): n is a, c, g, or t
ntgcttgtgtgacctcggacaccacccctgccaatctctgtttctcatcttttaataagggcagtgcctcgctgatgatgttgtttttgaaattaagtggaataatacttgtgaaatctttaatatcatgaatggtgcataatgggtacaattaaaaataaaaggctgtttgtggccattgcagaggcagtggtgcccagcagcagcccagacacagctgatgatatgtaggaaacagactctttgggctcagacccttagctgtgagccatgggtgcttcagttttgtcttctgtaaaacagtgctagtaatttgtctgcctgatagagttgttcataggattaaatgaagtaatgtgtataaaagaattagaaggttagtacataaaaggattggtgttattgttattgttgtttagttgctaaattgtttctgactttcttgcgacccatgggctgtagcccaccaaactcctttgtccatggtgtttcccaggtaagaatactgaagtggcttgccatttccttctccaggggaacttcccgacccagagatcaaacccttgtctcccgccttggcaggcagattctttaccactgagcctcgagggaagccccattgatattattactggtattttattattattattattattaccctgtgtggaaaagctcattcatggataatgaagtatagaaaattaccaaagaaaactgaatcttgacatgcctcaagaagagttattgaagtctgttagaaagaaaagactagatgtgttagctgtggcttcattggctttgaaatcggaatcatacctggaatatcgccatatagattggcttggggtgagatgaaatggacttgaaagaggaccagggaaggaggtgggaaccctcaaaaatccagcagatatagttgattatctgtgatgtgccccaaaacaagagaaaataaaaagggaggcatctatttcctccatacattcacaaagagatctataggaattgggggaacattttccccaaatgtgaatgttcttggctcccttcctgttctcccatttgcctggtcctccccactcctgtcccaacaatcaagaatataccaagtaaactctaaatggcagggaagaaattcttccgaagacaaagctagaggccaagggcctgtatacaaagccacttctgagctgtggtcatcttttttctgatccctgtgaaacctaaatgatctattgcataccttcttgtgctagtctttgtctcaatcaactttgaacacagagcatgtgagagtagtctgtgagtggggttcatttgtatactttaacacacttcctggaattcactctctttgctttaaacagaaatgtgagcagactgcagctaccctgaatgggttaaggaagctaactggagtgttcagcggttccccatacctgctttttttttttttaattctgctttcaacccactgccttcatctatcttccccaacagggtattgatcagctcttgaaattgtctttctcacttctagacactctctgcagatactgtaggagtgaaggagaatatggttctgcccttgaaatgcagttagtttagaactgagctttaagagcctctgataagggagatgatgcataggaatgctctagtggccatcgaggcctcagtcaacaacaaaaaggaaagccaacccccagtctctgagtggactgtttcaaaaatgcctttgtgaactagttgcttgaaactcagacatcactgcttcattgatacagtgaattcccagaagtctccttaacccttaacatccctgaggcaggtagtattgtacaaccaccattgttaaaactctgtcaaactaacaaagtcaaattataactttggatgccaagataacatgatgtagtcagaagttgcatgggactctagggtccagtcgctgttgcttactcttgtgatctgagcaggaggaagctgaactagagggttccaatgatagtgagaggagaggatcctataatcttgcctatgtgcttcttagttgtcaccgtctctctcaccaccatctgttaacccttcggtgagtaaagaatgacaggctatgccaagacagaaagaataaggccatgttcaagttagatttgaattccttaatgtaaagaaaaagtaaagaaaaggaaatgaaagaaatggaaggcattcaatagaaatgggttctgtagaggaaaaagttaaggcagttcctttcagctcccagaggggcatccataaacgtaaaaatatctatcattgactgagggctaaccgtggaccacatactatgctggcccttcacttgcattatctaattgaatcctaccaataacaatttcatggagaggccattatcagcttcattttatggatgagtaacagtgatttagagggattaagtatcttgcccaaagttgcagaactaacaagtgatgcagccaggatgccatcatgccggttggattctgaagcctgtctaattaatcatgatgctccatgccttccagccacatattcaactgaggaatgcctgtgcgtagttgcctttcgttgagaggacaggatgtgaaacacaaagcagtgaatagagaaatgtcggatgattcagtcagaaaactatgatttagttaaaatcttttgatttgaggaaaacttctttgtaatgtttttattgcagtaattttgatagcaagttaattttatcctgtactactccatgttgcctttaactttctatgataagtatatatttattttgtaagaaaagaacagcattttttcagtttcataactataattatatcattaagaatatgtattcataatctaaagaggtaaaacctctctacctagatttttctctagagacattttttaactaatctggacctcaatttgttcatctataagatggggaaacaagtttacaagattaatagaaatgtatagaaagcgctgagcatagtgctttagccttaatagattctcaagaaataagatctgtgattattaataatgtcttctagtattattatgattgttattattattataaataaatcattccctaatatagcttaccatttagtcctctttggggaaatgatcacctttgagaaagatctccaaggcccctctactcttacatgccctttatattgtgttccttccagattggagatttcctgtttttacaaatattattcctctgattcattattaaaatgttattgtgttttaatcaaaatactagaaactaactttcatagcatttatattttttctcttttcattaaaaaaaatttactgctattacatagttttctgactataaagacatactttgtaagtactactttttaaattgtgtggcttaggtcttgactggttatagaagtgttctcaaaagatgtgtaaactgaaataacatgtggaagaaaaggctcagtgtgagtgagaattccaatccctcacagctgtgtatttataaagactcctgttttgcgttgactctgatttcaggacaatattgagtaaaattaggtcaaagactggtgagtatatggtgattctgttagggagaaaattgtttccatgtatccacattctctcacaaaggtgtaattctctgaaaatttgctattaaaccatttgttattgaataacattcagtttaaagcagttatttctcattctcgtccaaggtagattcttatttaataccaaaaggaattttagagttttcttaatcaataaagaaacaatgcaaatgatgagactctaatgagcattttaaaaatcatgttacagttgaatcagacagttcaatttcttttttttttaatatcttcattacttgttgaattaactgatatgcttttatctttcatctgcagtttgcctttttcattgagtttctggaaaaagtaattgatatgaaaagtgcttagcattaagtctcctatgtatttcatgctcattaaattctaatcattaaaatgctcccctctttcttcaaactttcccccaacttttctttcccatttctcagctaacataaacaattgagccaagaaattatctcatttgaaatattttctgacaaaaataggtgaccagtttcctagatttagtttccctcctccattggcaactccttattaattctgtaaatagagtatgcatgttttttctttttttttttaatttcagtgacctcaagcacaaaactcgctaaattcctggaaggaaaccaggacatttatacttaaactgtatgaagtgaaatcgttcaattgtgtcctactctttgcgactctaaattgtataaagagcaacaaaaacatcaggtagagactgacttaaactcaagttcaaatagctaatcacctcactaatgcaaaaataaaaacaa

SEQ ID NO: 58082 - DNA, 1166 bp, Bovine  19866880794628
  misc_feature (1)..(1): n is a, c, g, or t
nattgacacactatcatccacctagtcaagagactattgacacactatcatccacctagtcatgtctgaagggcatgtcctcagaactattctgaggtttagatacctatgcagatttttcagaatttatatatttaggttctaatttctatcccacattttacccactaggaagaattttaaatcttcttttttgtgtccctaattggcacctttgcaagtttatatctatctacacctcctgagagttgtagaatttgtttgatttgattttttaaaagcacccagaagcctcatcatagcacagatccccttttcagcacacagctttgaagcccatactgctttctttaaatctctcaactatggattaaaaaataaaaataaaatataagttgctttcttttgacacctttcataacacctgggtctgatttctaaaatgttagttctagcaaaaataggttatctctgggacccacctttgaacaaagaccgactgtagaagagaaacaactgtgggaggaatgtgacatattccccgaagaaaaggtttatagtttatatatatataaaacagatcattccttgtattctcgggaagcatgtcaagtggatgaggaaataggaatcgatggaagaaactactgggggacaaattgcaattcaatataaaggttgactcttgaaaatgattgtcccagttgtcaaagatggcataaactttgtcggaaagtagacagctccctgccactggaacatttgaattatcacaagcagacttcaagcaccagattaggctagtaaaagattttttaaggtccctttcaactctcaaattttgtctttagtgttttgggattttttccccccaattgttcttctccatttaaggttttaataaacattaacaaacaacaaaaactgcatttctttttcttctctatttaacgtttcttcttccccaaccttttattctccatgtccttataacgtaatctgggaaatttcattcaaactaaagaactggtaatttaatatattacctttctcagaaatatttgcaactcagaagcatataggggaagaggataatgcttgactaaatgaaataagtggctaacagtgaaaactagatagtaaaaacatgccaagaaaatctttca

SEQ ID NO: 58083 - DNA, 738 bp, Bovine  19866880845647
  misc_feature (1)..(1): n is a, c, g, or t
nttatttatcatctgctttatcacctgaaaatccccaaaacaaccagggttttgtctttacatggctcagcatctacagtagtactcaggatatagtaagagctaagaaaatattttttgaaagaatgaactgtcattcaataaccatacactttgaagttgctaatattattcctactaacaatacaaataagacaaaaagagtaaagtgcaaagggataatgcaaccattttagaaatagataaaaggatccaggaaatggggctctgtgggtaaaggactagatgcctagttcaggattgaaacaatgaggaaagaagtaaaaataaaagagattagctatttttgcttgttaatttcccatttaattttaatactacaaataaataccttggaaaaaagctgtaccttgattctgcaaactcaatgtgctttgctaatttcaagtcaaaaagtaaagactaaaagcaatggtcattatttacaaagaatgagaagtgatcgaaaatatataatggtcactgcttaattactcctctattcttctgtttccatatctgacacatgcctagcttctgatacatgttagaccaggcacaaattataatttgaatgtagggtatagaattggaacttgcaaggatgcaagagctaacagcccaaagaacactggaaagtgtgatgagagctaaagaggattataatgcctttccggatttggtggatgaataggtttt

SEQ ID NO: 58084 - DNA, 1399 bp, Bovine  19866880874964
  misc_feature (1)..(1): n is a, c, g, or t
ngattttccaggcaagagtactggagtggggtgccattgccttctccaagtcttccccctccttctatctaaaccatgtggataagttttccaaaatatttgccatgagaacctggtggtcctcctgaaagtaaaattcaccagcatgtgaatatgcctccaagtctggggctctaaattttacctatcaagcaaatttacactgatcctccagaaactcatcaattactgttttactgtgtctatgggtagcctcttctcctggtaaattgtgattctgtgtatttacttgcgtctctggtgtttgcaataatggttggccctgtgacctcaattctttagttcatgtgagaagagttgctgattttacattcagtgttttttttgttgttgttttttttcttcttatttttgagcgagaatgacaactttcaagcaccttataagttaaaatggaaattgaccaactacttaatttagtctttaaattatctcaattattagtgtttgccttattagatatgtatttgtacgttttttgtaccatcaaacagaagagaaaaaagataacctaattccttctttatcctaaacactctgtttccttactatgaaaatctaaaatcatgcacattttaatgttgaggcagcagcatgaaaagggggtaatgggcaactctgtatcacttcttaaaaatatgaactagcagatggcatttcctcttctgtgcatttcatcatttagcagaaaacaattaaaagcaaatgaatcttaaacaaatagttggcatgctcatttctgcaatagttatttttataagaatcagagcttgttgtaacatatttagaatataatttaatgttcaattggcatcttagttaaatctggtctattcatttttagaaaaattatgaaaacatcatattgatcttcagtaggtttagacataaccaatgaataaaatataacctttgggtttaatacatacagattgaaatatatggcttttaaaatgtctcgggccaagaggtataagtgaagctaatgaaagtgaaccattagggtacgtctctcaaaggccctcctcagttctaggaggagacttaatcatttgttcatatagtcacatgcttttgtagaatttatgataaaatatactttaaccacattaagactgctagcatttcacttttatttcctctcttccactctcttatttcatgtagaatagtagtgaagttgcaacaggcattttgtagatttagctaagggtaattgagttggggatacctttcatattgggttcagaaagatctagttatgtggtttgaactctgagacatgtctaggtaattgctgcccatcttattgtaacaagaaccttagaaatactcctat

SEQ ID NO: 58085 - DNA, 1486 bp, Bovine  19866880971806
  misc_feature (1)..(1): n is a, c, g, or t
ncgttttccaaaagatatgattgtgtcctatttctctgaacacccaagctttattctgacatgtctttacatttgcctatttattgatacatatttttaaagtcctcgtctttaatgtgtttacttttcccttcatgtcttggaagacagcaactttaatagcttaataagtcattcaaataaatgcttatttatttgaatttgtgatgttttattcaaacaaattagctgttttatttacctctgtgtggtattgttaaaatacacagctgccttcgcttcagtgtgggatgctttagacacactgcctgtccaagtacatcgatattcttgtatatttgaagccttacacctcagtacacacttaacagcttccgaaaacaacattctattcatgtgggatgagtagggatattagctcttcacagcaattcagtctatgactacttatttaatacaatttacttgtgatctgtgtagctctgccttgttaaagaggtctcagtcctcttagaagccaggttgccattttaaaatacagcatctttgtgttttcagaatctctcagattacatggatatggcttgattgcttgctccttaagaaaagaagttattttctgttctgactaagtgactttttaaagtaaaatctcactttcaaagggacatatcattaaattattgctcacttccactctcaagggggtgggaagaaggataggaagggtttagggtgaaagcagaattatcagtgcctacaaattgagcctgtaaatggagaagacttctcatccatagctacagtcccagtagcataacaatataattagctttggagttttagtaattaccaaccgaattcccaagaaaaaaaaaaagtcttgaaattactgatgtgcaatcacaaagaaaattgtgaagtttcctgtttaaatttacttcagctcataaaaagaaatgttggccaaaaattttgtgatgaaagactaagcttaaaaaaaaaatctaatttcagaaatctttcagcagtatttttccatatcccaatagcctttcactatttgcagccacatttggaacactggggccattaaattaaactaaatctgcccaactctgtccattcccatgactcattttgacatgtgcgtctggactgagattcgacctcctgtctcctttatccttgtttctcacatttaccaacttaggcccaaacttcaaaatattccatcctgtactaaggagtgtggtaccagtatacatatttgcacatttatacacacactccatcagaatgaaattactaatcctcatattagtccttaacttgttaggtgaccatgattaaataacacaacatgtattgacctcaattttattttccaaactccaaggatatactccctgttttataaaatgtatttgataaattatattgtattattcataatattgatcgactctgtcagtaaattcaccca

SEQ ID NO: 58086 - DNA, 778 bp, Bovine  19866881002345
  misc_feature (1)..(1): n is a, c, g, or t
nattagcacatttggaaatgttttgaagacctttatttggggttgcattcaggaagcagcccagacctgaaattgctgtggtggggtaattatttatcctagacatctcaaagactagaggtctttttgatagccatttcggaacagtcatctgaaaaatcaggttattctccttaaagatagttcattgttcttcctttgaatactttgaaaggaaaaatatgattgagagtcctatgttcttattataatattataagcccctttataaactatcttcccacatataatattctatgatattgacgatcagctctgtcacagagaaggaattcagaaatggttagtgaaagtggaatgagtgagattagtctgtacatcaaaactaagctcctctgtctagctttctaggctgtgtgtcaccttgactctgccttaatttgtctctaccacctgcctcctttctaccagggcaggcttatattttgcctcccaagtacctaaagtctaagcctgtgcttgtgctactttgctggtcatatatgagcatttacttcttatcttttcccccaaatcctcccaccttttaagaacctcttcagatcccacctcaagccacaaacggttttgggtgtgtgtgtaattttcccttccctaaaatcctacttagcctctgatttccataaatagaacaaaaaccttaggctgcaattgttaacataggtttctgaaaaatgaagcaaataacaaaaatataagtgacttacctcacagttat

SEQ ID NO: 58087 - DNA, 1697 bp, Bovine  19866881310034
  misc_feature (1)..(1): n is a, c, g, or t
nggagatccttctttgtgctcaggaatcttttatggtaatccctgatccattattttggaatatttatgattttttaaatgatgtatcaagcttttgagccaccaatagcaacttttccatttgactaaacatcccagcacaccaacaatggacagaaacactttttaccatccccttcaccccacagaaacacatataagtactcatgcaaatagacagaatttcatttaaaattatatgacaatccaagtaaagcccatgtttcatttttatgaaaccacacccacaagtccccaggtcacttttagttatggcgttgggagaagttttctgttgagattttacccctgccacattagaggcagaattcaatattctgcagccccaaaggccagtgttcaccaattctagtctcattcaagcaaactgtataacactctaatgccaggtctgaaagcacataactatctgctgtaatcaaaggtttaaatgaccatttatttcatcttgtatctgcctgaggaaatcctttaccagcctattttctccccttagagtaagaacatttgcatgcttgcagacaaaggtaacaatttcaaatgatatatattcttcaatggtgaatatttgctttttaaatacaaagagtagagatctagttattattatgggattttacatattgctcaaattaactgccaagaaaagcctctaagaaataaattgcctttatgtaatattacctttaatttcttctagcaaatgggataagaggtttaagtaggttaaaggaaatcaagtaaacatatttatggaatacaatttttcatggttaaaagcctaaaagcaaatatttcacagcttactaagaatgtaccagggaactaggagaggcttttgtaagacagagttgatttttagaatgacttacaggttacaacaaaaagctgctgatacattttaacaagcaggtctagggggcccagaccttgtttgctagcactggatgtttagcttctgcaaagtttttgtaaccattttggaaaccaaatactgtagaacaaaagctttccttccattcagtatccaactgcatctggtgttacaggagcatcagaagagcactttaaagggacaatatcaacacatttgagtttctactagagaacgatatgaaataaaatattttatagtatctaagtatcttaaaggtctgagttctaacccatatacacttacaaaagtcagaaaatcagggtgatgaaataagactgctggaggaatgggtcttgggcaactcaaatacattctgagtctggttgctctagttggtaaaaggggataataatgtgtctctactgcctctttggttcactataacaaaagcctgattgtgaaaatgctttaaattgtacacaatctacacaaatattagatgatactatcattttcatttttccctactaatactgcagcagattactgagtaggacctatatactgtgtttttaataacataactgggaaggagaaggtaggattgtaggcacctcttttttttttcacacttgatgagattctgaaatacaatcagtcaccaaactcctcagacacatttagcagcatcagaagcagctgctgctgacaatcatgtcttcttccacagggactggagggtgttaaaacaatgagtcat

SEQ ID NO: 58088 - DNA, 2119 bp, Bovine  19866881333491
  misc_feature (1)..(1): n is a, c, g, or t
ncagggaagtagatcccacatgccactacaaagatcaaagatcccagctgccacaactaggacccagagcagccaaataaataaataaatatttttttaaaaaagagcctgcacactcggcatcacaaccaaaaaaaaaaagaagaaataaacaatattgatactgtatgttagttttgtaccttgctttccccactgaacatgatatgggcatttccctatcccattaaaaatttcagaaacaaaaacaacaaaccccctcgcaaacttccaggctttctgaatgaaagtcaaagtcctcagaatgccataagtatataatctgaccccactcttacatctgtgagttcatcttcagtggctcccactgtgctccagccataaccaccaacccactgattctttaacaacccaggcaattcccaagattgccacctttcactggttctttccactgtctggattattcttacagatattcatattgcttgccccctaacctcctaatctttgttccagtatcacccacacttggtcttaccttgccttgtttttaccttgccttgtttttctccttcagacttacacaattcctaatataatatataatcactgaagcttaaatacttgttgccttgtctcccatagtggaatgtgatttggggcagggatagttattattttgtttattcagtagcttccccagggcccagatggatgccacacttatgataggcagttcttaaatgattggtgttgctcctggtgctagaaggcaaatgtgtaaagcctttccttctggagaagtgctgggcatctctgcttcctactactggggctcagtctgaactggaggatagacataatgtagagttctgtgttctgccctcaaaaagggaaaaaaaaagaacggctttaaaaaaaacaaaacaaaaaacttttacacttgaaattctcatcttcctttaatcacaaggataatctgctgacccttacaacagctccaggctattattatccccaattgagagagaaagaggctgtagagtctattgaagccctcagtgacagaaccaggagtagtaaagcatgttattggatttcctcttctatacagtcacaatgaactgtagccacatctcagataacagtaaattggcaagtagacaggagtctccttctctaccctcaagacaggcttttaggctgtgtaattagcttgtgaagaaagacacaagcataactacattttccattgtaaggtactcagcaagtcttagtctttcacttctgttatttgttgccttttattgattcaatgtgcaactgcttagtctggatcttcattttacttaattttaccctataaattaaaacctatattagcatcccagggtccagaaatcattcacacctttgattcaacctcaaaatagcctggaggaaagagcaggtgggtatatcttcactttagaaggaagaatgacctaacttcttggtaatcctcaaaccaggacacaaacacagatcttttaagtataaaagcaaaagtcttaacttgctagaaatacattcactgtatttattttttagagagcacaagtatgaaataggaagaaaaattatctaaattattcttattgaaaatgtcttctaggacttccttggtggtccagcggttaagaatctgcctgccaacataggtggctggggattgctccctggttcaggaaaatcccacatgccatggggcaactaagcctatgccccacaagtactgaagcctgcacattctagagccctcattctgcaacaaaagaagccaccgcaatgagaagcctgcacaccacagctggagaatagcccccaccccactcactgcaggtagaaaaagtccacacgcagcaacgaagacctagcacagccaaattttatttttaaaaattaaatttaattttaaaaagaaaatgtcttctagaaatataaatgccacttttgcacttcacttgcattttctggtaattatcctggcagcatccttcacaaacattgactctttggaagttcctccctattcattttcctattggctctatgaaaaaggcaatggcaccccact

SEQ ID NO: 58089 - DNA, 641 bp, Bovine  19866881411519
  misc_feature (1)..(1): n is a, c, g, or t
nccctggaatggccttatgagacagatacctcatagtgatttgcttcagcaaaattcttacccatctggtgatctctagaatgcaaacgaaactggcacaagtgacagaaactcagttaacatagaataggccaatttccttcctgtcttaagcgcatacacttcctaatgatttgggatgcttttacgaacttccagccttcacatatccaacctctaacctcagtcctttagatctcaactacgttagccaaccaacactcccattttacttgcattcataactaccaatttatctacttaatagtactttttatagctgttttaaataatagtgtatttatttatagaatgtatgcctttgctactaggatgccaattaccaagaaagaaatcaccttcatatctacctagtagctaatatggtgccttactctttatagatactcagcaagcatagataaatgaataagtctcatcttttgactagtttgtgcagtttttacattaactgattttggaaagtcatctcctccagatttgcttgtagaatcctggtaattcttcttgtgccaatcaagccagttttccttgatctttctgtttaaagatacaatctctctgtgactctacctcagcat

SEQ ID NO: 58090 - DNA, 1294 bp, Bovine  19866881426316
  misc_feature (1)..(1): n is a, c, g, or t
ntcttatgagattacgcctaccattttatatagcctcatcatgttgtggttagtatgatcatttgtattctcatgaatccatagtatagactaaccctttctctgcttataatttgcaccacaggcactgagtaaatcatattctaatgaattatttttaaaaactgttctaagattcttgtaatatattaaactatatgatgttagagttaacttgaaaagaaagaaacacaaaagctttggtagtgctttagcttgcaatttaagtgtttccaaggtatacctttgacatacatactctgtacaactgacccaggtattataactaaagtataaacttctcagtgtaatgtctgctaaaagcttagactgctcttttctagggcccaggaggcattaatttaaaagaggtgtcatttggaagaactaatatatatcttgtggcagtagaagtgtctgccacctcatggggttggggaaactcactttagttcagttcagttcagtcgctcagtcgtgtccgactctttgtgatccattgtgagaatttcacagaattagccaacattttgcagaccctttcataatgaaatctagaaagcaattacccattagcacatctgccctgatcatgagaaaagcacatctgccctggtcctgagaaaaaaaacaaacagttaacactaatgacttccctggtgcctcagatggtaaagcgtttgcctacaatacaggagacctgggttcagtccctggattgggaagatctcctggagaaggaaatggcaacccacttcagtagtcttgcctggaaaatcccatggatggaagagcctggtaggctacagtccatggggtcacagagtccggacacgagtgagcgacttcactttcactttcaacactaatgaaattataagcatcattagttattccttttggttttaatagccaagaagaagcgtgccatcaaccagtttaataaggggactcctctcgtgttggttttactcttattattattacttttcatatcagtgattgtttgcatcagctaccttcagcttccactgactgaaccatcagaggcaactgcatctcaaggtgttcagctgaatgtacaattagcttattgttaaaaacccgcagtacacagatcatatgttaatacaaagaaatctggatgtttctctcctaatgcccaccaggccttaaaggccagcatggagttcaggaaatttctaacaccattcctttctctcaaattaacttcagctctgaagtatccaagggg

SEQ ID NO: 58091 - DNA, 785 bp, Bovine  19866881499130
  misc_feature (1)..(1): n is a, c, g, or t
ntgaaagaatgaatcctatgaataactgattttggtaatattgtcttttcattaaaaaacagaacaagtaaagtttttgaaagattattactccggccacttagcaatactttggtttggctcagaaaactcatactaaaaacaagcttgcctcctctaccatacaaaatcttaagctaaaaatcaccactgttgccagaaaaaaaaatattttctatgcctcccttttagataaaaatggccaagagacacaggtctggttaatgagatatataattcggcattttttggtgtccttcaagagggactgattgagctggcatgtgccttctaacttatgccctccccactttcctcactggaatacaaacatgatacctgcaggcaaaatagtcatgtcaagagtggggggagataaacatatgctgaatggtggagtagaaagtgcctggtgattgatggcatcatgaagccaccatgcctgttcctgaccctttttctctgaactttttattatattgaaaaacaaaataattcattcatttaagtcacaacttaatataattctgactgactcatcagcttttcaaagtcatttgaaattctttaaacagtatatttaatggtgaaaaccatgccctcagaaaattcatatatatatatatataaaaatattaaatctcatcatcatccacaggtagtttgatgtatagctatatgcatctttcttaggttagaaattttagttgtcaatgggagtgaaaccaggaacaatagaactcaag

SEQ ID NO: 58092 - DNA, 1001 bp, Bovine  19866881626519
  misc_feature (1)..(1): n is a, c, g, or t
ngagcccggtggaagggcagatggttatagccgaagggagaaaatgtgccaagttcttggtacccatgggatatagagatggaaagtgaatggaatgctggctaggagagaagctggccccatgggattggaccaggcaacaggacctactctcccatatggtagccctacaatacgacatctgaaacaccatcctaaattgactctagaatattctacacaagggaaataccctcttttccctttttatcccctctagacaaagaaggtaagagagaaagaattctaaacaagaataggagtgatcctttcttttctctggtcacttgaactttgaagagctattgatgagcttctgattccatctactattgttggtaaatcaaaacagagaataaaaagataattttatgattaaaatatatgtttgtctatttgctcagaccccaatggagagtcatacttctgtcatttctttcattgtcaaaagacttaagttctggttcaatatgtctagtaatttaatcatgcctttgtttaaggagaaagatggttccatttgccttttatacaatttcagagttgggaaaaaccttacaggctatcaaatttaatatcttattcctatgtgcatactacctgtgtcagtatttgcttgacatttcgatttaaacaaactcatgttttacattttaatattattgtaaaagcaaagtaatgtcattaacataaataccgataaaaatcatttgcatgtatcacaaatacaaagcattcatttgagaaaacattcattgtaatatgacccagaacctactggcatttcatgttattctctgtctaatctgatctattgttcaactttcttgccatccaataagaatatcataaaacactttgtgaaatgctgtgtgaacaagcaggtatctgttaattgctaaactcttctcccagaaaggaaattccagagtcgattggttgttcaggtaacccacccctca

SEQ ID NO: 58093 - DNA, 1236 bp, Bovine  19866881760545
  misc_feature (1)..(1): n is a, c, g, or t
nagttgtttgttatacctgtaatgcattactttcttgaatgtctgacttattatgggttattgagcacatttctgtgaacaatggaaacggcaaactatttcatttccagcactaaaccagtcaacgtcattagacaaaaaaaaaagaaaaactataaaagtcaataatcagtgtgcacttgaacatgagcagtgttgagcctaacaggctcccagagactcctacgagtttgtcattttaattatttgcatattaagaactctgcaggcaggcaatacttcaaatgacagctcaaacatctccttcagatgtcattaggttcagtattgccaaatacattttagttgcaatacaagtttgaaaactaaagagatgatttaaagtcaattccaaacctgttagagtcagaagaaagattgaggcatctaagtatggccctaggataccagtgcaagctgaaattgctggagatttgaaatgataattaggactattttcctgggactaggacaatagaaagtaacaatacctagcatgatatagctataggaaaagaaaggctttacaagtaaagtcacagagtagatattcaataaatgctagctaacttttttttttaactataattagtggcagaggcaacatcaagagccacattcctgattaaaattacactgcttttccatgggttaattttattttctcaaactaaactacaggacaaaaaaaaaagtcttgttttactaaagcatacaaagtagtttgtctatatgctaattaaatttgccaaactattttccgtgcttctagaaggcaaataatgaatgttattctgggtgttagaaagcacccagagtagttctggatccatagcaataaatgttcagtaactggttatttagtaagcccacagaatgaagggctcaatgttaaagaatcaaaccggaatataaataagtgcagccactatggtgaacagtataaggttccttaaaaaactaaaattatgatatgatccaacaaccccactcctgggcatacatctgagaaagaaactctaattcaaaaagatacatgcatctcaatattcacagtagcactatttacaattgccaagatacggaagcaatcaagtgttcactgactgatggatgggtaaagaagatgtgccatatgaacacagtggaatgacactcagccaaaagaaaggatgaaataatgtttgtagcaacatg

SEQ ID NO: 58094 - DNA, 1087 bp, Bovine  19866882026708
  misc_feature (1)..(1): n is a, c, g, or t
nctctgtttgatacatgctttcctcccttccccaccatgtgtgctgggccataatggatgagtgaaaactagcttttcattgtcattgttgaactcagaggacacagaataagttaatcacagaaactaaaactgataaaatatttgaaagcatttaatccaatctcctaaggaaagaggtttcatagtgttatacctgagtcatttaacaggtttgtagcagaaataggagtataacccacattttgtattttaagttccacagttatctgttaactgttcattttagctcttttttttcctttagtttccacaatcaaagcaacgtttagaaattacgagttaatgaggaatttgacataagcacaagggtgagagaatggtgggagtgtgtttgagatgagggggaatataaagcaattaaatcataggggaaatgtcaaaattacaagtgagattatagaaatataactcataaagacctaaaagttgcaaaaccatacagataaaaaaatggaacttgaaaattaatagaacaattagatgggaaaaaatggaatgtatatctgtgtgcttctgttatttaaagaggacttacatagcatttattaaaagccagtcaccattcacttgcttgctgcacattatcattcacaaaacccctagagatacacaagtgctattattatctgcattttatagacaaagtaggcagaaagaagttatacaatattagtttccttgggcttccataaaaaggtaccacaaactggaaggtttaaagcaaaaaaattttaattctgcacacatcagatttctggaagtccaaaatcaaggtgttagcagagccatgatccctctgaaaccttggaagaatccttccttgtgtcttcatggctgatggtgttggcaattagtccttggacttcttggattgcagatccatcactccagtctctgcttctgccatcacgtgacatgaggttagaaattcaacatattttttgaggaaaacagtttgactaagaccatgtaacttattcagtttttgtgttactaaaaggaggagccaagacaggtcttgttc

SEQ ID NO: 58095 - DNA, 3840 bp, Bovine  19866880427560
  misc_feature (1)..(1): n is a, c, g, or t
nctgcagccccattgtggttttcctgccaagctgcagtggttgctgggaagaacacctggtgggtgagtgatgggagagcttcccgctggcagcagccacctctgcccagagccatgctcatcactgggtgccatggagggcccaggcaggaagcctgagaacactgttccagacacatctgccgtagagccgtgccctggagtgagcctgaccatgtcggtgagacccagttcaccatctcccaggggcgggctctccaagaacctctttgcaatctcccagcctttctttccatggctatgttaatcttggctccaagaccaaatgagtggaagattcagggggttttgagtgttagattgcaggtctgagctgagcacaccacgccttcactccaggctcctccactttcattctaatgttaggaaagcagaggagagaaactggctgttgttgaccttgtttcatggtgtcatcagaggacaggtcattattgtaagagtggtgtttggaaaaagaacggggtcaacgcttaagatacatgggctcctgtcctcactctggcctgagccagctgtgtgaccttgaacagcgagttagtctttccacatctccatttcctcaaccaggaaacaaaagaaattggattgatgtctcccagcgccccgtccaactccaacattttagactgtacagctgcgaacctcaggactgatgtcgttcatttacaaagaaaatgtcaccaacatcccctccccgcccccaggaggatgtggtctgagttgttctccctgttgtgatggtgggtctgcagtgctccacacccgcctgcccgtccccattgtccgccgtggttcccatgcaggagggctgacccccttgcctctgctgtcctctgagtctctgggaggacaccgtcaagaaaccactcgaggctggtaggtctgggcctcggttcccacctcaggaaactgacttgctggttgactgcaggcaagacttggcttctctgagccacatccgccaaatggggcaaaaaattctccctgggaaagtgcttcgggatgagcacggaggctgaggatccaaatcccaggccctttgggaggcagtggacctctactaatggaccacacactcagcagggctttgtgtcccagtgtgctggaaccttggcctcctggcacgtgctggttgtcttgcccacatgcattgtgaacagggatcaagatgccctctttttggattagttctgcatttggttctgggactgtgaatggctttgcagtgcctttcagtgagctcttttcagcttcactcatcaggccttggttggggagctctgtttgcttccagctgactcagtgtggttgctgagctgatgctgttgagtcactcgggcaaggcccgttacttgccagacatggctcacttggacccatctttccagggtaatgaactcataggattaaactgagagctccttccttctcctctactttcacctcctagcttcccattcagcccccacccacccccactccaccaccacccccagcttctggtcctcaggtgggacgtcttgagccagggagcaattagccaactcagacttcaagattctccctagaagaagttgctgttgttgttgtacagtctctcagtcgtgtctgactctttgcgaccccatggactgcagcacaccaggcttccctgtccttcaccatctcccagagcttgctcaaactcacgtccattgagtcagtgattccatccaaccatcttgtcctctgtcatccctttctcctaacttcaatctttcccagcatcagggttttttctaatgagtctagttcttcgcatcaggtggccaaagtactggagcttcagcttcaacatcagtccttccaatgaatattcaggactgatttcctttaggatggactggttggatctccttgctgtccaagtgactctcaagagtcttctccaacatcacaattcaaaagcatcaattctcggagcctagctttctttatgatccaactctcacaatcacagtgcccaccaatggaggaatggagatacaggtatacacgtggaatattattcaactgttaaaaagtaggaaatccaaccacttgcaataacatcaatgaaactttagggttttgtgctagtgaaataagtcagagagaaaaagataaaatactttatgatctcagttatatttgatttttttttaaagccaaactcccagaaacaaagagtagattggtaattcccagggcttggaggatggggtaaatggaaagatcttagtcaagggtacagacttccagttataagataaatgttttctggggatctgatgtgcagtaaggcgactgtagttaacaatgctatacaacgtccttgaaagttgctaagagaatacgtcttaaattctcagcacacacacacacacaaatggtaatcatgtgaagtgatggataactgaccttattgtggtaatcatttggcagtgtatatgtgaatcaaatcatcaccttgtacatcttaaacagacagtgttatgagttaattatatgtcagtaaagtgggaaaaaagtatctgtgaataagttcttatggatattaaacgagttaatacattggacttaaaacagcaccacattgtaaatgcttcagtaacactgagtttattgttatttttcactgagcgtttgctgatctttctggagcttcaaaggtcaagagctctggaacaggactgcctggatccaaaggctgcctccactcagctgtgaggcaggggcggtgggccactcctctcagcgccctggcatcctcgtgtgcgaacagaaataatggcagcacctgccacttagggctgctgcaaaaataaacgatgcgccatgcacttcgcatagggccagacctaaggtaagcatacaacaaatgtttgtgattgctgtcattactgataccacgcgctgggcgcaggagagacaaaggtaaataaggaaattgaagcagagcccttgtcaggactaaagagaaattgcaaatgtaaaacctgtgatttaatgaggttttacagtgtccagtcatccttgaaaagaaagtaggaaaaaggaaatcctgtcagctaatatctcctgtatctagtcattctcttggtttacagcaggtatttcactctttgctttaggcctctcgtttgcttaaaactgacggcttgaaaagggaaattcatctggattccttcaccgagcggacagtccactgttattacgatgatttatcggcgttctttctccgcggcttttgacaagcaaagaaaggagtttgctgtcttaggccttgactttgatagacacattctcccaaaaaagcagcttatgttttctgatctcacatccttagagccctattcgtgggtccagctaaacccaaacctcctgaatttgccctagataaagcatagactcctacttatgtaattatcagatatgttatacagaaaaaaaaaaatactcagtctatcaaataggtatcatatagcaatgactaccatggatcaacctgtctcctaagcaccagaatattcatgatagaggtttggggaacacaaactccaattcttgggaacacagcccacagttcctgggaacacctgctctctacagaacattcttggtgatgagctcttcctgggttcagcagtgccgagaaaataacccttatggttagagatggatgccaataggtgattagacgggttttgtattatttgtatttgctaacacacatacacattcacctgtgtaaactgg

SEQ ID NO: 58096 - DNA, 1533 bp, Bovine  19866880428402
  misc_feature (1)..(1): n is a, c, g, or t
nctcgatggacatgagtttgggtagactccgggagttggtgatggacagggaggcctggtgtgctgcagtccatggggtctcaaagagtccgacatgactgagtgactgaactgaactgaactgacctgaatgaatagaagagtgttatactttaaaggtatagccttgggaatgggctgtcctgtatgtttcagtctataggcaacattctttcacagaaggtgtagagccagcatgactaagcaccgtcaacagagcccagagtttaaagtaaaagaagcaaactcaacatggagtcagatttgttcttccctattccatcgccagtgttcctcaggcatcacccggcctgtctcactcaccctgtccccggcctgactgctatagacattttatattgagattgctgactcagagatcaatgatgtggattccacgcaccgtgaggatgaagagaagtaatatagaaagagtaatgtttccttatggagctcacaaaatgccagccgcaaagataaacagtttgagatataagctaataggttaggcactaaaatacaatgtgaacttgatgatctaagatttttttttctccagctttaaaagtctataattttacactgtgtgagaaggagaatagtttctatttaatgaggtaagttttaaaaattattaaaacatgttttcttaaatatatgccatcttccctttactatgtcataaacaatctatattacctagtcaatgttatgagactaacttatgggtttgaaatgcagaaaatgtgcacacaatgattttgtgaaatgtttatgcttcttttcaagtgataaaatagactaatacgtgtatctccattttcacttacctaataggctcttcctcataaccatttctttatatacagaacagaagatacaatagggtagaaactgccaatgaatttgcaaatgacattgttgagctctgctagggagagcattaccatctaatgggtatatttagaaaatatttattcaggacctgatactttccacagtgaaatgacagtgttggcaaataatcatccaaagacattcttaggtttggttatacaaggtatcaccttgaactttaaagccattgctcaaccaaggccattttgtaaagaagtctttcacgtggctactctgtagagagacgtttgagtcttgatcttttaaaatgctacttttaaaaattcaacgaaaggacaagtgcagtgtgatttcacttatctgaaatacttaagagtagtcagactcatagagacagggagtaggatgatgattggcaggtcataaaagggactggatgggggaatcagatcagatcagatcagtcgctcagtcatgtccgattctttgagaccccatgaatcacagcatgccaggcctccctgtccatcaccaactcccggagttcactcagaatcatgtccatcgagtcagtgatgccatccagccatatcatcctctgtcgtccccttctcctcttgcccccaatccctccca

SEQ ID NO: 58097 - DNA, 2137 bp, Bovine  19866880571267
  misc_feature (1)..(1): n is a, c, g, or t
nctcaaatgcatgtccactgagtcggtgatgccatccaaccatctcatcctctgtcgtccccttctccttcctccttcaatcttgcccagcatcagggtcttttccagtgagttggctgtttgcgagatgtactgttctatgtattgtcaactcttagcattatcagactttttgacttagctcttttatgtgatgcctagtgatatataaattagttttatattttgtctgtataaaaggtcaagaacattttcatatgtttattggctatttgtatattcctttttgtagataattgttcctttttattgtttttttcaaacttttgtaaattctaacaaatatcatgtactccgagatcatgaatatatttgcctatactattttttagaagctctattgtttttcatgttatattttgatctataatttacttggaattgattcttatgtatgatttattttatgtttaatttcatgtgtatttatatgaaagcatttgtaaaaaatctgatacaacaaatgaataataattaaatgagataaatgtaagaaatttatgttagtataaacctaattctatgagggtagatagaataaataaacctcaaattaaaaaaaattttcctctgcatttttctcatctataagaggagaaatattattcaccacctgaacaaaaaaaggaacattaacttatgatgatgaaagatttcattatataatcttaatgtagtatcatgatttatccaaatcccaaacctatgggaagacaattattttctatcaatatttcttcaataagcttaaaatatttttgggcaccctggaggaggaaatgggagcccactccagtattcttgcctggaaattccgtggacagaagactttggtgggccaaggatcatgaacagtcagacacaagccgagtgacggagcacgcactgagcatacacgcgtgtgtgagcacagtgccctcaacctgccttttcctttttcctctatttttttaaagctatcgtttgtatttttcacaataaaaatagctcagggcattgtcagttcttaacaagtcacaaaaaaatacagtttttaggttcagtaaaatatttattccagggaaaccttagtttcaaattacaaaaagaaaattcaatacttaactacagtaaaacagagagaactaacttttaaaatataatcaaactgctctatcacatgcagagaaggcttttttaaaaaataaactgaattcttagtaaaagatgtgatacaaagagtagaactcttttccttaaaaagaaagaaaaggaaaaacttccaattagcagactaaaatgtgaagctggaaaaagaagcaaactaaacacttagccttctgggaaaagaaatcgcaaacaaataagaaagtttagaaagatgtatttagcctttgccttttaaataatgccttggtattacactgcatttagttctcactgtaaaacttatctaacccaagttaattacatttccaatgatagttgtgagagcagttgccaagatttactacataaatgacatataaatttagttgcagaataattaagtcagaatttgagtccatacattaagcaatggaagcataattacattcttacagatgctaaaaacttcgctcgcaattctttaaaaatgggttcaaggcagattcaggctgtgtttcatttaagacttcttttccttcgaatatagtagaaaaaacaactctaatttgagtagtgctttataggctatgccacaattttaaaatattgggatattttacattaagtgctaacagcaatatcaaggggtggctttggatatcagtgtgggagcaagaagttccggcctcttagtgaactccatcagtgcctcttctcttgccttctcaaaaagctttttaccttacaaatatggccttgtaacgttagggtggtttgaagactagtgtcttgaattgctttccagatttctgctaagaaattcctccttcataaatgaacattcaagactaacctctggacttgagatctcaggttatgtctatgaccttgcatccccttactgatctacagatcagcttgacccactctatttttaaaattttatatt

SEQ ID NO: 58098 - DNA, 3686 bp, Bovine  19866880648098
  misc_feature (1)..(1): n is a, c, g, or t
nccttgatggactccttttcctatttggaaccgtctgttgttccatgtccagttctaactgttgcttcctgacctgcatataggtttctcaagaggcaggtcaggtggtctggtattcccatctctttcagaattttccacagtttattgtgatccacacagtcaaaggctttggcatagtcaataaagcagaaagagatgtttttctggaactctcttgctttttcaatgagccagtctcaaagcaagcaaacaagcaagataacaaagaaacacaatgtcttttcagtgaattcttcctatataagaagggaagaaacaaaacattgtcagggtaatttcaagacaagattatatctagaaacaaagaatgcatgctatcctgtgctgatttaacaacacaaaagaaaatttaagtaggagagaagtgtctgcccagttttcaaactcatatctttaagctatttgccaacaaaatgttgatatgcttttggagggataatctcacttaggcagactcccaagaaccttgcctggttcatacagtatggaattgaaatgcctggctaaggcagactcttgagagtcccttggattgcaagggagatcaaaccagtccatcctaaaggaaatcagtcctgaatattcattggagggactgatgctgaaactgaagctccaatcctttggccacctgatgctaagagtcaactcattggaaaagaccctgatgctaggaaagattgagggtaggagaagaaagggatgacagagaatgagatggttggatggcatccctgactcaatagccgtgaatctgagcaaactccaggagatagtgaaggacaagggagccctgttgtgctgcagtccaaggggtcacaagtagttggacattacttagagactgaacagtggcaaaggcagtctagtaaacagctcaaggagtcttagaagaccagctgtcacaggtttccatcttaaagcagatgaccaccatcccagctactcttgaaatctcattccctctcacgctgccaatggttatttcaggtggacccggaaagtagacaaaaagttttctaatgacagaagagaagtctgagttttcatatagattactatggattttcatatagattttatttcagcattttgtcatacactgctgtatttctttcactcttattttattgatagaactacaagctgattggatatacagcacttgatttatatatcttttgatggcttcttatttctccacctttgatatctgagttattatgaactggtttgaactgttattgtggaaaaaatggcatttcagttcattttcttcagcctaagtgctctaagggaatatgtaatttatctttctatctcgagaacctatcatggtcctcctgcatattaagtactctacacatactctttgaatgaaaggaaaaaagtaaacaagtggctagatgtatgtacaaagggaagataaataagtctaaaacaatactattttgggttatcaaagacagtgatgaaaataaatgcatggcagtgacagttacagagggcctagctctccaggaccctgctttgctaaacttgaatcttgtctcctctgcttggaatacaggcaattgatgatgggctctgtttctcttaatgtctggttacaatcgtggccttggtctattgggattagagaagagtaggaaggatttaggtctttgccttaaacataaggctcaagatgaacagagaaagacatgtccatgcttaaactgaaactgtggaacaggcaaggagctgcctctttttgcacagagggtgtggacttgggcagttcaggacgatttataggaaatagtaggtgggctttatcatcagaattggctgccacagcattgagctggtggctttgctgctctcatttggactttttcctgtaagtcacggagatcctttcagcgtatacatgtctgtgttacaggggaatggtttccaatgaatgttttggtcacatgcatgatagtagtaggcttcactgattttttttgtgccatattttaagacaatatattcaccttttaagataatatattcagaatgtctaagcaattctgagatattgttaaccctggccgaatggccatgttaataagactagaatattaacaatgattttggctgcttattcatattaggtggcatgctcagagtcaccctagagtttggaaaaactacaagttccattctgactttgacacaccaagatgtagtattcaatgcacacaaaaaattttatgccagtgggcaatactataaaatgcctttgacaacaattttagtatacactacctattttcagctttcctcgtttgttttccttctatttatatagagctgtaatctccaacaagcagtactggcctcctacattatttattgtttcaatataggggacaattacatataattagctggatgacattactcgtttgctggtggaatttgctgtgagtgtatttgcttcttctgggagttgctttctatttcctgcaccactgctctgatgctgtttagagagacctatctctttttttttcctgtttatttattgcttcactggtccaaggcaggaagaaagcatatgaaaatcggtatggaacagcctgtgaataaccatcacaggaggcagagagagttgcataccaattagaaaacactcaaataggcacaaggtaagttttcaataccaggtttattgtaggtgaagaaatccagatgaatgtgtcaattccttgtgaaatttatgaaaacaatcatttggtgccatggaagatgtaattcacctagtattttatttctcctccatgatatgttctgcataatttgattttctgaatgctgaaggtcactcccttggtatgaaaccctaaagtaattagcattttttaaaaagacagttttctcaactatattaatctttttcctatcttcttagagtttgcagaatataactgaacctactgaaaattctgcaatacatgaccttatgccagactatctcacatgacccactgaagactgaggaactatgataaatgatgcagtatttctgagtcctatacatgtgacaggctctgagtgcagggaaagctctttaaaaagttagagcttagacatctgctgccagtggtgtgctgtaggccacagctgtccatctcgccatcctacatgtgcacacaagaaatcttacttatgttgaactctccaaagcacttgtcttggttccctttccatccatcccagattccgacctttggttttccttatccaaagttcctttagatcgtagtcatattcatttttggcctcctgaactgacttcttgactcagacacagtaatctcactgaccgtctttataaattggggctctgctgctacggctaagtcgcttcagtcatgtctgactctgtgcgaccccatagacggcagcccaccaggctcccccgtccctgggattctccaggcaagaacactggagtgggttgccatttccttctccagtgcatgaaagtgaaaagtgaaagtgaagtcgctcagtcatgtccgactcctagtgatcccatggactggagcctaccaggctcctccgtaccatgggattttccaggcaagagt

SEQ ID NO: 58099 - DNA, 1139 bp, Bovine  19866880687596
  misc_feature (1)..(1): n is a, c, g, or t
nactctagattcctctctgccctttggcaggacagggaagtgtagtgacagctccagggctcatggcttccaaggtcgtgcttttagattctgggacttggggctcactgggggtgagacagacgaggttcaaggctggagcctgagagacttccctggcaggcgaggggttaagactctgcctcccagggcaggggtacaggttccatccctggtcagggagctgagatcccatatgtctcatggctccaaaaccaaagcataaagcagaagcaatattgtaccaaacgcagtaaagtcttcttaaaaaatggtccattaaaaaaaaaaaaaaagactggagccctttgctgttccccataaaggtgatagcagggaagtgttgagtaagaaggtgttttcgacaatagcaagagatcccaacacagcttaatgggcctgcctatccgccacccttccatcaacccgcacctctgtggtctaactggattcatccacaggataacgttgatagtgacgaagagcacaagctttggagccaattgtatttgggattaaatcctgaccctgtcactcagcagtgtggtgaccgtggacaaatcacttcatctgtctatgtcttcatttcctattctgcaaaatggggataagagtgctcatttatcagagttgctgtgaggatttgaaacaatgaatctaaagtatttatccatactggctattaagtaggtgttggatgtattactcttactgttgttattattactttcatgcttcaagaaacttttaaacacctccatatatttggaactcattaatctctatgatatgcaagtatgtgattaacaaagataaaacacagttaaagaaatatgtacaagtttgagacgaaggaaatcctataatttctctggagggaaggagccacagtattcctccttgggtaatgtattattaatgctgatttccttgagatacattaagaatggattcaggacagagagagagaatatgagaatttacccagcgccagcgctccaattaatcaacttctgtttctgtaaatagccctaagtgaaagaatcaaactattatgttttgtggatgaacgatcagcaaatgctcagaaactcatctgt

SEQ ID NO: 58100 - DNA, 2845 bp, Bovine  19866880695575
  misc_feature (1)..(1): n is a, c, g, or t
ngtatctgggatagattccatagttcctaattctgttgatgctctttgcacattttgtttttttttaaacctttgtcccctaatttctgtgtccttggcttctactcttatacctctcctgtgactcctttgcggtttctcttgtgagccttaccgttcacacatacatacacacatacacctcatgtctctgagagccattcacaagcagaggatctgctatgtaggctttaatgttaacaaatctgtttttacaggttcactcactttttgtgtctcctctcttgaactgggggcttcccaggtttcacgagtgggagagaaatgcggattgccaatgcgggagacataagagaggctggttggatgcctgggttgggaagacccccagaggagagcatggtgacccactcagtattcttacctggagaacaccacggacagagaagtctggtgggctagagtccatagggtggcaaagagtcagacacgagtgaagtaacttcgcacacactcctgcattgactgctaggactttactcaaatgtccttgagatttaaacacaaattgtaagggaattcagtcttctacactggttttcccagtatttgtcattggtatttatgtttttaaaggttatacgtattgcacaagtttaacaaatacctaatgataattgtgggtatgctgtttttatctgcattttttaaattgtagctgcataggtgattctataggaaataagaatgagtaagttggttagttgtatgtgactcttccaatgttttagatctattcctatttaggtagattaatatttcctgggtgaattctttttttttttttttccccaaaatgtagaaaaagggtacactaaatcccatccaatattctagtatgttaatttaatatctataatgtcagttggctagatagtaaatggctagacatgctttttaaatgtatcaacaaatatattctgctaagtgatctcttcaacttttcacatcatgaacaagaaactccaaactactcagcatattttgataaccctctcaactacagagttaaagacagctgactcaaatcccaactttgcccttcactagttgtataacctcaaaaatctaaataatgtcttagtgacttctatttgtaaaatgtgggcaatattggtacctaatttattgtgggattaactgaggagatgtcggtaaaatgcttagaacaagttttgcttacacatgagaaagaacagctttttatttcctttaatgttagacttctttaagaagtatgcaattcttaacaataataagctctgattaaatttgatataaatatggcaaaatgtgcaaagcactgtgggaagaaaaacaccaaaaacgtggcctggatctttaagaaacttaaaagtaaaactatttctctattttcctaacgattttgctttttaaaatagacctcagaaacagttgattttattattttgatttcagcttcgcactagaaccatattatttttcatcattaatttattactttttccttcctatttctcttccagtccacggccacttggcaccatcacaaaatcacttctcacagacactgcttaatttccttgtatgatttcagtctgcacacctttcccttggccaggagtcttacctttgcatctgtccctgggaattagaaatggagtgtggatggcagaagacatgccttcacttctaacaaccaaatgactcaaatgccctgtgcttttaatggtaaacccagcatttaccattacccagctcttacccatagctattaatgacagtcctttatttgaaggtagggcaaagcaaaatatttaataatatatctctcgtgcccatgaataccagtctaaaagctgaaagaatttaaatacttcattcaagcatttattaaaatgaaagcagcatccagggtctactggagcatggagagccattgccacgttccgtgtatttttagctgttgtcagtggtacatgaaaaacatcctagtgtgcagtcccgtcctgctgacatttccactaggtaatttaccttttgcttcactctctctggaaaaccctccagttattctgtgagataaacaataggtgccttttcttcagtgaacttttgcttgaacttaacgacctgctctgactaaatgcagtggcctcactcctgtaaaaaagaaaatgtttttaccaacacccctttgcctagcaattgcttctcagtgctcagtgtattttagcattgggacagttctctgcattggtttctctgatttttcccttgcagtgggtcacaggcacccacatctggaaggttttagtggtagtcagtgtagcattgggataagctcaaggagtacagagtagggcagtctacatttcaaatcatggttctgctaggtttatgattatgaactggtggtttattcaacctaagactcagcttctccacctggaaatgagaaaaataattttgcctacataatatgacttagaatagggggatttagtgagacaatctaagccaccagggaagccccagtttctcatatattcttggtatgagttctattttggcctatggattgcataatagtggggcttccctggtggctcaattggtaaagaggctgcctgtaatgcaagagaccggggtttgatccctgggtcaggaagatcccctggagaaggaaatggaaaaccaatccagtattcttacttgggaaatcccatggacagaggagcctggcaggctacagtccatggggtcacaagagtggacgtacttagcaactaagccatcccca

SEQ ID NO: 58101 - DNA, 1014 bp, Bovine  19866880814864
  misc_feature (1)..(1): n is a, c, g, or t
ncttccaaactaatgttaatctcaggaactccccaatgtttgatcaactgcctgggcactgtggcccagtaaagtcagaaccacccatcacaccgatgatggcagccaatgttcagaaatgagtgtcaaagcatctccaactccccttccttacaaaactcttctatcgttgccatttattaatattttcaaaactcctgtgtcatctgtttatatttctaggaatgaaaattcttgaaaataaaatttaaacatatgaaaagaaagttgtcaacaatgaagcatagagcaatctcattaattagattgattctgcataagatcatcagcgaaaataatcctgaatattggatattcaaagatatgcaggcttattaagtatgactatatattttagcctaaacaagattgctacaaattagcaagtcaattttctttcaggatctgctttaataatcagatttaaatgatcagtaaatagcacatcaattactgatatggaaataggtgctgaatggactttcaaataaagtattcttagcagaggtgaaccatgtgccctgcagcttagttttggttattaataaatgtaatttttcaagcttatgtctaacttgaaataagttctacgtcaatgaagtccaaattgttcatgtttcttttaagcagagaacaagtagggtttgtctaacagtttcactgggtatctgaacgttttttaaagacataatcctttcccttagtgcaaatgcagagaaacagccagaaaatgccccttgtcttccactgagagggatgctcctgctggtgtggtcagtggagtttccatttatttatttacgtttggtcgctctgggtcttcactgcttcgggctggctttctctagttgcagcgctcggtcttctcactgtggtggcgtctcttattgcagagcccaggctttaaggtgctgggctcagtaggtgaggtgcttgggcttagttgcccctcagcatgtgaggtcttagttccca

SEQ ID NO: 58102 - DNA, 754 bp, Bovine  19866880815291
  misc_feature (1)..(1): n is a, c, g, or t
natgattttggaatacccaggtaaataaaggagtggaatggaagataagcctctttcacaacagagtatttgttggtcgatagcatttattactcctcagctcaggaaggagtttacggccaggttgtaaatataaaataagcacaaatgaagctgcaaaaactcttgcaaagcaatataatacataagtgagtattgatggcgaaggacagacaagttagccaggcaccctgggtaccagaagggaaggagagctgggggcctgagaaggacagtcagcaaagggtgcctggaggtgagattcaagagcagccaagtttgtgcaaagcctcacagagtgggaaaaatgaccactgaccacagttgtcttgtttcttgactaaggtttacatcccaggcacgcataccggcaatcaataactccttagctgccgttctcacataatcggaaggctccaggggaactctgggcccacctttaaggatgagtcacgacgtgacggctctatagagagaggacttgaatttcctccaaaaaacgctggtgctgacactctgcggcccagagtcagcctttcagtaaaaactcaataacctcttgggtatgcttcctgaaagagcagaagtgaaggctttttctgacagttacttaacctcttcaagtcagagctgcctcatcggtaaaacaggaatgtcctctgcctctcagaggtgctgcaaggagaaacgaaaattaccaaagctttgtaggtcc

SEQ ID NO: 58103 - DNA, 1383 bp, Bovine  19866880866524
  misc_feature (1)..(1): n is a, c, g, or t
ntccaaaaactcttcccaaagtacataatgctctaagacctcatggatacgattccttgcacatatgaagggagaacaagtattaaatttcctatcaaactattttctttctattcagtctatatctcaaaagagctcccaccaatataacctttttgccaaatggccaagatgaaatatatttggggggcatttgatatgaaatgaacagtctcaaatagctttacacatgttgaaagtttaaaaagttgtttattaactactttagttataattcatttaaaaatcccattatgtttggttacacaagagtgactttaatacacttaaagatgcagtactccttagctgtgacatatttatagtctgagcattaaaaagtttataaaatcaggccatattttctcagtgtcaaacatccctcaatgaagacaattattcagcctgcctatttgtaattaggtatgaaataatttatgattatgaagataagtgagcaaaaattttagaaggactgcatattgtattttattattaaaagatttccataatctttccagggtttgaggagtcataaattgcctggatctgatttccactggattttgcttagaattaataaacatatggatctcatctaagatcatgtgtcaaaaataatgaaaagaatggcttcacacaaagctgaaaatgaaaccagactgacatgagctgactttggtttggacaagtaccatgagctgcctaaagtcaacccacaaagaaagagactggcagtgccagcagggagagtacgccccacggggcagaaaggcagccaaggttcaagtaagccagggctgcagagctcctgctttgccacacttccttctcaacagggaccaaggacacgtgcaacatgctattattgcacatggcatctgtggcttcctgggtacgcaggcagctaaaaacatgaatatttattggaaggactgttgctgaaactgaagctccaacactttggccacctgatgtgaagagccaactcattggaaaaaaaccttgaagtggggaaagtctgagggcaagaggagaagggggtggcagagaatgcaatggttagatggcctcagtgactcaatgacatgaatttttagcaagctctgggagatagtggaggacagaggagcctggtgtgctgcagtccatggggttgcgaacagccacacatcacttagcaactaagcaacaacagcaacaaaaatgtggggagggcaagcagcccttctcctcagtccctctcccaagagaataagcagacacaaaaagcattgaccaatttctcgtttctcttctcttccattcaaaagaagtcataggaacagggggctgctactgttc

SEQ ID NO: 58104 - DNA, 1698 bp, Bovine  19866881002499
  misc_feature (1)..(1): n is a, c, g, or t
nctgggttgggaagatcccctggagaaggaaatggcaacccactccagtacttttgcctggagaattccatggacagaggagcctggtgggctacagtccatggacacagagtcagacatgactgagcaactaactcttagtagactttgaaatataccccactgccaaccagtactccccagatgctgagggctttggagacataaattcaaaagtaaacaattaggagtataaatctttacaaatcagaatgtatcataaagctgaatccgagtgagttttggcaccaagaacatcatcttcattgtacttctttctcatttgttcctaaatgtgactcccaccttcacgttcattgacaaaggtaattgacagacaacaagagctaagaatgaacattaacaatttctatccaaatgtcccttttctctcaaaataaaaaagaagaaaatacgagtcgggaaagcttacaaaagaaaggaaaaggggaccattggtcaaatactcctgtgagtttacaatgaattacatcaaaattcaagcaggctcaggtagggcttcaataattttcagttaaatgatccaggctgtatctcccgagtgttacatgaccattttgctgctgactcaccgtggtagatacaagagacaaagcttccaatttgtacggtgtttactgctgagaccaggctctgcaggcacttggtaaaagctgcgctaagtgattttctgagtaaggctggcctccctctcatacatgatttagagccacggggcctcagccagcaccgggagacggtgagatgagtcaagtgtgtctttcaaaaattaaatatacggccccacgactgtatgtgtgagtgtgcacatgtgtgtgtgtggttcctctacctctgtctatcactgatagagtgcgattgggttcatggcagctgaccttctaccagggcagatacacagacatgagcctccctcattctggtacctaaagcgtgtggctttcactttaaagcacaacctcaaggctgcctctttcccgggcacaagtctgtgccctcacggtggctgtcctcgcaggacatgtgtggccacttcacggagcgggagttattggaccctctctcagaccagctggcgcacctcacacatgagctgcttcgaccccaaaccccaccaagagattaaaccacctcattttcctccatgtattcacgcgtcagctacgtagcaaaggtttctatgtcccaagacacttttgagacaggctggcacctgagacccttggccggaaggcctgaacctggtcacactctcctcaaacagcaggatacaagggaactgtgtggggctaaaaactgctgcgcttattcgcagttgggcaaattctggacaaaagacacagagaccaaaaaacttagctgccacttctgaagagccaggagcgaaaacaggttgttgggaacaaaagcgggttaccaagtatacaccctgcactcaacaccaccaaaggggtgggcaagccacctgagtcatccctcctgcctgacctgtggacacacgcccaccctcaccccatacgaggagcaagcttaccaccccacggggagcaagcaagcaaggtgttgggggccagagtgaggtactccgcccgtgacaaaggtcatgaggaaggaggcgggatcgagcctcaggagtcc

SEQ ID NO: 58105 - DNA, 909 bp, Bovine  19866881018470
  misc_feature (1)..(1): n is a, c, g, or t
ncatattgcagccctttaatattataaatccctgagtaattgaaaatgcatccatgcaatgatggtgactgttccacctggttcttaaaaaaaatcaatttgtaaagaaagtaagaatttgcatctgcctgaagcccaattaaagtgacagatctatattttcagttgcaaaagacatgcaaagggatatataaactcttatcccaaaactgtaaaatctgcctcccattgaggcacacagcttactaaacttgtggctgattaagtcaagaaaaaattagaagcaacagtttgcttttgtttctgtagcaaatccataataacacgtttatagcctgtctgaagcaatggcttaaaccctagtttatcttaacattttagtttccttgtctgtccatttatttactctagtaaatatccatctttaccactgcggaagataaactacttgcattcccatctggctcttaggaaatccctacagatattgctacaaaaaaaaaaaaaaaaaaaaggcagttaaataggataatagtgtgttaggtattatacattgtatttctaaaccattaacaagaaaatggaacataaacaaatcaataaccgaacccataaaagcataaaaaggaaggaccttagagtttaaagaatgttcttgtcattatgttactggaatttactaaaaatatgcaccatagggataagtcagtttacttttattgttgttgttatggctgacaactctgggtgaaatattcagaagaggctaaaggagagtgctatttggagtcaagtctccagtcatttggtgaagattattacaaggtgacatgcaaaactcatagcaattgccatgcaagatgccacaacatttcaggaaacccagaggaaattcagaaatttgacaca

SEQ ID NO: 58106 - DNA, 1211 bp, Bovine  19866881088850
  misc_feature (1)..(1): n is a, c, g, or t
nttgagttccattcaacagaagtgtgtcactgaatccaggccatactcaggggaagggaatgaagtaagatatggacaccaggaagtgcaaatattgagagcagactactttatcattggtaatccttgtaaaatgaaagttaaatgtagaaactcaattagattgatgatgaatatctttaacacaaaaataggaaggataatggtttatactttgtattgtatgacacctggaataaatacataatcaccccgctattaccaaaactaaaattgatccctgaatagaggtaatggaagcttgattcctccactgtaaaattatacttttctttttcaaccagaatgcgattagtggattttattttggtatcacataactgtccatccacaaagggttttaacactgtatgccagtgattgcaaagtatgtttttgcttttcaactcataatagtcattctgtatttctatctgaatctcggtcaaatagatctttcccttttgactattcagttaccctgaaacatagcacttatcagaagggcaagaaaactgttcgtttttttttcttccctctaaacttagttttcagtacccagagtttactgatgtctaaatgcacatctgtaatcaactctgtcccatcaatactcctcatttgatgtggtctgtgatagttttctgggaaaaataattaagttttaccaccgtttttatttgtttcgtgttgttactgaaattcccttcagtgtctgtattccacagggcactttccttaacaagtcttatgtagccccacgtaagcatgtactcaacccatttaatgccacctttctgctgtggcactgccaagatgtatcttaaacagtttgactgtatcatttcttggatgctggattgattcctgcagttttataacgttctaatcctaatgttcggttccagcttgctctcacccttagtgccatttatgcacatctggcctggccaactcgtgttcttttatacggcctcaacaattatttagatgaccaatattcactaaagcacgcatgccagagatatggcacgcctgccaagaaagtcagtccctgcaagaccgcaggagggtctgttgtaaaattgccctaaaattgatatctttatgtttattgttatgagattttgtcttttttttttttttttgagctttgttgcaaatctaaataa

SEQ ID NO: 58107 - DNA, 1331 bp, Bovine  19866881120721
  misc_feature (1)..(1): n is a, c, g, or t
ngaacgagcaaacagaaagagaaaactgcgaaaaagtagaaacagcaagatgacgggagagtgagagtgaggactgagaaaaggcgccagggtttccataaagaaacaaatatatttagaaagcagcaactccgtgtgacatttgctaagtgattttgatgattgacttttcaattgagtttctgtagtaagaagtgaaggagggtggggggtgaggaaaaagcaattttcccaatgggggtataaaacccttcagcctaatgaaatgttttctctggtttagagataacaacccacttcttttgggttttatgcctaatattgattctttgtgtattttttatggaagccttgatgaaattcagttaattgtattttattggaatgggagagtgtcctgtttaatattctccaatctcctcacccatggttcttcctaccttccccccttctccctatcaatagtttagctttgatggatggtttgtggtgatttaaaaaaaaaacaacaaactctcgctctacctttcttgatccgcttccagtttgcacagttgcaaaagcactgaaaaagccaagttcttttaagctgtaagatgctgaaatatggtcattaaatcctgatgggtttttttattttgcctctcataattttaaggaaaaccactttctgagatggttgggtaaatgcaggaaatatcatacgggggaaagtgaggtcccagggcagcttttaaacctgcagggtgttgagtttatttacaaacaccagcagaactagcgagttaccagggtagcttcaccaagcggccgggactctggaacacgagacagcaggtacaggggcgtcagccgttcaggggctggcttgtgggggactgccctgtcttccatctttttacatctcggtgttttatctagagaaggccttgtcttgagagaactgctttgccactgggcaataagatgacttacttcttgggatgtctcataaaaggatcaagcaagaacacttagttgttgagagaagctgtaatctttcttgactgaatggggtggacatgggaagcagaattagatttagaattgctcaaaggataaaagggttcggatttatttaaggccccaaaataatgaaaacgaaaggtaatagagacacaggatattatgctacaaagagtcctgccttagtatttagaagccttggattttttttgagtcctggttttgtgacttagaagtcaaatgtccttagggaaatcacttctctgagctttgagttttcctagatgtatgaaaagggttttctgggggcttattttgggctggag

SEQ ID NO: 58108 - DNA, 784 bp, Bovine  19866881172318
  misc_feature (1)..(1): n is a, c, g, or t
nacaggcagagtagggaaagacaaggttcgagggcaactcagctctggagagtgtctttccctcttacctatcacgtggtctgtctcctagctgagaaatgctcccagtgcctctgaatccttactcaccagtttcatggcactgtttcccttaaaaatctcttgtttattcaccttaatggcgttgcagcatttagttgccacgctatgagggaagctattatggcagatggttccacaaataattaccttcatacttacttgtgtgctctatttatttttgctgattactggtgcattttttttgaacccattaaagccctaaagctctaccagtaggcacctaaataaaactctatcatcttgaaggagaagaatttagtatgtggttgttgagctactaaactctccccagccacactactgtttcagtcattgagagtttaacggaggagaaaatcagaatgtattgatttcctcttctgtcccttggaagaggcattccacgttgttttcatgatgttttgaagcacacacgatggtgccttttaaagtgtttgaggaaaagcaaatctgctgggtgagcatttagccagcttgccgttgaggtctggctctgtgttaatgtcaagctgtgggttagtatctggaggcagaaggagacgagacagcctttcccttctgggaagtgtgtatatctgaccacaagtcagattcaagtactgagttttccatgctgactaaaggactgcacccaagctctgtgaagacctatgcacatagg

SEQ ID NO: 58109 - DNA, 1114 bp, Bovine  19866881184841
  misc_feature (1)..(1): n is a, c, g, or t
nttcctgtggtcatgtatggatgtgagagttggactgtgaagaaggctgagtgccgaagaattgatgcttttgaactgtggtgttggagaagactcttgagagtcccttggactgcaaggagatccaaccagtccattctgaaggagatcagccctgggatttctttggaaggaatgatgctaaagctgaaactccagtactttggccacctcatgggaagagttgactcattggaaaagactctgatgctgggagggattgggggcaagaaaagaaggggacgacagaggatgagatggctggatgtcattactgactcgatggacatgagtctgggtgaactccgggagttggtgatggacagggaggcctggtgtgctgcgattcatggggttgcaaagagtcggacaggactgagtgactgatctgatctgatgtgaacatttttatggcacaaacatacaaaaaaaatcaaagaaaagaaattcaaaaaagcatattttactctttcagctgtttaaatgtcctgttttattttttaatttggaattttgttggtgctgttctccaaagaaactcaaatgtgaatcagaataaagagtactgcataaccctgtgtttggtccataaaaatagaaacatttgaaatttagcacacaatatcaggtgttcattatatgctacacatcacttaccatacaactcattactgataattaggctctaattagaatactgtggcacgtatacataatagaatattagtcagctataagaagggacacagtttggagtcagttcttacaggcgcatgaactatacagagtgaagtaagtcagaaaaagacaaatatcatgtattaacacatatatatggagtctagaaagacagtacccacaattctatgtgcagggcagcagacgagacacagacataaaggaaagacatttggagtcagtgggagaaggaaagggtgggatgatttgagacagtagcgttgaaacatgtacatttccatatgtagagtagatcaccagtgggggtttgatctatgatgcagggaacacaaaccctgtgctctgtgacaacctggggggcttggatggggcgggg

SEQ ID NO: 58110 - DNA, 728 bp, Bovine  19866881259237
  misc_feature (1)..(1): n is a, c, g, or t
ntagaatggaataataaaaagtattgtttttcataactacaataacaatataagtaactgaagaatacttgatcgttttacaaaaggctttctcatagactatcaagtaaatgatggatgtcacggttacacaagccttctagtgtctgacaaggcgtccgtttggggccccggcctcagaatcagactccacagctttggagtccaaccatcgtgctttatggactctgtgatcccagtcaggtcacctggtcctccccgagcctccgtttcctcatctgtcaagtgagatgagcatcacagcttcctcatgggtggtggtgaggattcaacgagagagtactcagaatgcacttggctcagtgcccagcactttttgagggaagtgctcagttgctcactcgtgtccaattctaggtgaactcatggattatagcccgccaggctcctctgtccatgaaattttccaggcaagaataatggaatgggtggctcctcctggggatcttcctgacccagggatcacacccacgtctctttcgtctcctgcagtggcggcggattgtttacccctgtaccatctgggaagcccatccagcacttcctagtgacttatcagtgttggtggcctttattactgttattggtaatagaggctaccgtccaaggtgaggtgcgaaaccacgggcaagactgtgaacaaaacgtgggttctgactgcctcctga

SEQ ID NO: 58111 - DNA, 1421 bp, Bovine  19866881265668
  misc_feature (1)..(1): n is a, c, g, or t
ntgagacgtaaaaccatcttatgttttaaaggcatgcaacattatgagaaatcttggaaatcttttgtactggatatgcaacctgtctcacaaatctcaacatttcgccttttaaactgtgtgacccaggagcaatgtattcatgggaacaatgggagacagttgagtgcctcagtttgtcttgctctactctaatttctacacgttatttagaaattctgaggaaaaaaagtagcagggctcccatggcaatcaacatcagctgccatgcaatcaagctcaaagagtttgcaggtgttttagggactttgctggggaatagttgacatttctgtataacgtgtcaaaccagggcaggagttgaaagagatcaaaatgaaatggagagtaaactcctagcacttggctaacatcacaaccaattaaacaaataacagatgctcactggaaactctgcggggagcaagctgtagacaactaaaaaaacaaaaatagccatcacagcttttaaaagaaatctgagttggctttgtgtgggtgaatgtgcatgtatgctggtgaatgagggtatgagtgtgaggtttaacaaggtttccaacaagatcttttcaagttgtttctgaagaaactactattctattacatctctattaaaagtatctgtgtagcagtagctttattttctgtaactaaatgcactttgggccagctttattacagaaaaagtaatgagtattttagcacagaatttaagtcggcatgaaaattccagagggggttaattagaaacagatcctatggcaaaagggaaactgaagccaaggttatttgccctggccaagttccaatcactctctggagttcttgctataaaaagataagatactccaattaaaataaatttatattaaaaaataaaaaagatgagatactgttgaagatgaaattattcccactcccaggtcttcatccaattttataaagtgtacagtaaaaatgtgcattttcttgacaacatggactactgacagtaagtaaaatattaagtctgtggcaaccctaaattcctattctcaacagtcaaaagattagtcttacctagaaaagttttgctcaaattgatttcctgttagtcgttcagtagtaagaaaaactatccaaatcttggaaataggtaaaaggatgattgcatgcctcttaatatagtgctggaatatgctgtaagagcacacctcaaggattatttatgtctctaagggatttgcttttctgatttgctatttactattgagtagggtctagagtttgcaaatgaatgctaatttatagatttttgtctgttggcatgcaaataattcggtcagatataaaaaataatcccaaataatatagctttattgccgtgcctgcatgcacgcatg

SEQ ID NO: 58112 - DNA, 838 bp, Bovine  19866881433489
  misc_feature (1)..(1): n is a, c, g, or t
nagattgaagaacttgtgaagcaatctggtactagaatttgcactctcaatcaccaccctttgcatcttaggaaggctttcagctgaaatgtaagaacataaatgagaactgattttgcaccttgaagtttttcagaacaaagccattgaagaataaatgatggcacaaagcagtttatttgtgccatgccaacatttgcaaaccaattgtacttcagttgcagagcgtatgtccacatgactcttttgaatagaaagaggtaggtatttttttgttttttggttctttttttcccccagaaacaagtgtacagcagaaaatggagcaaacgatacatatgttaaaaatcttccctgaggctggaacaggtaggtaggcactctgtatgctcctgaggaaataataagaaaggaaataaatacactcctagcttttgaaagtttccgtctcggaagcttgccaaatacacgcagtatgcagtcttccaccaggccttggtgagggtttaattacgcggctgcgaagcatcattactgctaaccaggagaacttgctaactgaaagagacctggcagttcacttcctccacagatttcagatttttctttttcatttttgctttattaagttggaactctaatggaaccttccctggcactcatctcctagtaactctttgaactcacaccaccagagagaggtggcattgactgaaccttcacaatggcgaacacgagcaccgattaatcagttcccttgaaaagaaaattggaacaggtagagctggagactggctttcagacacaggagttggaatcattattctgaaataatctc

SEQ ID NO: 58113 - DNA, 1734 bp, Bovine  19866881480295
  misc_feature (1)..(1): n is a, c, g, or t
ngatatctacaaagtcttaaagtatattcccgagtgaagttgctcagtcatgtccaactctttgtgatcctgtggactgaagcctaccaggctcctccatccatggaattttccaggcaaaaatactggagtattcccttctccagggggtcttcccgacgcagggattgaacccagttctccttcattgcaagcagatgctttaccttctgagtcaccagggaagccccattaaacataaaaggaaaaatagtaacgtacagcataaagagacctaagcaaagccatgttcaccaagtgatggaagttaacatcaccagtaaagagaaaaaaaagtctgaatagcctgtagataagatggttgaaaagtattaatattaattttcagaatttgttgtatgtactttggttatgaagtgaaaatatacacagggaattgcctggtggtccagtggttaggactccatgctttcaccgccaaagggcctgagctggatcactcatcagggaactaagatcccaggggtcatgcagcaggccaaaaaaaagaacaaggaaatatatgcaaaagtatccaggattaatgaggcactacatctgtaacttacagtaatccaggaaaaaaatttcgcgtgtgtgtgtgtgtgtgtgtgtgtgtagacagaatgaaagagggagagactggcaaagaaaatgttataaaatgttatcaatagctggaaaatcttaacatagaatatgtgagttcatcttgcaaaaattttgtgaagtttcaattatttcaatttttttaaaaattgaagttaccgttagatctaaacagtggcatattttctgaaataagattactcggtaaagtatttcaacttcatgattcttactataagcttcatgtttctatatgaattttataaaaggtttagagtagctcaagcaaatgcatgatcatactaacaacaagtaaaaagaaagatgaagagcatatttactttcaaggcttcctatttaaagacaggtgagttacaaaaaaaatttctaaagacactgccaaaacatagggatagtaaggtggtcatttctttataactagccataacattttaaagtatgaaagttgagagaaaagtgcatgtaaattctatcacttgataaaagatatcattcaaaacactaagtattttatagcagagatggtgggaaaatagaaaatgcagcagagtacatggttcccctttccagaagcttgccaactgaaaaaacccatctgggaaaactaggaaggaagatatcctccaaacacagcaggttttctcagccttggcacgacggatattttggaccaggtaattctttttgaaggggcactgtcctgggcatccctgtaaccctggcctctcttacccactgctggtagcaccccttaaaccgtaacaatcaaaaatgccttcagatgtttctaaagggttcctggattgggggaggggtgggatcaaattcatccctggttcacaccattgaaataaacccacacatgtttgtccaacgtgtgagaagtaacactctcctccccctggaagtagtccattctcacatcctggagtgctctctcatgtgcttctagaacattttaggtgtaatagagaaagaaagaaaaaaaaaagagagacacagagagagagatttaacccagagaaagaaaagtaagaggctttggcaaagtttcagctaaagttg

SEQ ID NO: 58114 - DNA, 3088 bp, Bovine  19866881506830
  misc_feature (1)..(1): n is a, c, g, or t
ntttacttcccccaaacttggtgtggctggcgtcagtgtcatggtgatgctgcctaacaagggtgctgctcagctcaggtgatggaagcaaatgctgattcgtagcaaaatgtgttgtactagaaaaagcccagtgacagacaacaataaacatctacttctcacacacccggggtattcagctcagcatctctgctgatgttggctgaacacactcacacatctgggattctacgatggcctccgctagagtgataaagcaacttgtctctcgtcttcctcccaggatgagcagggtgtacctttttcacagcgatggtggaggccaaacgtaagcagacacacacgagcactttctcaccctctgcttcgtcaagcctggtaacatccactggccaaagcgctccacgtggctgagcccagaatcagagacgaggggattataatgtcatatgacagaggatatggatggggggggaagggaccgggggcctctaaagccagccatctactaccccttactttagacagaagacgttatggtcaattaggcgttttcttctttcatccctgcataattgaactcaaggaattaaagtgaattgcccagaggcacacaccttgactagtccagccagaatgcagacctgcagccaatccagtgctcttccaattccagtgtgccagttccctaaaaggcaccaaccacacaggcccccatttccctgtgcccacagtaggcctggtatgaaataactcaaaattcttgtaactgagcttggggtcacatggtgtacttatgagcagaggaaaatgcatggctaaatttaagtctgtgccactacctcctcagagtattttaaatagctcaataattataagctgtttgcctgattttactttcctgggaggttgtgacgcaggcttgaaaaagctgaagttgttacacgtacccagagtccccataaggataacacatctacatttcactaagtgcacatacatcgttcctatttatgctcaagtcaaagtaagcctatttttttctgcatttcatgctaaaaatcctcccctattccccaatctgtttagccatatgtgttggataactaggaacctggtggcaattctttatagattttatccccccccccccgctttttttttttttgtctcctgacttatctctacattaaataagtggctgctaaataggagaaatatctggagacagttttgactgtctcatcttggggattctactggcatatagtgagtagatgttaaggatgctactaaacatattacagtacaaaggacggtcccccacgagaaatgattcagtccaaaatgtcagcggtgctggtttgagaaatcctgcattaaatacgtgtcagtgcatggatcgctgataccaacaaacttatcacagaacatatttttgtttcttttacattaagacaatctactctgagaataatgctttacttaaactatagaaatagtaacagaccatgaatgttggtcccaagtttcatcattgctatgtctactacttctcttccctttaagtcacacagtagtcctgagggatgaggggtgggaggcagaaggatgcagggagcgtggaggaggctggacggacctgactttggatcccagctatgccgacgactagctggatggtgttggttacatttacttatgccccctctgctgcagtttccctttttgggaaaatgggaatatggccaactacctcacagggttatggggaaaattaatttagaagatctatataaattctctggcccagagtaagcactcagtaattaccaattcccagtcattcgtattaaaactcctcttaatttcaaatctgggtctcatatcctggtatttggggaccagccagacatggcaccccactccagtactcctgcctggaaaatcccatggatggaggagcctgataggctgcagtccatggggtcgctaagagtcagacacgactgaccgacttcactttcacttttcactttcatgcattggagaaggaaatggcaacccactccaatgttctttcctggagaatcccagggatgggggagcctggtgggctgccgtctatggggtcgcacagagtcggacacaactgaagtgacttagcagcagcagcagcagactctagaaagagccagcaagtacttaatgagaaaaaagtttctgccaatgagatcactggcttatattttcattcccaaaggatcaagttagttcatagggggcttccaggagcatctgaactgagctctgcccactcgttactaataagtttggtgtttatatgtcatatcacttgcatgttgaccagctgagaagtccaacaggggtttcaagaatggttacgtgcaagtctgaaaacagaagaagccagaagcaaatatattctaacacagccagagtttgtgatgcattctggaaaatgacggagaatatagtcctagggcagaatccactgaaccaatgttgatgaatccaggttagaaccaggctcacttttattcttcccagggccttttcagccttcagtgaaaatataaatgccctttaaatgtagctcctccaaaatcagtcttcttccaaatagactcgttgaagaggtgatgtgacattggttagtagcatgttaagtatcaaattgaaaagccttttcctgggttgtagtaggaatgtgtactgatgtatgatttcagagctattcataagactccaagtagttttgcaagccacactgtgacacaagcaagcactgtgacccagcaagtccacttctaagtgtctatcttgctaaaattctcaggcagttatgcaagtatatacccacaagaatattcgcttgtaatgttatttgtgaaaagggaaaactggaaataacttgaatacccatcagtggtaaatatagctaagtaaatgatggcccatctattcggtggaatactaaatttaagaaaatgatgaggtagctctatttacgtacacatactcaagagaaggttataaaatattgccgcatccagaaaacaaa

SEQ ID NO: 58115 - DNA, 1217 bp, Bovine  19866881517691
  misc_feature (1)..(1): n is a, c, g, or t
nttggctttgggctgctatataaagcacattcacactccaagcatttaaactgaggctggggattgggaggtgatacagtaagtgttacagtggccattaaaatgtcttaaacattaaggttccaaaaaatgggatatttagctatattaacatcgccaagttaaactggctgctttcccaagcatgagctctggtaattgccacttgatagaacagtgaccctaacgaactgacgtgtaagcaacagaaatgatggtcacatgcccccacacacacacatgcaccattaggtacacggagcctcaccaattgctcagaaaacggaaggcctgtgctttgctttggactcttacaagcatcagaaatgtttgcacaggtttcccctccacgtgaaaggatttaaaaagaaattaaaccatgcataggtgcaaaggttaacagcgtcagccgctagtggcgaatgagtcactgctgctctttgctgggcactgacctgagtgcttcagaagaaaccttctcaacaacactctggagcaaactcgggttcccaagttacagagagggcttaggatagtgatcagagcaggcagaaaccacccccacccccgcccgccggagatgcccacatcctcgtacggaacccaggggtaagctacctgacatggcgaaaagacccctgatgagcttcagcttggggtgttgacaaggggagatgatactagacgatccaagtggtaatcacaaggatccttgaagtcacaatggaatcacaaggatgcttaaaacatggaagagggagacagaaggtaaagtcaaattcaaagagagatttgaaggtattagattgccggctttgaagatggaggaaggggccacaagccacggtgtccaggcagcccctggaggctggaaaaggcaggaagtgggctctccagcaggaacacagccctactgacaccttgatattagcccaggggaccctttttggacctctgacctccagaactctaagacagaaaaattgtgttggtttaagcagcaatgggaagctaatacagtcaccacacattagtaaatgatggaggctggacttgagccctggtgtgctggcctccacagcccgtccagagcttgctcactgttgtcagttgagtgtcccccaccctccccaccctgggaataaaaagttgaaatcctaaccctcagtgtctgtcaa

SEQ ID NO: 58116 - DNA, 1267 bp, Bovine  19866881553509
  misc_feature (1)..(1): n is a, c, g, or t
ngaaactgcttgtttcgttatcctgccttgagagtgacggtctttccccaactattcaagtgccccgtcagctcacccataggactcagggtggctgttcccacaggaaggtgctgaaatctgaaagtgtaggtcataaatctctggatactgggaagcctagttaccccagaatcccgtcccaccacatgccaacaattccacagtgcgatgggccccttttgcatttactggcctatttgcaaccaccacatgccactcagtcagtgtcgaagaaatgactccctcccctctgaaccttgttccctgccagtgctgtgggttttgatgagatgctcccttctttttactgttaactattgatgctttcaaattgtggtgctgaaaaagacccttgaaagtcactcagactgcaaggagaccaacccagtccatccgaaagaatatagaccctgaatagtcattggaaggactgatgctgaagctccaatcctttggcctccttatatgaagagctgactcattggaaaagaccctgatgctgggaaagattgaaggcaaaaggaaaagggggcggcagaggatgagatggttagatagtgtcactgactcaatggacatgggtttgagcaaacttcaggagataccagaggacagggaagcctggcgtgctgcagtcgatggggtcgcagagtcagacacaacttagcaactgagcaataacaacaatttccttttcccctccccacactattaacctttcaaagcgttaaagtgatccctgggttatcactggagcaactgcatggtacaagaagtcacggcatctttctggcagagggaaagggtttcccatgttacagcacctgcctcagttcctggatgctgggctcagggattttgatccctctctggaagacttccctgccccctggaaggcagttcacctgagagttggtctgggcttcccaatgggacccagcgcagcccctaaccacactggccctgtggactcccgttttctcaccagacgcccctccacccacccgcaatccactcctctcaggttcctcattaaagcaaaaatcgtcaggttcttttaatgtggctttttgtgtttcatttcctttgttggttaaaaaatgttgccagtgaaacattttataagatttctatacagtgcatacattttgaacattttgttcctattaacataaaatattattctcatttcctctcatgtgggaagaaagaaaaaaaagcattc

SEQ ID NO: 58117 - DNA, 1100 bp, Bovine  19866881751630
  misc_feature (1)..(1): n is a, c, g, or t
ntacggtcttgaaatcgatgatgggaagtggcagatacacctgcagcataatatcaaagaacaaagcaagaaaggattatcttgtcactaaatataatggtatacattattttgttttattgtgtttaaaatctggtgtcagctgccatagaatgaactaggcaacagcaggtgtcttctgtaataacctgcaaagacatactgaattctcctctgtattctaaaaagagaatcacttgcaaggagtattttggctccttggagctatggagtcatttacctgctcaggatggcttacgggaggattctgagaatttcaggcaggcactttccccatggtggagcaattgctcatacggagtttaacttgtctctatggcttccaagatgcttttgaaatgttctatttagaggaggagaaggaaaaaaaaaagttgttttcaagcaagagatatatttaaaaaatttaaaaaaggatgtatgttttattccatctgatctttatttttaagctgcagtgtttaaagagatgtgcactcgccactcactgcctctcatcctgggtggcaaagtacaaaattgtgtcatttggcagctccatcattcacctgctgtggaagtttagaccaggtacttaatgtctctgttgtttcaactccatctgtaaaataaaggatgctgttagttgctcagtcatgtctgactctgcaaccccatggaccacagccctccaggctcctccgtccacagaattctccaggcaagagtactggagtgggttgccatttccttctccaggggatattcccgacccagggatcaaacccaggtctcccacattgcaggcaggctctttaccatctgagccaccagggaagaccccaaattaaaggacgagaaagtatttatttctaaggaataaatgaattgacaggtaaaatgctcagaacagcggtctttttctgtgctaaatactgtttgtgaggtccaaaggtcattgaacaaaatttctttttcttctgacgcatcttggttcaaagtgtggtgaaagttcctgttaaaaatgtgaacagtcggaatttactaaaacatttatcaaa

SEQ ID NO: 58118 - DNA, 600 bp, Bovine  19866881858446
  misc_feature (1)..(1): n is a, c, g, or t
ntttgaaaggcgagctttcgaaatatgtaacaggatgttgaaatgagaaaagggaaagaggcagagagacattttattgaaaagcatagtgtagagcttagcttaaaattggacacttgcctttgatgggtctgcttttaaaataggaaattgattttcagttaaccaactgaaagaaaaatgcacagctacactctgctcttaattctgcaggcagtccttccttcctaactgactttcctggtaaaggcatttgaatactttgcaaatagaaggtgcatagggtttagcatgctgtgtcctgagcagttcaggctaagtttatgttgctgtgccttctgttttccccaggactgaaaaaggagcacttgcattaagacggggtacagctgagtggaaactgcatgtgcaggcagctctttgaatcgtgacgtgtaataagtgaattgcattctagtatatgaagtgtgacatgtgcgaattaattactgttactaaattgatttacattaaattgccagtgatttgtcattttaaattatctatggaaaaattattttggtttatggtccatttcaaatgaggaactttaagtaggca

SEQ ID NO: 58119 - DNA, 2564 bp, Bovine  19866880382584
  misc_feature (1)..(1): n is a, c, g, or t
naataaacacaccaatgtgaggataaacaagcagttaagaatgaatgaaatgtggctatttcacattgaagtttcacatgtgcatgtgtgctaagtcacttcagtcgtgtttgattctttgtgactctgtggactgcagcaacccactgggttgccatgccctcctccaggggatcttcccagcccagctatggaacccatgtctcttacgtctcctacactggcaggtagaatctttaccactagtgccacctgggaagcccaggcttcatgtaagtctatccataggttctggctaggaaacaaaatgcatttaggatgaggacacaacttttataaatataagaactggctggatacatggagatgaaaaagttcatcccaaagtaacggttctattagaaagtgaaatgaagaaaactgtgggaggagcaagtttttagatggacacactaacaaatgatggcatgttgcaacatactttagccatctcaggtagacggcaaatggctgtggataaaatatcacttggttaatgaggaagataaagtatgaatagtcacaagggtgagatggggttatgtgctgtgtcatttactaaaatattagaaggagcacaggatttaagactcagaaaaaatacagtatttcatatttccccaaaattgaccttaaagaaatttagctttaaaaagtcagtaagtggaaatttaaatatagcattgtatgcaatatcaactatagaaaggtacaataaaagaaaagaatgtatgataaaagatagtgactccacagccaacagccataaacagaaagatataaaaaggtcgatcatcttctaaatatatacttttaaatagataataaataaaatatttgaaatgaaaaaaaagtatgtggcaactaaagaaaccaaagggattgcataagaatgtctctcacatatttgcatttttagacattaaaatacaatatgatctaggatctatctatccttgatgtttatatgtgtatgtgactacatgctcagtcatgtttgactcactgcaaccccatggactgtagccatcaggctcctctgtccatgggatttcccaggcaagaatactggagtgggttgacatttccctctctatgtgaataagtgtatatatgtgtaagtatacatgtattcatgtatatatgtgtgcgtgtgtctatttgtgtatttatgtgtgtgtgtgtgtgtgtgtactagaacttactgtggtcttgataaattaattgataaattagtgtcagatccaaaaaaaggaattaggatcctgtgattagagttatagacagggagattacaacaagatatcaagatatcaaataacaacaaaactatccagtcatttaatgggatggtttgcttatcatccaaaggagggtttgagcagatactgagtgaccagatggagggaatggtgtagagagaactctagaaacatatgggtggttgaactaaaaatgttccaggtccttttctgggattttctttcatccaacattcatcccacgcatcatacaagtccctaagaattttttttttctaatttattcaactaactgattgtttccattattctccacatctgggtactcttgacttttcagtcacaacattcatgactttcctcttcatcttcactccgtaaagggcacttaacgtttccatgcttcattttgctggctagttaatgtgtctaatcaaattaagttgcagttggatgccaccaacttttactcagtactctcatgactaaaaaggatacttcattattatattcattttcaactttcaaatatagagctaattcacttactgtgaacacttaaaccaagaaaagactattgcctgggcagaatgcctggtttgataggtctgctggattagtccgttatattgaatcacaaagacaataaaaagcaaccaaacagcaacaacaaaagcatataattgggttaatactgatcttcagaaaatgatgttttaaaatctctcccttcaactcatgcctacacttatcaactctcatagccaggaaattatggtttatatctctcctcagtttctcaccctgtagtataaagtcatttcctttgtcttgattctctgcagctgggtatctcaatagcaaagtgatattattttccacaaaatgagaaacagaataaggtcatatcaaccatagagatcatgtgtaacactggccataatgatggactccaagatgcatcataaaacaggttggcagctacacttgctgtgctgaaaacacaatattttgatagcaatagcatgcccagtttgctcaaataaaagatgttaacagccacatattttcatgtattggatggcaacagttaaaatgaaagtgaaatacattttgtgcagatcaataacactccccaaacaacttactcaccatttactacttcttactatagtaaggcaagtgctagaaatagcatgctattctaaatcatgctagaaatagatatagtcctaatgtactagtgaaaacattaaattgatt

SEQ ID NO: 58120 - DNA, 3015 bp, Bovine  19866880439479
  misc_feature (1)..(1): n is a, c, g, or t
ntgcttttttgctttctttttcctggggatggttttgatccctgtctcctgtacaatgttacaaacctctttccatagttcatcaggcactctatctatcagatctagtcccttaagtctatttgtcacttccactgtataattataaggggtttgatttaggtcatacctgaatggtctagtggttttccctactttcttcaattttagtctgaatttggcaataaggagttcatgatctgagccacagtctgctccccgtcttgtttttgctgactgtatagagcttctccatctttggctgcaaagtataatcaatctgatttctgtgttggccatctggtgatgtccatgtgtatagtcttctcttgttctgttgaaagagggtgtttgctatgaccagtgccttcctttggcaaaactctattagcctttgccctggttcattctgtacttcaaggccgaatttgcctgttactccaggtgtttcctgacttcctacttttgcattccagtcctctataataaagttgaaaaagtaactttctcaaatataagcaaaagtttaaactataatataagggaaagcatctgtttctttgtttaatgatatatatctgcttggttatgctgtgtcctgacataattggatttctgttaacaatggactcctaacagataacatattttctagtttaaaatcattgaacctgtcatcatataaatattcctcaaaaataaatataggacagaaaaaaaagtgaagacatgaaagaagctaaatttcctatggagtctatttttgttttttttcaatcttcaaaaagttcatttttagtagcaaagagagaagtcagtttatagatccctgaatgctttagaagagactctgcttttaacgtgaatagtgagacagataattttctaactatgaaattgctaactagtttttgaccttggggaccacttaaaacaagtaccctctgctctcctggtgggcttggagcaaaggcagctgtattttgcacagcacactgaatcgtaatgggccatgtgctgttatgaatattcataaagctaccatattctgcctgccccaagatgattccagtggatgctgctggagggatttgaaatatcacttttgtagtatccttgaaaagaatacacacaccaggaaaaatagaactggagcccaggtaattctgtccttagtgtgcacttcagagctctcctccgaacgattttgccctgtagcaatggcacagaaatctattgtaatgacagagatgagaggtttaaactttctgagaatcttaaaacaggttaaattaaaatctaagtggtcaccatggcatgctactgactgacgcacttcctcatatgtgaaaagaactggtctgattctgtatgacagcagcggtcactggaggttgtgatttcctgatgatacatttaactaaaattatagctgctttcaaattacaaccaaagataccaggacactcttgataaggcagatgattatgtttcaacacagacattttcacctatgctttcaagttaattcagtacttctcattacactcccgaccctttatgttaggctatgctgactataaagcttatttctatacctcttcctacacttcattttttattccacagtggaaattgaaatcaaacaagcatagcccacatcggttcagttcagttcagtccgctcagtcatgtcacatacttgcatgctggagcatcctcgagatgcctttgtagagaggatcttggtgcttgtgcattcatctgctgttgttgatggagcattaggttgttggtgtagaaccttgtcccgggtcgagctctgtatctctgcttcagcacataacccgtagtctcgccacacattcacagccacacctttgtccacaatgattggcagattctcgtttcctttctgcttcagtggtgcacattttgaatagtttatttttcacattttcctttgattttctctttgctctaaaggagttctggattatattgttactattttattatatgtgttatatatacactattgtataatatgtgacattactcccattatgttgttcacattattatgttccctttgtacacaatattgttcagtgtcgctctgtttactatggtaaaggagaggactttggggtgaatttagtaatattccacctcaaattcagaatcttattcgaattgttaaatgcacatcaaagttactttctgagtctctgcaggagggattgagttctggggaatttccctagctgttcaaactcataagagtcggatacactaaggataatagaagtttcttaatttaatatttgagagtctgtctggcagtcagtaaattattcatggaatcattttttctacatggcgcatattttgttagttttctaatgaaggtgctctaacaaaaacccacaaagcgattgaaacaacagagatgtgttgtctcccaagtagctttggaggttagaagtctgaatcgggttgtcagcagggttggttctttctgaggcagaatctgttccatgcctcttcctagcttccagagttctctttgtcttcatgccatcttccatctccatgtatctatctctgtgtccagattctcccttttctaagtattcctgtcatattggattagagacaactctaatgatctcatcagacttgatcatgtgcaaagaccctattttcaaataaggtcacagttacaggtactggtggttaggacttcaacgtctgttttggaaggttacaatgtaacctgtaacaattagtctatcatctgatgatgaaaactgctgtaattctataacccccttgggtcattataagactgattttttatatccctttggaagctgatatttggatgagggcctctaacttattttacccttagctagaaataacaccaaataatagtaaagtctttctagtgtaaaaatattatttcactca

SEQ ID NO: 58121 - DNA, 1927 bp, Bovine  19866880690774
  misc_feature (1)..(1): n is a, c, g, or t
ncatttttatcactgttatttcacattcagatgtttaatgcagatgggatttattttactctcgtgtaaattcaagttaaaacacatacacaaattgtcccaaagtctttacactcaagaaaaaaaaaaaaaaaaacaattaacatttggtgaatatcacgacagttatgtatagatttgcacaaatgaaaagatcaatatattgagagacatatacttgctatttattattagtatattatacataactaaacagaaacaatagagaaggcaatggcaccccactccagtactcttgcctggaaaatcccatggacagaggatgcctggtaggctgcagaccatggggttgcgaagagtcagacacgactgagcaacttcactttcacttttccctttcatgcattggagaatgaaatggcaacccactccagtgttcttgcctggagaatcccagggacgggggagcctggtgggctgccgtctatggggctgcacagagtcggacacgactgaagcgacttagcagcagcagcagcaaacagaaacaaattggaaagaactgctgaccttaaatattttttcaccatgagaaaggtttttttctaaacttacctttatagttaagaataaaagatgaataccattaagaagctggatgcattagccccatgttttaatttcagaccgtgttcattaactccctgccgtgcgttttgaggtgattagctttcctccaatttgtcttcacccctattcattttcagggtttttttttaataattacatacttaactttgtcagagttcataatatttacattctgttctgctagtttaattgccttggcactttggtcttaattttacatacagatggctgtcagtctcaccaccagtccttcttttattatggattatccaggactgattttactattcaaatcattcttccttacttgtatttcattgttaattagttttgtttgtttgtttgctattccttgaaatatttcccgtgaaaggcttctgttgtctttattcttttctggaatattattaatggttcctctcttcttttcctgttacttcattgctctacaaaattctagcaccggatattgctattaaaagtctcaggaaagcctggtatttttctcctgttgatgccaggcatgttctgcctggatgcctgatacatttttgccatttcacttctttcatttcagggaccttttccatattatatcactcaatatcattcagttccatttgttgaggtcttcagagaaagcaataattcttatgatctttttaatcctctgcagctatcataatttctctattttaaactttgtatgttttctctgatagaaggaagttattatctagagtctttcttctatgccattagtttatttttctccatattaatgttgcctttgctctatataattcgtgtattttatttacaagggtgttgtcagaatttgccttaggtccatatagtcttttaaatattttattgtctttgagctctggttttattaaaatcaaaagttttaaatactagaactgacagcactttccttacctagttcgcattatccctaatgagcctctaccacatatgaggtagagaattactgtctagcagctttgtttccctggagacattgctgatgggaaggggcagccaaactgagttcatgcttgtatcaaccagatttggactatactagttcaatggggacttggtggccctttctgcctctgtagatgtcttccaatgacatattcagtcggggtggtttttttttttttttttttttccccagtactgtctactctaccaccttctttcctctatccaaattagttgatttggattaaacttttctttatattttcagaatatatcatcattc

SEQ ID NO: 58122 - DNA, 1191 bp, Bovine  19866880979442
  misc_feature (1)..(1): n is a, c, g, or t
naccacctgcttttaaaaaatgaaaaatgcttgttcccaagatgcctgttgtgagaatatatactcgtatctcattgacattaatggaatcatgaatccatctccaaacaaaaaaccatcaacagcttgaagggatgtatgtgctgactacattggaagaaagatctgaggacaagttcagcttccacagagttacacagactgcatggggaagggatgaatgcctgaaaagtgatacgaatggataatggaaaacccaaactattaagtgacttttcctatatatttttggaaatattagtatatcctacaattcttgaaggagaatttatttagactcataatgttctgcattatgagtctaaataaaaataatagagaaatactgtaaatgtgctcatttcaaatagtgaaaatatataccagagcagaaggaaatgtgtgttgcccattaaataactagtgccttaccttaacattctagaatgctgctggaaaatcataccagtaggagaaaatgcactagaaaattgttggtatatgtttgaaggaataaattcatcatataaggttttaatgtaactaaagattttcctaagctaatccaagggatccacaagaagcctgaaattttatgttcagcagaactgtttacaaccagaaattaagctcattttagtataaggagctttgcatataagctgattttagggactgctgaaattcaaaatgtaaatggctttaatctaatggtgttcctgctttgtaacaaatgcagtgcagcctgtatcttcgtttccattatcttttttttttttttccaattcactttgttaagaccccaagtagccaaaatattggaccacacacatttctcaactgtttggctcacagaggtaattttaattcctttatagctggaaaatctgtctggatggggagatgcttctaattaaaaaaagaaaagagctgtctctcagtacacacacatggctggtggctacatatttccaatcagaatgcaggtatatgaatcagtctgttttgttaggattctaagaattattgaagatattttgagaatttctaaatttcttcaaggattttcatttgtcttttagacacctaaatcagtattttctcttcttttatttctatgtctgatgctgccaacaaataaaataataaatc

SEQ ID NO: 58123 - DNA, 1433 bp, Bovine  19866881067257
  misc_feature (1)..(1): n is a, c, g, or t
ntctaaatatatttatactcctcaatggggccagtttggtttcccagtcatctgagacacaaagaaagcttaagataatggccaaggtttcccttccagataagatatacatcactcttatcagtcacagattgagtgagtctagattttagccatgatgatcaagtcacagtatgacctgtcatttaaaaacagtgtagtttcataaaattttgtccaaaatcaaagttgaaggtcaggatagagatggatataatatcgtagtacaaggaaaaaatattgaaacggctcatacaaataatggtagtgaacatcatttagggatcagcaagtgtcaggtactaagttcagaactttgtagaagagtttatttaaacctaaattggtactgatagatccactatgtgtgggggaaagcatggctaaaagatattaactaactaacttgtcacgtaccagtaagtggtgaagctagatgacacctagatgagagtctccataagcctgtatccttgagcattaaatggttgtattattatcacactggctactgatcatgtatgtgaattttatcctgcttcaagtcatttcttcttcccatctatatactatagtcctccagtgtgcccattttcctaagcaatttaaaagatgtttaaagactgagtcatttcaccctattctggatgagatgagaaaagtagcaaggcccatctgtcattcataccatttttctctaaaaccacttgtgattcacggtaataattcccagatggaagtcattaaagtttaatttgtatgcatatgtgacatcttgcttttcaaaatctttttgacttcactctttccattactgaaactaattgatatatatatatatatatatgagaaataactaattaaaatgagtgtaaaacagttctctcaaatataaaacatgctataaaatgctaataaaactataagaatatatgaaaaaaaatctgtcaattagaaaattaacttcagatgggaaagtaaatatcatttatcctttacaatgtccaaataaatgacttgtttggcagctcaatgccttatttcttaatattaataaaatttcgagaaaaatagtctttctttcataaggcccacagaataaaactttgaagatgataattataaattaaattggaaagaaaacctccaagtagctatttgctggggccatattgtgattatgattaaataaacataaatcactagttggcaaattgtatcagaatagaagagcttccttctcatctatgagcgactcctggctaagtgataggaaagggagaggatgcaatttagaggcacgacctgttcatcaggggaggcagacacagtgagtaaatgagcagaaccaaggggccagacaattacggttggaaacatcagaagagacacag

SEQ ID NO: 58124 - DNA, 858 bp, Bovine  19866881250987
  misc_feature (1)..(1): n is a, c, g, or t
ntttaaaatcttttaacacattctaaaaatagttgaaactgtctaagaatatgtgtaagcagttcatagctgcttacagtttaacttttgaaaatgctgtaatattggaaaatacgacgctacctcaggtatttaaaggcaaccatgagttgttttgaattctctaatctattgctgtgacttaggtttcagcatttccaaaaggttgatgacagtttttttttgaggctgttaatttttaactgaagtgtataaagatattctagacctatcacttaatgttactgaagttgttgctgttactgcagtctcatgaaattttggttcaattttcaaagaaaaaaaaaggaggtatttttattaccaagcactttccataaccgttattatttaagccatatagaaatatctacttattaataattaaaattaaatgtacatttgtatatcacatgcaaatgaccctagttaaaagtttgaattatttgtttattatacaattatctttcaccagatatgcttagatgcaggtgaatttatcccttctttcacattcattctgaaacattctctatggtagtgttataccacatgccaggtaaaaggtggttaatgcaaaactttccccttctgccaaaagttcatggtctaattggagaggttctgaaaaatattctgctggaagctagtcataacgggtcgcatctggggctatcaatccattaagatgaaaggcttccaaacactgtagagtatattttcacctatcattatgacagatactaaatgagataaagaccacagcctgtctcgaggattcaaagtccatctgtctgaagggacaggttttatctctct

SEQ ID NO: 58125 - DNA, 1755 bp, Bovine  19866881404391
  misc_feature (1)..(1): n is a, c, g, or t
ncgtgtttctagggattttagtggatagttaatggtgatcactcacaagtatgttgtgaattttatgcaaatatttttaaaaaactattttatcttccacatttagaaaagtcacaaagtcatgtgaagcactccacatattttgctctagtgaaagaataaatatatcacctgtaaaaatctcataatgcacttgcaccaacaataatacaccaaaagtaagacaatgatatagaatacatataaagcatctctgtaaatcttacctcaaaacagtgggaccgattctcccactgtagaaaacaaacgacagtagccagaattctgtgtaaagtgagacagcaatccacctgtattacggttccacttgtattacagtttaccatgaatatattcttcctcatcttagaactgtcattaaaaatggcttttcttcaaacttcttccattagtaatgagctcataaagacaaagagcaaaagcttttcagggccatattctttaaaaagggaaccgctgacttcctaaagataataggaatcacctaatcttttatttgataaggggataaatcaaatcactcttactgtatttttttcaggaaaattagtagatttcaaaatgtaacacagaaagctaatgactcagcagtattattagttaaagtagtattggataatattgaaggcctgcttatgaatagattcacctatacactatttttacatgttttaatattatattatgtaaactatgtttatttactctttgtccactgttgaattcaaaagtatgaaaattatcctgaacactatttttttaacaaaatatctagaaatatatcatattaatacagataagaattttataatgagataaattatcttcatgcaaaaggctattttacttcttagtatatagggaattttaagaaaagtgaattcatatgatttatgtgattttattagactcgactaggtacgctattttccttagagctctaacatgagaaattcagatactctcaaaaatgacaggggatacctaacttggaggaaaaagataaattccctaggcctactcaagtctttattcacattgagaataaaccacacacattcatgtattacatcaaaaatcttctttaaaaaagctcttatttaaatagtgatataacttaagtacttgcagcctacatttgctacctaacttgaatggaagattagatttaaatcaagatattaagaaacaggaaattgggcagaatagtaaaagcaatgaaaattgctttacagttaagttttaacatttacttatagcatttcttgaagatcaaagccagttctaatacgaaaagtcctggaacagctcatcctctgcccagagaagcaggcatgtctcatctctactattaattggagaccctgcaacttttgcatcctgtgggtgtggtggactaaagagtaccaaccagctgggacctatgccatatctaggataaaatctggagacatgtggcaaatattcattaaaatatgatcctcattcctgataaatggtaatactggtatgaaaacttgctttaggcagtataaatctgagaagttctttatgaaattataagcaggcaagcataatctggccctatcttctgacatagttcaaactggactgaaactttaaaaccataggtaggaatccatggtgacttctcaagtccctctccccaacttgtatcaaatttggtttagttgt

SEQ ID NO: 58126 - DNA, 1659 bp, Bovine  19866881433499
  misc_feature (1)..(1): n is a, c, g, or t
ngtcacctccacaaggagaccttccccaaacatcctatctaagacaactccctgactttaatcactccttattacagcagcctggtttattttctcagtagcatttacaatgatctgggattactctgttcatttatttcttatctgtctcctccagcatgcagaaccgtgccggcacataatattgctcaagaatattgctcaaaaatatatatgaaatgcattgaaggaatggaaggaaaccatatattattattaatctggtatttttggagaataattaaatatatttaatttaagaggaattattttggctaaattccctagaaacttttgctaattaagaaaatagtatgtgtagaatggccacctgatgtgaacagtggatcactggaaaagagggcgtctgccttcattctctccctgatgctgggaaagatagagggtagaaggagaagagggcatcagaggacgagatgaatggatggcatcaccgatgcaacggacgtgaacttgtgcaaactttgggagatggtgagggacagggaggcctagtgtgctgtagtccatggggtcacaaagagtcagacacgacttggcgagtgaacagcagcaaatataatgtggaaagcaggaacacaggactgggcaagagaagaagctagtccttaacaccctacaactggggcttcagctgatcctgcaaggaagatctcagggaccaactgctgctgggagttcagcatcagttcagttttctggaagtgaagaaagtggactctggaaccagactatatgagttttaatctcatgcatcctgttaatagtaagctgtgtgatttgatcaagttagtcaacctctctgtgcctgagttttctgtgaaatgggtttaatgataatacttgtggacttactttgataattgagttgatgtaagtgaagatcttagaaaattttaagcactataggagtctgcctgctatcattagccatagtgaaaagaaataaagtgtaagttgctcacttgtgtctgactccttttgacctcagggactgtagccatgggattctcctggcaagaacactggagtgggtagccattcccttctccaggggaacccaggaaaggaacctgtgtttcctgcattgcaggcagattctttaccgtctgagccatgtacagtagtaggagtagcattcgttttgtaaggggaggtcaagtagaagaaactctttactgagattatcctaatttatattgggtggtatagatgatcagtcaaggtaacatttcattctagcatcttaattttaataagcattatcacttgatttatcggtataggcaggtgcttccacatgtcatgacattcatgaagctgctgctgggcgataagcacaattaaattacccgcagcatctggccctttaaccagtcactgacaggacattaaggttttatattggtttcctcttagctttctgacattccaacagctcattaactctggtcaaaaaagtactattctagatatgaatatttcagatgaacataaaaataaatagtgaatttaatgtcttctattaattacatcattttacattgatatttattgaatatatacattaataagtaatctgaactctacaatatacat

SEQ ID NO: 58127 - DNA, 920 bp, Bovine  19866881524918
  misc_feature (1)..(1): n is a, c, g, or t
ncctttacagacatgtaagtgagattcatgtactcttgaaagtttcagaggctggtaggatgaaagtgactatacaaaccatattctaaatttaaagaaaattgatgtagagtctcaatcttttccacttataaaacaaagctagtggacttcataatttctaattgccttaggttgtaaatacctgtggtttttagaaaataaataatttacatgtgaaaagtgtaacatctggcaaaaatacaataaggcacttgtggaatatgcaacagagttacagaaccatgacctgtttatgctgcatcccaaagattcaagatcggtgtatcaaagctgctcctcttgggcagtgatccattgcccgaattatttaatataatgctccatttttgggtagtcgaaaacctcaggaggatacaaattctgctcattattgctgtgttttgctcgttttgctgtatttgtcacttattatttcatatttatttactcatgctgagttacattagtcagtaaattatttccctggactctgattctgacaacgttatatgaattcagttatattctcctaacttatcctgtcttcaggattttctttcccagcatttgcaagcttcagcactcttactccttgcttcctcttcagccttagaaataaaaaatgagccaccgtggtttccatattgattctcatggtacctcgcttgtcactgtgctcagggttgaaacccttcctttctctgagtcagttgtctctgaactagctattctatatcacagacagtgcttgttaaccttggggattaatgtttggttggtgatatatttttaaaacctcactgaaattcaggtactgtaattatggctggggtttacttcagtcagatctgaggtattattcctttataaaaatgctg

SEQ ID NO: 58128 - DNA, 695 bp, Bovine  19866881577707
  misc_feature (1)..(1): n is a, c, g, or t
naacccaggtctctggcattgcaggcagattctgagccactaaagaagcccatataactatctatctatctatatatagatagagagagagagagaacctgcctgtcagtgcaggagacatgagttcaatccctgggtcaggaaattccctgaagaaggaaatggaaacccactcccaggagtcttgcttgggaaatcgcttggacatagaagcctggcaagctacagtccatgtggtcacaaaaaagtcaaacacggatatcgactgaacaacaatatatgccaatccaggcatgataaaagctaaagctaagtattttacccttggataaatttttaaaaagacaaaatttgtgtgtgcttgaagttccaggctttacgtaaatttctgatatcagaatctccccactaagtttgactctaatattttatgaccttcataacatagttgaagatcaatgaactcaagatttattcctacagatttctcttcatagaataaagctgaaagaaaggtataagattattagcggaaagtgggtagagaaagtacaggatcccagaagttcagactccttgaagaaaaaaaagaacttaattctcagaatcattctccaagtcaaatttcctgttttttcaatctgtaattcctatgttatcaggtcattccttttttatacgagagatgaaaactg

SEQ ID NO: 58129 - DNA, 683 bp, Bovine  19866881916918
  misc_feature (1)..(1): n is a, c, g, or t
ncagagaaagagcaaagggcaagtccacctcttcatggaaatgggctgaaaattgtaaacatcattttcattcataacctcattgccacatgaaggtgtgaaggagctggaaaaaagtgtaatctctagctgagattctataaaaaggaaagacgagcatatattttgggtaaaattttgaaatctctgtctaaagacacacatggtaattttttttccttctatggtcctcatgaggtgtaactcacttgttcctattgtcttgagagagacagagatcaaaggtatctgtcatcttggcttgttacacgctcaacagtgggatggccgcctacttcttgggatgttttacctcatgcaaagtaaagatgttccttttaattacaacaatattcaaatactcattctgtactttctctttattaattgtggttggtgcagactaatgtggtctgaatgttgcttcccaacaacttaattcacttctcaagcttgatttgactttcttttttctttacatcggtgttatattctttgtggtgagttcgttggttattttgccttcttgtgtctgcgtttttttaattaaaataacactttatgataagacattgctaagttcaaagcaactaaattgagttctaataaggaaggcccacagaggtggtttgtgttttggtgtg

SEQ ID NO: 58130 - DNA, 704 bp, Bovine  19866880446568
  misc_feature (1)..(1): n is a, c, g, or t
ngtatgagtaaatgtaaaggtcatgcaggtgccctattaggtagatgttttaagcttaatctagtttagcattgactatgatgtttcctttctcacttagaactctaatgggctttacccattatcttgctcattaatgagcaagcatttcagaagattaaaagagagtggtaagagttgaaaattattcccacttgtgttcttcattctaactctacatttaattgggggagctaatgcttttctatttcagttttctattcatgactgtttatgaatagaaatgcagtatggtttttgacatttcatgtaagccacaccaaatttgtattctacatttatttaagcaagtttcataaactgttgctgcatgaataagctctatgtttagtatgcaaaattcacctctgaatttcagcttttgaaattaatttctgagtgtttttacacatgagcttctcattgaaattgccattcatgctgatgtcaatgaagtacaccaagaaattgtacgatgaaattctgaataagccattctagataattaaaaaaaaaagttaagctaaaagcatactaaatgagccaattatttgtagaaataaaatgaagcaaatatttaatcatagcagataggatgtaaggtcttttggggtacaagagggataagttagggagagtgttttagttaattttcccacttgagg

SEQ ID NO: 58131 - DNA, 1770 bp, Bovine  19866880523983
  misc_feature (1)..(1): n is a, c, g, or t
nttgataaagaaactaggtaagatgaataatgagtagtgttagtgtctaaaattgtatactaagtaaaaattgaaactatcattaattaatcacaaattcaacaaataccccaaaactatttttagctttatgcttcttttcataattttttttttttttgccaatgagtaaaccaaatttctgtgggattcagagagataataatgcaattttttattggactatgacactaacaatacaataaacctaacttggtggtttttattaaaatatatttctatttttatagaattttaaatatatttttaatatttttatgtatttctctctatataaaatctctctattttataattcttacagcccagtgagtgatacttattcagtatacttattcattttacttattcaataagtgatacttattcatttttccccctattgtgtatttaagagtggaaaaatcaatatatatttaaaactcattttcaaatacttgttttgaaattcatgttttgagatatttgaatgaatatatggctaagtgctattttaactatcagacatttatgagaactaattatttcatagcataaaaataatttggaaaacatatacagaagataaaatgcttctcaaaacagttgtttattaatgtattttgaaaataaattgtgagctatttccatcatgtttttgaaagttggtacaaattaaaatgtcacagaagtaattgttgagggctgccaccaaaatatgaagtgtgcccttctagaaatttagtaacacattctcttatcctcatttaataacacattctcttatcctcatttaataacacattctcttatcctcattgtattaatttctccatccaagaaagggctaacttgtcaaagccttttttttttttttgaagggaaaaaaagatggcagagaaggaggactttgagctcacttactcccacaaacacatcaaaaatatatctgcatgtggagcaactctagctgtaaagaaattggacactggcaggcagctcttccacaagcaagactgtaagaaagacccacacaaagataggtaagaaaggaggcaaagaaatcagagtttgaactacatattgaacacctcattcctggggtctcacattgagaagacacatcactttagctggtttgaagatgggactgtaagaaactgagattttacttttgaagaatgcacacacatccacttgtttttgggaaaatgggaaggaagcagattgaaaactctctgggattctggctagtttttttttatgaccatcctagagctttaatacagatttaatgcaattcctaccaaaatacagtgatatttttcacagaactagagcaaataatcccaaaatgtatatggaaccaaaaaagatcccgaatagctgaaacaatcttgagaaaaaagaataaaacaggaggtaatcacactccctgacattattatactaaacagctacagtcatcaaaacagtatggtactggcaccaaaaagacaaacagatcaatggaacagactaaagaccccagaaacaaacccatgtacctatggtcaattaagctacaataaagagacaagaatatataatggagaaaggacagtctttttaccaagtcgtgctgggaaaattggacagttatatgtaaaagaatgaaattagaacattttgtcagaccttatacacaaataagtgttaaagacggaaagtattaaaggtggaaaccataaa

SEQ ID NO: 58132 - DNA, 1692 bp, Bovine  19866880695247
  misc_feature (1)..(1): n is a, c, g, or t
nagtatgtttgaatttagaagagaaaaatatgagatacactatgtaaaagatactttcatgagaatctctttgaaaaagcagacttaagatttagagtatttttaattttataatgtgaccgaatgaagatcatatttttgttaatttaggagaatttcaataaattttaatgcatttttcccccacaggtcaatgagaaaaataatcggtacaaaaactcctttgtgaagtaaatataaatataaaacaaaatttatttttaaagcatacagttgtgtaaaacatgctcattaaaatcttaacattcatatctctattataaagacaatgcaaatcattattaaattaataaattacctgaaaattataattttaagcactattagctattattacattgatgtttaaaaacataataacaatatatgatgtttaaaactgggtatttcatgtgattagttgttgatcattttcatgttcattcttttgtcctttgaaatcttagcatttgattcatttccaatgaaagattttcagtttttaacatctgagcatttttccaagaacaataatataacaaaagataatacaaataaaagtaccgaaatgagttcaggacaaacttattcaaagcctcaatagacttttgttgatcagaacatcaatgccaccatcactaagatgcagccttcacatagctgggaattaaaattgcctacgggcaaaataaaacatcataaaacacagaccaaaacttaccataatagtggttacaacaactgttctgttttcaatagctgctgtgtcattgccaagtgtgggtacatcttgaatcaagactaatttatccatatcattccagtatccaacctgccaaatagaaaaaaatcttgaaagcacattttagaagagttttctctagttcttattggaacaatgagaattattaataagaaaacaaaacaaatttatgaagcacacacaaaaaaatgtgtttggaagttttcttaattgatgatgagccagttttcctaatgttaataatactacttacttacacatttgccaactttacaatttattaatacactcatggactagctaagacattgagaatgaatgggttcaaaaaggaatatggatacagatggaatgccattttgttctgatgctcttgtagtgaaattgattggaaacttctatacttagtttacatgatttttatcaataatgttacagattttatagtaaggagaatagatttacatggggcacatgtacaggatgttttaaaaacatagatttgtgtattttaaagcaatatagaaatagttttttggtttcatatgtacaggatgttttaaaaacatagatttgtgtattttaaagcaatatagaaatagttttttggtttcatataacctagcctctagataaactagaggctagtttatcatttctaaaatgctaaatatatcaaatgttaatgattatttaatattttcacttttgaaaattttaaatttgtatttttaaaatttcaaatccttatattactcgtttagactcgaagcaaactcttttccataaaatatattaagtaattagttaagcactatacaatgttacaaactaaaatgggattctactggaaatttaggattcttttcagaatgcagactacttcttta

SEQ ID NO: 58133 - DNA, 1352 bp, Bovine  19866880737441
  misc_feature (1)..(1): n is a, c, g, or t
ntgatgcgaagagctgactgattggaaaagaccctgattctggggaagattgaaggcagaaggagaaggggacgacagaggatgagatggttggatggcatcactgactcgatggacatgagtttgagtaagctccgggagctggtgatggacaggaaggcctggtgtgctgcagtgcatggggctgcaaagagttggacacgactgagcgactgaactcaacatgtagcaaaatgttgtccatgtcctagtgctagaaaagagcctcatacatgttgtgcattaataatactggctttttctccttcttgcgggatgaaagaggctttgttttagtagaatttggaaatggtgtcagaaatccaaggtttcattactatagcaacaaaaagtaatggacagactaaatatcagcagattcattgttgccttagtgacaatcagttgccttaccaaatatgtttattgttatattttggttccacattttaaatatgcttactctatatgaatgttccaaaagggagaaaaagttgaaaatgatttaagacagagaaaagtcctttaagagatgaaagcaatttgtttcactctccattatttagtaggaagccatagtccacaaaaatcctacagggtaaatagaagtaatcatttctgttcaaatattcaatcaattctgtttaaattctattctatttgcagtcagagaaattgaagcatgcagtcaaaggcatgtctgtattgtcatttcatgctatttcaaattattttttttctaaacttctgagaatagggaattctgtcacattgaaatggaggactttttaagcagtagaattgaagactgcatatgcctgccagatagctgaacctgagacaggattattaaagcaagcaagggtttaatttagctcctttgattatcttttccttttcctttcagccgcctccttcctttgctgagaaagcattctcattatagtaacttatcaaggccctctccatcccacaacatcctaatgaccctgatttacacctttctctaccttttcccaaaattatttcctctagactaaacctagggaggacagtgctcacttttaccttttaaaatgtagttcattttttaaaaattgggttgtttatatttttgatgttgagttgtagaaactgcttatacatgctgaattttaacccccagtttggtcttatcatttgcaaatatttccccctattctgtaggttgccttttcattttgacaatggtttcctctgctgtgtaaaaacttctaagtttaatcacatccaattttttaattttgcttttatttctttgtttagaagacata

SEQ ID NO: 58134 - DNA, 2033 bp, Bovine  19866880861157
  misc_feature (1)..(1): n is a, c, g, or t
ntccttacttattgtaaatattttgcaatatagttgttttctgagtggaatagttactagtagttattcacatttgaaataattttaaaaatatataatttattcagggacattcatatgcaaattaataataataataaactagttgagcaaatggctaacatctcctccataaaatataaaaatttagaaaatattgatttgtgtgacaaatagtgacaaaatatttctgccccatgccacactgtgcctgacaaaatattactagaagaactgcataatgaactttctaccttaaattttataaagtactaaaaatacataagataaaaacaaacaaatacctttggaggtgtctcagatcctggatattctctctgatctaatttcttccagcgatccattaatttggtcaccataggtgtgttaaaatctaccaactggaatcctgtaacattggctccaccatgtataaatctctcaagagaaatatccttgaatccctataaaaatcagtatgacagtttattaagcttagttaattattggagttaatagctaacattttggctcctcaatgttaacatgaattgataaccaatattatttaaaagtggtggctttaaacaactggaagattatgtaaatattgacataataacaattatgtcaatttagctgttaaactctgtcattcaaaatctaatgcatgacaccacatcaacaccaaaaaaagacaaaaatcacgtgatcatctccacagatatagaaaaaaaaaacatttgacaaaattcactatctactcatgataaatattcccatcaaagtggatataatggaaacatatatcaatataataaaagctatttgtgacaaacccacagtcaacataatattcaatggtgaaaagctgaaaaccttctcgctaaaatttggaataaaacaaagatgcccactgtcacctcttctattcaacatacttttgaaagtcctagccacagcaattagacaagaaaaagaaacaaaattttattcaaattgatagggaaaaggtaaagttgttattatctgcagatgacatgatattatatatagaaaactctaaagattccacagaaaaactactagaactgataaaaaatttagcatggtaataggatacaagattaacatacagaaatctgctgaatttttaatactaataatacatatcagaaagtgaatgtaaaacaattattagatacatcaaaaaaacttaaaatacctaggcataaacttcaccacagaggtgaaagacttaaatgctaagatctataaaacaatgataaaggaaactgaagatgattcaaagaaatagaaaaataacccatgcctttagattggaagagttaatactattaaaatggccaactacctaaagtaatatacagatttaatgagatccttatcaaataactatgacatttttcacagaactagaatgaataatcctaaaatttatatggagccataaaagacccagaattaaaaagcaatcttgaagaaaaagaacaatggtggaggcctaactgaatcatacttcagatagtaatataaagctacagtaatcaaaacagcatgatcttggcacaaaaacagacatatgggttaatggaacagaatagagaacccagaaaaaatccaacacaacctacagtcagttaatcttcaatgagggaggcaagactacataatggagaaaaggaagtcaatctcttcagcaagtggtttgggaaagctggacagctgcatataaatcaatgatataagaacatgtcctcacaccatacataaatataaactcagaatggcttaaagatttaaatacaagacctgatgccatataactcccagaagaaaacataggcaaaaccatctctgacataaattgagcactattcccttcgtcagcttcccaaagccaaaaaaataaaagcaaagataaacaaattggaactaatcaaatttaaaaacttttgagcagcaaaggaaat

SEQ ID NO: 58135 - DNA, 800 bp, Bovine  19866880945508
  misc_feature (1)..(1): n is a, c, g, or t
naaaatagatgagccccatttttgttgcagtagctcttaggaaacccaatggatctagacatcagaatgtaagatttctctgtttgctttttttttttcctaaaaaacatgtattaaagttgaatttgttattgatggaaataattgttttatatcaggtagaggttttagctttttgttttttttaatgatagactttagaagtgttcattatctaatccttaagatcatttgggttttcacagaaatgtttttaaaatatgttacctgctacttcgcattcaaatacacttaaatattacaaagaaaaaattttggtagtactcttccaatattcatattttcaatagaaattcaagataattactatcttggtcatcttaacaatggtttatttcctggtgaagtggggctgtcgtgaatataagaaaagttatgaccagcctagacagcatattaaaaagcagagacattactttgccaacaaaggtccgtctagtcaaagctatggtttttccagtagtcatgtatagatgtgggagttggaccataaagaaagccaagtgccaaataattgatgtttttgaactgtggtgttggagaagagttttgagagtcccctggactgcaaggagatccaaccagtccatcctaaaggaaatcagtcctgaatattcattggaaggactgatgctgaagttgaaactccaatactttggcaatctgatgcgaagaacggactcattggaaaagaccctgatgctgggggagattgaaggtgggaggagaatgggacaaca

SEQ ID NO: 58136 - DNA, 1577 bp, Bovine  19866880996041
  misc_feature (1)..(1): n is a, c, g, or t
nttttttaaaaatgtagactatccagctatatttcacttataagattttaaaaatgtcaaaagcaaactaagaaaacagttcaagtgtggctcacctttctaggtcccgtgctctttagttcaaacacatccattgtgtaattgaccctacgtccatagtggtcaaattgaacatttcctgttagtccttgaatttgaacctatgaatgaaaaataaaatctacacatgtaatcatttgccattttacttacagaaatctttacttcatctgctaggcttatgactacgcatgggtgtggaactataatctgtaagcaactcactaaaaaagtcatggagtatttgagctactgggatagaattggatagaaccaatacagtattgtaaagtaattagcctccaattaaaataaataaatttaaattaaaaaaataattggatagaggaatatcaaagaaatatataagcgattctgttatgtacttgaaagataaattttttttttattatggcatttccattgtacttcttcaattttgaaatattatctataagaatagaaacatggtttcctttttagttacttttcagttttatctacacatccacataataaataaccctgataaccacagcagatcatatttctccttgctaatgttaaacttaaaatattcagaaaaataaacatatttttgaaaatattcaagtgtactttgttccaaatccttttaattcatttaaacttatgttctgaacctgtggcatttcagaacatttaaaatgtattactaaaaatacacacatattacagtaatcatttgaaaaacagtgttagtataactacaaaagactaaaataaatacttaatccaaggttacaagacaatttgaaggtctattgaggcagtcagtagattagtagactaagactgtatgccaaatatttcaggttcttcctcattctgggtccacggtgggcttgttctttttggacactttttggttagctaggtgtctgtgactctttctgacaaaagcgttgttaacagatgtaatgagtgctaaagcattttatttatttatttattttactttacaatattgtattagttttgccatacatcaacatgaatctgccacagggatacactagaaacctccctacaactcttttccttttgttacattcaagatggtagctgctatgtcagcttgtgtccctaagtgattataaaaagcagagtgtccctactaatctgatgtgtgtctgtgagtgtgaaatcctcttttgttgttttaagccactgaagcttggggttgtttattactgttacataacctagcttatcctggctaaccatctacataacatataaacaccagtattctatctagtgggcttctgaggtggctcagtggtaaattagctgtctgccaaacaggagacgggggttcgattcctttgttgggaagatcccctggagggagaaatggcaaaccattccagtattcttgcctgggaaattccaggacaaaggattctggcagactacagtccagggttcacaaagag

SEQ ID NO: 58137 - DNA, 2509 bp, Bovine  19866881003822
  misc_feature (1)..(1): n is a, c, g, or t
ntggggggtggtgagagaatgatcaaacatataaccctaactggaaaatataaattatgcagcctttttggagaaaaattgggcaatacttattgaggctctaaatatatttaattcctttggacataattaaacatgtacttcaaaatgtggctacgaggatattcaataaaccactgcttacagtaaaaactgcagacattcaaaatgcctagcagagaggacagaatgagtcagctatggcataccttcctcacagcaggcagtgggcctcccctaggtatcactcccccagactctgccttaggcttcttccttaccaagagttccctttccacagaagccaagagtgtcaagttcagctttctcagtgacctgatcggggtcaccagaaactttgtggaaattttctgggggctcactaacaaaactgagatgtgagaggcaaaataggcttttctgcctttcagatgcatgagggagaccagcctagagcaaaacaaataagctaagatggaggcaaaaaaaaggccctaatggcaactttaaattgtttgttttgtgacacaataaatgtccttggttactaagccaggttgaaccgtaatacctatggtcaattgcatcttgatagtagctggaaaacagaatacttaagcagcactaaaagttatgctacaccagtgtagttatggacctcagatgtagagtcaagagaaaacttaaatatatttatgttctattaaaaaaaaaagagtaagtatattaatagggcatcattcaccaagaaaaagatctgggaagatactccatgttttaaggataggtacctctaaaatagttatctctgaaaaataggaatttgaacattctctattttgtgtattccgttttatcactttaagactctaccatcaatttctatttttattttttatcaaatccaatgtgattttggggaggaagaagaggcaaacatgtattctagtcacaaatcttgatctgggagtctgcttttttaataggaaaagttgtttcttctttttaaaaatgttttgtgaaacaaaatttgatactctcaggcatttattttttagtgaatacagaagactacagttttcacttccctttgttactcagaaaatcatatcatgactttgtaccatttcttattgaaatctcttctgtaaagcaaaaacagtcccaaaatgaaggatcttcaggggtcataggaactgcagatgatattaaatcattaaaggtgagaatagtaaactgcctctgggttgctttagaatcatcttgagatgtaacctaaaagggggaaaaaaaacccttagattacctcaaaattataatgtgtattaatcttatggtcaattttataattaggaaaataagaaatcagtaatcacatttcagtaatattaagttacacttcaataacattaagtaacacagtgggatttagataattgtttctatttcttatattagtgctgtcaatataaacaagaataatatgaaataatctgattcttatactttttgtaggtaacaattgcctgtggttatttgtttaaaatgtagatttactgagccttacgtccaacaattctgattcagtagaaaaggatccccaaatagataactttaacaaacaagtgggttattctgacagggagagaccaccaggtaaacttctgagaaatactctagagggtgcatctaataaaattgctgtaactacttagagatgtagcacttcattagtaagtgattcattcaacactaaatagaaattatatcttacactctgtgatacaccccttgttcataaactcagcccagtgtggactgtctttaacattctatacattctagtaaagacagtacttgggtcttctgcagtgcttttacagggtcagtatgtttcatatgatttaattctcattactatgttgatatggttatgttacctcatttctatagatggggaaactgaggctcagtaagatcattcaatgtatacaagtgtacaacatagcttaaatggtagacctggacctggaacccttgcccttttctcactatgatactgctgcccaaatagactctcttcatggaaatacggtactgctatgtgcaaatgttacaaaaaatataaagctctatggaatcataaggtatttgcagaaagggtaatgctgagacttcagcatacaaggacagctaacctgtttcagaacatcttcagattaaaggagtcaattttaacatgttgtcccttttaaaataaaataatctatgaagaattttactcttttttaatctatccaaggcatgatctgtattgagcttttatcctagaagtaatgatgaaaatatactgatcacactacattcccttatgcagattccctaaaataatcatatgcatttaatttcaattattgtaacattatcagtattccttaaataaatacttctatagaatcacaactgtatg

SEQ ID NO: 58138 - DNA, 772 bp, Bovine  19866881023832
  misc_feature (1)..(1): n is a, c, g, or t
nactctcacattatctacagatggaaccaaaggaataaaacatctataatcatcatacctacagtcaatatactatacagtactgtttcataaagttttgggccatttaagtaattcccacataaatatctgcggtttcaacattctgaaactgaaacatagctaaagaggtgctcagccaggctaagacagggttcttcaacttcagcaatattgctatttagggtttgatcattctttttaggggggagggtggaaactgtcctgtgcattgcaggatgtaggcatccctagcctctatctactatatgccagtagcaatgtgcccaactttccaattgtgacaaccaaaaaatgttgccagacattgctaaatgtctttgaggggccaaagtcacccccagttgacaactactgagctagaattttatacatacataattgtaaactctgagtccatagactatacaagactatgtgtaattttactaatttaaatagtacaacaatttctgctatattgtttatgctagggcacatagttttcatagaagacttaagcatataattatccacaaataatcatctttttcctactaaaaacactaatattaaacagggaaaaaaacaacaatacagctaatcctgcaatgatttttaaacctaaacctgtggtttacaaacatttgataaatggagacctagataaatcactgcaagtgtccttccttcgaattcgagtctctctttctctactgtaagcgttcctttt

SEQ ID NO: 58139 - DNA, 1848 bp, Bovine  19866881194631
  misc_feature (1)..(1): n is a, c, g, or t
ncatggatggaggagcgtagtaggctatagtccgtgggggtcacaaagagtcggacacgactgagagacatcactttaactttcttctataaaagggcaacgggtggagaatactgtcattttttttcttacagtatagtctggcttcaaagaactttacaagaaattctacatgcttttttgcttttgacttttacaaatgctaattactgttgaataaagaaacttatggcatctagtttagtgtccctggatattaaggagaaatctctgaaatatgtcttggttttgatttgtagagttgagtacttaaattgttcttataaataaactttcaaattggtaagttattactatgaatcaaatcatagtaatcaaatcaaatcaggttatgcaaatgaactgtatgtaactaacaaatgaaacatgctacaatattgttcagcaagcataagatattgtaggtaaatatgagcaaacatttataaaaccactagatggcattcattcactgcagttttggccaaatacagcctttaaagttttatcaggacatgaaggattaggagcaagtattatcccttatttgatgatatttttctatcgtttaatgcaatgacagagttcaattttaccttttcctatatgctttaaatcaagtcaacaagcactgaaagtcttcattaaaggattcttccttgggagaagatttgaaaaccatcttcactgtagtggcaatgtatttacttaaaacatttagaagaaaataatcacagtatgtcacttaattttgttttatttcattgctttattaattcatttggatatttctcacatagctagttctctaaaggttataaaaagtacagagtcacattttgtaatattctaataatctttagaattagtgtttatgaaaataggaggtcaacagctcttgagtctcaaaaagtcctttctattgtacagcttaaaaatgtatgagaaatagtgcttctaagtacattgagaacaaaaacggtctttggtgttaaaaaattatgatttagtcttgcttgtgtgtgtgctcagtcgctaagttgtgtccatctctttgtgaccccatggactgtagccagccaggctcctctgtccatgggaattctctaagcaagaatactaaagtggattgccataccctcctccagaggatcttcccaacccaggcatagaacccaggacccctgctttgtaggcagattctttactaaccacattaccagggaagcccttacattaaatgtaaatggactaaatgctccaatcatagactggctgaatggacacaaaaatgagatacacacacagcctatagtatcccagagatggaaggatttttcaatagctgtaaatcaatcagtatgatacaccacattagcaaattgaagaatgaaaatcatacgaagaacaaaaatccatatctcaatggatacagaaaaagcttttaataaattttaacatccattcatgaaaaaaatcccttttatcttgatctcagaaatgccaccaattacttagcaagaaatgaagcaccatgtgaaataagagacctgaatttcttcaggttttttttttgggcggggggggtgttgtttattctcattttcacagttaatttggtgagagcctatgctaacactgctaaacccatggatttctgtattttgttacactggaacttgacagagacaattttacattatagaagctacttcatattgcgcttaagtgttttcattgccttaaactcacatcttataaatatgagaatagaattatctttaggccaaattactatgtggtgaagca

SEQ ID NO: 58140 - DNA, 1220 bp, Bovine  19866881366992
  misc_feature (1)..(1): n is a, c, g, or t
nattttgctagtttgaattctgtaatttttatttcttgtccataatttcccaccaaaaattaagttaaaaaaaaactacacacacatatgcacacacatagggacagtacattagaccaaaagtcaacacaaactatgacttatcgtattaagcagagtcagactgatttcactgctactctgaagtatctacataatgcagcagaactattacacagtgcagatgagctagtctaagctttgctagctataaaggttcccagaaatgggaaaatccttgtactgtagaagaatttgcattacaaagagatggtaataccaaaaacttaagtggaactgaaaatacttagcattaagccaagccatccctttgtatatatgttatttcaactcctgtagcacccttcattcttcaaagtaataaggcacttgacaaatgatataaatatggtttttttcgcttgtatgtgataataaccaagataaagtttaaatgtcagcagaagactttgcttggagtgctgcctgaagcctatcccaaaggaaagcaacaatgtctttgagaaaaaaaatctgaggtttactgacctttccatttgattttagttgattttagagaatgatttgttaagtttgggaatgttagatacttacttaattgtatatgtttatgcagactgatgtcagcaaagtagattttaacctcttgggaaagaaatatgttttaaccatttttgcatgtatataacatttagcataatgttggcaaatagtagggtattcaagaaatgcagttttttttctaccaattttccttttactatatttgttccattcttattctatttccttgtaagcttacttaaattttgttgtcttttggaagtagagtaattaattaaagtgtgatgaactgagacttaattagccttgtacactgaaaaaaaaaaaaatagcacaacataaaagttgagagctatgttttattcagcaagcttcttaggatctcaagcctagaagacagcatctcaaatgaatctgagagactgctcccagaaggcaagtagggaaccaggattgataggagtttttgcaacaatgggcaggtagtcagaacatcaaaaggttattaaagaaagccaggtatctcaagttaagaaatttagggcttttctatgtatgggtcatgtagtaccattgatgactgcaacatcctttgt

SEQ ID NO: 58141 - DNA, 4127 bp, Bovine  19866881459666
  misc_feature (1)..(1): n is a, c, g, or t
ntttcgatgtttggcaaaccatacatattgtaaagtttaaaaataaaataaaattaaaaaaaaataaaaataaagtcaaaaaaataaataaaataaaatgatttaaatagtatattgtatctgaaaattgggagaaatttgaaattagatctgaattttcttgtacacagaacaggcttgtcttctctggaacaatctaatcctaacaaaataagcataaaattttttcaaattatcaaagcctagacagttgcctcttttgataaggatgtgttgttttctgagaaaatacatgtaaaatctccagggcacatagtaaacactcggtgagttttagctcctcttctggtttcttttatattagccatctttctatatttttagagggaaaccccgatgtttgttcatctggcagtagtccttgaaccagacctttaggcaggagtgaccatcagaatattgactacaattcacatttattagatgaaattcaacattcatttttacaacatgactaaaaggtgaataaacattttaggcaattttttcatcaaaaatgtcagcaatatattttctttaggagagacacagtaaaagtaaaacttgcaatgagtttttattgacttttgttttcatttcaactgcttttgagtgagccagatcagtctcacttacatcttctcaccacgtgacaataaaaaaattataagcattcagtgaaacacagggatgaagttcattttttaagactctaaatgtccagtgctttttccctttgatgatacaaaatgaatttaaaataagatctggaagcatttgttgttgcttttcttaaaatcaggcctctaaaacccattttctgaaattgtatataagagccattctgattacaatgataaatgaaaatttgaacccacaagagacatttagtgcctgaggtatcctagagtcaaacccaatagaatttttctaagaataagatgtatacctgaagttatgccagataaatgtgcccaatttttatatttatttattttaaaaaagctattgagagagttccctggtagcctggtgcctagtggttaagagtccaggctttcacagtggtggcccagccaggttcggtccctggtaggtgaactgagatcccacaggccaggtggcccagcccaaaaaaggctactgaaatacttgttagcatcttaaagcaaagaacaaaagctactcctttaaatcaagatttaattgcttttatccataatctagaaatagaatagtgactgagtacaattgcacatagacaagcccaaagtttttctttccaaattttgtggaaagaattgatcatgaaatagtcaattcactcagatcagaatgtttatagcatgtcttttctaatagcagaaaagcaaactgataagatcaagttttcttagtcattacagtaatgctttcatcttaatatttacagaactgaggaaagattttttttccaaacagaaaaataatatgtgacaagtttttagagccaattatttggacttcattctgtgatgaatttcataagatatatttttaaatttacctttagcatagcaaatgcattctagaaaaattctagaagtactcacatatgacagttcaatacaaagtcctggggaattgctagaaagagatatgcattctcataagaaagacttaatagcattcagagcaaattaaatgatatgcacttgtagagatttgagagtaagcgtttttagttgtactcccatattacatggctttttcctttcaaaaattctactgagcataattatgaaaatgactgataatttagataatatttagtgtcagaatttcaaaaacaaaacctgaatgtttactctaaaagtaattatccctcaaggaaacacataaataaagttacagccattgccacaacaatccaaccagactcagactatatggtaaatttataagaaagttttgcagtttgagtagtctcaataaggtcgcataaagatgaacagaaatgacattttatgtaagaagccggagatttaagtgtagaatataagaatgctgagaactaagaacacgaagatttaaagagagaataagtggttggcagaattatcagcactcaattgcattaatctatagagaaggaaagattatttgagaggatatggaatccttcccatttttgatattttcatttccttataccagcaatcaagaaaataaaaggaagaaacaggttttatgacaaatcttcctgaaaagtcacaatgcttttaattagtattaataaatactaaatgccctcttcaaaaaaacaaaactaatacattttttacataattgttttacttaatattaaatgtttaaaaggaatctgaagaaacaaattcagactgccatcttgcttggtttaatttagtgatgagtagttcctgtagagattgtctcctgactcctgattataaagataaatagattttaatttttgagattgttcactaaaggcaaactataataatgaccttggtgtttatcatagatatgtcagtagcattttgacttcaagtttctgaaattatcagggtaaatgatcattaaaacttttcattataacatttttaatccaatttttatttcatatttaatatatcattattctaatatttaaggtatagagtggaataaatacaaggatggaaattccaaaagaactgggtaaacttaaattcacagcaaggaattaagatacaatataaattatgagaaaattatgatctaaactacaacaaacttagggaatatctcctttaccttattttctcttgagttaacattaaaattcagcaactagaaagaatttaaaggcatgaatgaacagtcagtagatttcaataataatgctttctgtttctcctcagtgtagtattattacctgctacctaatatgacagagcaagaatataatgaggatttcaaagacctgaccccataacatcaatctgggaagtttcccagtgatgaccattcatgaagcattgaaacatgtcccctttcagtgcacttccctttaagcacttaaagcttcttaaaatatgagccttaacttccattataggcatagaatgaactttatgtgactgatttgcctttctatagctgtctatagcagctgtagggaatgagtgaaagcatctgtggatagatctgtgttttataaacaggaagatctgttataaatagtctacattgagttctcttaaacaattcatcatgattttaagagtacaatcatttaacggctaagatattttctagcagaaaaaagaaaagatacaaagaaagattgctgtcaaacctaagggaccttctaagttcaactggaaatactaaggtgtagagcacagcaagttaaaagatgtgtcctgcccagatttgtcaaacaaaatcttgcaagattttagaaaattagttcttaaacaggaccagtaactccagagtgattcattcttccagatcgttgagtttctttttcctgtgaaaagtagttttaatatgaccaaaagagtatgggaaaaaatgcagatgtctaatcattgatattttggtgtttgttgtgtcatattttgctgaaaagacagaaatattgtaacactccacattctttctgtttcctttccatgcaacccagctgaccttttctgaagccataagaaacaaagccagattatccatcactgggagtgtgggtgaaaacggtcgcgtcttgacacccgactgccctaaggctgtacacactggaactacaattagacaaagttcaggattggctgtcattgcatcggaccttccataaaaaccaaaaaaataattgagtgccttaattaaactgtatttgtgactgatggaaacgcagccctgagggacaggctaagcgcaagtcttcgctcaaacaatcctttggctgagagcgggaagttcgtcctaaggcgccaaacatcagcaacgtgtgcatgagctcagctcgaaaacccaaactcagattttatatcaggaaaactcacaatttagatttttttcgggtagtgggggcgggggaggag

SEQ ID NO: 58142 - DNA, 556 bp, Bovine  19866881556973
  misc_feature (1)..(1): n is a, c, g, or t
ncaccagatgaaatccagatgaagttcagtctaccacagcagcaggtctgagtgggaagaagtttcaccaatgccaagagctttaactgaattttactgccaggtgattcagtttaataaatacagagacccatggttttctaatcatttctaaatgtagtgtatgattagacattctaaagcaattgcagttctagaagcctgcagtaaatttattaactttaattattggtaaaaaggtctttacagcttagtgagataaaatagaccttctataagagaattactatgaatgtataccatattagaaaaatactatgaatgtatactatatatgaattagcagttcccagaaacttaaaatacacaatacattctaccaaaaactgtatttaatttaatcttggagaataggatattagtattttcatatgtaagtaaaactcaggctttgatgttttgattcttaaagtactttatcctgacagaaaaacaaatcatacttcacataactgtacaatgtaaatggggagaagtctctttaggtagtaaaaat

SEQ ID NO: 58143 - DNA, 1220 bp, Bovine  19866881683487
  misc_feature (1)..(1): n is a, c, g, or t
ngttatatagactaagcactagtctttgtaatttatagaaattatattaacaactaataaatgttgttagtactatgcacttataatattctatgataaatatgtttcttctcaaaatactgttttctatttttttaaaaaaaagatgatgttatgaatttatacttctgtcctctttaatcttatcacaccatatgccactgtttcatttttataagctcctagaattttggatttgtttccaaaagaaaatggtatttgacattaacttctgttgcttctgaacagtgctaatctatctacatagtaaagatttcaattttcatatgcaataaaacagagactggaactgtaccaaaaagattgtcatgagacatgattcataattttaaaaatggagcattaaagtaaaagaacaaaatagctattattgactcattcaccaaatatttataaagcaactgatacatgccaattttaagccatctgctgggcatatagccatgaacatgatagaaaaggatgcttttcttattatactctagtaacaggttataaaaaatagataaatacataacaacattatttttaagtaccatatagtaatatatacatatgaacactcaggtatggaaactaatttcatggctgggcttccgaggtaccactagtgttaaagagcctgcctgccattgcaggagacataatagatgtggtttgaccacaggttgggaaggtatcctggaggagagcatggcaacccactccagtattcctgcctggagaagcccatggacagaggagcctggtgggctacagttcataggtgctcaaagagacagacatgattgaagtgagttagcatgcaccattagatggcagcccaccagggtctgccatccctgggattctccaggtaagatagagtcggacatgactgaagcgacttagcagcagcagcagcgtgcacctactgaatctttaggataattaattcaagagaatactcatttggccttaaagtttcaactgcttgtcttctaagccagtgtttagatagaaatacagtttttagaaaaaaattgtgagtcagaactgtgtccattagaatcaagtactatctggctttccttttgtagagcctcatcttccactaccccacttgcctttacggttattggtttagtcattcaggtctgtactttgccaccttatttttt

SEQ ID NO: 58144 - DNA, 712 bp, Bovine  19866881732597
  misc_feature (1)..(1): n is a, c, g, or t
naaataaaagttgtattatgcttcatggatttagaaagaaaacaacaggtttaccctttaatcagcagaaaacatccaaatatgtgaatgcctgctaaaaagagcaaaattttgaataatcttgctgaacaacatagggcatttgattttagattaataaattagttggatggaatcagtgaaaatattgaattttatcctggggaacaagcagcacaggaaagagagaatttggctaaagataaaattaaagcaactgatacgtgtccttcaaaatgatagagctcatcaagaaatcactatatccaaatgaaggcttaggatgatgattaaaataggctttactgaaggcagttagctggtagtctttcttgcatggacttactgctggattggcatttgtcatttgctgaacattacttcctttaaccaccaaatgaaatggaaatagttgtattaggcaagagcagtaaagtttatggtcaatttagatcagttcagtctctcagtcatgtctgactctgcaacctcatggactgcagtgttcaaggcttacctatccatcaccaactcccagagcttgctcaaactcatccattgagtcgatgatgccttccaaccatctcatcctctgtcatccccttctcctcctatcttcaatctttccgagcatcagggtcttttcaaatggagtcagttcttcgcataaggt

SEQ ID NO: 58145 - DNA, 1242 bp, Bovine  19866881778760
  misc_feature (1)..(1): n is a, c, g, or t
naggagcttttccagaatatacctgtcttcaacccttctcccctgagacctaactgactcctctaaagaagaggttataggtaaatattaaagcttgcttggatattcaggtaaacttccccttctatctccctagtgtctttgagaatttcacctgatacctgaaaaataagaataagcatactttttgcataagctacaataagggaaaaggcaaatgtttgctgatttcttttttcagaattatttttataagaaattgcgatatttgcaactgtgtttaagcatttttttaaatgttgattactgtttcctttttttaaagcctgctatttctgaagctgtctagcctgcactgcaaaactgattgtaatgctacaacttttagcagattatatgccagattagattctgtatacttgagaagaagtaagagagggatgatttatttagaagtgatgagttgaatttttattagaatgcaatcacccttcctcccagttataaaattacccatgcagggagtcttaagtggtaagagaagaaaggaagtcacaagtgtgaaccgtggttgagatagagctgcaaggactgcagagagtgcatgctgagggaattgtactaaacatgttgtgacaaggaagtcacaagtgtgaaccgtggttaagaaagagctgcaagaactgcagagagtgcatggtgagcgaattgtactaaacttgttgtgactttcagacttacttcaagagtcttagactgtaaaagagaaatgaaaattcttactttaatctatctgggaaccagaggcagggagacctttaatctatctcttcagttcctttttctctcactctatctcctacattcctttggtaggtcaagtcccaaatgtcaaggccccaaaggcagtttttggtgtcagcaacttccaaaccccaacctggcagtacacaaagggttggccagaattgctcagtctcaggaggaattttttttttttttttaatgatcacttactaatgaaacagtgatattggtatgtctattgtttttaaaaaatgaaactcagaatggactgtcagacaaaacacaggacaacaagctaaatttgaatttcagataaacaatgaataaattttttgaaaggtatattccaaacactgcatggcatacactaaaattatttgatgctcatcagaatttgaaatttaactcaacaccttatatttttacttaccatat

SEQ ID NO: 58146 - DNA, 1751 bp, Bovine  19866880426941
  misc_feature (1)..(1): n is a, c, g, or t
ngtggcaggggacagaccggagcttgagaggaagtaagaaggccatccattaagggctgtttctagaaataccagagcctcctcagcccatcctcccctataggcaagtttggaaatctggctttgggacaagttgtgtctgtggtggtgtggctgaaattggcatcagagaagggtaggggactgagcgttcaaagcaggtcttctgaggctgccccttgatgccacagcttgtgtctcaagccattgttcccgttcacagcacggaaggtagcttgagagaacttgctattgaggctaccagctgggctgcgaccggtcatccatttgcagaaatgaacgtctgtcctggcttgaagcgcctgctcctagtgtcacctggcgaggctgcttcctctttctgggccccagtggcccaggctgtcaaatgaggaaacggagatggagggtgcatctcaagagcttcttcaggctctaaggtcccgaggatccccagacctttccaaagatctgaggttctttggaaaatggatatatcttacaggtagtgattcagagtggcttattgtacacttcaaaggtggctagtgtgatggagggactgaattttaaattttactacattttaattttaagtttatataactgtatgtggctaccttatgggacagcagagctccttaactggaaaatctaacataaggtgagcatttggaatgcctgtatacatttttatatatatctactttgaaattgaaagaaactttctaatttcagaaaaaccgtttgggttctttacagacaatacagacaagaagaagaaaaagaaagtaaaaaatagtcacgaaaacacctactcagagataactgctactggcatcttggtgtataactttctaaattcccttctgtgctcatgtcttaggtagtcagctggctttcaacagcatagcttgaaatcatccaggaatggatgagacatgttaggagagaatgcctgctcactgcccagcagaaaatactgagaaagactttagcaatctgccctgactgatgtttcttttctgggtgctaggttatcaaccctatgggctgggatgcatttggattgcctgccgaaaatgccgcgattgagaggaatctacatccagaaagctggacgcaaaggtatgtgtttacaggcatattcaagcacttgtatacattacccttaaacaactttttttttttaaacctgtgcctgagaaatagaaagcaaaggaaacaaaacactgcagtctgccaagcaataaaaaaggattgtctatgttggtatttgctttttctcacactgtattcttatctaagacacaacacaaagtgtttggctattcattcatgtgttcattttgatgctttgttatttacagttattcttcctttgaatatttgcatttggaaggaaaaaggaggaagaaaggatgacatttgttaaacttctaccagtgttcttcatcttcttgaccatagtttgagccatagccaaatgccacattataattttctctgcaaattcttttaatttttttggcttcatcattctgaagcaagaggaacaaggaaatatatggccactttattctaggcatggctttctccaaggaggacatagtctgagtccccgctgtggcctcaggctgccatgtgctcaggcaatgctcatccctcttcctcctgataaagccttgaggaacttgtactagaacccagca

SEQ ID NO: 58147 - DNA, 2121 bp, Bovine  19866880491297
  misc_feature (1)..(1): n is a, c, g, or t
ntcattctagccaggcctctcatctaattgccatgtgtctcaagtgagcactttattttattgtcttgttcatgcactagttcaagagcctgggctccccggtcagaatacaatctccagcttctcttaggcaggtgtgtgtttgcagtttccttatcactgcaggcccacgggaacactagggacacacagccatgcaaacaaatacttcctgattgtttgaagagcttcttagatatttattctgggaataagcacgtggctggaatctgggtctccacgcctatctcagccctctaccagatctactggccttctctgctgttgagggctctcgcctacattgagttaagctctacttggtctgtatgtaacctttccccttacctaaaagagctggctgaaacagacacaggggcttcctacaagcaccaccctcaacattcccctagagaaaggaacacattccttgcttttggaattaaaactaactatagcttatatggcattaccactcccataacaaatatattgtttagctgctcagtcgtgtctgactctctttcgactccatggactgtagcccaccaggctcctctgtccatagggtttcccaggcaagaaaactggagtgggttgccatttccttctccaagggctcttcaccacacagggatcgaacccatatctcctgcattgcaggtggattctgtaccactgagccacctgggaaactgacaagaaacaaggtgaagtgtgaaagtcaaaggtgctcagttgtgtccaactcttgcgaccccatggactacacagtccgtggaattctccaggccagaatacaggagttggtagcctttcccttctccaggggatcttcccaacccagggatcgaacccagatcccccgcattgcaggcggattctttaccagctgagccacaagggaagcccataagaaacacagttcagttcagttcagtagctcagtcgtgtccaactctttgcgaccccatgaatcacagcacgccaggcctccctgtccatcaccaacaccgggagttcactcagaaacacaggcttccttcaaatactctggtgaatgaaatgaaaggggacacctgcataagggggtggttaggaatgtaggtatgggatcgaggttgtctgctctcaaatcctgactctactgcttcccagttacgtgacctgggaccttggtcaagacaatctctctgtacctcagtttcccaatctgtaaaataggataatagcacctgcctcacagggctattgttaataggaatgaatcagttagtctttgtgaagtgcttcagaacagagttgggcacatagtaagcactattatgcttcagttattattagatataattaataagaatacagagatttaggacagacggacctacaaatcagtatgcacgcaaaagaatctgacagtgatgggaaaacaagctggttaatagaataatatgccatccttggtgttttgattttctggcaaacgtacagtctttgaactgcttcagtaaaccaaaaagaactctgaatttatggggttttgaaatatctaatgtatgatcacaaccaatgtgataaaaaatgttctggctgcattaaagtacaacagttagtgaaggtgtcattgttttagcagagaatttaaaatgaacattcgattgtttgtatctcttgtatcgatttaggctaacatgtcagacattgtttgtaatgttatttagcaaatactgccaatccttctccagcagagaatctttagtcatttatctgggaaacacttcaaatgtatgttctatagttttaaagacacactgaaagatttttacataaatatgatcccatggtatccaaactcagaattttctttccctgtcttttctgatctattcgctgccactttttaaacccttgatcctcttagatatcctacctattaaaatttcacatccgggtctcttctttctgagcgatctcgagcgcaagacaccatttctcacatcagaagtcccctgttagctcatcacccaggtgctcattagaatccaggtgttcaatcacacaaacgcctcaaggtgcatttgt

SEQ ID NO: 58148 - DNA, 4336 bp, Bovine  19866880524040
  misc_feature (1)..(1): n is a, c, g, or t
ncgcccccctgctctagggcaggtggtctgcacccgactcgtgtcccacttctcgctttgacttatgacaaaagtataccctcccaccgggcacacaccactctcatctgcaaggcccagcccacccccttccctcttctgcaaaactctgcactggccagcggcttcctcccagcctcccggcccacctgtctgactgtgaaagcctgagggcccccgggacgcccctctcctgctctcgtcctcccactgcttcccactttgcactgcatcctcaccatccgtgtgtgtgctgggggcaggcagtaagcagctgttgcatcaaagctctggtattgttacaggaagtaggaaattataaggataccacatttcgaggcttgcagaataaagactgtgtaataatgtgaacattaagtatatttcagccctagcttcttttgcttttgagactctgaaattccaagtctaatttttccacacccatttaaaaatggagggacttcactggcagtccggtggttaatagtccaagctcccaatgcaggggacaggatttcaattcctgttgtggaaactgagatcccccatgctgttatggcattgccgaaaaataaaaaaatgtttaaaatctgaactatcctttgggccttcactaccaccggcccccggtttcattaggagctcacgtgagccctgtactcacacttccaccacacaggtagtgatccaaatgcacccaccaggtcctgattctggacaaaaagaactctgccaaagcagcgggaagaagatgaatccagtcattctttcacgtttgctgagtatccactgtgggccaggcactgcttgggaacacaggagtgacgaacattccagtgcacagaagcagcaacaggcagagtgcagcatagggtgggagagagctgctacagagaaagtaaagaagaaatctggacgagtggagggagcccagcaggggcatcaagaagaacaaaggccctggggatcccggggtcctgcgtctgtgttaaagaatcactctggctgctgagtggtgaacagactcagggggcagaggcagaggtggatgcagaactggcagtctagagactggatcctaggtacattttcaaagacaagctaatgggatttcctaatatcttggatgtagctgttagagcaaaaggaaggggctggaggatgataaagttgactttatatggaaaccatttacaacgtgctcgtgtgggggctgctgttagcactggacctgaaaaggggggagaggagctgatgaagggaaaggtgaagaagggggctgaaaaggggccacggccagggctggagcagggccaatagggaggacctctcgtctctcctccccagtgcagatctctgccagcgcctcacatcggtcactccatccagaacccagaaggcaagggaacctctggcgctgctgtcctcaggcccagtcttggggtacacagggcagggggagagcagaagaagcgagaggcagagaatcacaagcacgccagagaggcctcaaccctgggggaagtgtgtgcttaaacaccacgttgattgttcatgactgctttccctggacctgtgcttaaggtgcagctggagaaagtcaagttctctggaaagaacatcatggttggaatagtgattgggtactaaaaatcagagactgtgaaatcctgactcctgggggccttccagatcagacttaaacagtcacaggctttagatgtcagagagcttccaggaggcagaagaataaggcagagacctaagaccccaggtctcccccattgcaggtggattctttaccatctgagccaccaggcaagcccaagaatactggagtaggtagcctatcccttctccaggggatcttctgacccgggaattgaactggggtctcctgcattgcaggcagattctttaccagctgagctactggggaagcccggacctaagactcaggaaggcatttctagctctggtgttaaggtatgtgatgtggcacttttccaaagcagccaattataatggaaccataagtcattttccaggcagagtctatactagcagattgacaattcctatgtaacccttttcatggcagacacatcttgataattgggatggtgtagatgggtcttaaaagtcctcatacattctagataattaggatgctttggaaccaaaaggaattcactgtaagctaggactaaacacgttgccttcttagtgtgaaatttcttttaaatcaagactttttaaaattcctttttctccaactaaaatataggttttcacaggcaatcagctgattggagggtggaatgagacacaagaggctcttcatactgcagaaaaagattcctttgaagaggtggactggatgatttcaatcgtctagtgtcttgttattcatttctataaggtctatactgttgttcagttgctcagtcgtgtccgactctttgtgatcccattgtctgcagcacgccaggcttccctgtccttcaccatctcctggagtttgctcaaactcatgtccatggagtcggtgatgccatccaaccatctcatcctctgtcaccccctgtatgtataaataactaaatatatatatttggctgcaccaggtcttagttgtggcacaaaagatctttagttacagcatgcaaactcttagttgtggcaggtgggatctagttccctgaccagggatcaaacctgggccccctgcattgggagcatggagttttagccactgaacccaccagggaagtcctaaaatactttcttaatataataaaatacctatcccaaaataccaatcaatattaaccttaatagagaaatactacagttagaaaatatgatggggaaaagatcctctacacattctaaatgaattgatatataatatatacatatatatgcaggtatattagaaaaggaacttaataagaaatatataagacctatgagaaaaagagctaatattcattgagaagcatatagaagactaacagaattacagagcattttcttgaggcagtgaatgtgtgcatgctcagtcacttcagtcgtgtcccactctttgcgaccccatggactatagcccgtcaggcttctctgtccacgggatttcccaggcaagaataccagagtgggttgccatatccttctccatgggatctttgtgacccaggaattgaacttgcatcccctgcattggcaggcggattctgtactctcagccacctgggaagcagggataacatttataaagatattcagtcccaataaaaatcataaacaaattttataaaagttttttatttaaaaactttctgaaacaataaacacatgggaaaaaaatgagataattctgaaaaggaaagcagggagacagaattgagcctgcaaagtgtcaatatcccctgcaaagcttcaatatttaatacagtgtaccacagctgcaagaaatgacaaacccatgggaagttctgaaatggctgagtgtacatacaagtgagcaaagtaaaactatgattttctattaaacttcagtgggacttgtggacgccagaaaactccccaaatgacatatgctgctttatgtctccaggtgatggagacatgaaactgaccactgttttagggctgcttgtttatttccttctggtatagcttcttgaatgatacctcagtaaagcaagaaccaagtcagtgttggagggtggaattaaaaaaaaagaaaaaaaaagattccaacaagctgctcatcaaacatcccctagctctgtggcccctcctccagggttcttgctgctgtgggatcatgtgaccaattctggccaatgggctttgagaggaaatgacatgctatttccagtcccagagaagagctccaccccacaacctctcagttgccatggcaaccaaggaaaacaactatttaagatagtgtccttgcaaatcagggtgcctccacctacttctctcctgcatggggggaagagtcccccatcaacccttactggacatgcagtgtgattaaaaaaccaaactttgtcacaataaaccactaaaatactgggattcatcagttactgtaggatgacccagcgtatcctggagggataaggagatgtcagcatttcaaagcaatggttctcacattagaattctctaattctacacgttagaataatctggggaggcggggacctccctggtgacacagtggttgagattttgccttccaatgcagcaggtgggtggtcaatccctggtcaggaag

SEQ ID NO: 58149 - DNA, 1462 bp, Bovine  19866880542907
  misc_feature (1)..(1): n is a, c, g, or t
nggattatattatgaaaccaatgtcaagaggagcaggaatttcccaactggtttgacgtcaaactctgaacatataagtaactatgtgtgtgtgtgtgtgtgtgtgtgtgtatgttagtctctcagtcctgtctgactctttgcaacccccatggactataacctgtcaggctcctctatgcatggaattctcctagcaagaatactggagtgggttgccatttctttctccagggaatcttcccaacccagggattgaatccaggtgtctggctttgcaggcagatgctttactgtctgagttactagggaaaccaatgtatagataactctactgctgctgctgctgctaagttgcttcagtcgtgtccgactctgtgcgaccccagagacggcagctcaccaggctccccagtccctgggattctccaggcaagaacactggagtgggttgccatttccttctccaatgcatgaaagtgaaaagtgaaagtgaagtcgctcagttgtgtccgactcttagcgaccccatggactgcagcctaacaggctcctccatccatggaatttcccaggcaagagtattggagtggggtgccattgccttctctgatagataacgctagtagacctcaaatctagagaaggttgagtcataagagaaaattgaaagatgacgccatgatactaacacatcactaattctccttttactatattccttctcagacttgtccatattcataatgatagttgtaaatatacaataagtacaattttgcattctacttcttctacttagttttttataagtatttttcttattgctattaactcctttgtggctcagatgataaagaatctgcccacaatgcaggacccgggtttgatccctgggttgggaagatcccctggagaagggaatggctacccacttcactactgttgcctggagaattacatggacagaggagtctagcaggctacaatccatggggtcacaaagaattggacacgactgactgactaacactttcacttccacttcagtatcattttttgactacataacgcaccaccaattaaactcattacaatttacctataattttgctagtatcagacgtttctgttgttccctgaggtttaactactatcaataatgctatcatgatcactctagacacacaaagttttcttctcattgaaatatattcctaggataaaactttcataagtgagttactggattggaaggaatgacattgttttgcagtactgcctactgatttaaaaaaaaaaaaaattgactgggtgcttcactgggagttcagtgcttaaaactttgccttccactgaagggggtgcaggttcgatcctttgtcgggcagttaagagcctacataccttgcagacaaaaactcaaaacataaaacagaagcaatattgttacaaattcaat

SEQ ID NO: 58150 - DNA, 862 bp, Bovine  19866880545006
  misc_feature (1)..(1): n is a, c, g, or t
nagtcggacatgactgagtgactgagcatgcacacatttacttattctttaaatctggggagcaaagtcccatctgaacaagtgggaagcttgaataatgaaaccttaataaataggaaggaaggaagataaaatgaaaatgaattacttctaaggcgatacagtaaaaggcattaagaattaacagaattttcccaactagagattggtcgtgttgaacttactggaataaatacatctaaatcaatttgaaattagctaactgttcatcaaatggaagctgccaaagtgcttggaaaagattttttttaaagagtgcttaacatctctccacctgagtcttgtttacatgttaaatttgctcagcggattcaagggcaaagactaatccctatcaaaatagccacatttccttctgagttgaactaatcacgtgtgaacagttcaattccacccatcaaacatctgaacattctgtacacaccgagtgtcaccttaggtcctgaagagaaagaaaaaaggcactgaacttgtgtgctcagaaggctggggtgcagtggtggagatggacagtggagccccctccccatcgtctatgatgatgggcagcacagagactaaggcacacagagcggggacacatctctcagcccagacaggaaggagaggccgcagcggggagggagaaatcaggaaaggcatcctggaggaggtgatctgagctccgtcctgcttgtgtgaccggaagacagcttctgggatgttcattcttcaagtccgcacaactggattcaggaagatggggtagtcctctggcctccctagtcatgagttgctggctagcaagtcttcagttccttgg

SEQ ID NO: 58151 - DNA, 1630 bp, Bovine  19866880598057
  misc_feature (1)..(1): n is a, c, g, or t
ncacatctaaaagactttttgtcctttttaatctaaactctgtatttagcctatcctaaatgaaaaagttggcttaaaactcaacattcagaaaacaaagatcatggcatctggtcccatcacttcatgggaaatagatggggaaactggaaatagtgtcagactttattttgggggctccaaaatcactgtagatggtgattgcagccatgaaattaaaagatgcttactccttggaaggaaagttatgaccaacctagatagcatattcaaaagcagagacattactttgccaacaaaggttcgtctagtcaaggctatggtttttcctgtggtcatgtatggatgtgagagttggactataaagaaagctgagctccgaagaattgatgcttttgaactgtggtgttgggagaagactcttgagagtcccttggactgcaaggagatccaaccagtccatcctaagggagatcagtccttgggtgttcattggaaggactgatgctgaagctgaaactccagtactttggccacctcatgcgaagagttgactcattggaaaagaccctgatgctggagggattggggggcaggagaagaaggggatgacagaggatgagatggctggatgtcatcaccaactcgatggatgtgagtttgaatgaattccgggagttggtgatggacagggaggcctgatgtgctgtgattcacggggtcgcaaagagtcggacacaactgagagactgaactgaactgaactgaaatcatcttaggatattcaacattttgaatcttttaagatcagaaactctttctatattatttgctgttgtatgtctagtagctaagagtatacctggtacatgctcatgattgttgaatgatcaataggaaatgaaagcaacaaacgaacagaaagtataccccagtatatacagtaagcacttgagtatataatgtttcatattttacaagtagttttcaacattcatctctatttgagagagatacagaatggttattctttttattcaatatgtgttcttactaaagctatgtgaagtggaatgtcttatgaaataggtgaagatgaaacttcctttcaaaacctaggttttctttttctatactgaaagttggcaaaatttttctcctaagactcagttagtaaatatttctacctttcaggctcaccaatccctgtcataggtacccagcttcaccattttaacaggaatgtggccagagaaatatgtaaacaaatggacttgactgtgttccaataaaactttattaaaaaaaataggcccatcagttgtaatttactgaccccctgatagacatttatgccacatttccaacaacatttttgggtacttaatgtttcaagtgctgtgagaggaaatacttcatgagggaaaaattcaccaaacacttagagctgaaggtcaactgagaacaatgacagaacaggcattaaactggaattcaaatgcaagtgtcttcttgaattcgatgttgtgcttgttattttgcacaacacaaagtccgccctgttgtttctaagaggagagagtggtttgagtcctgcgaagttttatgagccaactcagtgtatgctgag

SEQ ID NO: 58152 - DNA, 1564 bp, Bovine  19866880689723
  misc_feature (1)..(1): n is a, c, g, or t
ngagaaagggggactcaagaacgtctaattggatggagaatttggaaataacggaggatgtgttaaaagcaaccagcacaaggggaaaagaaagacaactagaaacttcaataaaaacaaaatgctgctccaaaaagaaaacagaatcataataaattacttacatctgcagaaacatgtatacagtcataataacattcatgctgtttatttcaactttcagaacaaatcaataaacaaagcataaatgactatggttacagaacagaatttaagaattgtcagacttgacactttcagaggcagagaggtggacaaggggaggagacggagcatcccacattctaccaaattctacatcccacattttaccaaatggagaattagagatactgtttatagttaatacaataaaactaagtttgtgattataataaatatttttcctgattataaaatttttgttccttataaaaaatacaaaaattatttaaaaaaattttaatcacctataattccattatccctaggacctgggtttgagcccaagctctgaaatttaccatttgtatggctccaaaaaagtcacttaaacatttgtaactttttttttaatatttccttcatgtcttttatctatatacttttaaagagtatacagtgtatgtaacaacattttatgagaactgcacaatatacacacaattttgaatccagatgcttttcactttaaagcccaaagtaaaactctggatacaagtatcatgtccttctagacttgtaaatatacttcttggccatggggaggtcagaggttttccagagatgggcctgagccaaatattaaaagaaaccaaatattaggcaaagcagaagggggctgtggggcgtggtgatgagaggtcacaggcaccacgagagcaagttgcctccaggccgcagtaaaggtgcctgagaaacgaaacccataggctggaaagagatgataaagaacttggtaaataaacatgttaagggatccagctttccagtgagagacatgaaaagggggaaacgcaggccttgcttggtttggtaccccaggacctagcaccatgtctgccacaaagagagtgcataacaactatttttgtcatcaatgcctgatacactggaagccagaaatggctcctgggtttctggtctgggtgttggatgatgccaccatttgctgacggggggagggggggaatccaggaggagcaagattgaaaaggttatgtgtctgggcaacatccctagagattccgtagtctgatgttaattttgaaaaatgtcactgggaattctctggcagtctagtggttaggattcagcactttcactgcaggggctggagttcaatccctggtcagggaactaagaccccactaagtcacacacagccaaaaaataaagttaccattctgtagcaggtgtgggtgattacatagtacatccccaggtgtgacttgagaccccaaaggattctcggattggcctctgggagtttatatgcctcccaaatgaacgcaaaactgagcgt

SEQ ID NO: 58153 - DNA, 787 bp, Bovine  19866880710258
  misc_feature (1)..(1): n is a, c, g, or t
ntctggaaagaattcaagagaccttggacctccccagcatttagatgattgcaaaacttttcatggaggcaaagtagcaaggggacaagtccagacagtgcatttccaaggtgaagccactgaatttgacaacccgcatctattttttaaaggaggttttgccacagaaatattgactttgggactgtgctgacaagccataacacaatccttttcctcctggacgagagcaggggccacgaaggcaaacgcctgcaggagctgggctggtaattagtataaatgaaggatgtgggctgggtgtgaaaaaacaactttcctgaagcacacatcaacctcaagacttgtctttttatgtcacttgaggtatgagtcctgaactttccattatgggagaagcagccctgaagggcactcacccacagcaacagaccctcagcctctgtgggaggcgatagggagaggtgtggcctgcagggaatgggtgaatcaggtgccccctctagagagcagctgtgtgtcaactccagacggctattttctgatgagcacgcaagtcccagcatggccagatcttccgatccagatttgttatgtaaacattttatcatttcaaatgttggtgagtaattctttaaaaagatgctgcaggcctaacaaaacacatctgtaggctggaacattctgtagtctctcctggggcgggtcgagtgtggtaggcaggagaaaggtccatgtgctaatgcccggaacctatggatatgttaccttacagggcaaaggggat

SEQ ID NO: 58154 - DNA, 886 bp, Bovine  19866880738617
  misc_feature (1)..(1): n is a, c, g, or t
ngttttgaaaagtgaggtacatgacctgcgagtcgttcttcattctgcagacaaggagctctcttcagtgaaactggagtacactttattcagagagagtcaggagaaagaactcaacagcctttccgagagacacatgcaggtccagcttcaactggataatgtcaggtagagttctgttctgctttcaagttgcctgattggcttgtcacctaggactacttaaagcacaagtgctgtttacccagctcaggctagtttaaaaaattcaggggtaatttattgggacttccctggctgtccagtggttaggactctgtgttttcactgctgagggcccaggattgacacctgatcagggagctaagacccagcactctgttccaggtggggcccagcgtgtggggccacagggggaaaaaatggtactttattgatactgggaagccccagaggtgattttggtttcagggacagactagattgagtctcaaacaacattgtcagtatgcactcccttctctgcccaccacccctgccaagcttttcttcctgtcttcctcactccttcggtgctctgtttccctctgtgtattgccctcgttctcttctcctgttaagaaccttcctctttttgacagggaacagactgcctcagacagctccatcttctgtcttctggtgtaacaatccctgcaaagaaatagtgtctttcagttgccatatgtcaatcccagagaaaattgcggttattcttactggagtcatctgcttacttttggaccagtcatttaccaagggttggcccagcctgggtgatgtgcctgttccctctctagagggaagggtgtgctcttactggacagtacaaggtagaccagatcag

SEQ ID NO: 58155 - DNA, 1318 bp, Bovine  19866880748929
  misc_feature (1)..(1): n is a, c, g, or t
nggaagtctcaggcttttctgccccaaagcagttccctccagccaaggcacttccccagagagggacacactcctgaaccatgggcaggcaacattcacgtagccaggagatggggggcagcggggggaatggtttggggatgattcaataaattacaataaattacatttattgtgcaccttacttctattgtttttttagcctttattttttttaccttttaaaaaaagtatctatttttaattggaggatgattgctttacagtgctgtgttggtttctgccaggtgttgttcagttgctcagttgtgtatggctgtttgcaaccccatggactgcagcgtgccaggcttccttccctgtcctttaccgtctccccagatttgctcagactcatgtccattgagtcagtgatgccatccaaccatctcatcttctgccgcccccttctcctcctgccctcagtctttctcagtgtcagggtcttgttttttctgctacacaacatgaatatttctactcttaccaaatcagtgccacctcagatcatcaggcgttagatcccagaggttggggagccctgcactccaggggctgaagaggtggggcagtgaggggcccagtagcgtttgtgaccagaccgttttgtgactgtgtttcagactgcgtgtcaggccagtgtccctttggggaggtttatcttcagccttccacgtcggtgttgcccaccctcaacagaaccttcatctgggacatcaaagcgagcaagaatgtcagtctcgagctgcagttctccctgtcacgcctgaggcagattgggctgacggagaactgcccggatggagtcactcaccgcatcagcggccgcgtcgacgccagcacgatggtcaggattgggaccttctgcggcaacggcactgtgtcccggatcaagatgcaagagggagtgaacctggccttggacctgccgtggttccacagcagaaacgtctctggcttcagcatcgcaaaccgctcgtcgataaaacgtgagcttgcccacccccatctcccccagtagtggctgaggttgaaacctacaaaatcagcctcactttccatcagaaacagtctgatggggcggttttgtgattccatctgaccccttaaagcacatcccactcttttgtgaacacgcgggacgcctggtgtgagcccacccttcgctgttacacagaccctgtggcgactctttcctttgtccttggtatgtgacacttgtgttcaagaaacagaacgggacggctgcacaaatctatcgctccggactctgtttctc

SEQ ID NO: 58156 - DNA, 2253 bp, Bovine  19866880756622
  misc_feature (1)..(1): n is a, c, g, or t
nagagattttttgatgaacagttacaattttgactttccaaaaccgaaactttctactatttttgcaactctttgtaagtcaaaaattatttcacagaatgtttttttttaactgcagcctacagttttatattgagctgtgcctgaagaaaaaatttttcactgataagacaccttgaagaaaggacaatcagtgtatctctagattgtatcaaatagagagaaatccctaactactatccagctccttgacatataggggaggtgggtggatcagacctaatgcattagccttgctatgaggccatttcccccatgtaaattttgattatattaattaccttttctttagattattgtataatggactcattgacatggatattcccattcatagttatttttatctttataaataacattctgatgtatttatcaagtgcttgagtatttcctaatatgttagtctgtctggctgtcacttgaacagctgacagatagagtttgtgaatccagaaagctggaagccatccgtaacacttggtgatgcaggcacattgctatcctgacaggttttgtgtgagttatcagatagtatcctcagacaacagctctttctcatttttctgtttactgggacagtgatatcccctcccccacctttttttcctctatgagcagggctccacttccaaccttgaagtcttttacaatcaaagcaaagagaagatttgtggatgttgaatatgcaaggagctgaagagagagtgattggaagagagatttgttcaggtgagtgagcaagtgttcaccagtggaagaaataggagggctttggaaattttacaagagaaactgaatgaagctcagaagagaaaattgccctctcttttgggatgttggggtgaatgtgagtgagcatctcttggggccagcttttccctggtactcatttgatctcatttccactatttggctcgtttacattctctcactgttttgccctaatcttagtctgttatttgtttgtctttttccttttatctcccttgtctctgattgcctcacttccttggtgtctgcagctacccatttctcattaatgatcatcaccttatcctggtgcagatctcttccaccgcttataattctgaattacttgctcacttgctcttattgacccttactcataggccagtattaaggcctgtcaaaatgaggtccctctaagttaagggacttccactctgccctacacaagagacatttactgtggtggtttttttcaggttggatgaacaagcctgctccagagcagaatggcactgatattgagttgccaggggtagcatcaaagagatcccgagaggatgaataccaggattctacatttgaagaaaaacgtatatatgagaacatgaaggaaaaccctcccagagaggctcctggaccacgctttttccgagaaggttttggagcaataacttttatccataaggaagcacctccagaaatgattagccaggaatatcattttgagagaggcttgcttttgacctcaagtcttgttacacatctcagggtttctacagaagagagcctacataaatgggagacaagtaacatacacaccaatgagatttcaggccaaagtaaatgtttgaccctctctacacagaaaaaatcttggaaatgtggtgaatgtggaaaaacctttactcagcgctcatcctttacccagcatcagagaactcatacaagaccctacacatgtgaggaatgtgggaaaacttttagtcgtagctcattccttattcgacatcaaagaattcatactggagtgaaaccatatgcgtgtgagcagtgtgggaaaacatttagatgtcgatcatttcttactcagcatcagagaatccacactggagagaaaccatataaatgtaacgaatgtgggaattccttccgcaatcattcacatctcactgaacaccagagaactcatactggagaaaaaccttacaaatgtaatagatgtgggaaggccttcagtcagaacacacacctcattcatcatcagagaattcacactggtgagaaaccttatttatgcaacgaatgtggctcttcttttcgcaaacactcaaatcttacacaacatcagagaattcacactggggaaaaaccgtataaatgtgatgagtgtgggaaaactttccatacaaaggcaaacctctctcagcatcagagaattca

SEQ ID NO: 58157 - DNA, 1851 bp, Bovine  19866880768648
  misc_feature (1)..(1): n is a, c, g, or t
ntgttaggaattgcatttcactcggatcagaaatttaaactagtttcttcagtagttattttaacgagaacccagtttcgtgccaggacagtttatttttctccagagtacttaggactccctaacataacatgaagcatttacttatcacctatctctcatttaaacctcctaagggtggggatattttgttcatcgtcttacctctaaatgtcctggcatttactagaatagtgcctggcttgctggctatcactaagcatctgaatgaatgactaaatgttaactatctttcccaaatagattaagagtcactactgtataccaggaactagagaagaatctgtctcatagtaagaactctacaagtatctgctgaataaactaacacaaattcttcttactagagtcattatcctactgctggctgaaacgaagagactgagagagatcaccaaggagaaggactctgagagagggaagaaagacaactgcattcatgttaaggaccagaagaataaaggaacagagagagaaagaatagtagaaaagaacagaaataatttccactggtttatagtagaaataaaccagttcccatcttccaataataaataccgtgatttatttacagaaggtcccgaattctaatcaccaccaattcatttaaaaaatactattcatttaaaaaatactgtagacagttattaaatgttttgaaaaatcaagtttctctatatatctgtttatacaaaagaatctggtattcattttgaaattaaaaaaaaaaacaaaaacctaacaggctatagcaattaaaaaaaaaaggccccacaagataaagaatgtagtagtaaatgatattctagtcaaccatgggaaagataaatagcactcacttagaactgttttctttatcttcttcaaattgtaataataatttgttattgcgttctttttctgcctcaaaaagctccatcaaattctaaaagacaatgttatattagattttaacgtgtagtcaacaaacacacggaataccttccacgtggtagccacagtgggccattacacaagtcaggaataggtcaaatagtcatacatccaggacaaattcatcaataaccagtacctttcttaacttacattcagatcagatttcagagtttcattttcttttttgcagttttggaggctttttgaaagttggtcaatttcaaacttcatcacttcttgtaagttgtcataggaatcctgtaggcaggttttgctctcaagcagcttttcattttctaatctttatcaggaaaacatttttacaaatgtaaatagagacgttaaatgaagttctgctcgccagacttatctgcagttcactgatcccatttacagaccattcccaacttacagaagcctgactgatgtaaagcttctcacagacttgtgtgaaatggtcatgatgcacaaacattagtgtgagggggatggagaaaacagggtgagtgtgtcagcctgtagccacctatttcctcattctttctcccatggagtcaaccagacatgcttaattgatcggtaatttcgggtgatgagactcatttagggaggtccagacctaacccctttgtaaaccaaagactggccactgacttaattttattgctagctcaactctattcactcagcacatattctccaaatccagaaagacttttcaagatggcaaatgtggcttcgatctgaacaagagaataaattccttcaggatagaactatctttttaagtcacatgattattatttactgctttttaagggtttcaccctctcattctgcttcgcaacatacagt

SEQ ID NO: 58158 - DNA, 2035 bp, Bovine  19866880785415
  misc_feature (1)..(1): n is a, c, g, or t
ntgtgttgaagagtattaaaagttgtttttgtgaagttgtgaagcaacaggatgaaggggcatatttaaagcaacactttttccattaagagaaaagaacaaataatgactgaagtataacacccacactgctggatagagaagtatcaccagttgaattttgcatgaattagtgtcagcagtcaatgaatttttagcaaaggagataaacagcaaaggcagccagttcaaagaacttggtatcatttaccaagtagaaaatactaatttttaggaattccttagatgactgaatttgttgaagagagtaccactaagtttcagtatgggaaaataccacataaaaattgatcagagactgatgtttagaagatagtgaggtccagaaattaccattagtatctttggaagatagtaagttaaggtactatagaggccaaaatggccaatgaaatatagagcactgtaggatatataatacaaaaaatctgattttaactttgcatccaaaatcatggtctctctacaagccatattccaagaattttattcttttgttaattcataacagaatggaaaaaggcttggaaaaggaaattcataaaactttttttttctttatcattgcagtataaaaagattagaagtatcttcatttcaactgaattcatttcaacctaaaaagaaacaaggactgaaacagaatatgataaaaggccacgaaactactcaaagaatgagcaaacattctgtcaccaaatcccatagcattaataccaatagctgccaagcctgtaagttagattagtactaactaaaccacttttcagaaagtaacagtaaacttaaagaactaatgtataactaacagaaccgacagtggcaagatgacccgcaaacaagacatcaggatcaaaaactgtgctggctggaccgtgagtctgaccgctctgaccaatctctcacaccatatagttgttaatcagggggataaagatgtcagctctacagtcattcagattgtcattagttaagcacttttcaaatacttaacacaggaaaattccatttaataaaaatgtaaagtatcaagatctgcaagacagagatataggagtattcccttgctcgtgggtatctattagcctacatgaagaataagtatgtacataggaaatttgcacaccaagtctggaggctaagtgcaaaccctcagggcaaggcaatatcaaggtccttataaacaatctccctgcccctagaagacatgtttacacaatcatgtcttacttttgtcatttttctctgttccagacacttcgaagaaggctttttccaggattgcaatggtctgggcgtccatttcgtgggctcttttcacaggctctaacagtctcagtcttctgttctcctccctgagggaatgattttccatagcatattttgccactctggggtggtgctctatctttgacatggaagaatcagagacatatatttacaaacgtgaccattttagagaacaagtttttctaaaaaccaacagaaaacactgtggacaccacaggaactatggagagcacctcagtttttatgatcagactgaatatgtgcatatcctacaactctcaagtccacatttgggtctgaaaatttgaaacttctccatctactcttgaaactcacccagacatcttcaataagcatatggggtgtaccctgtggcagactcttcatgcaagggagactgcttcaacacactgaacataataagaaagctctccaatgactacagcgaaatgccactcaagattcagtaaatgaaaagggtgaggtgcaaagaagtgtatatggcagctgtcttttgtgcacaaaaggaataaaagccaaaatatctgtattggtctgaaaatgcataaagacctcttgaaaaatgtacactctgataagagattatctttgtttcttaataatgtgcctggtgtcaactatccatcctcccagggaaaaggaaaaacaacaaaactttgatgag

SEQ ID NO: 58159 - DNA, 1724 bp, Bovine  19866880796524
  misc_feature (1)..(1): n is a, c, g, or t
ntgtctgccttattatcagtttatttttagagtaataatactctagtaactgaagaatgagtctcagttctaagatgttgaccagattaacacaaatgagtttaataactacttgttgaatgaaggaatggaacagtaaatgtataaattccaaaagagaagtggaaaagtcctgcaggtatcagtgaaaatacacctggttttgtcatcaggtgtagaggagtgagggacattaacaaaaaactttaccttgacccaaggcacggaggaagcatcaccgtttatatgcagaaagattaagtctttactttaggaaatgatatcaggtatcactgatacctgatatcctgcaggtatcagtgaaaatacacctggttttgtcatcaggagcagaggagtgagggacattaacaaaaaactttaccttgacccaaggcacggaggaagcatcaccgtttatatgcagaaagattaagtctttactttaggaaatgataaagtccaataatagaaaaacaaactcattttttaaatcactgacatttctgaacatcactaaaatatgctttttttttttaagcaattaaggaacaccacatacccttaagaatcagagacaacagccaatctgtttctgatctgggctggatcagcaatgtcctactgtgcagagagggcactctctcaggtcagtgaggtctgagaacactacaaagtgactttgccttcctgagaagcacacagcatgtcagcatactaaaggctctgcaggttctgcagatacccaagcatgctgagctctcaccaatacatatttccaaacctgggtgaacacagaaccttgcttttgtgtgaagcatttgtgtcttgtgctcaattttaatatctttttggcgaaagaacttacattgatgtcctccagttcttgcctcagggtgtctattggtttctgttttctcagagactgaggttcttagctcctggatctggctcatgaggtcagttacaacttcctgacaaggacagaaaggtatcttcataccgagtgacagcaaagagaccattctttaatggtaaatagtttacctttccaaaggacaacagaagtcaattttattttagcagaatatcatgtgtcacattacattattaatatcatcacattatattatcaatttatattttaatgattttctaatattttcatcatttgcattggttttatgaatgaataagagctgaacataaaaggaatgtatatctaattattcacatcaggggactgacaatcaatgagaaaaggttgcattaacggcatcttagttaaagggggcaggggatgtgttttagaaacactgcagttgtgacataacagttggcacttcaagttatgaggaaagttaacttaaaagacctcattctccaggaactttggaagatgagcacagcctaaatgcatacagaaatgctggctacctatcaccttgggagcaggaaaccagcatgtgaaggcagcatttataaggaatacacagggggctataacctcaacctcaacctaccttgtcagcgtctctagacttctccagagaactgattactttttcattagcacacaaactctcctctagtttctgtacttttgccatctatgggggggaaattaatatttttagaaagagaattaaatcacaaagttaaccgtgcatatatatccaaaaaaa

SEQ ID NO: 58160 - DNA, 3392 bp, Bovine  19866880824959
  misc_feature (1)..(1): n is a, c, g, or t
ntccctcaggagagccgtgtccttctcagttgagtcagttccagcctttttctctgtgaaacaagataagaggcctcggtggtcaccacctgtccccctgtctggaatgactgtgaccttgggggtcctgtcccttccaggcccttccagcacacacgcagcgaaacactgggctgctgaggaggagtggtgctggagcgtgggttctgagtcctcctggccctcccgcctccgtgggggcccccctcaaggtctgccttgcggctctttcagcgtctgcaagcggtgcattcggaaaatggaccaccactgtccctgggtcaataactgtgtcggcgagaacaaccagaagtacttcgtcctgtttacagtaagtcagcttccgaatgccgtccccaccctgcggggagcactcgccgtttgccttgctgctggcaggacggtgcctggccatgcagacctctgcctttctgccagagctctccttggttccacacgggcccactcccatgcccttccctcgagcgtctagaaaactgcttccagctgattagctctaagcaaagggccgtgttctgggctcccaggcctggtgtcgagctcagtagccaagaaggcggccaccctccctcagctgcaggtaggtcgagggctggagggaccacaggcagtcagtgccctgacccttcaagcgagaagaggcagcgggcccggagcccccaggacagcccgagccccactgcccccagggaatggccgcgcacctcagacctaggggcgggggctggctggggggaatcaccaggtggctctccggcccctccctgcccagccctcagcctgagcgttcctgagtgggaggttgcaagcaccccgtcccgggcgcccgcacggccaggcggttctcacagcaatggcgtctgccctgctttcctgttgcagatgtacatagctctcatttccttgcacgccctcatcatggtgggattccacttcctgcactgctttgaagaagactggacaagtgagtatatgccagggcttccctccctgctccaggaggggcgcgtgaccggagtgggggcgggctctctgtctctgtcctggtgccaggggctgacctcattttattagatctcctgcaagcctatggactgaccagggaagaaacagcagaggcccgaatatctcttcatgaaataaagcagccccttaaagtcagttccacaggtaaagtcgtgagttggacagaccctcctgggtctgagggggcccaggaaaaatgtaggccccagcggggaagctcatcccaggagcagagccgtgcctttaagtgaggagctttaattgaaggtcattgcatcccaaccttgcagaaatccatttttaactttctggctaggacatgggtggggtttttgttcatttgggtgtttttgtgtgcgataatttttttagctgcttaatcaccaatgtatgttaagatggtagacaaattcttcctgcttttgaagtatctcgtttaaagatgcaaatgctgaggagggaactccaatcacaagactgcataaatcctgaggggaaaaatatagatgctgaacgtataattaaaatttgaaattttttaagaagaataaaaatgagatataagaaaagaatttttaatatagtagtccccgcttatctgcaggaggcatgttccaggacgctccgtggatgcctgacacctcaaatagtacagaaccctacatatacagcgtttggtgttttttttttttttaaatacggatgtacctatgataggggcttcctgggtagctcagctggtaaagaatctgcctgcaatgcaagagagccgaattcgattcctgggtcaggaagttcccttggagaaaggatagactacccactccagtattcttgggtttctctggtggctcagatggtaaagaatctgcctgtaatgcagagacctggatttgatccctgggttgggaggatcccctggagtggggggggggggggtgggcatggcaaccaactccagtattcttgcctagagaatccccatggacagagaagtccggcggtctatggtccatggggtcacaaagagtcggacatgattgagcgactaagcacagcacagcatacctatgggaaagtttaatttatgaatcaggcccagtaagagagcatctgagcggccagcatcactactctggcactttggagctgctgctaagtagcataagagttacttgaacacaggcactcggataccgtggcagtcgacttggtcaccgaaacgattggtggcatatgtagcatgtacatgctggacaaagtgatggttcacatctcatgtggacagagccaggtatgagatttcatcatgcttctcaggggagtttgcgctttaaaacttattatttctggaattttccagttaatatttttgcaccaaggctgactgcaggtaaccgaaactgcagaaagcaaaaccaaggataagggagagactgctgtagttgctggaggaatgaggaggctgcctgccgggctcctcctttcacacgcagtctgtgagacaaacacctcgagcagaaacatggtatttccacccttttaccattgattggtccccttcttcatgtcatcattttttatgagttttgctcttcctgcatgtactgacttcttaggtatctttagctcctgaccagatattaagagatttttctagcctctcttcctagcttgcatctgcccccttctgtctttctggtccacctggcttgacctcatctaggggaagaaaaatcccatgggtactggtcacctcaggctgctgcaacaagatgccatagactgggaggcttaagtatttatttctcacagttcaagagtctggaaagtccaagatcaaggtaccagtcaattccatcccttacgaggacccttttcccagcttcaaatggccctatcctcatgtgtcctcacccagcagagagagagaaaagcaagctctctggtatttcttcataagaggtcatgagggtggggccctcgcagtagaattcgtgcccttaagaagagacgtgcgcagtgctgagagcactgagggccactgttggggcaatggagttggctgggaccattgcttccgtgttcccacttagtgcacaggagactgtcagcgaggccttatctcaaccttgtaacaagcctgcagggtaggagagatactcccccctttgcagatgacaaaagtcggtgtttgcagaggttgagcaagttaccctgtcacatggctaagaagagggcctgtgattcaggccttagtcctgagcgggcttttcctaccctgtctggaagacttccaccaccca

SEQ ID NO: 58161 - DNA, 662 bp, Bovine  19866880957103
  misc_feature (1)..(1): n is a, c, g, or t
ncgactgaagtgacttagcagcagcagcagggcatttttcactttttcaagtttgtgatttgttgtcatctctttccttattataaataaatactcacttttcacatttgactttctatttgtaattctgtattctttttcttaaggtaattaagttcagccccacaaacctgtatccactcctctctgtgtctcacgcatttcctgttttaatggaatacattctccagtatttgagaaaaggtgtgtgggagtttgttgtttggaggttttattggttttctttctgttttagatgttgaatgtctaaaagtgctctttttctactttatcacttaattggtagcttggatatagaattcttagttggaaattattataccttcacaattttgaaggtattgcttcattgtcttccagcttccagtgctgctactgggaaatccaaagccagtttgatttttgtttctttgcataagaccctggaaattataaaatgttctctttgtttataggctcccgaaattttgctgtgatgtgccttgatgtgagcctgttttatccattggactggacacaccatgagtctttaaatcgggaaactcatgtcattccagacctggggaatttcttgaattatattactgatgatgatatctctg

SEQ ID NO: 58162 - DNA, 1557 bp, Bovine  19866880978588
  misc_feature (1)..(1): n is a, c, g, or t
ncctccaattctgcatcccctgaccaaatcacctgtcaaccacacccccgaaactgctgaccctcccttggctgccgggcacgtggggacaccatacttctgaattctccatcctagaggaacgcgcgtttctgtctctctcttttaaagagagaaacccattttctttcaagttggatccaacagtttaagaacaaaaatctattgaacattttttcccccactttggtctcttggtaagatggatttgggttttgattctgtcaaaatgagaaatttgccttgttctgtaagatcagacattggaagggcttctcttttctttccctttctttcatttcttttaagccctcaaaggcaggggctgacaaggaagccgcatctgactcagaactccccagcacacacctcggcacagccagctgagctccatcgcccaggagcccattgccgaagccctgggttttggcggcacatcatacacagcaccaaggctgtgccacacacgtcctcatctgtgatggggcgcctgtcagataagagaatgccccctctcgatgaagcactgccgctccaaaggcctgccttgtctagtgacaggaacccgtggagatcccgcctctacactgccttctgacctgcagcaggtcactgagcctctcagacctgggtctcagctggaaaataagggcttagacagatgggtcttttgtgacatagtggtccttgtcccactgatgccagtgtgctcagagtcccatattaacccaattcggttcactctgtaataaaacataaagtgtttctccccaaatttaagtaacatgaagcttttctttatcctggttttttatgttgttgttgttagatttgtgtgtgtgtgtgtgtgtgtggcagtagctacaaaaatgacactgtgcagtttaaatagagtgaatgtggaaatgaaagagcgtcttagaggcagggacgtgaagatacattttcaaacacagcaaaggtgactgatgggtgagtcgtttgcttactggcatcttcccctttctctactgctgggttctcttttgaggaaccctattttgccctctggagatactctgcagggacaatcagtcaagcttccctgcctactgagatgaggatccaacaagtctcccaggcgaggctggttaactctgcttcccaggaagatggagacaggacccagtgccaagcccaggggccagtggaaagggctcccctcagggcctggttgccgaaagagcgtctccattcttccctgccgtcaagatgctatcttcccgagacccagatgttcagctttgtcttcaacttggtgtcaccctgtgtccttccactgaatcccaactttcaagttagtcagaatcagtctgttgcttgcaaccaagaaccctaaatctaatggacatttgatttctcctctcctcctttcaatgtttcctaaaagcacaaagaaagaagaaaagaaggaagcgacaaaggacggaagggagatatcaatgtttttaaaatgtgtttagccacagagcctttttt

SEQ ID NO: 58163 - DNA, 1749 bp, Bovine  19866881058677
  misc_feature (1)..(1): n is a, c, g, or t
nttggtcccttttattcctcggtggcctggaagtgtgtttcgtctccagttcaggtgagagaatagtaggctgctgttcctaaaatggcagtagttctgtgcaaagctctggaatcaaggttaaatcttggggcgacctgtgtcttacaggcacagaatctagaacattctagcactccagtcctcagcattcctgagggccacgacagagagcatggttttctaagtatcctcagcgaaaagttctttgtgtaagaatattaccgagagggctccccctcagggctcagcggtaaagaatccgcctgccaaagcaggagacgcaggtttgatatctggtctgggaaggtctcacatgcttcagagcatctaagcccacgagccatatctattgagcctatcctctagagcctgggagccccagtggctgaggccgtgtcccaggactactgaaggaagcccctgtgtctaaggcccggctccacagcgagagaagccagcacagtgagacccctgcacatggcaactggagaggaaccccccccctgcccccggtgccactagagaaaagtcaggcagcaacaaggactctgcacagccaaaggtaataaataaataaaattaccaaaatgaaaaaagcatatagctgaggaatcagcacaatatgtattgcttggtttatagatgaatgaagcttgtttactaaatacttgcaatgtggtctgttgcctcaggagcagagcgagaagcaaaacattagttgggaaaagtgactaaaaattggcaaagaactcaccatattttatgactgcctctccagccaggcctcacaattcattcctcttctggtttagaaatgtcttaaccactcaagaaaggagctaatggaaccgagacatccagcgcctcacttggtgaagtgcttgttgaatgaatgagcagatgttgccaccgaaggttcgtcctctcctctcctcccctacgctgtgtctcagccctccctcgtagcactttatatggtaacttcttctccaccagcactcagcctgagcatactgtcttacacaggaaagtcgcttagtgtgtctgcctccttgcgaccccatggactatacagtcattgggaattctccaggccagaatactggaatgggttcccttctgcaggggatcttcccatcccagggatcgaacccaggtctcccacaatgcaggtggattccttaccagctgagccaccagggaagcccacacttaagtcttacacataatcccacacttatgtcttacacatagtaggcatttcatgagtacactgaaataactggattgaattggatccacagcagaatgaataccaggcagttgagtgctacccacactgaaattcctcatgaagatcaaagcagacttgttgccatgttcaattatcgctcaacccttggcaaggatctgaagacaaacagaaacatcttgatctatttgtgcaaaaagtcagcttgcagcatctgtagcaagtatgaattctcattttaaaaattgatgtccctggcctggagaaaatagattaattttttttttttaacaccaaagacaaagccttcattatcgcaaaaggagcttgttacccatgttgtttaagaaaaatataattgaaaatacagctttatcctggatatattggactgatttgacactagacattttttaaaaggtataagggattttcaccttcattattagaagtac

SEQ ID NO: 58164 - DNA, 1156 bp, Bovine  19866881087788
  misc_feature (1)..(1): n is a, c, g, or t
nctgcgtcattttcttcttctcgtgattgtgtaaggcattttgaactggaaaaacttctttccttcacattcttccaaatgatcagttggaatataaccagtgattcggaatacaaataagacccctttcatctcaacccccccacccccaaaatcattctacgcacccagagcccaaaaagtacaagacaggcaattgattttgtgaattcagaggcaaatcgtgttcacacagggcacgaggctgctgtggtcaaggacccttcttagggctccagccctgatctcccaggccacaaggggtgagcatccaacttcagcgaggttttaagtcccatccaggcacctgccactgcctcctgggcagtgggaggtcacgggccctcttcactctctcctatgggtcccccaccaggcgtccgggccagtccgtccacgcacaagcgtcacgactcaattagtacaaggaggcgtggcctggagacagtggcctccacgttagtcatgccagacagacagcagagaggaaaccagaggccagagaagtgattttaaataggaaaaaaaggaaagcagcttcggtcaccgaaaaatagaagggatgatcttttcaaaaataaaaaccatggggactttttttttttttctctgcaatgttcagccatttaacttgaggcattaaaaaaaaaagtttcagagtagttgtgttgcttttttcggtttagacattcatgagaacggatcggacggtagtgctgggatgtggtttgtgtctgagtggcaatgctgctcagggtccttcagaccacatactggtacgggtctgccttcccttggtctggcgtggcaaaggggctggcccagcctagagagaaggggtggccaaaaacggctttcatgttcatccattttgtttttttagcccatcttctctcttcctttttcaattgttctattccctgaaaacaagaacaatcatactttcagtcaagcactttactgctgtggtttttgggggaaaaaaatccattagcttgaggtgaattgagtaaatgcttcctttttaaagccatgaagcttatctacatagtacattttttttttcttctctttctctcataaaaagtgctaaagacaaaaaggaatcatcattttt

SEQ ID NO: 58165 - DNA, 1024 bp, Bovine  19866881118885
  misc_feature (1)..(1): n is a, c, g, or t
ncatatttggaaagttaggtggaacagatgctgctctaatttggtagagattacatacactgtggatgtaggaattgtgcatgcaacctctgggacttctaattctctctgccattttctatcaagctgctccccggaaactttgatggcctgtgacactctaacacaattagctgaggagtacttgtctttataactgtttaccttcccatgtatagaatctattggagagacaacaggtaaactagagaccaatgcctggagtcctcccaaggtgagagagatcagctttgattccatgggggtgaggggagagaggagcagagagcagtgagacttcagtctggctacttaaatgaatttactgtaatatttatctctagatgtgatgacttaaatattaactgcttggtttatcttataatggattagcatacaagccaaaaaaaagttttcacttaaaactttcctagcactttaaaaatcctgcatagtaatgatttgtaaattgatattggagtggcacaattaagagagtcttcttccgtgggccttgtcccctaacagaaggacatgctctgtgaggacctggctcatgccactgagcagctgaacatgctcaccgaggcctcgaaaaagcactcagggcttctgcagtcggcccaggaggagctgaccaagaaggatgccctcatccaggaacttcagcatgaggtgagatgcagggggaccattactcaggatgggcatgggggtgggggaagcagggctgcattgtggttgagctatgaggtccccaccttgggtaattctcctcattcagaaaagcaggctagcagggtgtgtagctgggctcttaacaggttgcttctttgtgttcagacttgcatggctgtccttctacccaccctggacccttgacacatgccagcaagttctgactactatggcaaaaggttatggctgacttccatcctcattttggctattgtggttttatattttgtaattttcctcagatgac

SEQ ID NO: 58166 - DNA, 791 bp, Bovine  19866881125434
  misc_feature (1)..(1): n is a, c, g, or t
naccttcgggtaagataaaaacccccaaccctccacactgaggatggtgtgtcttattttcaaagactccccagaaggagtttcactggtaaccgagaagacaccagacagcctggactgaccttgatctcaccggccaaagattcatctccctcccactcatggctctgagaacaaaactatggagtaaaccttgaattaaactctcggtcaaattaaaaatgaactaaaaactttgtaatggtgactgtgaatttcaaaatcagccatatagaattcatccattgtgactgatttaaacctcatttactgcctgagaagatcatgcaccggccccccaggagggttctgctcccccatgcaagagaatgctccaaagattcatctctctctccatattccttcctctgtgtcctctgaaccacattctgaattgtcaaagcagaatcataagcatgtctgcataaggatttttatgttaccacctcaagaatccaggacttgagactatggttagttctcatttatgccctgcctgcttccaaaaaaggctcgagacctgattatttgttccgctgcgtaccaaccatcacctcctattgtcagagagtgatgtcagagacttatttctaactcctggaattgtctacactagcctaatggtaaagtcaggattaggattcctcattttgcgagaggaatagcccactcaggtacccctttctcttcaaattgacaattaagtcgatcacaaaagcaaaagagttctccaacgagaacagctaaggggg

SEQ ID NO: 58167 - DNA, 979 bp, Bovine  19866881185798
  misc_feature (1)..(1): n is a, c, g, or t
nccactgcccaggcttcttcagcctcactgtcccccctcctctcggccccattcttccatgcctcttccttcaaccatctgttcaattccatcctggctgagtttctgcctgtggcctcctttaccttcccagttctcctccttttttgcagagctgagggaacaggtgttaatattagagtaattaattaatcatgaacctaacatttgtctaagaactcatttgtatgtaattatgtttcttcatctcaggactaactttagcctgaaaatgagcatttaatgaaaactgaaaatgacaaatgctagacactccgcttttacagagcatgcgttttattctcaaaggtcttgtttttcaaatctagggctacagctgaattttcgtcatttgaaaggttcatgttctacgtgctctcgaagccaatttagagaaggagcgttaaggaaaaggaaatcatggtctttgcagttttgaagacagctcacactgtctttctgaactgaaatcaggctgaccagtaggctcctcttttgctattctcctggccattattttttgagcactgtcaattttatggtaacctgaaagctgtctcctgctacaaagggcacaagtttctgtaaactatccataatgggacaagaagcaacaatttgcctaattgcttggtaactgttctttgccagctgacaagaatttcatcaaggcagtcagacaatagggacagcttttctatctagacagctgggaatggaaaaccctccattcaactacagatgagatgaatgggtgtgagttgtaatttgttatcagtctacttgggcagaagccagtatttcaactattcataccaaaccagctctccaccattgtttcatttttcctgggaggaaaagaacattcattttatctgcaatacacttgaaaatttcaggatcacaggggcagtgtcctctgaaagatattttttgagaa

SEQ ID NO: 58168 - DNA, 959 bp, Bovine  19866881202632
  misc_feature (1)..(1): n is a, c, g, or t
ntttggggggcgcagggggctcttgaaggagctgtcctggttactgaacagtacttggccctctctttatatcttttaaatggtatccttcccctcacccctaatacgggcaggcaataataatagataagtaagccacccttggcttattcacctcaagtttttaggtcttcaatcatttgtcctatattttgctctctctgtctatggattcaaggatctgggggactgtagaaagaggggagaaaaatcactccatgcatgccttttccacccctcctctacacgttacatgtttacaatttgcagtgggtatattactttttaattgtaaaatcacaacccatagaagttagcctctcctccactcctcctttttatgtaacttttagatatgtctttggatcagtcagggtcccagcagaagaaaagagggcctgcctgacagcagtcactgaagaaaacgtgatgaaaaggcggattctgtgcagagttcggggaagcccacaccccaccacaaggggtggtccggcacctgtggcactaggagcagaaggaagcctttgcccacctcgggtggcaggggcgacatcggggagccattcctggaactgggagagtggcagctggagcagtaggcgaggccggcccgtgagccacacgggaaggagctggttgaaccagctggttgaacccagtcagagggcaagggtccaggttaatgtgggcccaggggacaacttccatcacagaatgtggtggaaagaggatgggagggccaaatcgacaatatccagcacgtcttattagaatcgttgattaatattttacaacacaacatatatgttccactgcccaaacacgtctctgtactcgttgccctctctgtactaagtagtgcgtaatgtcataaaggagtgagtgctttggtggtcccttggtggtcccagtgctggggg

SEQ ID NO: 58169 - DNA, 938 bp, Bovine  19866881258648
  misc_feature (1)..(1): n is a, c, g, or t
nctcaattaatcttgacgctttattatgtcctccaattcatcagaggaaaccttaggcttctcaaagctgccttaatcttaactgagactgggtgtctcctttgtcctacattctgactgtcctgagtggggaagggaagcgccaccccagcgggcactgggccttacctgcatccctctcatcttctggaagcgtgcaatggtgtcgctgatggtgtacacacgcacgtggcccatatgcagcttgccggagggataagggaacatggaaagcacgtaaaacttgggctttgatttctaggaaagggtgacggaaaaatgcagtgagtatttattcatcattcacagggaactaggtacacatataatattttggcattttattcaaggtaataatttaacattttcaaaagctttcttttaaaaaaaagaaaagaaacattcccataaggtaaatggacaaaaatgccaaatgccaaaattcaaagcactgggttatcctaaagaatgtccaaaataatgccaaacaacctcacagtgctaattacccctacttatttttaaatctgcctttttctcttttagaacagctatctaggacttaaagaactgtatgtttttccaaacgaagctctgacatatgtgtccataaaattcatggagacaacggtgaatcacagagatgtgacaagtctaaaatggagccgctccctaaattccgggagctgcacgcagacttggactgagagggtccccaggcgcggattcaggttccaggtttctctgctgtactgcgagcttatctttcaacagaaaaagctgaaatgggagggtaatgagaaaatcttagccaggttgctgtttcccagggggtgatctacaggcagcctcaggccagggttacataatgctccagcatccaaagacacacagtttca

SEQ ID NO: 58170 - DNA, 1219 bp, Bovine  19866881460221
  misc_feature (1)..(1): n is a, c, g, or t
ncttccctgggactagaggaacgagatctgcgtggccggggccctgccattcagagtgctttccctttcctaatttaaacacactcgtcccacgtactgagacaattaagccacaggaggtctttatcaaataatgcactctcttgcttttcccatacacagtaatgagcgggaacggaggatttaataccagggtaggcgacactcaacagccacttgcacagcttggtatatttagctaagtccttgggcagaaaaccgtggctttgcccatgatatgcactgagagatgcctgtcatggcctgaaacaggcctgtccagcttttcaggaaaagataagcctcgtccaagcaaggtaaaggccactgccgtgcaggtttctgggcctgggtagggctttaatttttaatttcatctccacctagcgccagtcctgtcttcactaggaggccccaaccccacccaagcggcagcgtgctttctgcttggatcatccggccccagcctcctggggccctcaccgtgcctttctaaccagaggctgggcttgccctggccaggcccctcccacggcaggctccattcatgcagacacgcacgtatataaagtatcgttcaaccaacccagacaggccgcggcacagacggggtccccttggaggggcccgagtttcccacccctgtgggaaagagaacaggccctcctatctctgcgttcccaaggtcagggggcacatgcaggctgcggccatgcccgggccagaggaggagagtgcgggctggtgaaaacgagcccagacatactcacggggtccgtcagcatggcccggcagtgggaagccagggccaggaaggccagcaggttgaacacaagcccgttgatgacgctgtacacgtagtcccgggacggaatcagcatgacgaagaggaccacgaactccgcgtagaggaccaggaaccaggtgacgatggcacaggcgatgccacagccggtcgcggatgaaccacatggttcccgcgggacgggggtgggggaggcgggatgcacttctccggctggaggtactccggcttccgctcaatgtcttcggaagtggtgggcggggataagcatcataaactattctgtccatactggcatctggaagagagagggaaggatccagaaatggcgggcgtggtctagtcgtctgggagacttgatgaagctacctttcc

SEQ ID NO: 58171 - DNA, 1742 bp, Bovine  19866881477263
  misc_feature (1)..(1): n is a, c, g, or t
ncccaagacgcatgctgaggctgtttgggtttgagtaggaggacagaaggcctggggttaagctgctctaacttactgcagtgcattagccaatagtaaaggcatgacactcagcagcatggggaatgttctagaaacaagccaagcttgttttagccctctggccaaaatggttaattttccagggagaagagactctgagttaggctctacctgtggtgacgaagcaaagtgtaggaatgttggccagcaagcccagaagtgtgtccccaccacctggctgtggggctgggtaagttcatggtctccggacctaggacaagacccacaaccccagccccaggcccctcctcaggacagggtaggtgtgaaggtcgagggagctggaggtgcctgttacacacgctacggaccgtaagaccctgcacacatcacagacggtgtgcacgtcctctctctaggaaagacgtccattcctccagaagcacgtgctgagcaaggtgcccgctctctcaaggctccagccgagtctctggagacagccgtgaaatcgctaagactcgataacggaagtctatctgtccacggcgtgtgctgcaagacagcaagtccagactcccctcctccggctctttatcttacactctgtggcctgtcgcttcacccaccaggtttctcagaaaccatggtggcctccagttctctgccagacgtaggagccgagggaaaaccaccccggaacacagtctctgaggcaggcaggcgacacctcagtctgtagagaacttgagtcccctcaccgcagaggaaatccctcaacagcggcaatccctcaacagacaatccctctgtctgctttcctgaaggacaagagtgagctcgcaaaggcttctccttgccctttgcccaattttcctccttcctcgactgccctcacccccagcgaagaaagaggacctgaactgaatacagtacagtcatgaaaagtaaggacgtgtccagaaagctgagaggggagaacagtaactatgactcaagggacagacatcccagagtcaaaagttgcacagactaacaggaaagaataaggccagggcctcccctcccaggctggcagagaatcaatggctgaaaggcaggtaatgtggattgcgtgcatttccaaaggaacactgaaaaaaaaaattttaaaaaggaacaccgactcaacaaatattcagagtgactatcatattcaaccagttttccaataacgcagccttgtgctcttcacaagatagtggcgatcggtgttgccagggacgacttcgcagcattagaagatgcaggggtaccgtctgcagcaccgaagagaagggctgctggagattgagaaccggggccatcagagggagctgacccacggcagggagattctaaacttccagattctgcacaacccaaacccaacaaatgaaaagctgaaatttcattatgattcaagagctgatcaaggctcaccattttgacaatgtccaaatgcaagggttctcccggtttttcctgttgccatactgatttgtatgcatatcacccaggcccccacaattgctgtctaagctctaaaccagtaggattttattggaccaccgccacactttgattacacgtattatagggtctatgtctgttctgcattataatagcaaggctgagcagctgtgaggaaagactcatagcttcaagtatttagtcggctcttt

SEQ ID NO: 58172 - DNA, 1408 bp, Bovine  19866881564735
  misc_feature (1)..(1): n is a, c, g, or t
nttggctccatactggccatacttgatacctttgtccatatgaggttttgcgttgtgtattttttaatgcaggagaaatggtggaatgtttaagatgttcattaaaagaatttttgacccctgaagttcttgtgttgcaggaacaaatgagtgcccttcaagtcaagttggatgaagaagagcataaaaatgtaaagcttcagcagcagattgacaaactggaacatcattctactcagatgcaggaggtgagattgcaagcatgacctcagaaaatgtctgaacctcaaagtaaggaaggaaggaagagactttagaaagcttgggtcaaggtctatttgagttgtattctcttattatttcagccactcctctgataaggagacacacacccctagtctgaatttaaaactgcatttgaaaaacagaaacaaagtgattggtgtgtgttttagcttgttagtattcctcttccagtaaattgatctctttcccaaagcttttctcatcagaaagaaatgattggaccaaacagcagctggagcatctctctcagttgaacgtccttgaaaagcagcttcaagacacacagaccaagaatgactgtgagtctgaacactgggagcttcctgatctgaacgctgtaactcagtaactttttactgatacggcttagtgttgtgtctgtgtttttagttggttggtcctgtttcttttaaattagactagatgagtaatagtaatataaagggtcattttctccaagactgctctcaaaaaaatgatacaaatatttgcttgaagtttgaagaccactttgaaaatgcagtgtcttaaatgcatgtgatgaatgttttaagagttttagtagtgacaaaaaaagcataaattatatatttgtatatatttgtagatgtgggagtgtcatttaattcccagtttttccagtttatgtctccttttatcaaagtatttacagtagtttactaagacaaaaaagagagccattctcttttgtttgatctgttaaaaagttgcccagttttaattccagtttgagtttttttaagaagaccagagtgtttaatctatgttcgaaagttctggtacatctccaaagggttttcaaaaagtaaagattaggtcacctaaagtatgttaaaatctcttgcattttttcttatattaagaattttgatgcacattctacaggagaaatgtagaaaaatcaaatgacctacacgtgagggtcagatattaactttttttgggggtaggaatatatcagaattcaggcttccttggtggctcagtgctaaagagtccacctgccaatgcaggcgatgcaggttcgatccctgggtcaggaagatgctcggagaaggaaatggcaacccactccagtatt

SEQ ID NO: 58173 - DNA, 1189 bp, Bovine  19866882029137
  misc_feature (1)..(1): n is a, c, g, or t
ngcttttattttaaaaaggaaaaggttttccatatttacaggtgactttaaaagctttgaaatggcagcctctaactgcagactgccagttgccacaggtatgtacagatgcggtgttcagaaacttgagggtcagccaccacccccaccccctgcccccaggtacaccattaatagtcatggctcttaattcagctctactaagtaggcatgggtagctcttacttttataaaaggggaaaaaaagtctcccaacaaggtaggcagttgatcaggatctttatggctcattctttttcctttcttttaaaaataaattttcagcacgcaacttttctgactcctggtaagaaaaagaaaagaaaaaaaatttaggctctaattcttataggaagaagtattctcagaatgcattaagtttaaatttccactgataaactcttaacggtaaacaagaatctcattggtacgataaccgaattacgcttggactagcagtggccaactttttttccaagcagttgagtgattcaataattaaattttaattaaataatcatttaaaaatcagcatgagcctatttagaacaatcaggagtttacctcagtaagtctgacattttccttcttcaaccgcactacgtactggatcttctgatggaggttttggtgacccaccaactttccattctcctcggccagacactccacctgtttccttaacatttccatctcctgtagggaaatcaatacagggaaggtaaaaatgagctgctttgaatttttcatttaaaataacattattgcatgccttccaggaggagagggagggagaaacagagcccaggctcccagctttcgtgaccacacatctctacgtgctctgagcaactctcaactacagggtgcccaatcgcagccagcacccttatgctgatcggctctgttcataaaaccaacacacaaatgcacctggcatgttctctctttttcttctttcagctcttcgaactttgatctcagttgttccttttcttggaatgctttaaactccaacattctgactcgtttgacttcctcagtcatcgtcaggtagtcggtctctttgttctgaagggtgatctggagctgctccaggctgtaatggtaactattgagttataatattccaaagggacacaagtataag

SEQ ID NO: 58174 - DNA, 1649 bp, Bovine  19866880404345
  misc_feature (1)..(1): n is a, c, g, or t
ncttttctgtgttttctgtgatttgatttagctctgtaagcctaagttccatgaggtgagaaataaatcagatgtcagtctctgttaaacgtgtacttaccgtgggggaacaggaacagcggagacattgttcgggccctcccactgctgtcccatcgggcaagatggcgcatggaacaccagtgcaggacagacgctccgagcctggctgccgagagcagagtctctgctctctgttcacaggctgctaggcagggctgccacctgaacaggtgcacgaaaagtggatagaatttggaggaagaccaagtgatgacatgaagattcagatgttgatgggcttctgaaataatcactacttattaatttctgtgtgtgaaagcgccctggatactggatggtataaagagtttgtattcacagagtttcgtttacttcagttgagagtgaagagagtactggtggggaatcgggtcttccttgaggctcctgggtgccatgagcctgcctgcctcggggacttgccaagaacgcctgcctcctggagggtcctcctccctgaagacctcaggtcaaacactgcttgttcaggagcgcctcctatgacatctctggggaggctatagctcagtgcctcatcagcatccttaatcctggtcctgccctttctagcagcagtcacaactgtctttttatttttttattgaggtataattgacgcacgacattatattagtttcaggtgtatggcgtagtgacccagtatttgtacacactgtgcaatgcttacagtaaatctagttaaccgtccgtcagcatgcgtagttacataatttgttttctctcagaactttccagatcttagcaactctcaaatatgcagacagaattgttaactgtagttgccatgctgtacatcacaccccagggctcatttatctcatagctgaaagtttgtatcttttgacctttacctgttttccccagccccacaccttgactgtcatttgtgtgactgcatagtgatctgtgaactcctgaggactaggagctccatgagagcaggtgttgggccctgagtctctggtcctgggatccagtacctagagcagggtctgccttcctctccgccgagggcctgagccctcctgtcacactcttggcagagcccccttccgcttctggcttccggagcctcccaggtgtccactcttccctcactggcacatgttgttcccctgggtgggggtacctttggctcctgtcttccatctgggatatgatactcattctccagacccaccccagtttctccctccaccaggactcctccagtgggctcagtggtccctctcctgtcagctgcaccaggtggatttccccactggggtcttaccatgctgtcctgcagcgctcacttcacacatctatctcgcttgctggaccaagtccctggaggacgcggagcatgccactcatgtcattgtctctgttttgtctccatccttaaatacagtgtctgtcacaataaatattttgaatgaataaaaatttctcttattagttatccatgtcccagaaatttactaaaaaaaattcccaggaatgtcagctcctgttctgactaggtgctgggccctcagacacct

SEQ ID NO: 58175 - DNA, 645 bp, Bovine  19866880449811
  misc_feature (1)..(1): n is a, c, g, or t
ncactgaaccattggggagttcaccccatgagcttcttacagacaccagaaaatgtttcaactttgtgttccacattgttctgctgtgttttatccaaatgaacttttatgagccagctgccattcagtttcttacagattctcttgcctgtaatctcacttggggaaaccaaatcttccaggattacatcatgcacggttgtcagactgcagctcctgggatgcttttgcttatttttttgtatggttttttgagttggcttaggcagaattcttctctgagcaacagacgacgtgtttcctgctgaacttctccaagtcacgcagtagtcagacctggaatttttggaaatatttcatttgaggaataaaaacaaagattaaaagagctttttgaccaacactaacttcagtggccttggcagctgtgatgttcagctcccgcagctgagttttcaggtctgagttcatctacaactctaggagggtgtagaagatttcagaccagaacttgtccagcttctcaccattgggcttcatgatctttgccctggaaatgaacatggctttgatcttgccaatgggctgatacagttttcccccaacactggaggcctaggcctcaggagagctgttaatccagga

SEQ ID NO: 58176 - DNA, 1434 bp, Bovine  19866881011249
  misc_feature (1)..(1): n is a, c, g, or t
natgaatattataattttagtcctatttttgttcaataagtaagctgttaagattttcagcaaagataaatggaattttccatccatatcttttgaacaaacatgggagctcgctgtggaggtttgtgggctcttggtttctagggcccagcatggcacttgacaggggacacagggctggccccagagctcctcggtggtgaggagggagtctcaatgaccccctttgggcagcaacgtgtacatcaggatgaaagcacttgtaaacctgaacacgacaaaattctgatttctcttcatcatttctcctaagctttaaacaataacagctgtcaagtcatttcagaaattcctgttctgatgtttaggtgccgcttgcctctctcttgttcggagagccagggtccacgaccgtggtggggggagagtggtccagcccggcaagaggggatgttctcgtgggccaggattaccgggcgagagtccgcctgctgggtgtctctgcaggcgggcaggcgtggtaagccggcagcagatgcagaaccatgttggttcctggcgcacactgcgtttctcattttgtacagcgttttccacctaaggatattgataggtgtcagggaatgacgccaatatttacgaagtgcacatgttacggtatctatgtacagaagtgaccctggatgttgagaagtcttcagatgaggattacacacatttggaagaacagtgtctctcttcaccacgtaatagtagatgatttgttccgcttcttcctttgcacaagcagaggtttttcaagatttagttagttaaaatgttcatgcctttcactccttcagcataggttttattttttttttttgcataaaattatgaagttataatgtcctaattgtgaaaaggaaacaacagcttgaaacatagaaccatctcactgtaaatgactaaagtggtggagaatctggaaaaaacctattcaatttccaccttaaaaattattgtttagctttatgtagcacagctacacaacacaaatatgaatcttctaagggccaaatcatgttttctgagactagctacagtgcaagtttctcataaaattattatgaggagtgaccttaagtgaatgccttgctagttaagttggcaaaaatcttatttcataacacgaaagttggtaagacctccactgtaaatggccaggtcagtgcttctaaacttctaaatctaagataatttgaggctgatgggaaggtgtccttcagaatactgcaggcagtttagaatatatctgagcgctttcactcacagcagaacgtctcagcacacctacggactcacaagcagcctggtcaggttagcgtctcagagggctggtacttaagcttgccttggactagtttttcacatgttattaaaaaataggtttca

SEQ ID NO: 58177 - DNA, 1495 bp, Bovine  19866881109389
  misc_feature (1)..(1): n is a, c, g, or t
ntcatatccccctcgatccaagtaagagttttatcatggatacactttttttttaattaagtaaatgaaagcatcatttctttgcttcaatttacttctaccatgaattaatataagcatgtcttgtttgggttgcctaactattggactttacttgaaataaccaaaatgaatatactttcagatttgtgtctcgttttacttctgtgtgtggctttttaaaaagatccacaacaaaggggaaaatgctgtgtgctgcagtgccaaaggctgaacgctgtctgctagggacagagcgccagttctttttaattttccttactcaccccttctatggaaacagaaagaaacacgaatcgtcgtctgtgaggcaaaggtggggaccgcccagggcagagcacacagcacctagtgatctgctctatgggcagcaaagagaggaagaaatccaaaaccatccctgctgctgctgctgctaagtcgcttcagtccctgaggagccctcaatgattcctacttcatctcactctttagaggcttaaagcatgtgtaagtggctgattgttttaagaacaaagcaaaacctggctgggattggtcctccgagggctccagccacagtcctctgacctccacctcccgctccacttggcctgtttctggagaagggtgatctgttttcatttctgaactgtctgtcaagaaagtagcctccatgaatattcagtcccaaagcaggggctcctaaagaaataaagcgagtaagtgctggctggctctgggctcaagtacgggatggtgagaagaggtaccctctggacagaacctgtgtggtgtgggcagggactcagccgacctcagggtggatccttcattaagtctgattcaatgggacccccggggccaggttccaggcttgcagccataagggcaggatgagctgactaaagcttggtagtgacatcaactgcaaaaaggcaactggggagtttcacatttcatgctgttgcagactgcttggctgggatttctaaaaatctaattttgcttgtatgaatgtttgtgatggtggcagcggatgatttttttcatttgctaaatagctaaattagtggacctcattgtaaaaggactggtttaggatggggtgacgagcacaattattcataggtatggggtggggagcggaagagacacaaagtgacaaagtccatctaggtaagcacgtttccgatagacagccgttcactgggtaccaacctgcttgccatgctggagaccttggggttttgatctctggtttggaaagatcccctggagaaggaaacagttcaagtattcttgcctggtgggctatagtccatggtatcgcaaaaagctggacacaactgagtgactaacactttcactgtatgggtcaacagacactgaagtaaatgctacaaattgaaaagataaataaggcaaagttcctattcttagttagactccaata

SEQ ID NO: 58178 - DNA, 778 bp, Bovine  19866881380390
  misc_feature (1)..(1): n is a, c, g, or t
naagtcactcttctcctctgaatccaccaaggtccccttcttccatctcctgcatcatttcctgggatctgctttcctcagtgagccatttggctgttcttcccctacactgaactgaagggtcaggaaaattaaaggaaaacatgaagaaaaaatgcaacctgaagaggcaataacctttgatttataacatgtatctcttctgcattgatgctttcaaaggtcttcctcttactgaggtgataagccccagggatccaagcagttctgtgttctaaactcagagcagctccaagcatgctgtcagcacctaattattaatgcatgaaaacaataaaaacaataccagcacaacaggcagattctgccatctgctactgctctgggctaagagggatgtgcgttcaaggctagctgttttgtttttttttttttggcgggggggcttcactttttcctgtaccatgtgcttcccatttgagggcacaggggcctgagaacatttttagaatttgcttctctaccaacatggcatgaatttccatattatcatcttatggctctaatattctaatttctatgtcacgttacaaattctgctggaatatttcttagctttccccatatcctttttacccagtggaaatcagagctgccaaaaagcttccagatggacatgaactgggccatgtagagctttccctgtctcccagtggagggtccctcccctggtagaaaccgggagatgggccctacctccccagcagcaggaatgcgg

SEQ ID NO: 58179 - DNA, 1879 bp, Bovine  19866881460258
  misc_feature (1)..(1): n is a, c, g, or t
ncggccacgggcgccgcgtggctggcggtgcaacctgcctgctgttaaggtgagggcggagcagcacctgtcatttgcacgtgtggggtgtgcttctgtgtgtacgtgtgtgcatacatgtatgtgtgcacacgtgtgcacatatgtgtgtgtgtgctcagtgcaggaagcagggctggatgaagtgtgctctccttctcacctgagatctgtggggaatgtccctccgggccttgggcggtcagctctccctcccggggcccgaatcctatgagcagatgggcatggccaccccaggacccagccttggccgttacgtgtcgagcgcacttggacctgctcatctctgtaatgaaaaaaacatgtggcttctcatgggtaataacttctgacttcctggatggctcttttgttttgtttactttagcataaagtattccaccctttaaaaatattaccctctcttttatctgttttatagtattaaaatacacaagcatgtttatattttaaaatgggaaatgtcaaaaacatttttacagcatctttcttttaatctttgtttaaagtgtggggtgggtggtggaatagcttctaggttatgttcaattttttccatttctggaagagcttgattgagaattccaaaccttttgtactggacagatgttcaggataaaaataaaaggcctatcacgtccctcggatcctagtagtttgcggtgtatgttaatacaaggttagaatcactagggttgaaatttttgctactgctgctgctgctaagtcgcttcagtcatgtccgactctgtgcaaccccatagatggcagcccaccaggctccccatccctgggattctccaggcaagaacattggagtgggttgccatttccttctccaatgcatgaaagtgaaaagtgaaagtgaagtctctcaatcgtgcccgactcttatcgactccatggactgcagcctaccaggctcctccgtccatgggattttccaggcaagagtactggagtgggttgccattgccttctccagaaaattttttttttttttgctaatgatatttaaattttttaacagcattcaactctttgaaggacgctgtgttgtaatacacatttcattttttattcctgctatttggaaagtaacttgtgatgccattacgggacctggggagattatgggtggtcacggtgatggctgccgcaggcttgtaggaccctctctggagtgcttgagtgagtgggtgaaacccccgttttctgtgaaatagtgaagtggctacctgtcctgcagtctggggacaaggactaggagcgccctttgctgttgtacctccaggctgatgtgagcagcgctcacgggaaatttctcaatggtgacagtataaatggacaaattctgaaaaaagtttttaaaattctacctttaaatcaagagcttgtttcttttcatttgcagataatgaatcaagcaaatacagtttgcccagatattgtgatgtttcagaatttttttttttggtgggcaaggtatttacgatcattgttctctcttcatgctaagttttattttctcattaaatcaggtgaaaacctgtgatactgtgctattaagccagagtgactaggaggaaatgataggatgttattaatttattagaattccatgtatcgagtcatttaatcagctagaattacagagatactcctaaaaaacagtcaagtctgctgttaaagttgcctcattaatgttttttgccaaggatttgtacattcctaaaaatacggaagaaaacccagaaattgaaattgtcatgaactgaggctcccttagacgagctcccatccagggcagagaacaaac

SEQ ID NO: 58180 - DNA, 1056 bp, Bovine  19866882055824
  misc_feature (1)..(1): n is a, c, g, or t
ncaaggaatgctttacacacagcgcacaatcacggaacacgctgtagtctcttaaaatatgggtaaaagctgctgtaagcatcgaagtctctgttctcccgagagcaggagatattgggttactgcctgctagtttgataggtatcatttaaacacttactttaaataaaaatacacataaaacagagcccgttctggatcacctttgatctctaagtgataccaaaaggcctacgttttactgggaactcacctagcctcttgcaaattgcttggctgttcatgtatttttaaaaaagataaacattctgttcctcccttgagatcaaaaaaaattctgtaaaggtgtttcaatgtcagttctcttttttaaaaaaagttgtttttttttctggcttgctgaaatctaccatacctgtggaatttccctccagcctgcttcagctaaatacataatcaacactgaggcccatgggacgctattggtgaacccatgagtcagggttctgcaggtacttcatcagggtgaagtctttgttggtttacattagatcatgtacttgaccagagtcactatatggaagggttgcctgaatctgtatttctaatttttctttgctgagaacgcccatgaaaattcatatttttgaagatggaaagaacagtaattttcaggtctggattgcattctggatatgttcctgagggagtaggcatttctctacccatcattgttggggagaattaggctgactgtggcttgttaaaatttttaatattacatacataattaaaattatatgaatctaaaatttacatatacatcattgaagttacatgtataatactaaaagcattttatattcatatttatatatgcataagtctgaaagaggtgatcttttgttaacacattattgactggagacacattaacgacactggcattagtttctgcaaaaatcccctggagagtgatgtgttaaaactatcttgatcggtcattttgggagacaagtcaagctccagcaccatctatagaaagagggcatagag

SEQ ID NO: 58181 - DNA, 973 bp, Bovine  19866881245290
  misc_feature (1)..(1): n is a, c, g, or t
ngaaaaagacctatatgagtcagtgagttaatatacagaatccttactgagcatgatgtctgttttattttttttttaatttataatgtgaatggaatatataatttatttaaaaaatagctttaatttgtgtcattggatgagaaagctgatattcttgataatgcacaagtccttgaccacaggtggacactctataactcatattatgtatattacagtcatttttgaaccatcttcaaagttttcccacacaaaattttcagtaagtgctgcttgattttattaaatgcagacagtgtcttgaacgtttctactgattgcctgctccaattcatcatttcctaacaagtgataagacaaaggctgctagatgatgttaaatgacttctgaattacttagggcaggactcagccccaccttacatccttctgtttctatggtcccaagttaaatacttttctaatcaaagtatacagaaccatcttttatttattgtcatttgactacaaatgtcactgtgtacatctctaagctctctctcatgatggaagaaaagctgaacataaattattagaaaatacctcctgctcagtacttaaaacagaggaaaaacacagctgtaccattcaaagcaaaataatctatttgtttaagctcagcatgtcacttatattaccaactgtgaaaggcattagtcactgagggtttgaaataaaatattgcatgacaaatacctgttttctctttgggaatttccatctaaagactgtcaagcacaagagtgtgactgatgagaccactgtaggcctgtctctagttcaacacttgctgtttgcagcatggtaatagcagttgttaccagtgaaaataataactcatcaacacagtacagtggatggcccaaaaggtggcctgctgagcactcagttgtagctgacagctgtcctgatgtaaagaatgatggaaaag

SEQ ID NO: 58182 - DNA, 1219 bp, Bovine  19866881461894
  misc_feature (1)..(1): n is a, c, g, or t
naagaggtgagaaagtgttcatcctttcattcacaaatgattgcagagctggtgccagatattacaagtgaagccagctgaaataaatagtgactaagacacatttcttccttaatgaactaagcatctactggatgacacatagcagtaaaaaggccattatcattcagttgagcatgttttactataagtttaagtaaagtatgtatacaaaagagaccgcaactgtcaggaaacttttctaattcagaagagtcattaccataactggaaaaagaacattaaatgcgtattacaataaaagatagtcatgttctcatccaccactgtataactcacatatttgatccctacatttgtcattgcttatccaagattagaaaactgtgtaccaatagagtggaaaataaatccaggactcctaagctgcctctgtgaattcctcctttttgaactagtgaatattagtggaactggaaaaaaattactaaaatgtcttattttcttttgtcgcctatttatatagatagatgtacagaaacttcttgaaatttccaagaacactatccaataaatatctaaaggtggatatggaaaaattaatcaaatggatgtctttcaatagaaaaattatttctctgggtttgttataaagtatcctgatgatcctggaacttgcaacaattttaatagacactctgtatggagaccttgttgataaaccattctacctttggtaggagtatggagaaatgtagtcctataactaggcaaatactatgatattttatggtgttataagatttattataacctgaaatgatagattggttgtcctctaaaaattgtttccctagagatttagtggcaaaacttccctcctaatatgtgctactgtaagagagtgaccctttattgtgacaagcagatctatcagagttacctgcaggcccagacactcagactagtaatgacctgaaaaataaattggccattccagaactttctactcagctggaagagaggtggtgacaccacatctcactctagactctagctgctgctcaaagtaagagattccaatcactagggcttattgagctatgtcagcataatgtctttagttcccaactgattacaggtcaagtgaaagctcaacttaagggggtggaaaattaccactctcttattatagggaaaggataacttagcagaacat

SEQ ID NO: 58183 - DNA, 1164 bp, Bovine  19866880369565
  misc_feature (1)..(1): n is a, c, g, or t
naaggaaatgcaaccaacctcccaggattcttgcctagagaatcccatggacagagcctggcaggctacagtccaaaaggtcacaaaaagttggacccaacttagtgaccaaacagcaatgaacatttatatgctttctttttatctactataaatgatagtggatatttttgataataagtctatgacgaaacatctgatgactttcttaagacacattcctagaagtaaaatccatacatggaagaatgtggtcatttataagtcttttgacatatactgataaatggctaatttttttttttaacaagtgtgtacaatagtagaggatctgatgctctctaaatatcttcattaatattgaatattttaatttaaaaaataatagctaatttgataggtgaaagtgttaatgattgatgtgattaggacttgattgattggtagagaagttaattattttctatattcattgaccatttttttcctgtgaattatcttctcatgccttttgtctacatggtttggacaattttgtttttgcataagctcttagtagtataagggtgatatatattcatctgctatatttggagtatttcccagtttgtactttgctattcaactgcttgtgactttaagaaaaatatttgagcagtttttagtttttatgtgtttaaatctattgagtacctgtgtgatttctgtcactgattttctttaatgtgtagaatatttagatgattctttattgaaatattttgatgatagggaaaggttttcagaacctgtggcttaaattttagcttcatttagcaaaagatttccaggagttgaatctgtttctaggagtataatttcactttcagttgaaataataaatattgagggataaaaagccctaatttattgttatgctaattttggagtagattagaattttactgggattttggggaagattttgctccatattgcatcaaagctgcttctggtaggctaattcaagcatttattacagtcttctatttccctagaattatatgaggatgatttcacctcaaggcacttttcaatttcacaacttatttgtgaaagtgttaatcatgttttctaaagatgccccagttaccagtagctccagtgaggttagttgactgtaaa

SEQ ID NO: 58184 - DNA, 951 bp, Bovine  19866880938168
  misc_feature (1)..(1): n is a, c, g, or t
ngtatttaagaccttactactgaaaactatatatctttattgaaagcatttttgatattctaaaagattcaaataccttgttcatggattggaagactcaatgttataaagacatcagttcttacaaaataaattacagattcaaagcaatcccaatcaaaatcccactagaattcttggtggaaactgaaaggctggttctaaaattgatatgcaaatgaacagccaaggcaatcctgattaagcaggagtaaaggggaagggaggagaaagggaaggaagaagaaagcagcaagaagacctacattatttgattgtgaacttgttataaaatcacagtcttaaaacagaagagaattaacacaagcatggacagatgaatggacaggatccagaaccaaattcacacatagatagttttctgatttttgacaacggtgctccagcagggcaggggaaagtaaaactgagaaagcagttaggtgtggggcgcaggcttgttcttttaacacaacttttgtaaggagcatcacttccttcccagtagtttatctgaaagaccttcctctgtgctccttcgtattctgtgcattttaaaatcaatacacctatctaattgtggaaatcaattctttacgtgtctgtatctccagcaccctacatgttgctggacacacaacgggtaagaaactgaactaagggtaagaggtccaacagaaactgctggaaatcagctccagtggtaggagttaccattgttgtcaagaacaaaagctctttagagctgctagaaagaaatggcacctcagaaatatttgaccctttgtcatctttaacaagggggtaaatagagagattcatcatcttgcaaaactccaggggaaaggatagactagcaatttctgactagtgaagctggaaaaccaaacatgctgtgcagagggggtcagc

SEQ ID NO: 58185 - DNA, 1377 bp, Bovine  19866881201068
  misc_feature (1)..(1): n is a, c, g, or t
nctgtgttgtgaactgcaaatttcttgtaggcttagtgttttcttttttttccccctatcctgagtacttaggcggctgctcatttataatgggaaatcctataaggaactccatgaaacacttggaaatgagtcaacagaatctcaatgaatgggtgaggaaagcatctctagcagattcagttcttgtgactacatttctccccggctttatcactgagactattcagaaaaccagaacaattgcaggcaggacaccaagactctggtcatcaccacaggatgagaacatttaataaaaccaagtggaaaccttgcgagctcttccttcccagctgacacacgggctgccagacaaagggctgattaatagaagggagcccgttgtcaggctctggcattgttgggtcaggctgagaggggcagtgattccaggtcttctcactcccgtgtctgtgtccggcttcttccttctccacttctctcatggcccttcgtgctcagttcatagaaggcacaggtgcatgggagtttgctgagggacatgactatcatttattttttaaaatagtctctattttatttattgatcatttaaaattttttatttatttattttggccgtgacatgtagcatgttggatcttagttccccaaccagggttcgagctcacactccctgtggaagtgcagggtcttaacaactagaccaccaggaagtcccagctgtgggtttctttaaaaattagtctaagtctcatgttaggtatccaaaccaatatctacaaatttaatctttcccagtaatctactgtaaaatgagagatttctttccagtacggaccaaactaacgtgtgacatctctcattttctataattctaatttgacacaactaaaatcagtatcagagaaggcaatggcaccccactctagcactcttgcctggaaaatcccatggactgaggagcctggtgggccgcagtccatggggttgctaagagtagggcacgactgagtgacttcactttcacttttcactttcatgcattggagaaggaaatggcaacccactccagtgttcttgcctgagaatcccagggacaggggagcctggtgggctgccgtctatggggtcgcacagagtcggacacgactgaagcgacttagcaggagcagcagaaaatcagtatcccccctttacatttccgtctcttctgtaatgcctcgtcttactgattacaaataacggtatgtgaagaagagtctcagccagcgtgagataaagcagtgatggcagaacatctgcagatggaataaatgcctgtagtgactgttacatcctgtatatgaggacgagtgtctgatgatactatcg

SEQ ID NO: 58186 - DNA, 2160 bp, Bovine  19866880417516
  misc_feature (1)..(1): n is a, c, g, or t
ncccttatggcagaaagtgaacaggaactcaaaagcctcttgatgaaagtgaaagtggagagtgaaaaacttggcttaaagctcaacattcagaaaactaagatcatggcatctgatcccatcacttcatggcaaatagatggggaaacaatggaaatagtgtcagactttatatttttggcttccaaaatcacttcagatgatgattgcagccatgatattaaaagacgcttactccttggaaggaaagttatgaccaacctagacagcatattcaaaagcagagacattactttgccaacaaaggtccatctagtcaaggctatggtttttcctgtggtcatgtttggatgtgagagttggactgtgaagaaggctgagtgccgaagaattgatgcttttgaactgtggtgttgggagaagactcttgagagtcccttggactgcaaggagatccaaccagtccatcctaaaggagatcagtccttgggtgttcattggaaggactgatgctaaagctgaaactccagtactttggccacctcatgcaaagagttgactcattggaaaagactctgatgctgggagagattgggggcaggaggagaaggggacaacagaggaggagaaggctggatggcatcaccgactcaatagacatgagtttgggtggagttcgggagttggtgatggacagggaggcctggcatactgcgattcatgtggtctcaaagtcggacatgactgagcaactgaactgaactgagggtactctatagtttcaaacattgacaagctattgaatcaaaaaacactaaataagagttttgagctcacagaggctggtaggagatcaggtcctggttaccaaaaaaaaaaaaaagcaaggggggcagttaagattaacccttgagtgacaggctcaggaataataggtcacatgtcacctgctcatgccaggggtgaggttggcatttacatcagctttagaaaaagctaggctgagaagatgctcctttggtcaaaatgattgatctgtatccataaagctgattcacttcattgtacagcagaaactaacagaacattgtaaagcaaaaaaattgatcatataattaaatataagaggtaaaactagaaacaagcataagttgaaaaaaagattgaaaagaagatagaaagattcagagtctgtaatttccacccacatttaattatttggataaactctgctgtcataaccagatggaaatcactaaaaacaaaggatccctgagactatttcacatgtctgatcagtggttcactacaaaaaagagccaaggtgtgtggggtcctctgcagaccacagcccaggatcagaagctgttggcttttgttgaaatttatagcaaatttatcgacttctgagataaatattgaccaaaccaaagtcaaggttattacatcttcaggaataataaatcctggtgctctcagtgacacaaagtcaatatgtgctctgctgtgtaaattccaggcaaaaagcttccttggaacatctgtaaatctctccatcatgaccacaagactagctttttgaaaattatttttgacagaagatggagatctgggcaacacctcctgttcaccaacatagaactcaccaggcagccccgttgcgcagtgatggacttcctgactttttcactggaaacatagctcaaaggactggtacttggcatctattgtcactgattctaatcatgaagaatcaagatcttctcattctaaacaagaggcagaataagcccacatactcctgacatctgctctacattgtggcaaaagataattatatttgaaataataagttctatcaaagttgaaggggaaaacagagaacacacacgcacacacacacacacagctgaatcactttgctgtcctcctgaaaccaacacaacattataaatcaactgtagttcaacttaaaaccccaagaggcaataacagtacatgaaaaagcctcataggacttaatttccacaagctcagtcttagtcagtgatgtgaaaaagctgcccaaaacattaattacattgtgatttgcattgtatggctaagaaggggttagagttctctttgctcctcactattaaagtgatgctgaatttgaga

SEQ ID NO: 58187 - DNA, 990 bp, Bovine  19866880657398
  misc_feature (1)..(1): n is a, c, g, or t
ntgcccatctacaccataaagcaaaggttccagcggaagcctgcctcaggagatacatacaggaaactgactggtgaaactcgtccaggggatacatacaggaaactgactggtgaaactcgtccagcagcccctgcagaggggctggggggacacccgctgccccacacaggctgcctgatgctctcagggtgataagggccccacctgtgacaggcaggtcactgccaggccaagaagctcctctgacccacttcccaccccgtaagctcctgtctctccttcagcagcccaatgcctgccaccattcccactcgccatctggagttttagggcccagcaaggaacaacacagggcctgattcactgcaggcaagtgtgcacctcaatgacaaccctgcagaaaaggatgctgtggccacagagatgaactctcccagagcgaggaagaaaggccgtgccgacgcgcaggacgtgttcacggccccgcgcagcacctcctcactcatcggctcgggatggcgggcaggttatgagctccgcccgcgccctggcccttgccagcgccccccatcagggcccgccgtccgcgcccccctaccttggtggtacggatggtgcaggaaggaatctgggccgcctgctaaagccatcggttcctccccgcggtcttcaaaccacatggactgcacaggacctggaacagagacagcctgtgagaaacccagacagagggaaggcccactgctctctaggggctcaggggcagggggctgaccctggacaccacttgcattctgggtgagtcaggggactggcaccaactccacaaccttgacctgtggtcacagggcctgtcgggcagaggtgctcagaggggtgagccacacagagaactgaaagccggaccgctcagcagtccccatgagtcacctgactcttcttctgaggacagttatacaacactctgaagactttctcatactgtgg

SEQ ID NO: 58188 - DNA, 1278 bp, Bovine  19866881069397
  misc_feature (1)..(1): n is a, c, g, or t
ntttctttatccagaaggggctttttaaagacttcaagattgtacttaaaaaatctcagagaaacacaccattgatagagaaaggcacagtacttggataacagactgctttccatacttcagcctttaattctcagttttactcaatcagaatggtcagtggagagaaggggctttggagtcacacgtacctgggacttgtccccacgtctcattttggtagctgctcaaagcctctttgagcttccattgtcccctcgcgtaaaatgaggacatataataatggcacttgtcctgctgggctctcatgagggtcatgtgaggtaatgcctgttgtgtgcccaatgcccaatccatttcaactaattattactatcaagaacaaaccacagaaggaaggtgtgccccgttttcaagctttgctggcttcctagctctgaggttggggtttttgtttctgtgctaatagtctttctaccacttagaaagaggtgtgtcccatgcctctgcatcgttacgagaacacggctcacggcggagtcatgtgggcagaagccagacactgtgtctttgtttggtcattgagtgatgtaaccctctaagcatcctctctcagatcgctctgttgggaacggtttccaagccattaaaatgtaattcttcccatcttcccatgttcgggtgggggaatggagacaaaactcagtgtcacttggcctttgtctaaaatgaaagccccctcccgcttctggctaacacacagggtgaagctgctcatgagtttcctgagatcagagccctggttgcctgctggtaactgtggcagacacaggtagagaaccatctcgtcagcatgattttcttggatttggaacaggcaggcatcctatgaggagctcacagctgcagggatttaagaaaccatgggcgtgggaccaggttccatggacagtcacacagcgaaccgctgggataccagaatgaggagcaatgtggtgtcttctctgtgaaggagaaaaggacctgaatttgtcctgaataactgaaactgggatgtcagtcagggtttcacccaagacaggaaactaggatagacgtgaaggaaagcgttagttgctcagtcacgttcgactctttgcgactccatggactgtagcctagaaggctcctctgtccatgggattctccagacaaaaatactggtgtggtttgccatttcctactgcagggatcttcctcacccagggatagaaccccagtcttctgcactgcaggtag

SEQ ID NO: 58189 - DNA, 1878 bp, Bovine  19866880486053
  misc_feature (1)..(1): n is a, c, g, or t
nagagcatgggttgtcttaaaaaaatgaggaatggaaggcagcctagccatagccatccaaccactacattcccagagagaaaatttcactctggttaaacatgctctcgctatcatgtaattataataaagcagaagtcaattgttttgtaaaactacatatagaaaatttttctatctttacatcctactgcctagataggtgggttacactcaagtaaaaagattctggtttaggtaagtatacacctaaagaatttaaaatagattctcatattccaaaaggcattcaatattcttacagacattttaactagattatttttataaataccatcattaaaaactatacaaagtattttaggaaattatcctgatcggatacattaaatatagttttgctacctactttaagggattcaatatataaaaaagtgtaacgggtagaactttgtaagatttgaagtagaattattaaagaaggagttttggaaaaaaaagatgtaaatgatttgtcaaagaagagcatttctcaaaaaatgatcatattcaccaagggtttatgactgccaagttaaccataatacttcagcttgcatgattaattcactagagtatccaattttatctgtctgtcacagcagccagtaagatttttagctggaatgctggattagttatttctggaaactttcccatcaaagagataaattaagaacttggaacgaagactgacgatccagccattccaaaaataaacttattgagagcctagcactagcgagttgtagcgtccccaaatttggattaatagagtcttaaaattatcttttgcaagactagtgacaatattaaacactgccatttcttatatgagtaggcctagagtctgaaattaactcagagcatataaaactttaaacaggaatatgagctaaaacactaggatagcaacagacgctctgtttaaaatcatttagctctgaaagtgtttgacaattaaccaaaggatctcatttttggtgagcttggtttttgaatccacaacttcatatctgtgtgcattctcaacaatgacagtctaacatttacttttaggaacttgtatttatatcttggcaggtagcagtgatcagtgaataatcaaatccttttcggtgacaaatctctgaaaacagactcagctttcagtcaataatcacagcacaatgctatgtaatggttaaattccccatcctggaaatacttagctaaaacgcaaggtctacagatgaacaattatctccactaacttgctaactgatactgcatctgataaaaaagttttgttttcttttttttttttttaaaaaaaggacagaaagaggttcctaagagatgtgctattttcttctttgttacttcaaagcataacaaagcaagtagggtttcaaattgttgtggtcccagctgcgaatgaatctaatttggctcttgatcacagagttaataagcttagtactctgtatttcagggcataagtccttggtccctcaagagaagtgattgtaaagaaaaaaagaaaagccaaagtgcccagttactccctgtaatataatctgtccattaactttcctggtcagccatagttcaaccgcccataattcatttgtaaggcatcagaaaagatttcgtctttgtttccatctcttggaaattttgcctggatacaggccttaagttaccaaaaccacggtgagaagagagtcttgttttaaaacgtatactgatgtataatgtatccaaacttttatttttcattcttgctaaattaattaccattggttttagaaactggatgcaaacacaaaatttctagaaatctaataaactgacctt

SEQ ID NO: 58190 - DNA, 2107 bp, Bovine  19866880562447
  misc_feature (1)..(1): n is a, c, g, or t
nctggagatgcacagaaccagagaagcatctggcaggttgaatggacaggccttggtgacagagtggaggcaggaggtgaagaagggagaggattctgacttgggcagcagggtggactgagggaaaatgcagagaagcaggtaaaggatgggggcagtcttctagatggttctctaccccctacccaactccaattaggccactgttttcactagacatacaaatggtttaattgagcaaaagtaaacatcaagagtccagccaactatagtgtgtctgattcaggccaatcgctggacacctacaaagtggttgattgctcaccttgggctcggagcttggccagctcttcactgagcgagtcctgggactcttcaagctgtctcctcttctgctccatgttctgcatgtagtccgtcagggatttgatcttggcttcgtgctttaaacgagcaaacagaaaggggctatgaatgacgagcgagtgattatcctggcttgtccaggactgtccaacaggaaaacgcaacagaagaggagttcttgactcctctgttcgagtcccaacagccaagtgccaattccgcccttggcttgggatctgggaccacagactaagtcttcttcttcccatgagcttctctgcctcatccccctgcgcgtggctttccttaccaggtccttccttaccatctattaaatagaaataccaaaccccaggctggttttctgctttgtaaaaaacagagtctgctggaaagaaaggggctggaaaagtgtcaaggctgcgggcttcattctttgaacctgcacctttggatttcttctttggaactccagtattatgtctttacactttctgcctttcaagcacagcaattcctatttcagaggctttgtttctttttcctctccctaggaagctctccccaacaccctgccagacatgggcctggctggatccttcttacttgggccccaacattttcttatagcacctaacttctatttgattcatctatttttttttctacttgttagctccatgaaagcatagagttaatatataataatggagcgaaggaataaatgaatgaatgagagcttgtgactaaacaggaacagtagtcacctcgaggcagatggaaatatgcagacacctcctcccccatatctacatggatcatatttaggcaggaggaccctggagatggagctctaatgtaatgaaataacctctgggaaatgggactttgttggagcagatattttataagcatagcttttggtgacaaggatgagtataaacaaaggagataatagcattttagctggaaatattttgtcaggttccttagatcatgtcagaaaataaagaaacaaggtttttcttacttttgaaccccaggcaacaatgactaaatctttggttttgtgtaaattgtggcagagtacaaaatagcacctaagggaaaactgtatttgttcctaatgcagaaagcactgtctaaccacggttattctttaaccccaaaccatcctaatatttttgagtccaatctcacacaccctgagtgtgtgtcaccttaagatctgggcaactggggccccagtcctgggcctgacacttcagagcaccccacttgggcagtcctctggctgtaccccagtctaccgagcaaagttctatgccaagggagcgtgcccacttggaacccacatcctcttctagatcacagtgagtctggaaaactagaaacttgttactctaatgaccctgaggtcacccccaggagcagcagtgcagcttccatcatccatttacataggttacagctgacacagtttcacagctccatcagctcatagaacgtgtggaaggggcctgacttggacgtggaggctgatgtgtccagatggaaggaaagacagagggctttgggccgcagggcttctgtctgtgcgtttgcattggccttcaaatgttagggacagagtgcttcagaagcacatgctctcagagtaacaggtgacctggaaatcagacctgaagtgtactatgcctaatgttctcaattttcataaattataaaaatgtcaaagagt

SEQ ID NO: 58191 - DNA, 1750 bp, Bovine  19866880580714
  misc_feature (1)..(1): n is a, c, g, or t
ntgagggatggaaaactgcagggctggttggtgcttggcaaaggacaggaaagaaaagaacaaggttagttgcccacaccatgatgtttctaaggccagtgcccctcttttgccaaaaggtttcattgaatgttccaggtatccagcagagaaatgacccaagtggatcgcagaaatagaacaaaatttcatagggcgctccacacctttccaagcacccctccccactctcctacccctgccaaattgcaagaaggcatccaccagccacagatgctgaattattcaattattctagcagctttcaaaacacatgtgcagctagaaaatcgcccccaaagaaaagaatcgtgttatttaggctactaggtcatttcttgaacctctcttgaatcctggttggccacgtaattgttcttcaattgaacagtagctcattgacacccacccctcctagcaaaaacagaggcaaacatataatcataagacatctgctgctaactgtgcacttccaagcaggcaggttacttttggattttgcacagtggccaccaggctcccacagtcacccaagattgagacctgatgcagcatctgaaataaataccaacaccaaccatccactatctcccactatacacaccaagctgccttgtttccatggggaaaaaaggggggctgtggactgaaaaaggacttgtgcatgctaacctccaacacaaagcaaaaaccactgaaatgatctgtctgcacgtgggaaacccttctccaacgcctcacccatagtccacccaccactgcacgtcagctctctgagatattttctctgaggagaacacaccaaagagaatgctttagggaaaaagaaaaatgagtcacgaaacaagcctttgagactccattttaggaccgagcttcttcaggaatcctctatttctagctctgaagaagcagagcatgaagatgagttgagccaaaaaaaaaaaaaaaaagcaaacatttaccagaggtgacttttaactccaaatcaattataaaactcacagaggagagaatgacacttttcatctaatcaaaagcaatcaaaaccccaaaatctcaaacactaccctctacacctcaaatgtggctaccggagagtaatggatagaggcgcatctcaatggaagcagattaaggcaaccttgcaaacagtcacttggccacactaagaatgtatgtcggtcaagtgacagggtgggggcagggatcagtgctagggaaaacatctgctcgttcacacagcttgctgaaaggccggaccaagctccaccatcacccactctttcccaagtgtcccaggacatcaatagtcatgggggggaaaaagcacacactcatacctcctccttcctctccttcttccttaccatttctccatctgtttagctccatctccagatgctggataacattcttcaaagtcttatttttctctttctctttttcgtatttcttcttccattcttcagctgtcagttccaggttcacagagacagtattcttgatggtcttagccctggtgtgaaaaacataagggaaaaattctgagcagagttgctagcatttgctaaatcatgaatataattaaacttcaaattcctttcacaccagaagattaggacttagggagcaggaaggatgctagagcttttactaccaccctcttagctgctttagtggccccactatttctaaggctccaaactca

SEQ ID NO: 58192 - DNA, 1828 bp, Bovine  19866880588286
  misc_feature (1)..(1): n is a, c, g, or t
nctgtctgtgcgtttgcattgcccttcaaatgttaggggacagagtgcttcagaagcacatgctctcagagtaacaggtgacctggaaatcagacctgaagtgtactatgccctaatgtttattgttcttcttctcaattttcataaattataaaaatgtcaaagagtccagcaaatccagaaaaagtagtataaatttcacccataaaccactctatccaactactttccccctatattcctggtcttatctatataaatgcatattttatcaagttgcaaggtatagcatagatctgtcactcggcatttccatttttatttaactttatataattatactttccaaatgactaggttgcatacatttttggtaagagctgcataatatcctttcatgtaactttatgttattagtctctctataaatagttgcctattttattttattaaaatgaaagtaatactgcaatcaacatcttccatgtaagtgctaatattttaaatcagggaatgataataccatatgaaatgaaaaattttcactttcattaccaatgaaaaatgctataagtgaaattactggccaaagtatacttacgtttttatgggttttgattcccaaggtgctttccaaagggactgaccaaattatacttttctcaacaatgtatataaatttcactattacacactagcattgactaatctcttcaacgcttctttgcttactatgttatttataaaatggaaacctgatgctttaatttgcatctcttaaatgattacagtaggagacgaggctggagatggttgtatgatgacacattcctatgtttaaaagcatacaggatgaagtatgctttcatctgctcctcagcactgtcagatgtgccgttacacgctggtatctgctctccccaaatgactttagctatgttaatgcctggactgaggcagtgtgcagcacagactggaccactcacagaggcctcagccccaaacaccagcctcaggtgcaggggcagaccagaaacaaggctgcagttttctgaaaccaccatgctaaactgaaaatgcttcctaacggacagaagagtaccttatcactggggcttgaaaatcccttcaaggctttgagttcccacacaaaggtttgagttccagctctgcctttcactggctatatgagtctggacagtatatttaatctttcaagtctcattctccttatctaaaaagcaaggacagtcataacacctgcctatcagaattcttctaaagatcaagtgagagaatgcaggtaaagcgcttaatagtatatagggcactgtaagcactcagtaaaatgcttcctgctactgctatactggtagtggcggcagtttctgctgtcccatattaaaccggatctgtggtagagaccaaaagatcgaagagtgctgccttagcagagaggtgttttagatgccacccaatcttttccacttttccagggaagcctggcatgcagcaatcgatggggtggcaaagagtcgggtatgactgaccactgaactggactgaatcttttccactcattatacatcactatctatcctacctacctacctaccttatttataaatagctagataaagatatgtagacacatccattaaaaaaaaagactaaaggtaattcatgtaatttgtacgactaaacctagccttaagaataagcctggccggttactgcctgggaggccatggatacggtcatcagttgtccctattaggtaccatcagcctcagtaagagcgggaggaaacagatttccagagcacaag

SEQ ID NO: 58193 - DNA, 1297 bp, Bovine  19866880651444
  misc_feature (1)..(1): n is a, c, g, or t
ntgttttgaaggatggggaattagtgctgagaagtaggagtcctgatgtccttttgggagaggaaactggaaaaacaaactcctttggtgtgtgggtcagcagaacaaggcaatggtgatatcaaaggatgttgaatttgtagccatacattcatcacgcccctgtggggaatttttctctttcctttcagagtttaaaaaatctttatagtcgtagtgaagtaaattctttcatccctgtccctgacattaaaacagtaaaaaataatatgttcaggtgctaatccatgagttgatcttttaaatgtctctctagttgaagtaagaaggatattaaccctggggaaaatatcatgggcaatgaaacattcttggctttgcagctcacaggatgagttggtaccagttagagctttttttttttctttcaatattgtttaatctaatggaagcctaaggaacctaccaactcagtgtgctttttcaacacattaacttagccagtagaattaatttcaaattcatttctgcatggatcatttatagtattaatgtgtgagtttccacagcaactgctttttttttcttttttgcacaaagtaagtaaattttgccagttaattgtttttatgcttctctctcttttttccctaaagcaatggcagttttttgtcatcagtggttggactagatcaggtgcttatctatgattttttaaagacctctgtgcacacagctgctttggcaagtcaggaatcaaactgacagccctttggaaaggcgtatcctgtcacaagtctaaagagaaacagagtgacagttcccaggctcaagtgcgaggcctgcctctcaatcttcttcagctggctaggatcttggctgatgcagggctccagagccagacagcagagggcctgaagtaacagaatgaggcccagcgaggtaatcgggactgacagcctgtttgcctgtccaaaggcgtctccgcaacccacagccacatttaattcagcccgtgagagtctgagcacacacacacattttgctctctctctctgctacttttattattcttactttgtattttgggcataaatttcttagtctactcttcctcttggtgtataatttgaagagtggcatggaaatcattttttccctgtcttgtggcaggaaacatacctagacatccgaattcaattaggcctgaagtgaaagtcttacttggtatctttgagggatctttcacagttcacgtgttcagctgctgtcattggtgtgttgttgtgctcagtct

SEQ ID NO: 58194 - DNA, 2745 bp, Bovine  19866880657945
  misc_feature (1)..(1): n is a, c, g, or t
ntgggctggcttccacttctctgcagccaccatttaccatcttctaattgctttgcaaactgcaaatttctcccgaaatcctgcaccccaaccgtggacctttgtccccttctcttgtggctcagctggtgaagaatctgccagcagtgcaggagacctgggttcatctcctgggctgggaagatccccctggagaagagaacggctgcccactccagtattccggcctggagagttccatggactgtgtagtccatggagttggaaagagctggacacggctgagtgagtttcactttcactttcacaaccatggataggatcctgcaaagcacatcaaaagcccagctgtaactttacataattttttactgaaggcctgaggaagagaggatactataccaccctcccctcccccacccctaccccccacaaaaacaaaccaaccatacaactgggcattggactctggcttctagagtctattgcccatgggcttgtttggaggctgccccgagtcctacctccctggcgctgacctgtcccaagttgccagcaccatcttacctcccctagatgggagagattcttggacaaggtccccttgcctgagtccagaccccacctccaaaacacaacaatcaacgcaaatgcagcttggcccctagagaagatagggttactcataattgaccacatgatcctttcaacccttttaatccaagagggaagattttgtttcatgtggccaggaagctcatcaaaatgttgcttcttccatcgccctgaacaagcgctgttaaaatgaattaaaaatttattgataatgtcaaacaccagtttcccctacttctatccatgaagatactaaaatgttgggatttggtatcatcagaacatcatgcattctacatcagaaaaaccttgatttgcctattggcgtattcattaatgttgtgcggtcacgttgttagtagctcagtcatttccgactctttgtgaccccatggactgtagcccaccaggctcctctgtccatggaattctccaggcaaaaatactggagtgggttgcccttcccttctccaggggatcttcccaaccgagggattgaacccaggtctcatgcattgcaggcagattctttaccagctgagtcaccagggaagcccaaaaatgaaagtgtgaaagtgaagtcgctcagtcgtgtcagactctttgtgcccccatgggctgtggagtagcctgccaggctcctctgtccatgggattttccaagcaagaatactggagtggtttgccatttccttctccagcggatcttcctggcccaggaatcaaacctgggtctcacacagtgcaggcagactctaccttctgagccaccagggaagcccttttgatgtgcttaataaagtagaaatttaaatttttcttgattacttatgagtcaactgctatactatgttatagaacatagcaactccctcagaggctgttaatgctaggagatgaatcatgtacatatattaataaccccagttttctttgctttttaaaaaattgttggatttttgttactaggttacacagtaggtgaggaatgccaatgtagttcacattctatgaatgagttatggtataaatgataaagtaagttctgattgttcacttgccaatgtaatcccaaccattttcatccatatttgtttactaagtatattgacattatcatattattcatgaatagaaagtactgtagcattatggtaatacatttgatatttatatttaatatgataatataacatagttgagggcttctcaggtggcacggtggtaaagaatctgcctgcaaatgcaggagatgcaggagacatgggttcaatcccctgggtcaggaagatcccctggaggagggcatggcagcccattccactattcttgcttggagcatcccatggacagaagagcctggtgggctactcttcatagggttgcagagtcggacatgactgaagtgacttagcatgcatgcatgcatagcagatttgaatggataaaaatatatgtaagactttactatatattttcccctctttcctatgaattcttgcccagattagccaatggaataggcctaagctattttgcaactcaggataaaggtgtactggggagttttgacaccctgagttggtgtctatattttactttgaattggatgctttagtcacagttatgttttctcagagtgcagtgtttatataccggttccttctatttctaggcctctgaagttgacccttaggcaccagcatcttctgtttagagatgacattatacccaagggctcatagaatgacctcactccttttagctctggcaaaattaaccttctgtctgcaacataatctcactcaattaaaataacaacaacagccagaatgtaaataacaacaacagcaggctttactctccagtatgtctctttcaccctggatggaaatgacccaacccagagcccccgtttgacttactttggcactagctgggtgaagctgggcctggcaggcaagcttccagtttctctctgtccacaacaggcaaaatggccgtgtctgcatcatttgaaaactacacagtcagtgaaatagagacaaagaaatgtggttgctgtgaaataaaatgactgtcacaaaggagagatcaaatgtgagagaaggtgcatttaatgtaaaaaaa

SEQ ID NO: 58195 - DNA, 1091 bp, Bovine  19866880667647
  misc_feature (1)..(1): n is a, c, g, or t
ncgtgcgccaaaagccgtacagacagcgacagcggcttcgtctgtaacagctccaaagcagaaacaacccaaaggtccaacgtatttatggatcgataaattatggtatattcatataaatgaatgataatcagcaatgaaaatgaataaactactactgcacaaaacgatatgaatgaactcacaaacataaagtccagaagccagatagaaaagaatatgtacctgatgactgctgttttaaaaagctcaaaatcaagctggcctaatctatgatgcagaagattttgagaggtgatcacctttgtggataaggaaggggtcaatgagtgcccactggaaagtgcccactggggcttctgggattttggtgatgttctatttattgactatgaggtagttatgtgagtgtgttaactatgtactaattcatcaaactgtcactttgacttgttcagttttctatatgcacacatacttcaattttaaaattttattaaaacagatttttactaaaatgactaatacaaaaaatggagaaattaccttattgtatcagagtgatggacaatttaatctaagttccctataaggtaaccaagagacactcattaaagatgctatatgtgcagtcatcattaagttaaacttctgtcttttgtccaaataacctgccctgacactttaatctaataatccattattaccttcttcaagttacagtatttttatttatttggtttaacaagttctatatattcataattgctatgaaaaatatgccttctctgtattaaatgatctctttcaagcctcaaggggtatcccacccatcctagtatgccagaagttaatgaataagtatacattcatattttataattttgtcagtacattttgtatagtctctccatactcatattcccacattcaatgcttgtaagctttattctctgtgggtagaccctcagatttggactttggcttcccgagcattttagcagctttctttgaacctggtctgtgttcatgaagtctttcctagtttcattgtccgggatcctaaggagggggggggagctctacattgc

SEQ ID NO: 58196 - DNA, 2161 bp, Bovine  19866880673864
  misc_feature (1)..(1): n is a, c, g, or t
nagttgttacttcctgcccgtgcaacattttgcaacccctgggaaattgtgaagactagttagtaagagaaaagctggttacaaaacattcattataacctgattttttgtaaatctatgtgggcatagaaaaatattcaatatatgggaccaatcatattttacatctattagaatcccaattgtttttttaatacatttgaatataggtatgtcaaaaatgtaatgcaaatgtttccagtatgttgtctcttcatttgtacagaagttttaaattttaacatattcaaatctgctcattttttcttcacaggttgcttctttttctttaaagccatgaaaattgttacttctatgcagaactaatacatgctatattctctgctagtgtttctatcctttgatttgcaatattcaactctccagagcttacatttggtgaaggtccaattaatatcttactatatccaaaccatttattaaataatctattaaataattcttcctcattgccttattttgaaattttagcatatttgagttatagttaggaaattattccaatttactttttaaagtacaagaacctcaaagtaaaaatccaaatatacataagagttttgtaagaaatctcagtaagagattatgagcaaatcaagacatcatcaagccatttcatcttcagtggggcatcattcaactgagccataatttccgtctaaaatcagttcttcccattcggtacaaggctttagtatgtaattgtggggtatataagtatacagcagctgagtcaccaactgtttggattctctgcttattttatggggaggggctacttcttgggtggcaatgttattctaaccctgacacacctggaaataatacccctttgccctgagaaaaataaaagtctaagaattcattgtttaactggtcaagattcagaatcatggatttttactctattgatttttttctccagatctactagaaacctaccatacatagtgtgtactatgtaaatcggctcttgtgttttaggttctaacgtctgcaccttgccactcccatcaagacacaagctcctggaaagccaggcctgaagctactcgccaatgaaggaaggagagactcaagtagagtcattgcagagacctctagtgagccttacccacagcggacactcaggaaaggctgccaatggatcaactatcttagcatctcagtcataagtgatacttgaaggaaaaaagaaaaacaacatattatcactgaatgctttcatctgaatttatctcctctacacagtaatgtggacggatttttgccatcagttcacaccctgaagcacaaggcatgatgatctttcatttgcatagctaggactcatcattatccagatttttttgactcaacaaaacagaattacaccattaggatttcagcatgtctgttcttgcagtaactatcttgaattgggttttttagaagcaaccactgtatgaaaaaaaaaaattataacctcgaaggttcatacatggcttggttttagaatctgagcttttctggttcaattccctgctgcttttccaaccagaaaagaaatggctgagcagttcctctggaccaaggcactggatggcagtgctcagcctggcattctctgctttcaatcccctctaccaaaaacgaactagagagagcaccaccatcaaaggtacaattactgagcacctaatgttctccaagctattaagtatgtacttgttataatatatctggtgctgcttaccaaaaaaaaaaaaatcctaggatgcatttcttccacatctctgaaaaaattgctcaatttaatattacccttaactattaagtataattttagagatcttgcttaattttttagtctaatatgtgaacagcatattaagaaatgtgatattccacttcacaatattgtctcatatataaaataggaaagtccaactataacactgtcctctctgcttctctcttttctgtcacagaagaatggacacttttgtatgcagcataaggaggccagggaagaggagggattattttacaaactggcaaagcaaccgcattcggctcctcccatctctgtccccatcctcctcccaagcgccaggggagg

SEQ ID NO: 58197 - DNA, 1277 bp, Bovine  19866880713503
  misc_feature (1)..(1): n is a, c, g, or t
ngatgttgttctttgctagagtaaaggagaagaggaggttgggaagtatcctttctaccttcactgtgccttagtttttagtattgagctgcaaggatggaatgtgaatgagctaaacagattttgaaaaacatcatttatgtattcaacaaatatttactgatgtgacttcttggtgtcaggagttggagatatagtagtgaacttttctagggcatatattgtattaaagaaagaggggaaacaaacaagtgtgtttctggtgataagtggtatgtaaaagtagggagaggaaaagagagaaaagaaagaagaaagcaaacttccttcccttgctgctttggatttataagctagatattgtcatttttaccacaggtttatgaggtggttgctgttaaatgggagtcatgcgtatgaaatatttgttatggtatttgttgctgttaagtattatctattacatggtattctgacttttttacaaagtcacaaaaaagactccaacccaccaaaccctttattgcttctgaggtatttgtaggcatagaaactattcctttggggatgggaatgctgcataaatgtaaaattgttttacttcccctgcagttctaatcactagaaagtgttcctctgaaataaaagcagtttgcttagggatagatttgaatcaatgccaggcaccccattctctcacagtgaatgacgtggcagaggggaaggttggtggaggaggcggcaaaggaatgcactggttttgcattagccaaatctggaagtaagccagaatccacctagaaagtatagagtccatctgtgttgtccatcaccatctactagcccagagctactggatcaacacctctggggttggtgtgctaaacagtagtgaagaggcaaggctgagaatgtgcttagtaagaagataccttcatatttttaaacaaagttactttggaatcatggaaaatattcatggcaagaatgaactcttcaaagcagattactcctaattaggtctggttttcctagagaccttggtaatatcctattgtaagctatgattttataacttttgagagttcctttaggttaaaaggatattgtttagtgacttttatggaaagattgaagacaggaggagaagggggagacagattggatggcatcactgactcaatggacatgagtttgagcaaactccaggagactgaaggacagggaagcctggggggctgctgtccatgtggtcggaaagagttggacatgactta

SEQ ID NO: 58198 - DNA, 1822 bp, Bovine  19866880844485
  misc_feature (1)..(1): n is a, c, g, or t
ntcatgagagtctcagggtctaaggctgagttgtattcacctttaatactccaaagtccattttagtatctggcacatagcaaaaatcattcattcattcattcattcagtgaacaaatatggtgccacattcaagagaatgcttgaaggtgttttctcctgctgagggtgggtgaataaaaatcactcactctaggattcttctttgtaaatacagagcaacctggcataatggaaagctttggctgtgaagtcagatgcacctgcacgatgacactgattctgccactcaactcgggcaagtgcctcaattctttcatctgtaaaatggggatactgatgctcactatacaggcttgtatgaatgttagaggaaaatcatgtaaggcaactcaagcattgtctaatacagtgtatatgctcaacaaagaaagtttattatcgatgagtatctccaaacaagagtgcatgtttaaatccaattacatgcactacatcatgtcacaacctattcatcatctgtaaactacatctaacaatatttccattcaattactgtctactgacttaatggactgtgatacttcgtgctggacatgaatgatgcacagtacttagaacagagtcagccatcatatcctgagattcaaaacataaactaggaaatgaggcctgaggtcaagtagtaggacctgcatcgctgagggcagtaggcttggctgcacccattccaaatagcaaggtcccaaggaattttccagaaaagtaggctgtctcaaagcagggcagagagctactaaagcagcataaaaatgagtcaacatgaaaatctgcaataaaataggaccatgggaagtgctgggtaagtagagaagaggaacagtagacaagcgaggcttccgtaagtttgctgaactggtccgaagtagccagcacagcacataccttcacagctaccctctgtgtacacatctcccctgaggacaagggtgtctcccacctccccaaagggcagacaagagataagtcaaagtataaatgaagtaagagggtgctggggaggaagaggtcagaaagcagattacacagtagagctgcaaggctaaagattttcaaaactggccagagcctgtttcagattttcaacagagagcattctgaaaatgactgaaggtccaaaatatgagtgaactacctgaatggaatatcttctgacaaggaagtcaaagcaaaataattattataattgattgcatttggttaataagaagcttatgatgattttcagagtgtttacacatatattgttctgtttgagagtaatgctaggaggttaaatgctaacgaatcaagagccaggatgggcagggggtgtgctagcatgaccccgagagagccacaagtcagggtctggaggagggactaattgggaacctgaagctggtccacctccattctagataggctggcactgggagagatgaactttgccttgaacaaaaaactttacaaaccaaaaataaagacaccaaaccaaacccccattgtagtgtcaggtcaaaactctacatctgggtgacctttgctgctattcaaatacagccattgttatgaaaatatgcctggatagagtttgtaagcccagaagcaggcaggcacaaatgtgcctccaggccattcattaatacatgaagccattttggcgttctctgtttctaattttcatatttccttaatttggttctcgtcctcttattggatcattctccctgaagtcaggactatgcctagctgtgatttttgtcctaaaatgttaactttt

SEQ ID NO: 58199 - DNA, 932 bp, Bovine  19866880894408
  misc_feature (1)..(1): n is a, c, g, or t
nagcccacgtgcctagaacctgtgatccaaaataagagaagccaccacaatgagaagcccgtgtactgcaattagagagtagcctccactctccacaactagagaaagcccgagtgcggcagcgaagacccagcacaaccaaaaataaaaattaaagaaaaaaaaagaagaagaagaacgagccatggctccatgtccaaggcctgtgtctgtaattcacattactaaataggcaccttggccctagagtccacggcctgaagattcttattcagttgaaaccaacaggagccagcctggatgactcagggagaatggtaatgacggggtgagtaatcaccctcttgaagtcactagttaggataaaagcagttgttgattacctcatgggacaggtttctcaggctggccaagaacagaacaaataaatcaatgtcactttccttcctcacatcttaaaactcggtatttacagtctgtatttcagcccacaattccaggcaacctctccacagaactccccattaggcccctagtctccacagagatggaggagaggggcagagatggaggcgagaacatctgtgaccttagtggagagaaatcctagaggaacagcacatggctctctgcttgtggtcactgccttggctattttaggaatgtgttctataaaactaagacgataatagggtgaacacatgcggaagagtgaaagtaaaagcctctgccatggcagtacattttaaagacttgaaaattgaaaacctttccctttcagagttgtaaccaattcagggagcaaatccagaaatgcactgctgctgctgctgcagcttagtcgcttcagtcgtgtccgactctgtgtgaccccatagacagcagcccaccaggctctcctgtcccgggattctccaggcaagaacaccaga

SEQ ID NO: 58200 - DNA, 2826 bp, Bovine  19866880902858
  misc_feature (1)..(1): n is a, c, g, or t
naatgtgtgctttcttctgcgcggaacaccgcatccatcagctgaaaaggaaatctgggacctggcttcaggttttcattaaaatgcaatagggcatccggaagtcggatttggaccaacaacaatgagatatttttcttatagttcctttcctctgaacagacttgctatgggctttaaagccctctctatgaccaaattgggtgaagttgctttttcctcctctctttgattgaacctggagctttgggtaggggagtgaagtaagcagaaatgaaattgccaaacttatggttctcaagtaaatgagattttctctaatgcttaccaactgtcaccaggtcagatggatttttctgcttgaagtccctggatgcattaatttctctgccgtcttagggtatccttctggaagcaaccccagcagtcagaaaaacataagaataaaatgcatagcacaactggtgcacaaaaggacagtaaagaataaaaagtgaggcgagggcaagaagaaagtcttcagacaagcatgtcattcgcttggtttttgactcagagggcaattcacacagagctcgactcagacctacaaggaaatggcataatgttctggggttgggtcggctgaactagaaatcctgaaagacaatggcatgtcctctttccttcattcatctagtgtggtgactttaaaaaaaaaaaaaaaaaaacttcctgaagcaaagaaaccacaatatatataacagctgacagtgacctctcactggctgagctggagtctcgtgagcagggggcctcctctccccacggagaagcccatacaggcttccaaaaaggtatggggttgaaggcatgaaagacaccattctagagggtgttagtaatccaggaagtggcaacacaggatctcatttttttgaatacagatgactgacatctaagttggagaccaaggagacatcttctgtaaggcagtcatgtacaatttcttactcattttggtttcttgagctaaaaattagtaccacttttaataaataccacgtctttattacctgccgtctaactgccatcattttccttccttccttcctttcaacatttattgaatgcctctagtgtccaaggtgcaaggcactagctggttattaaaaatataaataaggacagcattagtagcagtatgagtagcaggtagtattagtagcaatagtagtaataactatagcaaacacttctatagcatttgtttggtgccaggcactactctaagattttcaaatgtattaagtcattcaatcatctaaacaacattctaggaaagatgtgtattctttccaatttacagatggggaaactgagacacataaagattaagtaaactggcagagatcacatatctaacaagtggcagagcagagacttgaacccaggcagtctggctcctgaatctgtgctttaggtatgattgctgcatgtgcactatctttgggatttattgtctatgctacaatatggaagtttctgctcctagagctttcaaagtctatctcctttctggaacttataaaaggaccgtgggcattgtatacacaagaaaggctaatgacattcagggacaactgaaggacagttggagattctcgactatcaggagagaagagagggtcatgggaggagatcatggaaggattgtgccttgccagttaggcaggcaggggctttggagcattgagattcaagctattactacaaatgtgacacacatataaccatccctgtgtgaagcgcgggacttacaaattgcatacataacattttgaattttaatccaaataaatgtgcagtctctgttatttaaaaaggaatgatggcagagttatatttcagtagatagatctttggggcctctgtaattcatactcttccatctttcttaagttgccaaacatttattaaacattgccattctttactttatcttcctcctaaacaaccactaaattatcttgggtacatgagccagttaagggttactgcaggcccagagaataacaggtctcagtatattccatgttcctgttcaaacttttgcatatctaataaaaagggacaattgcagctgacatcatcatctccttctttcttcctgacatgaatgtggaagggttgtctggagcagtagcagccatcttgtaaagaggaggaaataactataaggacaaaaagaatacaaataaattagatccaaatggcatttctgagcagttaaaaagaacaatggttctacatcaagctttcttgttatggtagatgctactgatatttaggccacttttgagtaatctgttcttacagctaaacaccttcttagctaatacacaggaatcatgggaaacccatagctgctttacctttcatttctcaataagaatctgtttttttaagacaacagcatgtacttatataatgagccaatattttttattccagaatgaccttgacatgtctcttcacagaaattaatgttgccatcacagctgacatacatttggcaagaacaataagtctgcttccattcttatccagtttagattctatgatcatcattacagtcagctttgaaatgaccttcctctctaagccccactccactctcatattcaattgacaaaaccccaactatatgcttggagaaatccaagcatccccatctccttgtgggcagccaagttactaaatgtagactggtatcacgttaggttcatacttaaaaatctcaaaagggccctcaactctgcacccaaatttaactacatttcttta

SEQ ID NO: 58201 - DNA, 1229 bp, Bovine  19866880927968
  misc_feature (1)..(1): n is a, c, g, or t
ncccagggcttgtgctaggcggagctgagctgtctacacacggggggctgagctcctggcagaggcgaggagagcccctggtgttgccccggacagaagccacccaacaccagggactcacttcatatttatttctggtggtgagtggagcttgaagagccacctcctccccctcggatggtgtggactgccgttggagatgatgcagggtagtgtccagggcggatgggcttggctgtgtccaacagacagaaaagagagaagagacattcagaaagggcttacacagctgcatccagatacctcctggtcacatgcaaaaaccaagaggcacaatcttctcatcaacattgcaattcttatcagataccagacttttctgaagacaggaggtttgcccttctattagcacacttagctaatccaagccacccaatatatatcagttacttcaattctgattaatgaaaattagagacaacagactttcagttttatctgaggcagatccataggtcccgatgagttccaacagcatctccctaaaactggatgcagaattctgtctatgatgcatttttaggggaagaggtccacaggtttcaggagattttccaagggtataaaaatccaataaacgcagtgaagtactaatctatgatcttaaaactagaaacaaggagctgctggtttcccaaacatatgcagagcagtatctgataagaaatattattacatattattggagatatttccatgtaagaagaagaaaaaatgctctctagagaacacccctaaatctcttttcctcctatggctctatcccaggaactatgactcaacagctacactctcagtctttgcaggtagacatccaaatccaggcatggaaggggctggatgtccaaccccccatgcactcactgatgccgggcctggctctctccagggtatttccaaacctgtacttgcaagaggctctccctgaggcttctagctacatgcagctccttcatggttctgccaggtgcaaaccacaaggggcctgcaggctttgctgagcaagccatatattctgcatatattctggtatcgctgggagagtgtatctctgtttacagctaaacccctctgcctgtagccaggacttgctggcttctttggtcagctcggtaattttgaagatcaccatgtcctctgggaatctcaaggaagcacgcatctgatga

SEQ ID NO: 58202 - DNA, 1083 bp, Bovine  19866880945116
  misc_feature (1)..(1): n is a, c, g, or t
ntccggagttcccgctcccaggtcccctggatgagtgaagcctcggtctgccatggaagctggccccgccctggcctggctcctgctactcagtcttctggctgactgtctgaaagccgcccagtcccgggacttcaccgtgaaagacattatctacctccatccttcaagtaagactcccttctcttcgctgcagaaatgtcacctgatttcaaataagatttgaaagctgaaaactggccaggagtaggcagccttccatgtgggggaaacctggtgacttattgttgggagtgtacatgctgggcttcccaggtggcgcctcgtggtaaagaacccacctgctaatgcaagagatgcaggttttgatccttgggtcaggaagagcccctgggggaggaaatggcaacccactccagaattcttgccgggaaaatcccatgaacagaggagcctggtgggctacagtccatggggtcgcgaaagagtcagacatgacttagcgagcgactgagtatgcacacatgtgcatgccaccaaaatatgctgtgtgtgtttacctcccccttttacagggtgtttgtttttaggtaaaatatttggcttgtttgctctgttccctgcaccatggctctgattctgagccctcttctctctgactctgccagatctcagtcagttatcaaagtaaatgaccgagtcccagaggaaggtgttagtaaaagatcaggcctttataagcaagataatagctggccttcctgtctgtgcatctaattctcagtttcagcataattacctctcaccacttcctattgcctatcactttcagtttcctgtgtttaagagttatcttcagagtgcagaataatgtgtgtcccaggtcccttccccagagtgtctaactgcatgtatctggggcggtccccatggatttttgctttcagcaagaattcaggtgattctgctgccgcctatattctaagaatcacactttggggaacatggcagcttagcttcctctgttgggcaccatctctggatttatctcatcttttatatttgcttgaccctctactggat

SEQ ID NO: 58203 - DNA, 1418 bp, Bovine  19866881013235
  misc_feature (1)..(1): n is a, c, g, or t
ncacttaaaaacatgagtttcagtattaacctaagcaaaatgtaattatagaagtaaatctataatagaaataaaaaagtgtagttctctgcaatgtccaggaaaagtgacttttggaattaggaagtatctgctattaagaagtattttactcacaagctcttctcgtctacttattcatttattcactctgtaattatagggaacatgctaaatatacaggaattgaaccctaatttgaggcagatgatggaaaactgatgctgctgaactgatgttgaacaactgttatcaccattcacctgtgggtctctttccagagatgtcctttgatgtttaagaacaactgcaaagtaaaaaagaaaggaaaaagtcaacattggccacacttatggctttgtcttttgtccagagaggtcaaggtggatttacaggtaaatctttcacaaccaaatgccaattatacatctgaatctcaccctccatgggtattgtcctaatctctcccgaaatacagaggtccccttgaaaagtgcctcaaacacactctaaattaccaggattacttgctgtttctttgaaaatgactttcatgtgaaaatgcttcagaaacataaaagttaatcacccctatcattttctagcagcagaataaagagaaaattaaattcttcttcattctttcctacaaaatgaattagaacctcactcactcttcttcacgttgtacgtagaaatggaacacaatccaatatttctctctttctctctctctaatgtttctcactctctctgtttcaaaaaggaaagggtaaaatacagactattttaaaactgtcacagttggtgagaaattctagggggagttctgtttttatcagaagtatgttgtgaaggtctgaaaatacaagtttatgagaggttacgtctctagcaaatgagatgtaccacactgacgtcttcaacagaaaccatcgaagtcttcataagtatgttaccctatacattttatcatcagtgttcagcacatccttgatgtttatttttaaaaagaatgtccaatcccaacatttcccttctatttcaaactttaccataggctagcctgaatgtaaaatggaaaccttgtgttttgctaacttcagggtgctcagtttgagttccatgaataaaatatgactctgatcattaaaatgtaataaaagtcagtgctttgaaaccttaacctaaacaagcttcctctctgatcctggaggcgaacttcagctgttctctcagcagggccttttctgcagaaagcccaggtctcatacaaagcatgggaacctgctaaggcaacatgcaccgctgagcacacagtcagagccattgccacagtagggatctcccaggcctctcagcacttcatcacattcagg

SEQ ID NO: 58204 - DNA, 749 bp, Bovine  19866881102181
  misc_feature (1)..(1): n is a, c, g, or t
nattgttgttgctgctgataagatagttggcaaaacctaataccaatttgtaaagtttaaaaataaaactaaaaaaaataaaataaaatatatatagtctgagaaaaattcaattttagaggcccagaaatattggacaaatgtatgttttaatattatatgtttgaacaagaacagcaactatgtttattccaaataacatttagtctcttcattctcacagggttggactctgaattttactttagatttcaaaaagatctgctctttacaagtaagaaattggggaatcctttctggaaagacaaaaattcaagtggaaaagatttgtcacttaatttatgacagaagtagttgcaagttggcaaccattatattatttcagtatgaaaaaatttatcatgtgattaattttcccccaaatacctaagaaatagctaagaaatttaaatgtttcactagaaacatctttcaaacacccaggtgctgaattttccatttatgtcacttaaataaatggcatgtgtgtatgttgtgtgcgtgtgtataccaatatacccaaaacataataaaagtgagctgcaactctagaagctacagaaagaaattactcctctggagatgagatgtatctcaaaaataagtcaattaataccagatataatctttaatactccacagacagtttatctcattccttatggactggcatctactcataaatgatatttcccatatgtcagagagga

SEQ ID NO: 58205 - DNA, 1009 bp, Bovine  19866881186463
  misc_feature (1)..(1): n is a, c, g, or t
nattgatttcctttaggattgattagcttgatctccttgcagtccaaaggactctcaagagtattctctaacacaacagctcaaaagcatcaattatttggcactcagccttctttatggtccaactctcacatccatacatggctactggaaaaaccatagctccttcattagctaatttgtaaatacctacgtgtggggccaaggaaagagagtcccagccatgctgtgtgatctcagaaccacggactagtggcaggcaggagagagaagtgcatgccgggaagtccactttcctgtcccacaatgatgcttgagtgctattcgttcaggaataattgaaagggaggtttgtgcatacagttaccagacaggggatcagagagcctcaacttctcctggcataattatggttcttccaggggattagaaagctctgcagttatgcagatgacttgcaaaggcaacatgagatattttactactcaaaccaagttgagccatctcaataacccagcagctagctgacagtgccaatcacatattgtaaaatcaggcggtttttgtgttggtgaattgcttggaagcccaaagagctggttaacctattttaagggagattttttatatttctgacaggggtgattaaaaaacaggctgtactgctcatatcagcagacaggctgcagacatcatattttccccagattgctaagtgggatacagttctgtttgcagtgttggtgaatgctggaaaagtaattttgatttgtcacttggtaaactgggcattctgaatatgaaggagttaatcagttcacagagggctgtcattaatccataacttacaggcccttttggaaatgtgtcttgccactaatgtcattgcaggcaaagtcacagtcccctcagaatccttcatcccgaaatggtcccttccagtcctgccaggggcgaactcagcttgcactgttggtttgtatatcatctgtataaactccaattttcc

SEQ ID NO: 58206 - DNA, 972 bp, Bovine  19866881199022
  misc_feature (1)..(1): n is a, c, g, or t
ntgcctgtatacagtcggatgtttgcattataactgacactgagtaagtactttttgctcaaaattgccttgtctcctaagattgagggagggtttagatgcagctccctgactctctcagggttcagttgagtgtgcttcagggtggctctgtagatgaacacattagtaatagtctcacccagcacatgttaacatgttcactttatttctgccatcaatggtgatcatactccctgagaactgcttctctgggcttgttgactgatacgaccataaatatatctctgaaggctaaagctgtagctgtttcagcacagatggaacaaaaataaatgtcccactgtgttagtattacaaattatcatccaacagtggcatgaaatttaaggtggtgatagtttaattctgggcttgccaggcggcacagtggtaaagaattcacctgccaatgcaagagatgcaagagacacagattcgatccctgagtcaggaagatcccctggagaaggaatattaggcaacccactctagtattcttgcctggaaaatcccacggacagaggagcctggcaggttacagtccatggggtcacaaagcgttggacacgactgagtacgtacacacacacacatacacacaaacacacatacagttttaatttctactcttttttgtttacataatggcagaatgactagaattaaaaaatattaatcaaataagttttgctgaccatattgtgtacatggttcattgtttgccctgaaagttatgaaacattttatatttaaaaaacagcactacctctggacattcttacttctaattattggtaataaataaacaaaattgttctctgggtctataaatggattttgaggaaaggaatatatctttgccttatagataccaaatcatgatgtttcttcttcttctgttatcatgtgcatccattcaatcaacaaata

SEQ ID NO: 58207 - DNA, 1271 bp, Bovine  19866881208690
  misc_feature (1)..(1): n is a, c, g, or t
nttcaccctgcctggtctgggttcccatccctcatgccaagtccccatcctcccggaaacagtctctgcctataaccgagtggatcagcctcagggcccaaagggaatgatcagacacagggcaaacctggctgacaggagcccatgcgtcacagccttgccccaaggactctggcaacggtccagcatatgtgttttcatcaccaaaaccagcaggagccaggcgtgcattgcctctaaaaggctttacttgctgccattctcctgagtctctggcctctgatgatcctgagtaagtggacaccccagggcctttgcacttgctagtccctctgcctagaaggctctggccacaggtgccttcatagctctttctctctccttcaaacttcaccaaaatgtcttaattagccttctctgaccaccctttttaaatctcaaatgctcttttccctgcatttcttcttcttcatagcacttatcacactgacattctgtatgtttccatctatatctgtgtgcctttcatgtgcccttcaccagaagcacatgtgctgagagtcatggaagggtaagacaacttcccagagagaaagaaggtatgaatgcaagagaaaaccaacaaatgtccatcaagcccttttcgttcttcccatgccacagccatcaatgactgtttcccagtcattgagaaacctcttcctgaaggttctccttcacgtctctgctcccctctctcccctttctccagacccctcagcattgtctattccatgcaaaccatactgaccaacagcacctgcctcagtgggaggactgagcgggtcagctcatgcttagggaagtactaggatgttgcagtgctgtttattagccaataaatcagagccattattcctgttatttagtttaagtatcttgtatcacatatactaattaaactcttattcccacagctaggttacaagcaaattgagggccaacatcttacgtgtggatttttaaattttcctccagagtacttaccattagtttttaatgattattgtcaagtgatggaaacaaaggatttccatgtttaaagtttcatttgaaaccctttagaacctctatttagacagtgattcaatcctttaacctcttccaggactgaccttgtgtgtaaatatggcaaatccctgaaaatggcatctatcatgggaactttgctagagtagagccaaaatactctctacaagatcaaacaaatattgactcaaaagaattttccc

SEQ ID NO: 58208 - DNA, 1013 bp, Bovine  19866881222707
  misc_feature (1)..(1): n is a, c, g, or t
ntcagggtaaactggtgaattcaacagatttaaaatctagcgcaggtaaatcaaacttaacttcccttgttgtctagctgaaataccaactgaaaaatatattttcgcaaacttttgccatatttataactgctccctcccaaattgtccttaagaaggataatactttatattatcagagactatgttcccactcccaagatctggatatgggaaatatatatcaatgtttagtgtgtgcacgtgtgtgtcttattatttgtatttgtgttcaccagagccttatatggctaaagagagatgtcagaaatgcaaacatcaaatacataggtttcatctgtagaaaaattccagctcatttaaactaccaaaattgcagtcagctgctgggagaaaaataaagacaaagatcctgtttacaaggcagctagagttcagccatcagatggttttgggttaagatatattttctttttatgctgatgtttctataagacattttctatgagttggtgatggtccaactgtcatatgttttcctccttcttgtgtttctatggtgtcttcatagtgatagtgttaatttttgaaaatctttactgaaaacttactcctctgcagctcttctgccagtgtgtagaattgcattctataatgggcaaattctgggaaagattgaaggccagagaagagggcgtcagagggtgagatgattagatagcatcaccgactcaatggacatgagcaaactctgagagatagtcaaggacagggaagcctggtgctgtagtccatggggttgcaaaaattggacacagcttagcaactgaataataacaacaaatgggcaattttctgatttttttttttttttttttggtgtgtggttttcccattgcttctcaggggctatttctgcccttctcttacttctgccagcaaggagctggtattaaacttttaccccatgaaattattaagtatttaagcttataagggactttccctcacta

SEQ ID NO: 58209 - DNA, 1061 bp, Bovine  19866881408549
  misc_feature (1)..(1): n is a, c, g, or t
ntggactctatgggacataataaatgattttgacttgagtactaggtgattagtggtgcaattcttattcagatacagagggcttgatggttctttttttggccagttaagcttgagatggctaatggacatcaagtggaaatgtccagcaggtgactgggtgtatgaatctggagcttgggcgagatttgaaggctgacatgttcatttgaagtatagagagaaggctgaggtcttgggccagacacactgtcgcttggaagtctggaagagatgtcaggaaaggacatggacagagtagccagagaagtctcagaggaccatgagctaaatagatgcccggaaaggaaagtgtctctggaaggagtaaatggcaacctagtcattcaggttcaaatgttagcactcagcacccatattaaaatgtaaatccaaaaatttattctgcagctgcaaacagtgacagctgaagcaggctgggcccactgcctgcccactgaaaccctcagctatagtgggagactctgaaacagggagactccctcagaaacagggagactctggtttcctaggcgtctttgctgcagtctcaaccaggatttgtgagattttcattcccttactaaaacagcagtgatgagttggttgttattgttgcttaaatgtatgcagctgtatacagctggtacactgtgccataaatcagttcttgaaaataatcagtaactaaattctaatccagattctagtgccttgactttaaggttcacctaaaataaaaggctatgaccaactcagtgcatgaaaagacacgtagaaatgcttacaattttaactaatttatgctctgatcctgacaagataagtttaataacaaatcattttctaaattttatcttttctcaaaggcagtttctgtttgggaattaacttttgcttatggaaaatcattgtattatatgtttgtcacttgataaatgtgatattattgaaatgaggagttagagattttttgctttctacctctcttaaagtgaaagcataacgtacccaaccaacat

SEQ ID NO: 58210 - DNA, 1496 bp, Bovine  19866881432755
  misc_feature (1)..(1): n is a, c, g, or t
naaaatgtggtacctaactcttaagagaagcagttttatttattttttaaataaagcagaaaaactgggaaatgagcctgtgtcttctgcctcttttccagtatcttttgtcttggctccaaggttaaatatactcattgcagacacaggcacaggcatagatgacctcataggggctgaaaaagaaaatagaaactgcaagataggttaaaaaaaaaaaaaaaaaaaggatcattgctaaggtttgtgtcatatttgagcaaagtaataatagttgagcattcattggatgctcactttatatgtgtgagcccctgtgctgagtgcttttcaggcattatttatctatttctcatgcagctgtaaaaggtaagaaatgataagagcaaatacccaagtagcattattacgtgttaggtagagttctaagcactttgtaaatgtcaactcatggaatctttgtaacaatcatgtgagatatgtactgttggtattcctgttttacatataaggcgattgaggcacagaggatttcagcagcttgtccgagatcatagttgattatcactggatctagaatttgaacccaggaagggtagatatcaaacagtgcaatgaccactaggtggtagtgcttttcacctactttctctgaagttaaagggtgatcggtgttttatacctaaagtttttgagtacttgatactcaaagttaatgtcttctcagttgccaagattaaaattgttgaagagagaaagaagtctaaggtgaccacagccagggcaggagttgggggtaatatgtggtgaagatgggtgaatatgtgccctgtgaaagcaaaaaaggtgagagaaaacaaaaaacatgcaccctacttaagtatgcccttttgtgtgacttgacagtttcttcagcctcggcccccgaaagattcattctgagttgcttggtagctgcactgtgtccaaatagccatcatcttttatctagactgtattcctaactgctattcctgtccttctagcattctttctccaccctaagagccaagagggagcttttaaaagtgtaaattatgaggattccttgttggaaatcatccaaaaccttccatctcactgggaataaaatgcagacttctcaccctggagtttagggctctgtataacctgccctttgcctaactaggtgggatattttagttttgaaaaggacattacaagatgggtatacattacttagctaaaaatgttctccttaatataataatctgtgctatcagacataatggggaaatttgcattcatatgcttagaacttttcaaagatttaactgaaaaaaaaatcacacttttttttctcgaacagttttttacttccaacgtttgccccatgcactgccctataactggaaaactcacagttgtaaaatcacaatttttatgattatgtaaaatcataatttatgatatgtaaaatcataatgtttcaatgt

SEQ ID NO: 58211 - DNA, 1235 bp, Bovine  19866881435356
  misc_feature (1)..(1): n is a, c, g, or t
nggacgtggtgtaaagttgtctatgagtttaggaatacagggaaaacgagagtaaatactgctatcaatcaagaacaatttgccacaaaatagacaggacattggaaaaataagagtgacatcaaacaaaatagctctcttgaggtataattgacataaaataagctgcatgtatttatttatttggctctggtaggtcttagttgccgcaggcagaatctcagttttggcatgcagggtcttgttcccaagccgggccccttgcactgggagtgtggagtcttaaccactgggctaccagggaggtcccagctgcacataaagtatagtttgagaagttttgacatatgtgtacattcatgaaaccatcatccccacaataagataatgagcatgtctgccaccttcaaaagtatgtggggctattgctggtctctctggtctatttcagtgatctaatctttataccagtaccatactattttgatgattgttgttgttgttcagttaattactgtaggtttatatgaactcaagaccttctgtggagtagccattgataaacatgtgtagattttatcaagctagggaatagtgttatagtattaaacttctacctcaaaggttaaaaccaaattcttggagtttagcctgttagcctttaaaaggccgagttatacttcagtctgctttggaggaacactccaggttttgagttgggattgttaaatactagacaggcctccccaaattacttttgtttatggacatttctgggaaccactgaaagctcttcttaggtggtataacagatcgagggtttagagcatatgacctcttgtaaacccaatcgttctttcatagaatctctgttgtaactgaatatttcatgaatctttgcaaatgaatctaattttagcataaaattctccggtactataagattaaccctattaagttccagttcagtgattttatatttgaggatttatttttagacgcatatgttggtgttgagctataaacttctgaggttggggtgattaaatggtccttgcaatatgaaggtgcagttgatttatgggaagttggtgcctgccgctgataatgataaaggaagatatttttatgccaagttctaaaatagagctgatgaaaaatgctaatgaaatcaaggagtgtctgggtggctttggaattaaaaaaaaagagtctttacctttaggaatataagt

SEQ ID NO: 58212 - DNA, 1108 bp, Bovine  19866881437301
  misc_feature (1)..(1): n is a, c, g, or t
ngaatggaagagaatgatttctgaagacagttgtatggaaaactttccattatgtgctccttgagagaggacatcatgtctcttcagtatgcatgaggaatgtatttggcgttccccttcggtgcttttatcctaactccagaaatggaaacctgaaaggagatgatatgaattcaaagaaattccacttctctattatttgaacaatgctttttacaacaccaactaaaaaattaagccaactcttaggaactcaactctttgattttccagatccttgccccatgctatcggtatgtttttctttctactttttacccacttgacattgaaaattgagttggaggaccattacatagacaaatatctgtggatttgtccaccaatacagtgtcctatctgtgataagttttattatttagaatttaaatgtgtaattagtgggggaaaagacctagaaaaataactaagaagttaatcataaattaacttagtgcagtgcatattgaatgaatggctgtcaatatctcccttagcaaacatgagaaacacactgagccaaaggcacactcaccaacctccaggaccttcatactctcatctcaacccccaccaagcctccttctgatgttgggtgggctgacgcacaggcaagaagtagtgaggagccaggggtaagcccctttcagggaatggagaattgacgttagcaatcagactcaatttctagctctcactaagtttatggatattaactgaatttgagagcaaaccctccaaggaacttagctgaaatcatctcataaatcttttaagataagttaggatgccaggtctgaagaggcttcatgatgaatgataaaacagaggcgcctgtgtggcatgcccctgaggaaagcaagtgagcaatgtggaatgagaaccaaactctatatgcacttaaagggcaaaagacaaccaccccacaaactcctgcagttgttgttttaatggcttatttatggtgctacagagccagacgtgtttactctgccccgcagttagttatcattatactcaaagattcagctaatgaattcttcccagtgaagaaaaaaaaaaaaccttc

SEQ ID NO: 58213 - DNA, 807 bp, Bovine  19866881501374
  misc_feature (1)..(1): n is a, c, g, or t
nataaaataaaaatttttaaagaaaacttacctgtttaaatattcagacatattcttagtggctgcataatattaaaatgttcgtagctataattcgtctacttccctattaagaatactaggcagcttttaatatttctctaaataaaaacccacataatctttgtggtgcacattactagattgatttatataaagttcttgataaagattaccaaattactccccagaaagactgaagcaattatagtctcagtaacagtgtttgagaactacgtcttggacccaagctcgcatactttttggaaatctttgttaggctaaaaggtatattttcaaatttataatttttagtctcaaacagtaaacatttaaaaaataagatagcctttttctcttgtaagtaagtcattactcttttgaaaaattttgcacttaaaatttatatactcagataaaaaaaattctgtcctcagagctggagaaggtttttctttgaccctcccctcttcttcccattattcactggctcttcccctctcctcttccttttgtaacaggagtgtaggtcttgctgtgaggggatgatctgcaatgttgagttacccaccaaccacacgaatgcggtcttcgctgtgatgcacgctcagaggacgtctggtagcggtgcccctgcgctctacctaccggtgctggcctgggccttcgtgctcccgttgatataaggccaccttcctgggagaggcagagacccgtcctctgaagcacaagctaacaactgtaaaatggtgaactttgaagaccaat

SEQ ID NO: 58214 - DNA, 875 bp, Bovine  19866881589385
  misc_feature (1)..(1): n is a, c, g, or t
nccacacataacaacagcctggggatataggaccaaaaaagtcctcagactgaaaaaaaattttttttcacataaagaatgaaaaaaacagaattcctatcccttgtgttataaaaactgaaaggtaagggaaattttatagacccagaaagtgatgaaatgaagagaaagacatcaagtctacccaaaaggtgataaaatattttatttgttttttggttgtgaaaaagaaaataaatcattaaaatgactgtcagaatggctccaggataagggcattgaataagagttggctataaatgttggagagagtaataaaagagttggttttgtttccttagcatttgtctgggctgaaccctcctatttcaacacaggaatcatggaggatggtaaaagtcaacccaccaagtgacctgcattagtgccttccttgaggcctgtccaagaacctcagagcagctgcttcccacctgcacccaggctcccatccaacgcagaccctacaggacaggctaccaatccaccagcacttcaggatcacagtatttcttctttccattattactatttcacatatgcctgcttataaaacaagcatttttcccagtccttgtttttctcagtcctaggaattcaagatgacaaaggaaaggtccctgccccaagcagctcagtttacagtttaaagggccttggattaattctgatgttgtttaatgatatatttcaagtgcctggagatagacaacagtgacagaatagctgttgtaaaagcaactgttgattttatttaaacccgggaaggattaggtgagaaactgtaaaaggggtaggattttgaactaacccataaatgtgtatcccaagatttg

SEQ ID NO: 58215 - DNA, 1318 bp, Bovine  19866881931206
  misc_feature (1)..(1): n is a, c, g, or t
ncgtgtccgactctttgcgaccctatggactgtagcctgccgggctcctctgtccaagggattctccaggcaagagtactggagtgggttaccatgccctcctccaggggatcttcctgacccaggagttgaaccagtctctggcatctcctgcattgccaggcgggttttttaccattagcgccaccagggaagcccatatattatggagtagaatgtaattgacactcaagagaataaaacatgaggcatcaaatagatttctacttgctaccttgggctggatctcaaacgcccttgagtaggcctttttgctttacaactgggggtaattaagagaagaaagttgagaaatactaggctccatcttcctgaactaaggaaattcacacacagtgaagtcctcgtgcaaaaatgataggtcaggagaacctctctgagaattggctatgcctctgtaatattcacaacttaacagcaggtgtgaggaggtcgggaggtgagctagtcagaggggagatgaagagagggggagagagggagagtcatgagattcctgcctgaatgtttgggtttctttttataagaccattggttacatttgaaatctggtcttcacatacaatagtccctttgtattcacagggggattggttccaggaccccagtgaataccaaaatatgtgggtccttaagtcccttatatgaaatggtgtagtacagtcagtcctctgtatttatggaggcagcacccagggatgtacaatgctgactgtagttttagcttcgctgaagtcaaatacctgttttcttctctgtgctggtgctttatgagccgctcaactaaatctgttttcaataacattcaagttataatgtaagtactatgacttatattaaaaggaagattaaaaattcttaacagcctggtgaacttaacccttcctaatgctaggcacattatctttcttctttcctgaaggactgggaaagttccagaaagttctttgcccaacagaatgggttagtactgttctacacactgtgttacccttttcagtggatgttgtcaaatcaagttgcagggcaggacataaaggtcaactgtacatgattttagggggagaggagagtggctgggaggtaaaatataccctaagctttggcttttaaagacttatgaatttgtagttgctttgtgactctcgactgatcactctttaaaacattttttaaatttatttatggtttatttttggccgtgctgggtcttcttttttctagttgggacgagtggaggctactttctagctgcagt

SEQ ID NO: 58216 - DNA, 664 bp, Bovine  19866880438167
  misc_feature (1)..(1): n is a, c, g, or t
ngtgagcaaaagggagaaaccaggatacttctctcttttccctgtctcaggaaaccctctccagcaatgatgatatcttctctgtggctttagagggttttggctttggggaaaacatgatgatgagccctttcctttgttttaggactgtaatagttggctggggacacaattcttatagtttaatggtgcctccttgtgcgcaagcgtgcagttgtggttacaatcaccccagttgcttctgtttagaaggtaacaagtttataagaaacgaaaaggctaaaacactgcagcactcgcgcattaaaaccccgtctttctattttcccactaaaagagagaaaaaaaatactgtgatccttttctggaacatcttgcaaagttatcagaattttggtcagggcagccaaggtttagaaccgtgactcacatgatcagtaatccacatggaagcagctgtctgaattttttttttttttttggctaacagtagtaagtagagaagcctacccttgcacaggaaaattgcatgtgacccggagtgagttgactgtgttacttatacatttatcgtagtagttaccagtaattggacattaattctgctctggcatctagattctttacatataatgatacgttttcatggtagatcaaaattacc

SEQ ID NO: 58217 - DNA, 1256 bp, Bovine  19866880518856
  misc_feature (1)..(1): n is a, c, g, or t
nacttggacttttctattctgtcctttgtttcccatatcccaccagtcttgaactggggaaagggaagcagaagtttgttgtatttctttgtctctgatgtgacctgctgtgcaggacttggccctcgcctccaaattctccaggccagaatactggagtggatagccattaccttctccaggggatcttcccaacccagggatggaacccaggtctcctgcactgcaggaggattctttactagctgagccataagggaagcccaagaatactggagtgggtagcctatcccttttccagaggatcttcccaatccaaaaatcaaactggaatctcctgcattgcaggcggattctttatcaactcggagaaggcaatggcaccccactccagtactcttgcctggaaaatcccatgggcagaggagcctggtaggctgcagtccatggggtcgcgaagagtcagacacgactgagcgacttccctttcactttcactttctttatcaactgagctattagggaagcccgccattcccaacttaaactccaccttaaatagttctcagagcccctgagagtttgacactgtgcacagcatcatccttggttgtgatgtgacagctgccattcttcttttctcttttgtggctccttggtttgttatcatggtcatcagcaccgccaaatttagtggctgatgccccagatagccgctgaaggttctgctgattctggccatgggtgtctgtgccttcacagcctcccaagcctgtgttgagagctctgtctgtcaccactgccttgtcttccatggaagctgtgctgaggcagctttttttttttttttttggcagcctcctcttctgagaagtcagacatgatttgaagatagatcaggggatgatctgaaagttggattttattaaaaacacttcctaggaggctgcttttgtcctagaaaaagcttgtggggctctacttgcttcccctgggatgagcctctttgtctctcttttaaaagaccttgaggacccaccccatctgattatagagctgcttgaatcttaagtgaatggagcttttagaacaaaatgtaaatgaatacttgcgtatgtataggcatcttctgacagactttccattgttactgaatagtgctttatataatcctaccactgtgataaagtcaactcatgctgaaacattggggagtgcaaatgtgtcccaggacacacacagctttcttatgttaa

SEQ ID NO: 58218 - DNA, 901 bp, Bovine  19866881065364
  misc_feature (1)..(1): n is a, c, g, or t
natattctcatctcctcctgttactggacatttagactattgttagtgtttgatagattctcttgattaggtaggagaagttatcttcccgcacaggctgtgtgaccttggggaagttacttaatctctcttcaccataattttctcacctataaaatgacaataattataattgtatctacttcatggaatcattgtaaggtggtttattactgcccataattgtcaattttgattacaattagaatgattattaccatgtctttgtgcaggtactgtgctaagtgctcctggttctatcaagtttcccagcttcccaggtggtagtatcattacttaggaatggtggagctatgcttgaatcctctgactgtaacgcccatattcttagtcaccaccttcctgtgactggaggtttatgagaggataaatccaagaaagagttcacaaattctggcgccatgctacaatatcaggtatctgagagtgaaaagcaagaggacttaggatgccttgtgacaattctcgtgttgtcaccaatgttgctgctatttagaccactcaatcctaattgcagtctacaagacatcccacaaactttacagaaaacacttcaagaatgtcacgcctattttctttaccatgaaaaggccaacataactttaacagttttgtttggaaaaaggatgtttttggcattgaaccatttagcatgaggatattttatggaacatcaaacattcgatgatagctaacgatgctagttttgcttaaatgaaagccaacatgaagcaaccaaattgttccacctagccaagagccgcaagactcattaagccatgggggcatctgtatcaaagggaaagatttcccagctactacttaaccagaatgttcatct

SEQ ID NO: 58219 - DNA, 1326 bp, Bovine  19866881198038
  misc_feature (1)..(1): n is a, c, g, or t
nactcactggaaaagatgatgatgatgggaaagattgagggcaggaggagaaggggataacagaggatgagatggttggagggcatatctgactcaatggatgtgaatctgagcaaactccaggagattgtgaaggacagagaagcatggtgtgctgcaatccatggggtttcaaagacttgaacatgacttagtgactaaacaaagagtacctccctggcagccattcctgaccaggctgcgggcactatcttaaaaatcagtgtcctccacagtgtgataagaatgggggactaaacatagctcagaatctaagaatgaatcagatatgatcaagaactatgttctcttacagtctctttgtatttttgctgtttgctttagaattaacctgctggccgaccaggtcaccaaagtaactctgggccggttacacttcagcgaaaccacagcaaataacatgagaaagaaggggaagccaaaccctgaccagaggtactggtgtggtgtgtatgcctttgctggggcgggggggggcgcggtgggggcgggtagctggttatgctacctgacagcccagggcccccagaggcccctctgatcctcttggccttcctcagctgccctcctcccttctctgactctgctgttgccgcatttcatttacccttagacatcgtccttcttccatccccacaccctgctatgcctcctctcctgcccagcctctgggcggcttgttttcattgtccccgtgatccttctgcaggggtccccaaccacccggatctaatgcctgatgatttgggatggagctgatgtaacaataatagaaataaagtgcacgataaatgtaatgcacttgaatcttcctgaaaccatgtcccttccaccccagtccgtggaaaaattgtcttccatgaaatggccctttgtgccaagaaggttggagacagctgcatttagagggaccatgtgttcatgtcttgtgacgggctgagggctgaggattgatggcatttctcgaattctgtgtgctggtcactactttaatgccctgagctccaaagctctgctgtagccttttttgattgaaaatacatttacattaatgatttacacctgtgattctcagaatgtgctcccaggaccggcagagatggtatcacctggacacttattagagatgcaagttgttgggactcactaaaaacctacctgatcaaaaacttggggtgaggtccagcagtctgtattttaacaagcccccctccaagtgatttgatgcatgctcaagtttaggaaccacgattttagaacaaaggt

SEQ ID NO: 58220 - DNA, 873 bp, Bovine  19866881198358
  misc_feature (1)..(1): n is a, c, g, or t
nttaaacaagtgtgccagcagagtggacagagctttagaagaggctgagtctctactgtgattttctgccatcatatcaagtcagaggatgaaggcagcgaaagagatggattaccgttccccctgtttgacgagtgtgtgaaaattaaagaaaataagcctccgtcaatggacactgtccgaagagcttgcatttagtttgtttccttcttcaaatcaactgccaattagttttacactcatccatctctcttacttcctctctccttccttaagttccataagtttagcacttttctatagttcatggtcttatatggtgataggcggtcttgatgtggagtcagttccccagtgtgatcggggctgtggaggccagctatagtaacaactctttggggccaggaaatccattgactcataaggtgctattttcgcattccttgtttttctgactgtaaccatactccagaaacatacttggactgaagcttaagtatgacgcataaaagcccacagaatgatctgaacacaggataattttagttcgtaccactagtcatgctagtaagcaaggacattttccactttagattctcattacttctcagtttgaacggaaaacaaacttctgatgagtctgtggtttgtgtactaggttattttgctcagaaaactggaaggctttgttgggcgagagaggtaagaccttagttagaataggcagactaaaccaaacaaaagatctggtttgttggggccaatagccaactgttggcatcctcagggaccctcaaataatgattcatgaaaggccaggaaattcttttcttcttcttcacctctcctaattgtgtgtgtgcatgtatgtgt

SEQ ID NO: 58221 - DNA, 1568 bp, Bovine  19866881273694
  misc_feature (1)..(1): n is a, c, g, or t
ncttagataaatagaagtcgtttcctgctgtgtgcctcccagtatctgcgtggttccctgaaacccaactacttaggtagtaaatatcctgatcttacagatgggaagcaggtacgcaaggataatgaacttcttgtcagctggaatttgaacccaaatcatcttactattcatcatcacatcattctaccaaaccaattaatgtctgtctctgactttttcaggctcactgagcctcaagttctttaacttcaaaatggggataaataataccaactttgtgtgattttgtgagaattcaatgagataatgaatgtaaaggtcataaacatataataaagtgtcatacaggttattttcaaaaatcaggtccaggaaattccccagtggtccagtggttaggacgcccgaactctcactacatgggttcaatccctggtcggggagctaagatcctacaagctgtgtggcacagccaaaaatgaaaaatatatatatataaaattgttttataaaagtcaggaccatcagcctgaagcctaagctatatcaagcttaaaaagaaataaggctgagaggacttccctggtgatccagtgggtaagatctacctgccaatgcaggggacatgcgttcaactcctggtctgtgaagattccatatgtgacagagcaactgagcctgtgtgccacaactactgagccaacatgctgtaaccactgaagactgagcaccgagagcctgaggtctgcaaaatgtgcagccttgcctttaacctagcaggctgaaatatgagcaggcttaactaaaccagtaaatacctatcaaataaagcctctccattcttaataccttcaacctgcatagtgtgtttactgaagcttctgtgcttgccctctatgcttctagattcatcattacctcgacgcatgggattcacaagagatgaatgttgccgtaaacttttgcaatgcctagatttttttcctcttaactgaaaaggttaggatacgctctattttttcagcaattaaaataatgatatcccttggttattaaaatatataaatgtcagctcactcgtaactcagagccatcagtaataatgccttccttttctataaaattaactaacagctctgtgcctatggtatgtggcctctgagagctgccccctaagctttttgctctggacttaccctttaaaccaggagactgtaatctttggagccatggcttattgacatttgctaataccaaccattttacgattccctcggccaccatgtaacaaatgtgttttccacttgaggagccatgtaagcacacatcgattttgccatgtaacatcagctttcattccaatctccaaagccctgagccctgagtaaattccagaaacaatgggagatagtggggggcttacacacccgcactggaggcttctactgcaatagcgccgatctattatttgctggatttccataatctgaatagaactgatggttgtatcaatcccgaatgagaagaaatagagaaagtaaacgcttctgcagaggaaaagagca

SEQ ID NO: 58222 - DNA, 805 bp, Bovine  19866881391368
  misc_feature (1)..(1): n is a, c, g, or t
ntgccaggtgtccttaaattattgtcatcaaaaaatgtgagaatcttgcctataaaaggcaaaattgtgaagagggcaacagtttatttcaccataacctaaattaaaattaaatttttttctttcatcatctttcttcttcatgaagatttgacctccagagccaaaattactgttctttgctacatttatctcagctatgtattaagaactcaatattatctaacttgcactgtagtatttctaattattaacccttccaaggttgaatttttacgagaattttttttaaccagaatgaaacactaattgatagaatgtccagtaatttagcaaatttctgaacatctactgtatcaaggtgggatatcaactcattagagaaaagatatattttggagataaatggatagccatctggaggaaagtgaaattagactcctacctcagatgatagacacacatagtaagagattcaagattaattatcatgaagttgaaagtaaaaatcataaaacttcagactaaaatacagtaaaatttttaattattcttcacattaagccttgtctgctactgctaagttgctttagtcctgtccgactctgtgtgaccccatggacggcagcccaccaggctcccccgtccctgggattctccaggcaagaacactggagtgggttgccatttccttctctgatatatggaaagtgaaaagtgaaagtgaagtcgctcagtcgtttccgactcttagcgaccctatggactgcagcctaccaggatcctccgtccagggattttccag

SEQ ID NO: 58223 - DNA, 1005 bp, Bovine  19866881622496
  misc_feature (1)..(1): n is a, c, g, or t
nggaacagaatcttaaatttttgacacttcatgcttatttttctatatcatattaacttttctttttatgcatctaagatttcttctgtagtatttcaacttcaatcatagacatagcatttacattttagaagaaagactgacaggtacacaattagtgtactcattaaaaaattatgtgttctgatttaagaaagaaacaaaatcttctctctattctccttccaaaaagtctctctgactctgcttagaatgtccgtaatagttattcttctaggcttaaggccagttataatcctaatagttatctggaaaaaactaacaaaccacattcactcactaatatttcagaaagaatagtttattaaatcatcagtattgattacttaataaaagcctagggaagtaagacagagaacctggcaattttgttggacctggtggctaaaattgaggactccagaaagaaacaagacaccagaaaattcatggaactctctatttaagcactgtgcattttactatatatgttataccttggtttacaaatattaaaaaaatttgggacaatagtatctacctcatggggttgttgcttggattaagtgagctggcatatttagtgctcaatgaagttagcaatcatgattgtcatcactgttactgttactttaaagaggaagatgaaaagtatgagacaaaagagagaagctacattccacataaaagacttgattaaagtgaagtatcacaaaagggcaactctgaagcctgtggacagagtgaaagcatggtgcttgaaacttgaaagttagtgccagtatgatctggtaagtttaggctcttgaagttggatcacctgagttttgatggtacctaccactcactaggtgtgtgaccctgccttgggctgtatatgaaaagtagggataatactatctatttcatacatctttttttttgtgcaaagaaaatgcatttggagtgaaggagaaaataatgaat

SEQ ID NO: 58224 - DNA, 1018 bp, Bovine  19866881648715
  misc_feature (1)..(1): n is a, c, g, or t
ncccacttgcactcttgtttcaacccttttcatttgttttatacagtttttgtttggggaaaagaaatagttaaaaaaaattttttttgtaagtttgaaaatcactgacctacagttgagcaaacagatcattagattttttttcttaaatattgtatctaagtaagtattctcttatagtaagaaataattgctctttggttttgccctcctgataatgagagctaatttatattacttactttagaatatttagttgagctttaagagtaaagcaataattcgtttggttggttttttttaacgtctaaaaaccatcttcaatcaacatcacagatttgtaaatttgccctactatttggattccaaccatttacatagtgtggtagagctgagaaaacatgagtttaggagtgagatagaagtggcttgaaatgatcttggtatttcctatgtgtgatcttaggtgagtcatttctttcagtttcttatctgcaaaacagggataatgatccttatttcacaggttacaagttatataaacaaattatgcaaaagcaccttgcacacagcatgaccaaataaatgtaaattttctttgcctcaaatattaatatattcaaaaaactcttttcacagatttgttataacaacttttctgatttcaactttttcatgctaaagaagtctagtattctatttattacttagtaaagttaaatttttacttatattttgctttctatacatgcctaattgaaagttatctcaaatcagtaagtagctaaagttctttctaaaaccataattcaaagagattaaataatagatgatttatatcttaaaaatacacattgcctatcttgattcatacctgacttttggaaactggcataaacctcatgaatgggcagagtgccctaaaaacagatggatgtgaatgctcaggtgccagaaatccttgtgaccacaattcatgtagaatgttaaaatggtgacagttctttaatggtccttt

SEQ ID NO: 58225 - DNA, 1201 bp, Bovine  19866881754705
  misc_feature (1)..(1): n is a, c, g, or t
ntgtcatgaggcagcatgaaaagtcctatggagaaacatggcagaaaaaactgactgtggtttagagaggatatcagtatcattttccacagtctgttttagtgtgaactaaatcacaaattaatatatcaagcaaactttttttttaaaggagaaaaaaatgaagccagttgccaagaaatttttttaaaaatattctgagaaatagtaattccagtgaggatggagagaagtaggtagattcaggagattttggatgatgaactgtgtgatggatttcctgcaggaggagggagtcagagatgatgcttgggaacctgtgttggactgctaagtggacatcatatgaccttgtgacccactctaaataatacagttataattctactctaaggctttctactcattacagtaaattgtaatatgacatttattatggtttagaaccatagaatgtcattcctatcttcgtgatttctgacttgtttttataaaacaaatttagaagtaaaggaaaatctgtaccagaattagaaaatttagaagagcctttgtcaggagacttttttttttttgctttgtttttattttgtgctttatttatttttaaacatttttttagtgaaaaatttcaaacatacaaaatgagagagaagagtaataaaatttatatacttcatatacagtaataaaatttatatacttcactcagattccacagttatcaattcatctccgatcttgttttagttaaataaactatcctccctcacagctgaatttttgtagctttgttgagatataattgacacatagcactatgtcagtttaaggtgtacaatatgatgatttggtataaacttatattgcaaaataattgccctaataaggtttatcaacaaacccatcacctcatataattacattttgtgtgtgtgtatggtgagaacatttaagatttactctcttatcaactttcaattatataatatagtattgttcgttatggagaaggcactggccacccactccagtactcctgcctggaaaatcccatggacggaggagcctggtgggctgcagtccatggggtcgctaagagtcggacacgactgagcgactttttccctttcatgcattggagaaggaaatggcaacccactctagtgttcttgccggagaatcccagggacgagggagc

SEQ ID NO: 58226 - DNA, 1835 bp, Bovine  19866880439304
  misc_feature (1)..(1): n is a, c, g, or t
ntgatctggttactggggaagaaaaagcagttttaggagagacgcagaaatgactgtgtgacattttagcaaaagtccttaaaaggttaaatctctctttttttaatacttttaattttcacatattttcaaattaatgtgattactttcttcctcacagtggcccatttggattagtgaattccattgataatgattttaggcaactgtggcctcataaattttattaggaaaaaatatcctccaggtgtgtttaagcaatagtcttttaatattagtgttttgaagggcatatattatcaaagtccatcctgaaatataaaaaaatgaccatgaaaattgtcatcggagtacttaatccatcccagaagtcatatgctttgtcaagctaaaatgataagaatgtatcccccttcagtctcttcagtaaatggcactattgaggaaaggattgtcccgttatgtcatagttactgaggcagtgaaatgagctttatcactcatatctaattgaaagagtcagtgaactgtattaaaattaaatctacatttcttttcttgaataggcaaagcaagaacagaaaatcacctcagctaattccaattttggaaaaaaaaaggtcgctacttctttactgtttcaaaaatttcaaaggtcaaataaaatttagataaaatttttaaagtgatgaatcaagtgcatgatttgggaactcttttaaacaccaaatggaatctatacaataatgtaacagatatggtttgcaattttctttttcctttttttgaattaatcaaactccacaggataagatttcatttcaaaacctctcatgatgttaagtctggtcatgtatctaaatttggataataggataaaaacacaagtgccatatttcagctgcttggaatttcttcaatagatagcaagagtgttttcctactttaatttgttctttcctggtttgtttgttcttttttctgttcttttttctatttgttcttttttctgcttcctttatataaatgtgatgacaagtgctggattctttatatttcccatatagaaaaccagtagagtctaagtacataaacaaggaagatgaaaaagcctaggtatctggggactccaaaaaggaaaattgccacaccagtcctgacatgcatatctttagactttacatgaaacagaaaaaaatacttgtaagagctcttatttatgacactttgaccttggtgctcccacaaaatctaattccaacagatacagtggcatatcagttcaattcagtcactcagtcatgtctgactccttgtgatcccatggactgcagcttgcaaagcttccctgtccttcaccaacccccaaagcttgctcaaactcatatccatccagttgttgatgccatccaaccatcttatcctatgttgtccccttttcctccagccttcaatctttcccagccatcagggttttctctaatgagtcaattcttcgcatcaagtggccaaagtgttagagcttcagcatcagtcctttcaatgaatattcaggactgatttcctttaggattgactggtttatttatgagtgaatgtttgataaattacaggctttattttgagagagctaatactgacctcggagaaggcagtggcaccccactccagtactcttgcctggaaaatcccatggatggaggagcctggtaggctgctgtccatggggtcgctacgagtcagacatgactgaagggacttagcagcagcagcagcagcaatagtgacctacccatggtaataaatatattcagttcaatgtaataggctataca

SEQ ID NO: 58227 - DNA, 2082 bp, Bovine  19866880589917
  misc_feature (1)..(1): n is a, c, g, or t
ntgaagtgattgctctgtggcatcatcaagaatagtggttggatcaacctaaggcagtgatactcactgtatcaacaaagggatctcttctcctttaaacttatcttaggaagtaatagttgcctgcatatgaagttgtctatgttggaatatcaatggttgtggctaaatgctattacagggaatctcatgaacacgagttacaacatacacatatttttgaatgttgtatgtggtgcagattctgtattgaaatgagatgagaaacactgaaggttgatcttcacatattttgatcaccaaaaattttgttagtgctcataaaggtttacaattattgcttaattattatttagttatattaagctgtctgttgggttctatagtatacttctcatatggactcacttagccattgcacctcagcaaattcttgtaattattttaatgttgcaggaaaagaagcagatacaggccaaggttaaataacaaagttcatacagtggccctgatatgtgacatctgatctatgagaactgaaagacagcactggttctattcttctctacttttcacacagtcttgagttatattttgagataatgataaacatagggtcctccccatgttagaacagtgctcagcacacagtgatatatatatgtagatgaaattagcaatatgaatgtaattaaatctttattctggtttacaaatgaattgattccatacgaaggtttgaaaataaagttgatcattatctagcaataggaagtgaccggtttttcagtactttgctcattaccaaccaaaaatacgtttaaaatgttgcatctattttgagaatacacttttcaaggctatttttccactctactccgttaagcttatttgaatatataaattgactttcaggtatgcaaatatacatcacaatctgaattaagtttcatatataatcaggctggtagtcaaattgttgtttttattgtatatttactttatttttgctaacagggtgtattgcttaaggaaagacatttttggtgtttacaaatgtgtctgggtctgcatacttggaaaatattgcaaccaaactcagttcgattagtcaatatgtattgatcacaatcagagtaattcaggcatagtgattataaattgcagcaataacatttctttttataataataaattataactttaattagaaagtctctcgtgtgatgtttttcatttgtgataatctctttatcgttatttagagcacttgtatacaatcaatactctattagtgcttcaagctaacagtttgtgtgaatcaaaaactcaaaagctgtcctcaatgaaaaaatcattatcattattacctttttatttagtatttattgtagaccacatttcttcattgagcttagacatcatttatattagttttaatggtctcactaaattacttacaaaaaatgagaaaaaattctatttactaaatttgaaaggctattatttttaagcttgaggttctctgtatattgaattaattaaagttgtatttgaagaaaagatataagaaaatttgagccaaattacttcaaagatttctaaagcatgaaaaattcttttatatcctttttacattttgcatagatattattccaaatcactgaataattgaagaaattaacaatagatattgtcttccattttcccatgcaacgttccatattttggtttcatttttcaggatgatatgttgcaaagaaaagacaattgcctattcaaacacatccacattctccattgcttaataaatattagaaactccattcaattttgaaatatagatattattaaaggaaataatcagtttacattcccaccaacaacagggtttccttttctccatatcctctccagtatttattgtttgtagatttttttgatgaatggccattctgactggtgtgaggtgatacctcattatagttttgatttgcatttatctaataagtgatgttgaacactttttcatgtgtttatcagccattcgtatgtctttttttgttttttttgcctttcaca

SEQ ID NO: 58228 - DNA, 1378 bp, Bovine  19866880624140
  misc_feature (1)..(1): n is a, c, g, or t
ntgatacataagcccttctatgaattgctctcttttctagattctgcttcatttcttgctattttacaccataaacttcttataaagtgcttcacacaatatatcatttcacaattctattattttatttatacagtttcttttgacagaaatggtggccccacatttttctttaacatttatagttctgtttcttcaagtcttggttcatttctgctcttgatacttgcctaagaatagtggggtagtttaaatgtttatcttctaggctccatagcattccgaatgtttatcatcttttgtatacaaatattacacaaaaataaatgatttttttttatatctcccccccatcaggatgtaaactacttgaggagtgcacctttactttttatcctttaagcattactatttcaccatgcttgtcatgtaatcaatgaaataaatttaaaaaatacattgaactaaattctctaatgaaacctgaatcacaggaaagatgactggatctgtctaggggattatgtttagcgtgaagatagttaatttatattttaatcagatgttggaggagtccttctgaaggggggatcttagtttaaatttttttgagcaaattgtcacattcaaggcgataatactgatggtgataactttttctaaacagttgttccaggctaagcttgtaacatattgaataattactgcttataatagccatgccacaatgcgtatcccattatcaagggaggaagtagaaaaacagaaatttaagaaaatcagtgcacgatgaacacataatgaatgataacaacaaaaatcaaagtactgcagtctgatcccacacactgaacatatccatagagcttcagtgttggagtttacagagtttagcattctagtttaaatttaacaaagattcatagcatgattaaaatgacttgaagaagtcagataagaacagtgctcccagtgatgagagaaaaactgaaatgaacagttccagcagttctcaagtctacatccaaaaattattataactgagaactgtatgctttggtagaatatagaatgaattgttataacaatgtaaacaaaagaggaggttttcatggtctaatggagctcttggtggaaaatgggctttgttttggaagtcagtgtgaagtaagaatattagaagtgtgagccttatttataatttggtttcatagcaaccccacgtccaaggagcgtaggctgcacccggcgttggagggctaagaggagctaaccacgttcaaggtcaggaggggtaacctcatccaaggtaaggagcagcagctgcgttttgttggagcagccatgaagagatagcccacgtccaaggtaagagaaa

SEQ ID NO: 58229 - DNA, 1759 bp, Bovine  19866880677759
  misc_feature (1)..(1): n is a, c, g, or t
nattgcatttagaaatagaaatacattttactttacttagactagaatataaatatacttacttagaatagaaatacatttttcaagatatccaacaaatcatttggtctgtgttttgtaagtgctttcaatttttttaaaattttatatgaaatcttgtacataatgcaaagagataaaagatttaaagatgaaaaagaaaaagaagcagtaactacagattgaaaaaaaaggaaaaatgaggcatcaaaatattttcctaaatctaaaattttaatgaataaagctaagtttctgtgaagtttgttgttattacacaaattacaatagtaaattcatgttatggtatgataccaggtgactattattaaagatctggcactaaatacctttattgttatccattcctcccacagcatacagagttccgactgtagattttctaggtttagttcttggactttgcattaaagttcttctttctggcaacagatggtacttcattgcttctagaatcagcttttgacattccagatcattcttaaataatgcatggttttctaggtctgccaatatctgtgaataatacacatatatgttaataatggtttttatagtatgagcatatctaattagaaaattagaagcttagtagatttgatattgcccttctactgacagggatgaaaaatataataagaattgattacattgagaaataaatatgagttaaatgcatggctaagaaaaacagaaaagatattatttttgattccatattatttattattattttgccattcagagtacaaagaaacttctaaatatcaattttcagtttcatttcctttttataaaatctgttcataaatcaaatatagttgcctttttggccataaacatttctggtaaagtagattaaaaagaaaattctgcaacaaattaagccctaacaaacctatcataaatagtcacatactttaatgtattccaagccactttaaagcttttaaagttttaaaagatataataatttaatatgttcaagcatagttttaatccctttcaaattaaaacaattcaataaaaatagaaaattatactcataacacctttttaattatgcaaaccattgaaaaactttacttcaggcaaagtaatagtttccaatagtgaaactgaaataaataaataaaaattaccaaaaatccagcacctgagggagaccagaattttatattattccttttttttttaactatgaaatgttatcatctccacaaattctttttctgtacatttttttgaatatatcgaaaatatcttttactttcttctttctctgcccttctttgcattttctttttccttgactctttcagtatcgtattctctttttttgttcatgaaacctattttatttcaagagagttaaatatgttgcatggatttagaaaatttataagtagaaacattaacattgactcactgaccttttcttctcattggtaagacactgtaccacattggtacataaatgtttactgagtgaataagttaataaatgatgacaacatataatttagaaattgatttgaaccataatcaaataaatttatttaactactgcaataaataaattactgtttgaagtataagagagaacacaaaaccttatcagttacttgattattctccaatttaaaaaaagatgcttatgaagttaaaaaaaaaagtattagagttactaggtgctttg

SEQ ID NO: 58230 - DNA, 1486 bp, Bovine  19866880739151
  misc_feature (1)..(1): n is a, c, g, or t
nactgtgtttatactataacattttaatacacatatggctaactatggacagggaagcctggtgtcctgtagtccatggggttgcaaagagttggtatgactgagtgactgagcaacaacaatggcaaactatgaatttatgaattactaaattaatacctcacaattttacctatcaggcaataatgtttttactaattgaataattttttaaatgtcctagtaaagtcttcatttttatttatcaaattattttgcatttttgtttaaaagtaccttttgcagtttcaatatattattatatatttcatatactatcataccattagcctttggaacatataacacattagacataatatgtgcttaatgaatgctgctgaatcaattattaaaagaaattcaatatttgtttctttttatttactctaatcactagaagtaaagaattacacagtacatgaaattaccacatagaagtcaagcattttggaatttattgaatctcattttataaacttattattttaaaattccacttcgtaacatctttaaattcaacacatgtgaagaaatgtatcatttaaattcaatgaagcaaagataacacagtagcttcccaattcactttaatctccataagcctgggattttttttttttttcttttgctgactctctgaattgttttcttcttcttttatttatttattttctattccattaattctggtggatttaaaatattgttaacctatttagtctcatttctttatataaaaattatgtatatgaagaagttagaaagagtagttatatttcaagctgaaatatacgttttaattcttgaagcattcattaactactaaaatgtttattgctagcattcagacatcacaccctaaaataaaaaatcctgccaagggttctttgtttaactaaggttacaatagatacatcggaaagattagttactatgaaaatctattaactcatgaatgtagataatttaaagccctatttagttttaatttttttttttctgactgccttgcacagaatgcgtaacattcacaaatgagggcatttgtatattatctgtccccaatatcacattccatgtaaaattaagaagttaccacctaaatataactctttgggaagtattaacttggttataaaagtaaacaactcttagttgatcatttcacatatctgttatgtgacattgtatagaatctgtatgtcatagatcattgagttaagatacttgaataaaggtaaaaattttacatgtagtgagcttaatattcctagaaaagaaatttatcttttatcactgatcactttttttgttaaatttgggacagctatgtggaaagcttagcaaaagattttcattcttcaacaaaacaaaacaacaaagaaaacaacaacaaagaaacaaaaaaatcacctgaacttagttaacgaggaaatattccaca

SEQ ID NO: 58231 - DNA, 1813 bp, Bovine  19866880762178
  misc_feature (1)..(1): n is a, c, g, or t
nttgatctgtcatttcaatcagggcctttcaaatgaatgttcatagtattgccgtagtttcctgacaaaactttagcaaaaaatccagaggatgctcaaacatttacttctatacacatgtatgaaacttttcaaataataattcaattcaatatgaatattaaatacacctaactgaaagttcctacaactcaaacatttaaccaaaaagcaaaattgaatgtgaatccaaacatttttttggtggaaaattttctcttttatcaatcattttctaaacacattcaagtaaatgtgtatttgctccaggtgaattctgatccttctgaatcttttagacagtacttctacaatgtctagtaatttgcctctacataataatactcaacaaaagcatttgagcagctaattattatccaatctgaaagttcaaaccttaaagattcctgtactttagtttgttttttgttcatatttgttttatttaatgaaatatatctatggacatcactagaaaatatttaaaatgagtggaagtggaaattaaaatagttctgtaatgatattttcttcctgagaattaatgaaataatgccatatagcactaatattaagtaagttcaaatattgtatcaagggcttatacttcttaaatcaaataaacgttacctgttcaaagtctattaatcttgattacagtgtatgtatagtttagttagtagcaattaaatgactgcttactaaacatttgtaggtgttaattgatccttaggggccattttaatccactctacctctttggtttatttgaccttcttgatttgaatcaggcaataaatgtatatgcttgagaagttctcatacatgtatttctgagttaactgcatgagtgtaggaattcaaaatgacactaaaagagtgcattcatattaacgatgacctaggtttcatttaattatctttttattctcaaaattgtgtgcagaatttccaaggtgaaaattcactattttgacatttgaagtaggtgctctggttatagtcacactgctcagaacaatatgatatgatttaagaaacccttactttttttatgaaaatatttctaaaaatatataaatatacagacaatatattaatatagataaagagaaaactgtttcactaatattttatatttccaaaagtgttaagatttacatggaataaagtaatttcattattttttatgtcatatttaaatttttcattatcactgtgaggtaacctgtgcatcctctgaaattttttaccattaaggacaaaataaaatagtaggattatagtatatacaatacatacttagaacttatagagtttatgatgtcaatataaacaagaaaatagtaacacaaaatttaaatattagcttcaacatagttgcaattaccttttcctgcttacgagacctgaaaattagagccaacacagaatgaactttgtggatgatattttattgtgttgtgtctcatatggacataggctcttggaaatttttataagattttctcacgtcaggtttctatacctccatctttctatctggatgaacatctgccaagcttttatatttgctttcatcttcattgttatcagatctgtaaaaaatctagagtcaaaaggcctgtcttaagaaactaagattccatttgccttattgcaattttgactaggtatataacataaattatagatggtttacaaatgctccttttcccagaagtccatgtgttaagtaacatgtgaacatataagagttgagagcaacatttca

SEQ ID NO: 58232 - DNA, 1710 bp, Bovine  19866880801828
  misc_feature (1)..(1): n is a, c, g, or t
ntctgtatgtgtgtatttgtgttttcgatggatgggtaggcatttgaacaatggtgatcagaacactaggcagaggagaaaggaaaatacagggagctggatattttcaaaatctcaatgcccaaatagaactgaagtaattaaataatagagtgttatccttggccacaaaaaccgattaacttatgtgatacagtttaaactgtagcctgggaaaccaaccaggataattattattgcatttctatggaaacactaattttctctccccagaaaacaactttacaagaaaactttaagaattcagtctgtttgtcaactggggattcatgaataattttggatttgtgtaaggactgaactgaactgagggataatgtacaatcatttacctcaaattgaaaattgtgcatattttacctaaatttttatgcatttggaactaaagttgtatactttacttacattcattcttgattctttcttctctatcaaattttattaaatatacaatatgctctatgttcattgcattgctgttagcacaaacaaacacaaaaggggaaaacatacaaaacactaactcaaagttaaacagtagctgaacttgcaaagagcaaaccagcctggaaacatttatagaaaacataattaaatcctatattgtaatttagagagcctaaggtttttgccatgagtctgtagtattgacagagaaatgttcaggaattaaaaattttagaaggtctttcattttaaaaccagcttcttaaaattcaggtggatatccaagcaaaagatctacatgtacccatagaattaatattggacactgtcagaagttctataataacttcattgtaagcttattcatggttgactggaaattattttaattgtggcatgacagtactaccaagttttttttttttattattatcttggaaaaaacacatttaaattaatgtgaaatattggaaattatatcagggtaccactggaggcagagaaataatctagaataaaattgcctattgactctttctggtagatagcataggctaagaagggcacaaaggacttgtgactaggtcaactcctaactcatttcactccagaattataattttaaaataaataaataaattagaggtatagctagacttacatgatatcatgtatcttagcataacttttttcagttaactccagtgtattctaggaaagggtctcagaagggaaaatagtagagagctgtgagaaataaatgttggaattattttttgtttgttttgctacatttatcataagaatatttattcaagtggaacccagaagtctttccaaatagctttttatactgacaggtaattgacttcaactggcagagaaaataactggcaaaattctaggtaaaggaggttgaatgtctgcagtataacctgatcactggtgttatttggaacttctgaactataacagtcttctgcaactcaacaaaatgcagttgaaattaataaggtaccaaagaaatgcatgttcagcagcttaattaacttaaagtggatgaatcaaatcccaaataaagagcagatgctccagtatacctagggatgaatatattatagattctgaaaaatgaccacactttcacatttctaaatgtccaaggaactgaaaatcaaggtagctcaagtatgacaatagttt

SEQ ID NO: 58233 - DNA, 1281 bp, Bovine  19866881149092
  misc_feature (1)..(1): n is a, c, g, or t
nctgagttttccaaatttgctggcatattgagtgcagcactttcacagcatcatctttcaggatttgaaatagctcagttggaattccatcacctccactagatttgtttgtagtgatgctttctgaggcctacttgacttcacattccaggatgtctggctttaggtgagtgatcacaccattgtgattatctttgtcgttaagatcgtttctgtaacctggagttacactcttcattaaaatgtttttgatcatgtctatatactattttctactatttacaccctaaatggcttacttaagtctgtatccttatgcttcacacaactgttatagagtaggtgtccaatagaggcttgttaattttgcttcataaagatctttaaaaaaaataaatctctcattgccgtatgatttaaactgactaaattggtaattttactcttacttaacatgtttttaaaatgtgcttcaattttctaccacctcttgagaatgcaaagcttgagtgtaaattcacagtgcagacagtaaaaagcacagctggtaaaccacagggcaaatttgcaaacccttttgttgcctgatttagttccgttaattactgtttattttgaataattatgctatagtctgtattttaaaaaacgtttttgtctgaacaaattgatagaaatatttatcaatgtctttagctaatgctttaattttccctgaataatcactgtggaatgcaaaatttaaaacactggtctccataataggagttgatatatgcttagccttctctttaattttttttccttatctttgttttgatgaaacaatgaatgttagtggtaaacctgggaattctgattaccatctgtctgatgcacctgctaaggccttatttcaactgatgctgaggtgctattgaacaaaggcattgcttctaacataaaaataaatctaaaaaattctagttataataagttcaaataacttgcctttgccaagtttattttcccctaaacacaaagataaaaagaataaaatctaagggaaaatattatggtctctaaaaccttacactcttcttagaattttatttacacagtatttattgctgcaaggtgcatttctttcccagtgttaatgaacaatgaattaaaagatgaatgctttcttgttagtgactgtagtaggaataggaaaacacctcaatattcaacctgtcattcttattagataacttcccacctcttcccagtctattatcttcttcttaatatggttca

SEQ ID NO: 58234 - DNA, 1082 bp, Bovine  19866881439352
  misc_feature (1)..(1): n is a, c, g, or t
ntttctatcaatcagcatattttagtgatatatccatggcattgtacatatcaatagttcattctttttttaaaaaaatttcttaatagcaatctgtttatccagtttcatgctgatgaacatctgggatatgtccagttttagctattttaaataaaacttctgtgagcagttgtgcacaaatatttttttgtgatcactgcactttcatgtataagagacacataaaccaatgttataaggcatatgattttccaaaaatgtgagtggaaagcatcacaaaaatatctccttgtgtcttgaggacaatacaaatatatgagcaaataaatcacaaaaacgtgctgttttcactatggctgatcactactaaacctatttacttgtttgtgatttttattctactataatgatttttattctactaatatcaaccttttcatgatccaacatcacaattattttagtaggagcaaatataataattactgccctatattccctgtacatgctaatcataacacaacaaggaaaatacactcaccatatcaacaatatttcaccttccttcacaaaagaaaatgcactcatatcactacacattctacctctattacttctatacctaaacccaatgacatgggttctactctaatgacatgtcacatgttgggtagcaacttggacttttggagattttttttttttttgcatagtaaatatactgaaattattggaagtatttgtatttaatgacaaaaattttgaagaattttatgttagttctgtttcacactcaggtagttttgatagcttgacttttaaagaatccttttaagatcatgaagcattaacacatttcagaaatactaatgtagacctgaagataatgatctacacacataatgatatacctgtcaagagatgattaataccaagagcaaaattcatgaataaataccatggggaataagcacatttaatttactctatcacacttgagtcatattaactatgcatattacccaaggaatccaaccatacattctgagagagataggggtaatgattccaatgatgag

SEQ ID NO: 58235 - DNA, 1933 bp, Bovine  19866881595113
  misc_feature (1)..(1): n is a, c, g, or t
naggcagaagaggacggggaggcagacgaagaagaggaggcagaagaggaaggcttcttccagaaagtgctcactccgccccttctcttggcttttgagcaggcggctctggctaggtccccagtgctcgaagctgctactgccgtcctgttgcaggcagctgcccccggccgggctgccggccgacggcgacgggtggctgaagagtttccagcggagtcgcaggatgtgcttcacatcgaagtcttttcgcccagagcctgacataattgacgcaaggaaggagaagggacctcagctgatgcaggagtagacgggttggggaggcaggccaacggagccccgggttggaggaggaggcgggaggctccctctgcaccccgggaacagacgggaccgggcggctgcgcgccctgccaggcgacgatcggagcgcgaacagaagagccctgcggctcagctgcggtcaggacctcaggacccgcgtgtggggaactcaacggcctggtgcacaggcaggaactggacgcagaggactgagaatccccgatctccttgcggggtcccgaggtgaccgcggtgagggacagccctgatgccggagacgcgcgagggagggaggtctgcgcactcagagctctcgaggcgaaggcagctggatacacttccctagcatgcacggatggcagagcctcagtcgagaagctgttggctcccctatccttgcagcttagagttcagtgcctggagattgcagagagaaagatccccaagtcgcggaagaagcacacaccccctcagccttctcgatgcacctgcgcccctgtccctgctctctaggaagatgctctgagagctgcgggtatctctgagaaagtccaatgccttctgcaaggcgagaaggggtggttttatctagtcagtttgtaaaagagagagagagaggaaaaaaaaaaaaatccagcaaatacaggagggcaaaaggaaagcccgcgccgtgaagctgtcaaggtcctcacagtacaattttctctctgcctcggcgcctcctccttcccagtaagtgacgcagatgtgcattgaggcctatacggagagatggagggagggagggaaggcttcaatcttctttatgcaagtgagcctgatgctcttattgtccccttgtgtgggtcctgtcacctttttttattctccttcctcactacattactatgtagcaataaaagtaaagcaaacaggcaatatggtttagcatcagtaagcaccaaatgtgaatcatggcagcgtaaacttgggctgccatcgctttgcaggttgcaggttaatggcttgaattatttaataaagcgcatcctttaacctttagccttagtttctctgtaatgagaagaaagaaacaggatgctggcgttaaagtgtgacgatgccaccattctgacaattacattgtgattctgccattaacgcactcaggcagtgctttcaccctgggggccagaggcacacggtagaaatttgaagatgggcatctgagcacaggggacgagttgtgcaaaatcagtgcatttaatgagttgccgtagaatgaaagctgttctccgtgtaaaccaagaagtggaataaaatgataaagtgtaatttcaaggcataaccttctagtacaaaaatcgtgatatgaaatgtatggaagaggttagggggaaaaaactgaagatacccaaaggctactattctgcagaaatctcttgtttgaagaagaaaagatgtgtttttccttatatttagaatgagaagatttatgatcctttctagctatgaccacgaagaaatatttcagcttttcctttaatgagcctttaaaatagaaccgaaatcatttttgcctacgtcaaacagatcgagagaagttgcagtttccctaactcaacaa

SEQ ID NO: 58236 - DNA, 1106 bp, Bovine  19866881704448
  misc_feature (1)..(1): n is a, c, g, or t
naaaattattgaactctataattgttgaagcttatctcagttaattcttccaaggaagtttacctattcactcttaaatgtttaatgagattataaaaatagctacacacggttctttcaaacctaaaagactctccagactcaaggaaattgtttaaatcattttaaagtacacttaccccatctctactggatgcagaactagacagctaataattaactgtgacttcttgagacagttgaacctccttagtttctctgaggctacccaaacttcagaattcaagaaaatattatcattggatgaccctttaagaatctcactgctcattcattctttctccttttctgagatgtgtttatttttagccttctacaaaggaaaaccttagagatcagctagttggctagctaaatagacacctcttatctcttagatacagagatacctcttagtctttcttttctgtatcattgtttacttgatctctactgttgttagtcatttcttacattgtgtatatattttaaaaaaggtacacactttctattatgactaacccccaatattgtgcaatattatgatgcaaattattagctcatctagcacatttctataacaactggaaatttatcaaccttgaggtaggtatggatatattaatatgagcaaaggccagagtggcagaggtaaccaaaaggcagctttgtatctggtctgccctctacaaagcagagccaaatctgggtcattatattcagcaggaagctttgaaacaccttccaacctttctgttgcacaacgataagtgtcttttgacctagtttttcgctcgaggaatgcaaggctgccaagaagccatagaggctgtaagtgttggatctatgtctttatgtttgtagaaggattcctaaaatgattcttccctttctaggaaacagtagtgtgattacattatttggctcttgcttggaaagtcagcaatcttttatatcattatatcaagctgcttgcaatttgaaatcaaacaagatggtcttaaagccccctcagcttcactaaaatttaaacagcctacttcttgactcgaagccctttgatctcg

SEQ ID NO: 58237 - DNA, 1095 bp, Bovine  19866880367850
  misc_feature (1)..(1): n is a, c, g, or t
ntaaaacttagttatttaatgtttctattttaaaacaccaacacagatgtttggcctctctgccttgaaactctatgcttttgtaaaaaaatgttcagaatgttatgttaaatccccacaagtattgtaacaagaatataaatattaataaatcccaagttggtaaataagtaattcattaaaataaaagtatcacatatgaactcatttataaccaaaagagcctctctataatagaacaaagacaagatctaattttatgaaatactgaattacaaaacattaagagctcattagtgcaggtgcatttggaagcagcagcaacaacaaacccaagcttcccccgacagaatatgattattccaatgaaaaggagtatttttctagcccaagggtacctggctattctgtaatcaattactaattggtttatgctaaaattaagtttagataaagccttctaatttagttcttcagttaattcagttcagtcgctcagtcatgtccaactctttacaaccccatgaacccagttaattacagcacataaaatacaaatggaaaaaagcctcccaaaatagttttttcagttttatcaccaggtatagggaaccaggatattatctaagtttaggacttcttgtaaccttgatctcttaatcaaattcttttgttctctgcaatgacagtaccaaaggaactgaaacaaaggaacagaagtagcaaaagacttgtgatttttatggcaaatgaattatgtcttactcttctcataaagtttcaataattccttcctacaaaaatgagaatactccttctgttataaaaaacccttgttgtatgttttagataatttaattatgcttatgtgtatgcgtgtgtttcaagcagagaaaagtttaaatggaagtcaaaactcttctaatctatatatgtcagagataaccattactaaggatttagtgtaaatatccttctagattttcattataatatacatacctacatacatataattttaggtcaaaatagaattatatctaccttatgtacccctggtggctcagatgggaaagaatctgcctgcagtgagag

SEQ ID NO: 58238 - DNA, 1487 bp, Bovine  19866880657590
  misc_feature (1)..(1): n is a, c, g, or t
nttcataaggcaaatacatgtcattgcttctatgtcctctattctgtaaaagtgtgtcttggagccccaggttagatatgagtaagactatagatataccagctcttcataagctgtaaagtactatgcaggtgtgggttactgctattgtttaactcttcagcctatgggaaacccctcttaaaaatcccatggacacctgtatacccatttaatgataatgtttgactcccacatttacaaggaaatctagctctacttttttgtgacttgggtcattctgtctttttcaaccagagagcagaagaaaagaaacatagcggagtattagaaaatgctactggcacgtttgaccagagcatttacaggtatttcaggtcaataatttgttgtaactggcgacttgaaggtgatagagccagagataagtatcaataaatgcagtgaaatgttagcagtgagaagtgtgtatctcagtgctttgctgctgtctccttggatttgttacatggctccattcaaggcctgttggagctcagaaaaaagaaagactaagtttcgtgttcttgttatattttttaaatgtatttccacttttactgacataggtatttaatagatgaactattaaaacatcttccatgttttttgaagcttgtgtgaagtgacagattttgattttgttttggtttggtttggtttttaggataaacttcctgatgaccaatatcaggagaagacagcgatggacctggcagctgagcagctacgcctttggcccactctgagcaaatcgactcagcaggagctggtgcagcgtgaggaaagcactgtctttagtcaggccattcactttgcaaacctcatggtcaatctgctggttccgctggattcaagtaaaaacaagctcctaagagcgtcagccccaggagattgggagagtgggagcaacagcatcgtcacaaacaggtaccgaaatgtgggcacacacagacaccctgtccttcttggtttagcaaaacatacgaagtatttggggtaaatggtgctatacacatttcaaaaattaaccattgtcctcaccttcagacttgctcagcttttctctattaaagacgttgactacatccaactattcttaaatacctcccataccctcttctcttttatgacctctgactttttaaatgtctcgcgcattactgatctagccctttcagttactttctgccacagcaacttgcagaaagcactgtgggaaagtactaatggactctgattaaagtgattatttgtttcttggcccgccttttcctcatcttaccccttgcatttgcctgtaatcgtgtccccaaccattccttgttctaacactttccctagtggctcagatggtaaagaaactgcctacagtgcaggagacccaggtttgatccctgggtcacaaagatcccctggagaagggaatggcttcccactccagtatc

SEQ ID NO: 58239 - DNA, 716 bp, Bovine  19866880856962
  misc_feature (1)..(1): n is a, c, g, or t
ncctgatgcaaagagctgactcattggaagggaccctgattctgggaaagactgaagggaggagaatgggacgacggaggatgagatgattggatggcatcaccaactcaatgggcatgagtttgagcaggctttgggagttggtgatagataaggaggcttggtgtgttatagtccatggggttgcaaagagtcagacacaactgagagactgaactgaactgaactgagcgactatagcactatttaagaagtccaaaattagccactacatttggggaaaatcttattcacagagcaagtgaggatgtgatgaaacagtgagcccttgtttattattgcttagccacctggagtggaattttgccaggctttcagtccaaataaagcagccgaggtttccatggtgtgggtttaaattgagcggattggtgccttgttttgaaacttggttgaaaaaaaacgccagtagtgactgaagagtgttaacagaaaacttaaagattgtcatcagttatgtaatgaatatatgaaatgatgattaaacatttgcaatatgtgcttttatacatacacacacacacacacacggtctgatttgatcctcatgctaatcctatgatgcataactggaattcttatccccatttaactcaggaggaaatagagaacatagctaataaggggtagaataggtttgaacttaagctatttca

SEQ ID NO: 58240 - DNA, 835 bp, Bovine  19866880900745
  misc_feature (1)..(1): n is a, c, g, or t
nctggcatgctgcgattcatggggtcgcaaagagtcggacacgattgagcgactgaactgaactgatagcttattaacaatgttgtgatagtttcaggtgtacagcaaaaggactcagccatacagcaataatatgttcacactggaaattttgctaagtgagatcttactttaagtgtctttgtctcgtgccaaaaaataagggggtgaagggaaacttttggaggtgatgtatttgtggcacagactgtggttttaccaatgcatgctgctgttgctgcttagtcacttcagtcgggtccgactcagtgcgagtccatggacggtagtccccccaggcttctctgtccatgaaattctccaggcaagaatactggagtgggtagccattcttttctccagggagtctttctgacccagggatggagcccccatctcctgtattgcagacagattctttacccttggaatcctgagggaagccctgtatgtcaatcatacctcaattaaatgtttcatagctcttttcgtgcctagcgcagccatggctcagggtcccaagaagcacctgaaacccgtagcagctccaaaacattggatgctggataaactgactggtgtgtttgcccctcgtccatctaccggcccccacaagctaagggaatgtctccccctaatcattttcctaaggaatagacttaagtatgccctaactggagatgaagtaaagaagatgtgcatgcagcgtttcattaagatcgatggcaaagtccgcacagatataacctaccctgctggttttatggatgtcattagcattgataagactagagag

SEQ ID NO: 58241 - DNA, 604 bp, Bovine  19866881055759
  misc_feature (1)..(1): n is a, c, g, or t
nttcggttgtgcaggtttaatgccgcgtgagcgattggcatctagctccagagacaccgtctcaagggagcagaagtctttaataatgctttggctgagatagatacttcagaatcaaagataacacagagaggaactaagtgcatcccattcagaatgatgttttgatactaactgaattcttcctaatatttaaaatggtttcaaccatccacgtgctggcagaccccttggttttacgtttgtagttactgtacagaacatctctggtgtgtgtgaatgcttgtcctaatcagacctttgccttaataaacagcaatatgatcattcctagaaattacacatgaaaaaagtttttaaaatgtatttttgtgatgtgctatgttgagagggaacaaaatatttataattttcaaacattcttacctaaatattgtacaatgtaatatgctgaactttcttaattttttggctaattttctaagatatgttaaaactgttttgtatggttcttgtttgttttagtcaaatggagtcgataagaaaataaaaaaatatgggaagagcatacattttaagctgtctgatttaacggaacaggagg

SEQ ID NO: 58242 - DNA, 1514 bp, Bovine  19866881154578
  misc_feature (1)..(1): n is a, c, g, or t
nctggccaaatttaaaaacacttagttgaaaatctatgcttgagaaatgaataaagattcaaagtattcatgttgctcctcaaattgttttcgtttagattctcactagttgagagctcttttacctcagaagggcacaatttaaaacaaaacaaaatcctgtgtttctaaaaacaaaaggataaaagtgcagagacagtaagcttatttcaagatatttccagcactgacatgtaactcacactgcaaccataattataaagtaaaatcataatagaggttgcaaaaatatcactagattttactataattaagaaaacatttactaataacaataaaaggaataattttcaggaacttttttattgaagttgatttataacattctgctagtttcaggtgtacagcccagtaatccaggtacatatacatgtggaggggggtctaatatattctttttcagatttttttcccttttagattactacaaaatactgagtatagttccctgtgctgcacagaaggtccttgttagtcatctgtcttcaatatagtagtatatagatgttcattccaaactcctaatttatcctttcctccccccttcccctttggcaaccataaatttgtttccaatgtggaaatttatttcctatagatattatttcattcttctttatggccaggtaatattccattgtgatatatatatatcttctttatccattcactgtaaatagtgctgcagtgaagagatgcatgtatctcttttaattatagctttctccagatatatgcccaggtgtgagattgttggatatggcaattctatttttagttttttaaggaacctctatactgttccgcaaagtggctgcaccaatttacattcccaccaccagtgtaggagagttcaattttaaggtacatttagatttctagaaggaatattaaaaaaattagtaaaaatggttaccttgagggtagataactagtgtgggccagggtatagatgatacttacttttcactctcctaaatgctcttttgaaaattatgaattttatatcatgtatatataggaggtattcaaaaaggttttttttggtttatattttttaaatgataggcttcatcttttcatcttcttagaattgcatgtattcgaattccaagaatccccactaactaacactggagatttagtatctttctgcaagaccatcgaaattctaaatcatctgaagatatttttaaaatatcagtgcagtgcttccctggcggtccagtggttaagagtcggccctgcaatgcaggggatactggttccatccctgatctgggaagatcccacacactgcacagcaactaagcctgttcgccacaaatactgagtctgcactctatagcccaacagctgcaactacgaaagcctgggtacccccagaacccatgttctgcaagaagaaaagccactgcaatgagaagcctgtgcaccacaagaagagggtagcc

SEQ ID NO: 58243 - DNA, 976 bp, Bovine  19866881254509
  misc_feature (1)..(1): n is a, c, g, or t
naaaaatcttttggtcttggtctgcaatcaaactagttttccccccactgttacttgtttcttatatatccttgtagagttcataaatttttttcttcctttttcttttacacagaagcacactgtatgtagtcttagatacattgttttgttttgtttttttttttcacttaagttacctgggagatcttttcatatcactacacagtaagttcctcattgttcttaatgttttatggatataccataggttaacctgtgattgggagtttttacttgggtaaagtcccaaataattttaaaatctgaaagactattgggccttataagaggactgtattctttatttttctatatttctacagtgtgttgcagtttttaagcactttatattcttgaagtagatcctcacaaaaactctataggtgttacaaggtaaataaagaaaggaaatgtctatttaggattttttgactgtggtgcaagattcaataaaagctccaccgtgcccttttcatgtgctgtactactggcaaatagagagtttacttgagaaacacagcctgctttgtagggctgataaaagtcttcattacttcatttataaccatttgtgtacttccttcactttacttacttccttaaaaccagcagagcatgtagaaaaggatctccacataaatgaagctttgagaaacaaaacaaatgtagacagaagatatgcaaatgttatttttatagattaattttttaaattgtaaaaaatcctaactgaaatatatgtatgcagaaaaaagtgacttgcttaatggaattggaagtattcattgaggtgaatgtggctcctttaagcaattgaatgggtagggctgagaaaaacagggaagattttaacctgggatttaacatctaataagattctgtgttagaggaagtaccgctttagctgtagaatttgacctgtttagaatgcaca

SEQ ID NO: 58244 - DNA, 993 bp, Bovine  19866881426175
  misc_feature (1)..(1): n is a, c, g, or t
ntctggttgtgtgaaatgtaagccttctaatctgtaggtccagacctgctctggccacatgagagtactgatctcttagggatttcttcattattccaactgccaaaggactctaaactagaatgctgtggtctcagagctctgcctcttccgtagaagagccacaggcatttcctccagaaacagatgccaagagacactgtctaaaggctctatcaaacacatgggtctaccaattaggattctagtcaaactgaattttttctccctagatttataagtatctctggataggaagacacttccttaggcaaaatcccctatctaggaccaccagtggttgttaaacaaggacacaattcctactccagccactataagttaacttccctatcgcatctaaaaaagacagtcctgaattccctggcagtccagtggttaggactccacactttcattgctgagggcccgggttcaactctggtcaaggaactaacatcccacaagccacacagtgcagccaaaaaggaaaagaaattgagaaaagatagtcttaaagaaacccaacttcaacatacattattttccttaccaaccaaccatctatcacaagtaaacctttctgagccctcaatttattgagcccttttttatttttaaaaattttaaattgtattgcatgatatccaaagtcccttcaacctctaacctcttgtcatttagtattgttatttttttgttatttcagtaattggcggggaagctgcctagaaatccttaatgtttctgatatgtttaatttcttctgtctccagttggttaaagtggcatttgatgaagaagtgagcccagaagtcgtagaggtcttcaggaagcagctgatgaagctccgttaccctcagtccgtttttaccacctttgcctttgctgctggacaaactgccccacagatcatttcacccaagcagaaggagaagaacacttcctttcggt

SEQ ID NO: 58245 - DNA, 977 bp, Bovine  19866881613740
  misc_feature (1)..(1): n is a, c, g, or t
ntactttgagatgattatttagtgcttgcatattggttcagcaaaatgagtattctcatatgttgaaatccaacagagtaaacggatcacatcagttagttagtgtatgatcatgtctgtgtgcagtttgcttttgttctttatacaaatacactgttaagggttccagattttgattactttattctaagttagcatagactcaggggcattttatccatacccttctccttgagggtgtcaagattctttaaagatacacttggaactataaaagaatatttcctaaattgaccttttaatttagttatttagtgtaataacatagatacatacttaagtttaaaagttttttttttttgttatgcaataatacttattaaattctttttctagattgaatacctgcttaagaaacttacagaagctatgggagtaagttggcaacaagaacaatttgaaaattataaaatcaactttgatgacagtaaagatggcctttctgcgtgggaactgattgagcttgttggaaatggacagttcagcaaaggcatggatcggcagactgtgtccatggcaattaacgaggttttcaatgagctaatattagatgtgctgaaacaggtaagcatcctgtaacagtgtttctcctcacctttagaatttgacatgtttgaaataaaagatttttatcacaaagatgagcctaagtcacttatattttcacactaatttagaacaggaataacatttcttattttctcagtcttgtgttgggcttacattataaataattacagttaaacactgggaagttactattttgaaagaactgtttatatgatcacatttctgaacgtagtactttcgtgttatgccttcatctatactcattcatctgaaagatcccatggcacgctcttcagtgaagaaaacaggttgggaacagcaggtgtcttgtaatccctttcatgcaa

SEQ ID NO: 58246 - DNA, 1505 bp, Bovine  19866880473957
  misc_feature (1)..(1): n is a, c, g, or t
ngtttcacagtagtctggacccatcaccccaaaccttctggaattttctattcacctccatgttctggggcccctagggaatatttttggctgtgatcttcaccgagagaaaacaaacttgagaggtatatgtcacagccaatgagaaaggccctggatatcacagaccattaatgcttttacaaacaaaaccccaaagaaccctaaccccatttgatggaaatttggatgaaatcttgcctcacagactgttcaatggcaccccactccagtactcttgcctggaaaatcccatggatggaggagcctggtaggttgcagtccatggggtctcgaagagtcagacacgactgagcgacttcactttcacttttcacttccatgcactggagaaggaaatggcaacccactccagtgttcttgccagggacggggaagcctggtgggctgccgtctatggggtcgcacagagtcggacatgactgaagcaacttagcagcagcagcagcagcacagactgttcagtcccaactctggctgagaattaccagtctctgtacctttcactaagcttcacttcctgttgtctgtgctttgaaagaacagactttccccacctgttttccaaatatgaaacataataacattaaatgttctttttaaaagtacacatacccctcccttcaaaccaaggcttgctgagcccagcaggtctgaaccagagtgagcttaaagccttaccactgagttacatgggtcactgcaaagccatgctgaagaacttgcgcccaacctccaaggctagagaaaagacccaagttgaaccacctatgggtttatacccaaattacacaagaattgcacacacaagactgagtgcaggaattggtgttaatatagcaaagcacctctggcctcgtttagaagctagacttaggtcctgactcttgtagtaggtcttctgcacaagttttcctatcccatggctttctgctcaacagcgcatacatacttgagttcctactgcctcacagctaatccacaccccgtgtgcagagattcagggttaagagggctggattacaacagctctagcaagtgatcacccacttgtttagcaccagtcaggaacagaggaggggaaaaaacggggggaggggacttctctggggatgcagtggttgagacaggaacataggttcgatccatggttggggaactaagatcccacatgcctgagctgtgcagccataaaaagaaaaaaaggcctcagttagctctgaataaggaagtgcatttctacatgtccctcctctccctcaataatcttgtttactcaaactcccccagttcccacagcctcaagtagccatgtttcaaggacttggcttgtggggactgtgataagcgctaccagcagaatgggaggctgggccactctcacgcaactcttacctccgcttttgttgctctgtttctaggaggagaggaacgcacagtagcaa

SEQ ID NO: 58247 - DNA, 1690 bp, Bovine  19866880625800
  misc_feature (1)..(1): n is a, c, g, or t
ntgtaaagaattaagttattgtgcacctgtatattgtacagctttgttacccttttaaaagatggtctgaaagactactcagtggcatagaaaaatgtttttaatatgatgagttggggtggggagcaagttataagattgaatcatggtccatttcgatacaattatgttcgggcatctctggttgtgcaggtgattttcatctcttttcctgtattttcagaatttcttacagtgaatgcatattttacgtgagcacagaatctgagcacagagtcgttgaactaaggagagatcagggaaaaataacagtaagaccaaaagttggcatgggtgctgtgacgctcatactccaaatgtattgccagccttctagtagagagtagggaggcacagggtattttaagagcaatatgtttatactttctgatctagaagaattttttttttttggtgtgaatttcgccaataatccaggaaaaataaaagttaagctttgtagatttatttctactagtactaaacaaacacagtcctaaataaggtaaagctaaatgtccactagttgagtagtgattgagtgagtatgataccgggaatattatgcagccagtaaaaatcacgtttaggtagcctctgtagttaaatggtaaagtgtaattgcgctaaaattatgtctgcatataaaacagaagggaaggactacatacatatatatgtacagttgacttattgccgagttacgattgagagtattcacaaagactaagctgtgttactagtacaatgcgtgtacgataaagtggcaagtatgtgaagtatggattagtaagtttgggattgtccagatttgaaattccagctgtgaggatgctctcatttgcaaatgcttgggttggtgattgcttttcctgtgggctggtgtgttgcaagctagtgcttaccttccactgtggttcccccacccatgtgacttgcatcccgcctgaaggcagaggtggacatgggaggtcactccaagtggatggggtgggttggtcaggagtagagcttggaggagccccttgtcctgtccctgctcacatcacatataaagtgactccttcctttgtccagtcaaagggcctttcttctttcactttttacccctagctgtgctcctgaaacggatctttgctcaaatgagtattttgtaattctcacccatgtagggaaggatcgagcagagcattctgatcagggcagaaagcaggagggtcccacagagaactccagtggaagcagatgtatatagctgcctttttcttgtgagtcatgagattagcgctggaagggtccattttactgatagagccactgaggcccggggacaccttgtccagatcctgttattccttgggtcttaaaacccccgttgttcctcatgttcctaatccagacctctgtggtgtctcagcaccttctttctctctttctgtgagtcttctgcttggctctgtcatattcctctttttttccttttctagaaagaaaagtcaaaatcgaacagttccgcagcccgggaacctaatggctttccctctgatgcctcagccaattcctctctccttcttgaattccagggtgagttgcatccgcatgtctttcttgcaggaaaagaatatttagagacccatcagtaatccgaaga

SEQ ID NO: 58248 - DNA, 2165 bp, Bovine  19866880669141
  misc_feature (1)..(1): n is a, c, g, or t
ncttttagatgtggggagacagatttcaccttctgagagtccatgaaatgctggtctttaaagtcgaatgcccacaaatcagagcagcccctttgtgcctcagttttgagtataaaataagaacagttgatcttgccaagctttaagttttctctaaggagcaaaattagttgaacccaaatttaaaatctgaattttactcttctgtggtgctgccagtagagggcagtatttggacgctatgaagaaggaagtttggactttatattttggaatcctgcagagcgaagcatgtgggactgtttaatgctggagcttttaggagcccctatgttatgttctaaaagcccctcagtgattgacttctcagtgtctaaagttgtggtgtgacaggttaggatatactttccaaggatgaaaagacctctctaaaatcatttagttgctctaaaaactgaaggttggagggggaaacgatcatttaaattggtttggtgtattttcaaatgtaagggaaccaaaccataatagatatgaatcgggactcatttgtctggtcggggcagaggaaggagggcagaaaggtgtactttgttgggggttcatttttcagtgggagagggggcagtgaaatctcctgctggtgcttgagtttctgctgccccctagtgaatgttaaccatctattctagccctgagtcgatttggggatgtaagttagaagccccaaaccctaaatcacctgtggtctagttaatactgcatttgctttcagaagatgactgtgctctttaaaacggggtcgcactgcactggaacgttttgtcttctgtcgggttgactgaggctggcagctccttcttaacaagtcactgactgtggccgtgctcccgatgtgctgtacatgttatctccttgcaggtgaggatgacaagctgatcttatgtgacgagtgtaataaagccttccacctgttctgtctgaggccggccctctatgaagtaccagatggtgagtggcagtgcccagcttgccagcctgctactgccaggcgcaactcccgtggcaggtgagaatttcttcttcttttaaaaacaaataaattgataagtagctgttgtgcttgagcttcagttatttaaaccgaatgagctggggagctttaagttcatcttttgtgtgccgacccccttatttaaggaactgcagtgggtcggggagtggtgctcaaagggctctgatttaattttctcattgtggacatttctagttttcattaccagccatgttttatattttcttggtcatcccttcttttcaaataacatatctccctctgtcttttatttccactttgcccacttcttaatttctgatgacttctgcagccacctgctgctaaaagtcatgaaacttattactttccttacctgtacctactctcttccttccttggcgtggttagaatttgggtgtcagcttggacatcttcccctcccctgtctctgtattgccaaatgttatccattcagtgtctagatgtctgcaagtcagcctcctgctgtcataaggccctcctgcatcgctcatccggcttcctccagtggcttctcaactcgacctcatatcttcctccctcttctctttccagctttgtggtgataccagaatggtttacaaaggacagagatttgcttacatcactatcctcttgaaacaccgtggtcttcccactgcctctagaatgaagtccctggactaacttttgagactgttcttacacagcactagcttacgattttatgaactcttgttcccttcttgtgtgcttgttacaggctgtttattgggcatccttgcctctggtgttttcttcccagagggcctattccctggccccagaactcctgcctggctaaactgccttccgcctacctaaagttgcactgctttctggaagcatgcttattacatccttaggattatttctcctctgtgtaacagcttggcttctgatgtctataaagtggaatactggtgcatctcgccttttttgtcagtttctccccagctcgctgtcttccttgggattgttcctgccctgagaggagaggtggacgctgtgcccttcaccctcaccaagtgaggccggccacagggcctca

SEQ ID NO: 58249 - DNA, 1699 bp, Bovine  19866880754962
  misc_feature (1)..(1): n is a, c, g, or t
ngcggaaccgcggctgccctcccgtgcccgccctgccccgtaccagccggagacaccgggaccggggcaggtgaaggacagaaggtgtcaggaccttccaggacccgacccacctttccccacgagctggcctgaacctctcctttgtggggaatggccacctccacacatcacttcatcctctctcaaagcaaacctactttttttcatcactgcctttgctcaagtcagtctctcctcttcctagctcatcatagcccttctcaatctcagccttggggcttccctgctagtccgatggttaaggatctgcctgccagtgcaggcggcatgggttcaatctccgatccaggaagatgccatatacctcggagcaactaagcccttgcgctacaattgtggagcttgcacagctagagttcatgctctgtaacaagagaagccaccaccatgagaagcctgcacaccacgactgggagtagccccctctcactgcaactggagaaagcccgcgcagcaacgaagatccagcatagccaaggataaataaataagtaaatatgaatcttaaaaaaaaaagcacagccttcctaagtgtgcctcacacttcataccaccttgggggcctttgcacacatgaggcttgatgccttatctctaaattccttctctgcactgatctgctggcaaactcctactcaaccatcaaaacccatcccataagtcccctccttgagagtcattcctgcctccctaaggtaggagaggggttgccttcagctcctgcaacccccaaccccatcctggtcctcttgtttcacaatactcagcactcttgcccacctcctctttctttgatgggctgtctaaggcagaggcctcatgcacgccttctctgggtccctgacctccatcttaggctaatgaggactcggaatctccaagttcaagactagaggctccctccttttataaagaggccagaaggatcaggcctccagcataatccacctcctatacatacccacattctctctgtcattccctgtaacccagtcctgggccagagaccaaagagtgtcctggccatcacactttatcctgatcacagcaagtcatgtgaatgacaagagccccttaaagaggaggaaactgaggctaaaggttggggggcacacacttacccaaaccatactccaaccagcccaggccggtacccgggaggacacgcgggtggggaaaggtcagtgagtgcaagggcagaggctgtaccagctgcctgatcaggactgaagacactcgtgggcagggtcataccagttgtccccatgggggcagggagatgaccagctgagtgccgggggcaggacacagaaccggggcgtcggctccgtgacaaggctggtgtccaccggcggcctgcacagacaggatggcagctgcctgcccacggcgcccgccacccggcactgactgtccttggctgtggacacagcccagggacccacgtctgcagacaggactgggtgtcttagcagagcctcgcttctgcagacagctgagacccctcctcacagccctcccacaggaatgcgtgacttgggatggagactgtgtcatccaagaaacattccatgttttccttggtgtgtgctctgggaacgtggcaagaacggctgcccacacggccgtccacata

SEQ ID NO: 58250 - DNA, 1982 bp, Bovine  19866880819653
  misc_feature (1)..(1): n is a, c, g, or t
ncccagatgctgtccaaggctttgagtacatccagcttctctctctagctggggtgtaatcactgattgctcagggatcttttttattcctttcttaggtgtttatgaatttcctccctcttctctgctctccatacttaagagaagctgaagcctttgggctacagaattaagaagatcgagccatgttgcttggccagcctcagggaaagaatatcctaacagatttttgaaagtgttttctggaaagtcagagcagctcccgagaggctcaggtagaagtaaaggctagtaataagctcctgtagttgaggttctagggttcctttagtcctggttcagagagtgtcggccagagtgagccctggagctgcaagctccacagagctcagtgccgaggctccggggtcctctggggtcaggggttcccttgttccaaaacagccttcctgtgtccggccatactggtcagttgccaggaaaccctaggagcagatcatcatccctcatagtgtgtgaccagattcagacaagaatctgcttgatcctgttcttccgaaagggattaaggagaaactcaaatccactgtagagtctataaaggtatttcatgcctccaattagacgcgtctgagtcctgaataaataggaacttgcttcaatgtatttttgtgattttgtatgttgtcagttctgactgactttccctgcatctccacttcttttactcctcccaacagaggtgtgttttcctgggagtaactgggcatccatcctcttgttggatgagggttgtgccattttccaggcagactattaggtagtctcctgatctttaggaaatctgtgaaatgctttttcctccagctcaggagatctctgacgtcatccctttgttgtgtggactataaatactccacatgggttggcaccttttgacgggccccttcctgggcagtgcttccgctggtggtttcttcggccccttcgccctcttcctagcccctttcggcagccattgttgttgctgttgttcagttgccaagtcatgcccgactcttcgtgaccccatggactgcccacggcagccttccgtgtctctcaccatctcccagagtttgcccaagttcattcatgtccatcaagtcagtgtgatgccatccagccatctcatcctctgtcgccgtcttcttctgctttcagtctttcccaacatcagggtcttttccagtgagtcggttgttgtcatcaggtggccagagtattggagctttagcatcagttctttctaagagtattcaggggttgatttcctttaagactgactggtttgatcttcttgctttccaaggaactctcaagagtcctgacagccataacaggccccgaaccccattgccaactgaggtttacttctgggctcttagtgaatgaggtatcaaagaagactagttaaattcaggagataaactacgttcctttttctaatcttcaaatcagtgatttattgaagtgcccttacctttccgtatgggggctgaaaaacgggaaatctggattctcagacttagcttgttttctgcgacatcagccaagtcattgaagccctctgggctgcagtcttgccatctgtacaatgtagcgatcagatctttaagatctctctgtacctccttcgttcccgtcagatgttggctcagtctgtttttaatttcttggattcatgattacctaattttgaataagccatgtctctaggcctgtgtaacccagaacctgacttagataaataaggatacaggcacatagtgaaagaagcgaacatcagtagcaaagaattaatgtgaagtcacctgggaggagatgtggagagaggatggactctgggagcacaacatggaaccaagaggacaggctgggagccgggggacgagtgggagctttagctgggaaggctctggtgggcttcacggagccacgca

SEQ ID NO: 58251 - DNA, 1375 bp, Bovine  19866881004205
  misc_feature (1)..(1): n is a, c, g, or t
ngccaggaacaccagcgggaaggccagcagcagcccctgcgggagatgggggggtagggtgacagcggcaggcaggaaacaggcccttttgggggtgtcctgcccaggaagctgagtcagggcccaggagaaggggcccagtctcttgccaggggcccctatccctttcatctgccctctacaccgccaccagttctcctaaaactcacactgaccgccaagtccagcccctccccagaccggctgcacacgctggacaccgcttcctttttcatcctcacgtcctgtccctccctcttgaatgaactcatttgattcccctaacaagcctccctggcatgtaccctcggtaccacacagggacatcagaggtcactcggctggtgtggggctcaggacacgaacgcgggtctcccttatgctaaatctgtttctaatgcccatgtctgccgcctggggggcctcgggaagctggagggcaggtctgagaggttgtgtgtccagggacccagctcaggctggggtcacaccagaccgagaaggcaggcaggacactcacggaactgggctttggcggcggccttagcagcagacttggctgcagctgggacccctgctcctgtgggggagaggatgaggtttaaggacggcacccatggaggattcagagcaccctcactcaggcccacttattcacacggcttacctatgacaccaccggggcccaggccaatgccgggagccacgccgacaccgggaaccacaccgacgccaggaaccacgccaacgccgggagccacgccgactccagggcctaatcctgcaaaagcgagcagagccagtccttaaccgaatcctaaccaaggaggacagaagctgacggaaagagcagcgggctggggggtcaggaaccctggatccttgctccagctgggcacagacttgctgtgtgaccttgggcaagttactttctcttgatgggcctcagcttcttcatccctaataagaggtctgtgcaagatcaggagctcaacttttggagttccagggacccctttgagactctgagggtgatacaggcagactcatgcagcagctaaacaactgcaccaccgtgtagtaaagggagtttggcaagacaggcaggcctggcttcaaagctcagctcagccaccatttagctacgtgagtatgggcaagatacttaagctcctggagactcagtttccacatctgcaaaatgggtgcaacagaaccgatctcataaggctggtgtaaggattacctcagcaaacgctgaaagtgttagtagctcagtcatgcctgactctttgtgaccccatggactgtagcccaccaggctcctttggccatg

SEQ ID NO: 58252 - DNA, 1303 bp, Bovine  19866881033077
  misc_feature (1)..(1): n is a, c, g, or t
nctaagtcccctgtagcggaagtctggaatcctaacaactggatggcaagggaagtccctacagtttcagcttctggctggtcttttccggcctgtcctgttggttcctaaacctcggaacttcccaaatccactgtcttttattatttcccttccctccatcaccttgggggaggggcaagtgggaagtgagggcttaatgggtacgggtttctgcttgaggcaatgaaaacatttggagctgtatagtggtaatgcttgtgcattgctgtgaatgcacttggtgccactgaactgttctttaaaatggttaaaatggtaaattttatggttgtgtattttaccataataaaaaattaaaagaaaaacttaaagagtcagccacctaaggacctggagctgtgggaaacacatcccatgtacatagggttgtattctgtgtacaccggggcagaagtataactccaaggacatgacaacctcaaacagagtctccaaatcattttcactgaagtcactctgtgggagtcaagacaactggcagggcccagcccacagtgacttcacaagcactcagccaccatcaccaccagcccctgcccccacaaccctcaagaatgacacactcagctgccaacaagacatatttcaaatagtttaattttaaaaatatcctattcagtgctaaaatatgtcttcactcaccgttgtccatttccattttcttaaacttttttgaaacaaaaaataaaatcacaaggttcgatgaaacatgcagatttcgaagaaaagggaactttctagaaagtctgggctgaaggagtactgtggggatgagtactgtcagaacctcaaattctcgctggggcagagtctgcggcaggagagctggggaccatggcaggaggcagggggatactggaatgaaatgtccaggtggaaacagctgcgagtatgtgcgtgtttgtgtgtgttgggggaaaagggtggctacagtggggggacaaaggactgtcagcagccagagagcccacgagaggcaggacggcctcaggaatgggtccaagtgccaggatagcatgaagtctaggtgggacttttctgccgtcgtatggagttaagcccttcccttccctccagagtccactcaggcattctccaacagcagcctacagggtccctagccctatgggcaagtccatgaatctacagtctccgttcaagttcaagtaagccctcagcacgctcttctctgggagggtgccttccccctctctttcctcttgcagaagcaccagcagct

SEQ ID NO: 58253 - DNA, 1423 bp, Bovine  19866881128611
  misc_feature (1)..(1): n is a, c, g, or t
ntcctcctttctaccagggttacccctactcggcctcatggacagctccaatttcaccccaagaagcctttcccgatccccacctggtccgtgctgccccttctttctgacgtatctgccagtggcacttgtcacctgaactgaacttgcctcccctcctggctggggctaggtctaaagtccccgtgccgggctggcccagaactgctgggagagcggtgcggaccagcctcgccgtgacacacacgctcagactcccatcttggggttgctgaagccctgttaggtactcggctctctgagccaggaaagtgactcgcccagggtcactcagcttaggtgatggcacggcccctggaactgagctgccctgaccccctgtggccatttgctgcaccgggacctgacctacaccactcacggaccaggaccgtggtcttagatggaggttcggaagcaggttcacccagttcccgggccccagataggctcaaggggaaaaacactgtaagaagaaaaagaaagacttgcctggagccagtggcccggacaccacctgccagaacaaggggatggcatacaggatcttaggacacggccagtcctgcatacaaggtgaccgtgctctcactcgaacccagcgcccctctggccagtggctcatctgccctgtgggactgcgggttcccaacgcggttctcccgggagaaaccaggcaggggctagatctcagagctgatgctgaacacactccatcccaccagacagacgtgggaggcgccccaaacaggccagtgttgcttgagcggagcggcaatgaggtgacctctgactccttgccaggaggccacttagcggcagccgccggcacaccggagacacccaatccatcagcaccggccatgtgatgggccggcacccagccacggccgtgaggggagccattggcgggggggccagacgctgctcggggccctgcctcagagctgggagggggccgaggtggccagcccaagggagccaccttgctcggtgacaggctcagggtgctcaaagccagcttgagccccactccgctcgccatttcccaactgggcatggccgcaggcgggacccctcactactgacctttctgttccttctcctggaaatggcctaggttgtactttagaatccctgaggagccgtggaaaaattccagggccaagtggaatccttcctcgcagattctatcggtctagtgatggggtccaggtgtcaggatgtttaaaaaactttccaagttttcattctaatatgaaacgcacattgtgaaccactgggaaagacgctggggactccccagtcccgcctgtctccacacgttggcccccagcaccacagactcagcacccccaggtctgaatgcaccttcctctcccca

SEQ ID NO: 58254 - DNA, 543 bp, Bovine  19866881148190
  misc_feature (1)..(1): n is a, c, g, or t
nagcctctctccaggacagggggcggtgaaactgggccaggcctgtgggtcagagccggcctggcccggactatttttgtactgtctggggggtgggggctgatgaaatcccagctgcatttcaccaaaacactttccccttaagcccagggctccatgtggcgcaaattcattgtcacttaactcatcactcagggctctgagccgcacccctccccctcccaagaaagacaaaaacacacagtctctggcccgggggaggtgggcgtgaggggctgcgacaggcagactggctgtcttgacctgagctgcccccggcaggcaggcagccggcccctccatcttcctgcctctttccctcaaaggcaggctgcatggcagggcaggccccccacgagggactgggcgggggggtgtaggtgggagcctggggtcactgagctctcctttttgccccacgcagcgggtgctggaaacaggaaactgatgagctctgcaggcaggagcccctactcccccaccggggccgggggtcaccccgtg

SEQ ID NO: 58255 - DNA, 1131 bp, Bovine  19866881258212
  misc_feature (1)..(1): n is a, c, g, or t
ntgggttgagaatggggagtgttgtgggaagaggccagacgggtgtcacagggtgagcggggccacccactggggcagacccaggggaaaccgtaaggggtctctcaggagcctcagcgaccccagcctgactgactgacacccctaccctatggggcagttgtggggggggcaggaatttgccctggtgacctccccaggcacactcctgtcaccatggtgatcaatcgcaaaacaagcagcttgattgtccctgctcagcggggcaggtgaaaccccggccacgtgaccgatactgggccaggtgcggttaagggacacccgccgcctccctgtcttaacccattcaacacctcagtgtccctgccgctgcaggccccacccccctggctctccgtccccagccagatgggtggtgacgaaatccccggagcactgactgggagtcacaacccgggaaggacttcgggctgggccaagcggggactgtgtgactgcagctgggtcacttcaccccccgcgtctccgttctctcagcaggaaaatgagggtgctaacaccctcccccttcccagggaggttggaccactggaacagagatgcggaagtggaaagccatcgcagacatagagcatcctcgttctgtaccccgcttcttccctttcatcagcctcagtatatcaggggcttgccactttccccaagagggagaccctcaccaaccgccagcgagtccactggcccattcctgacatgctggaagggcggggtgggcagccctcaggtggacccctccccaacaccctatcagcagagtccctccgaggtagcaaaaacccctctcctggccccacagctttttctggagtgttcaagtgaaaacctcaagccaactggtttttctgcttgccagccagccaggccctaaccagccacgtgatacagctggggcccagaactcagaaacatctcaagactgcttctgcccctagacccagggctccagccggaggcagatggtcaagggctgagggccaggttcaggttacccagttagacagcaggctggggtgggggtgggggactcacttgaaaccacctttgaaatgttacgcttctgaatcactaaca

SEQ ID NO: 58256 - DNA, 2273 bp, Bovine  19866881261050
  misc_feature (1)..(1): n is a, c, g, or t
ntgggcagcaagagtccataaactttttattatgaggccaataataaatatcttgggctctgcaggccattagatgttatggcctactcaatgctaccattacaagtcaaaagccaccacaaataaggaaaccagcgggcacaggcgtgttcaaattaaactatatggacacccagggaacaggcctggggtgtagttggtcaagccctggaaaagaggaatgggttaagaaaaggcaataacggggagaagggggaatctaataaaatgagaggctttgcatggaccaatgacagacgggtccctgaagtattttcaactcaattctggggaaatatatcccataacagctaagaggcaatcaaagaaagaaagaaagaaagaagacgttacctttttgttgttttgattttcttccacacttacctccttgctgtctgtcacaggaacccacttaaatatcctaagggacgtgtcacccacagtaacccacttcttctccctaaaacaaagacacttctcagaaccgataaaataaaacagattttctgatcagaacttgtgcttttctacttctcaccagatcatgtggtcaaccttaaatgcttcataaactgtcaaatcctactttacttttcaaggcaaaatcaccctttccagaaacacttcactatcgaattcctttagccccgaaccttccacctgtcacctctgctcacatggtgtaccaaaaccatttttttcctcacagactacagtagtatggagtatgagcacattttcaaactcaggtatccatcttgcataacttcttcatctccccaaaattaattcaatcccactgattttataaagtcctattataaaataggatatgtaaggataaaggatatataagatagtgtccctatcttgggaactcatagcaatgaaagataagtaaagaaatcattgtaatatgtgaaggcggcaagaaagaaggctgaaagaccaggatattccatggaaggcaaaactccgtgaaactctgggtgcgtcagttgctcagtgtgtccgactctttgtgacccccatggactgtagcccactaggctcctccacccatgggattctccaagcaagaatactggaatgggttgccatttccttctccaggggaatcttcccaacccagggatcaaacctctgtctcccacattgcaggcagactcttttaccatctgagccaccagggaaactgggttgaaacacaattccaataaccaaggaacaggacacgatgctttcagctaacagaactgagccttacactggcttttggaagaggtgaaggccaagcgccatggaaagatggctttaagatttcattttacagaagagggtacttttgagataggccttaaaaaaaatgagtagctgttctcccctccccacacatacctggggaggggaaggcaagtaacattcttgaataagggtgcagattacggatggccagagttggggagcctgaagtgtgacttctgaatgtttcaagtcccaatgtgagaacagaaaagccaaaaagtaactgctgttattgatgatgctattcagcaaatgacatcacaaaaatgtagagactgtgatgtaacagaaagaagaatgaactaaagacttagaaactggaattaattcctggacaagccactcatttattcctcatttattcaacaagtattgaatctacaagaccctctgctaggtcctgagcacacagggaacaagatacacagtcctgactctcctgagcctgaattccatctgtaaacagacaccacacaactcatttcagttagaaacctgattattagatttaaccacatcaaactgccatttctgcagataaaaaaggcaaatatagaggtcttatggttcaacctaatgccactgtggaaagctccaaataggacaggacctgatttagactggggctcttgaaaggtttcagtgaggaagcaactgcagagcagagccaggcactaactaggcaagtggaaggagtgggtaaaggaaggttgctgggcggaaggaaaggtagtgtggctccaactgaaagatggccagcatcttgcgaaagagggcagtttgagccagtctagtgaggaatgaaggatcatttttggtctttatcctaaggacaaaaagagatcaatgaagcattatttcctaagcaaaagagtgctaaaaaattcacacttgagaaaaatacaaagtaacgaatggatcaaggg

SEQ ID NO: 58257 - DNA, 659 bp, Bovine  19866881355306
  misc_feature (1)..(1): n is a, c, g, or t
ntgccctcttccttacctgctacaaggggatatagcagcatatgtattgctcatgtggttggtgttgatggtggacagcacctggcctttcagattccaaatgaggacggtcgtgtcactggaagcagtcatgatgaacttccctggaggtgagggggcgtaacacgagctgaggtcaatgacctgatcaactgacttacgaaggcctctgctgcccttcacatcatgctcccctcccgcaccaagggtcgccacagataaggatatgactgaagactggcgattacctgcctctcctagggacttgctgtggctcccaggaactccaggggagcccaaacaaggtcccttttgtcacaccagaactgagcatacctctcaggctgcattcacttattcagtgaatataacagtccattccctcttgcctgggccaagctccatcctctgaatgcctctcacctgtgtcagcgatgccaatgttgacaatgggtgccttgtgctttttaggaaagtcctccggggtggccgtgaaagtatagcctccatcgtctcgtttcatcatcttgaagacacgggagggtgtctccattagcgagccagacgatgaatgctctagaaacagggagcagacaagtctctcactccttcagacacag

SEQ ID NO: 58258 - DNA, 1769 bp, Bovine  19866881444060
  misc_feature (1)..(1): n is a, c, g, or t
ncattggagttttcctcagttactcccttttttacgccccctctgccctactacacgattaccatccactccaccagaaaattctttgggttacatggcagtaaatcctgaatctgttactcctctccatctcttctgataccatcctggtcctagccactgttacctacagggccactataatgtagcttcctcattggccttcctgcttcctggcttgcctcgttaagtcactcttgtacatagcagagtgatctctgaaaaatgtaaagcagatcacatcattcccaagttagaaaccctcccaagactcctcctcacactcggaatgaaatccaaaattctcactgtggcatacaaggccctgtgtaatctgggttcttcctcctgtgatcttgttaccactctcccagccgtgccactcctccaaccaagccaagttatttccagcttcaaaggggacttgtgcctctgttcttccctctgcttagaagcatttttttcccttctcttggcagacttgccatgcttgtcataattcagttctcagtttcagttacactttagagaccctccctgaccactcaatctgaagtagccctttccaccagccatatcacattagctcattatattttagtttgcattacttaatgctatctgaaattattttgtttggatatttgttggcttcaggggtgtcaggtgggtaatagaagtaggtgagttgggccacagttgtctgggtgaaagacagtaggaaaaggtgggaactgaagtcatctctagaggacctttgtcctgggtcaggggcaggtgtggctgtgacttaatattctggaatccagtagaagttgcccatttcagagaagccagaagttggcaatttattttcaaaagaaaaatgttaagcactgtaggaaccaaacaaaacactaatggcaggatgcagcccagcagtctctcattggcagcttttgggttgctcattaagccactggaatgtgacaggaatccttgtcagatttgctccatgtcccacacacactgcctggaatagagtaagcgctcaataagtgttgaattcgaaccaggcagctaacagaaatgtcagtaccctctctgcactgtggtttgacgttcctaaggatagacttctgactgataatactgtgcacctgggtcctggtgaagcttcgctttctggttgtcagaagaatgagactaagacactttgcattcctgcttggctctggctttgctctgattgcatatccaggaggggcagtgatcgcaggatgttgagttactgaagtcagaagtctttggttccagtttcagccggggcacttgttgaacagacacatcacttcacctctctgagtttgtttcctcatctgtaaaatggaaataaatctggcccttcatgccttgccagggctatgaatttctaataaaatgaatgaaaacactatagaagagtcattacagagatgtcctggggacagaaaacagctcctctcagtaaagatgaggctgcttccctgtcagcatggcgaaagttacctggatattcatgtagcccagaggccactatgtttttttgataaaaaatccttgtgtgtgaaggcagtgttaatactttaatattactatttcaatttatgtgggtttgaaagttttcagaataaaaatttggggaaatttaaaaaaatggtatccagattatttttatcagtcattaaaaataaaaatcttaaagcgcaaaa

SEQ ID NO: 58259 - DNA, 555 bp, Bovine  19866881880673
  misc_feature (1)..(1): n is a, c, g, or t
natatggtggtaaggaggtacctcttaaactcttgaaaagagagatacataatgagttagtctaggatttgaaaatatcttatcatttatagcgtacacaacctttggagaattgctttgacattttgtctgcaattataagtacagcagtggctggaacataaaaacttcaattggcatttgccctgaggggttatttgagagtgagtgacttattttggtaacctaaaatctgaaataggattcagaggcagctgactcaatatccttctgataggctttttttttttcccctccttttttaaaaaaacaaaaacaaaacataagtcaaatgaataactagaaaagaattatataaacttaaaagtacctcatgataggggttgttgtagaaatttcagttttaaacttttaaaattaatctaatttgaataactagtcaattaaaaattgtgttgtcagaggaacttcgttcctaaataataagcattaggattgtactgctgttctatggggggagaaggcaatggcagccgactccagtgttcttgcctg

SEQ ID NO: 58260 - DNA, 1353 bp, Bovine  19866880367254
  misc_feature (1)..(1): n is a, c, g, or t
ngtcgtttgtgacaacagagagtggcaaagctatgctgacaaagtggggccgtcccgtcgagtgtggtgcgttcacgtgactgaaggtggaggggcaccgggtgggagcctgcatccgcaggagggaccctgcgtctccttttgttttcagcactgtgtacgtgttggcctgtgtaggagcccctgggtttccggggaccacgccaagagtgtcccctggagggcctgcctcccaacctgctgtaggtacgaagcacagccttcattttcactgctccgtgcacgtgagatccgctggacgagtgaccccgccgtgcctcccacaccggacccaggctggcttcgaggcggccgtcagcggcgtccatcagattccacccctggggctcccctttcccggattcttcactgacttcctctgagctgacttctatttctttttcctgcatcataaaagtggattggaaaagcaaatatcatctccaagattcactaatgttactttaatgaaatgcacattacctttctaagtgttctgcctcaaagtggtgaagccagagaacgagaagccgcgtggaaaccgcagctccttccaccctctcacctccttttggacgtggcagattggattctggctgagtgtgtcagaattccgacttggccgcggtcaagctctcgctgctactgcaaaggcagtaataacaaccagctgagtgaagaatggagcccagactcggaaaacaagagagccgccccttggtgaggttgtgctgcttggtgatccccttgttgggggagcctgggtgggaggcgtgggctttgggggggtccaggcacgactgcgtctgaggtcactctgctccccaactcggaggtgccaagccagccgtcagccagtttgcgaaggtaagactgaagtggaggtgatacagagttcaaaagtgaggtctgcagtgcagtttgccctgtgattgtctcaaaggactgaagcagccacagaacaaagtcaggccaagtttaatactctaaagccagtatatttcttaataagaatatgagtggaaaacaaaacagcttagccaatattcccccaactgccgtaatccctcaacttggggagaaattccaccccaaaaataacaacaaagaaaatccaaacgaataggaaccaaagtcagcctcccccccacccccaggtggcatttccgtggcagacgggccttgggtgaagagccagttggggaacgcaaggcgtgcgggcccctgtggccacgtggccccagagcaaggggtgtgttggcgtctccgtgaggcctcctgcctcttgccccacccacggggcacccggatggg

SEQ ID NO: 58261 - DNA, 1374 bp, Bovine  19866880697030
  misc_feature (1)..(1): n is a, c, g, or t
nctacctttagtatctgctggacttttgtttctaccgaatgagcctggaattttttcaatggctccattctatatgaattagcaaactttagttttgccagggcactcttccattctttacctagatcagcaattgagtcatcaaatggaggctctacatactgaacatcatgaattgattctctcagtctttctcttaaaatttgtgcatactgaaaggagaaggagagagacagagaaagatgattttttaaattccataatgaaaatttcagttttaaggacccgggggcagtgggacagggctgacacaaagcttggaaatccattacaacagacatctatgattatgtggttgcgaaatcctagagtcaagcctggctatcaacttgaacaaggagaaaaaatatacaggtgtcatctatctatctataaacacaaaaacacacaaacacaaatttgaatgcataggtttagaacatccatggaagatgcggaagaactagaaacaagagtggcctttgagagggcaactgagtggctgaaagacagttacgtaaggaaaacctttcaggctccctgctctggcactggggcttccctggtggctcagcgggtaaagtgtctgcctacaatgtgggagacccgggctcaattcctgggctgggaagatcccctggagaaggaaatggcaacccactccaatacccttgctgggaaaatcccatggacagagaagcctggtaggctacagtccatggggtcccaaagagtcggacacgactgagcaacttcactttcacttttctctctgacattatgaaaatattatcctttattgccttcttataattttaattattttatctttgaataaataatacatttgtttactcttaagttttaattgaaaagacaacaaaagtggtatatttggtatatatgtcattccatgcttttgacattcaacatttatttgataacattcaacctgccttaaagaactatttatttagtggctattatggttaagtacggagaacgcaatggcaccccactccagtactcttgcctggagaatcccatggacgggggatcctggtgggctgcagtccatggggtcgcacagagtcggacacgactgaagcgacttagcagtagcagcagcgtgattaagtatggggttcccaggtgcactaatggtaaaagaacctgcatgccgatgcaggagatgtaagaaacatgggttccatccctgggatgggaagatctcctggagaagatctactggaatggctaccaactccaatattcttgcctgggaaatcccaggacagaggagtctggtgggctccagtccatggggtcacaaag

SEQ ID NO: 58262 - DNA, 1490 bp, Bovine  19866880709938
  misc_feature (1)..(1): n is a, c, g, or t
nacgactgtgagcaaggctgtctgggacctctgggccagctgcatcaccagatggctgaaactgcaccactttcctctggtgaggccagaagaaagtccacccagcccatccagactgagtctgacccacaggacgataaggaagcacgtgactggtgtcacaagctgctcacttctggggtggggctgcctaaatacaccccagtctctctggttatcagtcaagtccgtgttgtctttgcactccatgttttctctgctgggacttgctgcctgatctttagcacggctggttccttcttgttgtttaggcatcagaggatgacctccccttctccagaccaccccaaggggccacctgtccacctggaagctccccattccctaagtgtgcaggtggatgcggtagaattctctcctccctgggagcctggtgactgtcctgtgggcagcagccttccctgggccaagtcctcccaccatgctcccacgtggaggtacttacattgattgcctgacctgtcttttgaataaataatacttttataatgaacttataacggtggtatccaaattctttgactgatgacaatatgcggtctgctaattcaagtgacaaatgagaaaagactttgtcgtcatatttgacatcttgaagactttcctttaaaaaaattaagaaagatattttaattttcaaattttaaataaaaattgaagtagaaaatgtgtctaattaatatacgcagcttttggaaacatacacatatctctaaccaaatgatattaaatgattgatatgcttaccaatttatttcaataacaattttgaaaaaaatttgatttggttttaaaattatgttcaattgctcttcattagccatccttaggagaaggcaatggcaccccactccagtactcttgcctggaaaatcccatggatggaggagcctggtgggctgcagtccatggggtcgctaagagtcagacacaactgagagacttcactttcactttcatgcattggagaaggaaatggcaatccactccagtgttcttgcctggagaatcccagggactggggagcctggtgggctgctgtctgtggggttgcacagagtccgacacgactgacgcgacttagcagcagcagcagcaatccttaagttttcctttactaggttactctgccaaacatttactagggagacacaaggtgtttttttgccactgggcctgtggaatcttagctcccttaccaggagctgaactcacaccccctgcactgggagcatggagtcttaaccactggacctccacggaagtccctatccctgtcttcttgtctccctcagttaaaggccacttctttctaatcctgtccctatggctactcactctactgcttttttctgtgacctgcagatgagtaatatggaagtcaaagactgctcatcatgtttgtcagtaaattaatatatagctgggag

SEQ ID NO: 58263 - DNA, 1054 bp, Bovine  19866880772763
  misc_feature (1)..(1): n is a, c, g, or t
ntttttgtaagttttccttttcttcctgccaatagtttgttttgttatccagatgggtaactacaaatttagtacacagtgattcaacttggagcttctctctataaacagttgctactgaaattcaaatgacatgtgacaggcgttaatgacctcggggtcgtagccagcgatgtgcccacggtggctcgagcctgcaggcacccaggtcgctgggcggacacccctgaccaccgtgctccctgagaaagggagcagacatagagaagaggtggtcactcggacgataagagcaccaatctagcaaatactggtaatttaatatggtttggtctaatagtaccagtaccaagattgctaccagatatctggagggctatcctttcaaacgttgagttgtccacgccccacttgaacccctccttccaactgaggcatctgtaggtgtcagcacgtcccacagatgtcatcctttccactgtttatccgtcaaccatttgcaaaacactaataatagaacctttattatgaaaacacccaggcaccttcctcccaaagtctaaaatccgaagtcacttctactaatgaaaaggaatgcactcccacatctgaaaagaatgtctttaaacagaatgtcaaaaatgagcagaaattgtttattccagaatttgtttagaccaccccctctgcggcaaggcttgggtggaccacaatcacattcttgctttgttgtttagaaagatacggtatgccaaaagttgtgcaaacccatgacatatgccacataacatgagtcattttatctttcaaataccgaagaggaaccttaatagcggttgtgtgccagttccagcctgtcaataaccggcactgtgactggaccagcccttgtggttctcattatgattgcaagacgctcctcagcactgccattgggaaactccaaaactagaggttcattacttatagaacctggaattgcatggcacagctggtgccacactgcaaggtcagggcacagagagacagacagaaggagggagggagagacggg

SEQ ID NO: 58264 - DNA, 1614 bp, Bovine  19866880870547
  misc_feature (1)..(1): n is a, c, g, or t
ncccttgtccctgatgttgcctagaaaaatgaattgaaaagtggaccggtgacctaaacataagaactaaaatgaggagactcttagaagaaaacataggggtaaatcttcatgagctcagatttactaatggattctagatatgtcagcaaaagaaagagtacataatttggacttgagcaaaacttaaaatgttgtgtattaacagaatgaaaaatcaacagaatgggagaaaatatttgcaaatcatatgtctgataagaaattagtatctaaaatatataaagaattcctacaactcaacaacaaatacaatttaaacatgggcagaaaacctgaatagacatttctccaagaataaactaatggacaggtagtacatgaaaagatgttcaatctgactagtcattatggaaattcaaatcaaaatcacaatagattccacttcacacctttcagaatggctatcattaaaaataaaatgggaaataaaacacgctggtgaggatgtgaagaaattagaaactctgtacgctgctggtgggaacataaaacggtgcatccactctggagaacagtttggcagttcctcagaaagttaaacacagagctatcatatgacccacctacttcactcctaggtccacacccaaagaagctgaaaacggggcgtctgatcagatatatttatccccaatgttcaaggcagcactatccacaccccccaaaatatggaagtaagtgtccatcaacagatgaaaagacaacacagagtataattctaacaatggagtacaatttagccttaaagaaggaaattctaacacaagctacaacctggatgaactttgaagaaattatgctaaccaaaataaaccagacacaaaaagacaaacattgtatgattccacctacgtgaggtacctagaataggctaactcataacgacagaaagtagaacggtggttgcccacggctgctaaggggggaaatgggaatcttattatgtaaacgttttggaaatggatggtggtgacggtcacacaacactgtgaatgtaatttatgccactgaattatacatttaaaggtagttaaaatggtgaattttgtgtgtattttaccacaataaaatttatttctttgaattgcattaagtagcaaaaagcgactttggtgttttacaatccttagtaattgcctttgccagggctaggggatggggaggagagagctaacacagagaaaagacacacaacacagaaaacattaaaaacaataaaacggcagtacccaagatcctggctggaagtgtcgcagctcctggagctgtctccagagcccatccgcctccttttggacggttgggtcccatcatttgaattatcttcattatcatcctatacattcaaaagatgaaaaaaataactggacaaagaacagtaaataagggaagattatgtaatcctcccaaacttgctaaaaggctcaacttgaaggcttcctaaagattatacaaatgataaccagggacaagaatttggccttggcaagacctggaaaaaacccaaaaactaatcttcaatacaaatcaaaatagaaaattttcaataaa

SEQ ID NO: 58265 - DNA, 1054 bp, Bovine  19866880937107
  misc_feature (1)..(1): n is a, c, g, or t
ntttcttgatgggagagctgagtcttgatcttccctgaaatcacttgtactgagcactgtatcttaaacatagtaggaatgtttggtgaaaaaaaaaaattgaaataccagactagtctcagaactaaattcctgagtgctgtttccactggtcatgaaaatatgctttgacagtatttttctttcaacatttaaaaaaatgttattccactggtgttctgttgctgttattgtttttgttttttgcctgcatggtttctgatgagaaaatctgccatcatttgagtcactgcttctttttttaatgtattgtttttctatggccttttcaagatttcttgctttgttttggttttaccctttgattatgatgagtaagagcgtgttttctttgagtttattctatttgaagtttgctgaattttgtatatctgcaaataaatgtcctttaccaaatttggaaaattttcagccattatttcttcaaatatgtttctgcacaaattttttctcctcttcttccaggactataatcataatgtataagaacttatgatattgtcccacaggtctttgagagtctgttcattttttatcaaacttttttttcttctgtgttttccagattggataatttttattgattgaccttcaagcttattggccccttttttttctcacctccattctgtttttgaggtctctagtggacattctagttctgttattgtatctatcaactcaaaagtttccacttggttctttggcacatcttctatttctctgctgaaaatatctatcttttcattcattttgagaatgttcacccttaatgcatgaataatcattatgagatgtggttttaaatattggacaattcctacatctaggtcattttagagtttgcatttgttgattacttcttcccttgcaggttatttacatcttcctggttctttgtatgttgagtgactttggattgtatcctggatactttattatgttttgagactgactgtgggatctgttgaaattttctgaggagtgttaattt

SEQ ID NO: 58266 - DNA, 748 bp, Bovine  19866881098885
  misc_feature (1)..(1): n is a, c, g, or t
nctgcaactcatttaaagatagagttttcaagtcgggcttataaatcatttacagagaagctgagcagggctcaaactgccgtccaatcggcacattcctcagacgtgagcgcagagtgggggcgggggcggcggtggagcgagcgcggaggccagaccgtcaggagctgagctcgccctcgccagatattagatcaacaaccattaaacataatacgaaccatcttccgtggccagggctcaacagctgcgcgtacaaacagctacaaatacgtcccgggaggctcggggcccagcccgccgacggccccgcgcctccggccgccgcagggccctggttccccgcatccagatgcactggtacgttcgttccccgtgaactgcacacacgccggtccccacgccggcctcatgacatacctacccgtgtggcttctgggggggggggggtcggaggaagtggcccagcgctgcagaaacccaggccggactctggggcagagtctgtggctcgtgtgtcactttcgtggggacctggctccggggtgtgtgagcctggggttccctgctggtgaagggcagctctgtcctgagggaggtcagaggtcagtgggcacgtctcccctgcccccttaccaggccttccacctattctgtggatccgataaaaataatacatcagttactgaaaaggtgaaatttaacactgagacacaggtctaaattctatgattacagaattactttt

SEQ ID NO: 58267 - DNA, 745 bp, Bovine  19866881444780
  misc_feature (1)..(1): n is a, c, g, or t
nctttcccctcactcccctgcgcttctctggtctcactccctctctctccacaccgattctttttctctttgagctaagcctgtactattaatataacatcttctaacccaaaaagcagtggtcagaaagggaaagtttacaggttaagacattttaaagagaacagtattgatgggcatttgggctgcaggcaaaatacaaacctgattctgtataaaccacgcagtctgtaattttcttccagcatacttcaccgttttgagttacaatgctgctgatgtcgcaactttctctgacttcaaacccaagtttacagatcatgtcatacactgaaggagaaagacaggtggcaatcggctccccaactaatatctgaaatataaaacataaaacacactcttcaacagaaaatattaactttataatatatttaagtcacaggaaaactgttatgtcttatagaatatactcaggaatagttactgtgttaacactttctggatgtcagaagaactatatgattaaaacactgtgattaaatattaactaaagattacttatgcaaatattttcaagtaaatgtttaaagatattattttattaaacatagtatttttaacataagaatttacagaagctcagaatattttatggatagtgcatttcttttcagcattcacaaattatcccaaagttatcaaaataagcatttttaaatgagggctagaaaaatagaatatcaag

SEQ ID NO: 58268 - DNA, 875 bp, Bovine  19866881610010
  misc_feature (1)..(1): n is a, c, g, or t
nataaaacagactccgcacctctccagagcacaagagccataaatctatagcaaaacagacttcagctgactgacgttggcaacttgagccctggagtaaattctgctactaacggttcaaactggaaatcctctgtctcatgctatggaacacggcgccctctctatgtggctgttacagcctcacccactcgggtggtttccagcacaaacaacagctcctaccaggttcagaggttcagcttccttcatcttctgttgaagaaattctgtcagaaaccttgaggtcaacaccttatttgtttcatcttggtaaataatcacctggacaggttacgcctacactacactgaaagatcgagttgaggtcctttttctggccgtcacagaaaattgcttgaatattaaaatagatgacgtgacagcagcaggcttcctactcctcacggctgcacgacatttaagtttacggtttggctgttgactttgctaagatctgcagaacattttccaaaagggagatactgtagattttttagaagtgaaattaacttttatgatgtgggcatgatgagaaagtcaggaagtctctgggaataaaatactcttcagaaccagagcactgtataggaaaacacatgtttgaaagcacttgatgcctaaaaacaaaaagcattaatgccacattcacagaatatgcactgcctctcatagaatggagacaagcagctcttctgcagtcttgatgcagagcgcatctccagtcagaggatctgtgatggagaacacgctgctggtccacaggtctctgtgagtaagaggtggcctcccctcttgtcctgtgcgtttcagaccccgtttctccgggagccttc

SEQ ID NO: 58269 - DNA, 2250 bp, Bovine  19866880350650
  misc_feature (1)..(1): n is a, c, g, or t
nttagttttctgaatgttgagctttaagccaactttttcactctcctctttcctttcatcaagaggctctttagttcttcgctttctgtcataagggttggtgtcatctgcgtatctgaggttactgatatttctcccagcaatcttgattccagcttgtgcttcatctagcgtttctcatgctatactctgcatataagttaaataagcagggtgacagtatttatagaataatactgcaaaaaattacatattacagagaaatggaaacttgctaacattttgtcatatttacttcagaatataagtatgtgtatatatatataaatatgaatgaatgagaaaaccatgaataaagtctgttccccagtcccattcttcttctatctcaagggcaaacactactataaattatgaattgatctttgtgtttctggaccgttttttatacttttataccttatgtaggtatctttgagcaatatatgatattgtttgtgtgtgctttttagaatttacctaagtggaggaaatttaaaattttctgggctatccagagtatgttgcttaatttctagacatttgggaaattttatatttttgttattacttttggttttacttaatgtttggtctgaaaatgcaacatttcagtctttgaaaatttactcatgcctgctttatggtctcattgtaaggcctatttggccttacactggtctcattgtaagctgtatggtctcactgtaagaccctgtttggccttggatgctgcgtgtatactttcagagactaagtcatcctgcagttgtggggtgtagtgtccagtgttgtcactgtcagatgggccattttttttttcccctaagtttctcacttgtgtccaactctttgcgaccccatgggctatatagtccatggaattcttcagacgagaacactggaacgggtgacatttcccttctagagatcgaacccaggtctcccacattgcaagcggattctttactagctgagccacaagggaagccctgcatcaaagaagatgttcctaaagacgtagtaatggaattggagaaggttgccattcctgatgaatagagtctgtggaggcaaaatgggaaaggaattttcactttttaagcagatttttaattcttaaaattagtttatcatattgatagttatagagcaggctcttgaataatatgtgcttcataactgtgacggaataccttgaagattcctacaatgaccaggcataggctttaaataaaaatttctccaaattctacatcttgtgatgcatcacaggatattcatattagacaagggacatcgcagatgagtctacactaggactcaagacagtacattgcgtatgtttgcgtgtttcacgcctttgaaagccttaaaggtatgttttggaattgtgactagaaattaacttttcactgtttaaacaatgttttcccaaattctttatggacctagtattattctgtttattgttatacctcattatttcatggatgcaagaggaatttaaaaccagtgctcttaatataaagttcttgtattggtgaacagggaattgaggactgggagccctctattatatggtgctgatgatggatgcaggctgcctctgagtttgccctggatccctcaggtgctgcagaaagacactgcaggttgttctcagaacgcatggggaaaaaaaaaaagaaaaagaaaaagaaaaaaaaagaacgcatgggaaagcagaatcctttactgggcaggtaagagtgagagggaaaggaagagcaaggcatgtgacaaaaactctgtctagatatatatatttaagattttttaaaatatttgttttggccttttggaagtaaacattgcaatgattcctggggatgctttagggatgttgtttgtacatgatggtttttctgttcgttattatagttattattagttcattcattttgccaatgtttattgaataccagatactgtcctaagtttggggttccagtgatgaacaagactgacacagtttctactcttatggaaattccatgaataagagaatagtgtgatttgtatttcacaaagaaaaaagcaaccaattttatatgaaaaagactttttttgtttaaagaaatctttcctttaaaaaactacataatatagaattttaggattgtgcaataaatatttgtggactgctgtcattactaaacaatgctatta

SEQ ID NO: 58270 - DNA, 991 bp, Bovine  19866880494541
  misc_feature (1)..(1): n is a, c, g, or t
natggaagaatattgctttaacttattcccatggaggtagttcttgatttaatgacatcccagcagaaaggaatgtgatagatgttgcttcaaataatcctttgatatatctagtttcttgttaaaaggaagctttaccatgttctgtttgggaagatagtttctgttagactttttgctcagatttagcatagagaagaaaatattgtataaaggaaggaaagctaaataatcaggacaaaaatgggtggggctctcactggcctgattgaggtcatgaatcattaggtgtatcatggagccaaagaggttgatgctgtggggttacagagagaggtgttgcaagattacttgttcttttttttcccttaaaattttgtttttaatttacttatttttaattgaaggataattgctttacagtattgtgttggtttctaccaagcatcaacaaggattgcttgtttttgaacttaaaggacaaaatctcagggatgttagtctactaactgatcatatggaacaagtctctctctctctctctctccccctcccccgtggattttaataatgcaactttcctagcttttgcaacacactctttcagataataccacacagttataattcaagtgaaaggaaaaaaatttcataaaaatcggttatcaaaggagggaaaatttgtgggttgctcccttgtgagcaatatttgcctctctgatttattttgcaagctatttctgtcagccatgaattaaagaataatgaaaacacagttgttgcttgtttttataacctagataatttcacctgaaaagagttggtatgttggcatggcctatttaccattcagattaaagacaggatgtgccgagcaaaaagaaaataaagtccagccatattcttgccttttttccattacattttgttggccctaagtagttagagctccttttactattcatttctcagagccaaatggattttccag

SEQ ID NO: 58271 - DNA, 1355 bp, Bovine  19866880532977
  misc_feature (1)..(1): n is a, c, g, or t
ncagcttagcagcagcatcaaatcaatattttcaatggtacaagaaatgtcctggcctgtggttttaaaggcttcagtatctagaatcaggaaggctacaggacacactcccaccccagaatctttcgtccagcgcaattcgttagctcatcactttttaaagttttaatttcagttatttgatttgatgcagcatcaaatctttgattatgttttgcttgggtgtgggatatctaccggtttgagagtcaatataagtttctatttcagttgatccaagttaaaatgataaaacccttttccacagagggtgttcacttaccatttgacttggctgcatcgcaaactaaaaatcattaagtttgattcaaaattaaatcagaagtcaaatgaaaatatttcctgcatataagaacattcatgggtcatagtttacaaagagttcattttgaagggagagtaagaactgagtcataatttcttagattagagctttctattttattctgttactcagcttttcttttggaaactgattccatcagacatcagtcatactcacaatggtatcttttctatgtcatggaggccaggagatatgtgtcattctttgcccttctatttatttgagaagacagacatgatacaaaaaaatcagaaatcagatttaagaaggttaagagaatggcatggtattaatatatgtcattcttaaagtctcagctttgaaaatttattatataaattaggttctggaacttggaatgctagtattaatccagttttgggaatgtaaaattataggttggtatggctagatagagatataaacacccatatttacatccatgttgaatgtatcatgttgaacttgttgaaatttttgaaaatatagaaaaatgttaaaaaaaaatacacacattgaagtcatccagtatcatgccgccaataatagcccctattaatattttggagcaatttcttctaatattttttagtatacaaacatatatatatattagaaactgaaatgctaacttttaaaacaggtttgaaccattttcctgggacattaatatgttccaagaatgtaggtgttagatatggaaagtacagtaaagtcagggtggcctccagaaggaacaagaatgaggcttggaatgaagtttattacaagcatacctcattttattgcacttcaagatactgtttttttacaattgaaaatctgtagcaaccctgtatccagcaagtttatcagcttcatttttccaacagcatttgctcacttgctttttctgtgacacattgataatacttgtagtatttcaaactttttgactattactatatat

SEQ ID NO: 58272 - DNA, 1441 bp, Bovine  19866880551603
  misc_feature (1)..(1): n is a, c, g, or t
ngaaatttcctacagatatcagagaggacaggtcgcatagagaaaaatcccactgtgtcttgccactctgcaccatagcttttatgttttcgtattggggtttattggtcaatgtctgttttcactgcatcgtgtgtgttagttactcaattgtggacagttaattcttaggctgagcaccgaagaattgatgcttttgaaccgtggtattggagaaggctcttgaaagtcccttggactgcaaggagatccaaccactcaatcctaaaggagatcgatcagtcctgaatgttcattggaaggactgatcttgaagctgaaactccagtcctttggccacctgatgcaaagaactgactccttggaaaagaccctgatgatgggatagattgaaggcaggaggagaacggaatgacagaggatgagatggttggatgccatcactgactcgatggacatgagtttgagtaagctccgggaattggtgatggacagggaggcctggcgcgctgcagtccatggggtcacaaagagtcggacatgactgaggactgaacgaactgaaacatatatgtgtatatatgcatacattcctgtcatttgaaagccattatacaatccctaagtatggaatgctttctataactattattttgcattttatgcccttttaaaactgtgtttttcgtatttctagttgagttgaaattgtaactagtgcaaatttctaaagttcatactctggtaggggaagagcgttgctgttggtaagaatcagagatgaccttgcccttgctctggggaaaccaaagattgtttgttcatggtgaatttattcttatggccagcaaaaacatttctctggtgcttcagagtctcctctctggtactctgagtaggcaactttggatagttgctcccactcacatctgagcagggctgcaataatagcaaatggtccttggaaatcacagtcgcattaggctgctgttcaaatagcttttagggttgtgataataggaggcattcctaataactggtgactctgtgagaccctgcccagaaggcctccaaatggcagcacacaatttaaattttaatctggaaacagtggaaatgatgagattccagctggggaccttctggtctgagggccagcgttcagcctccccattagatgccccagaggttcgttgagtcaatgagtgaatgccctcgctctttttactctttccatactcggtgacgtcttccaccccacgccccagacagaagcaagttgcatttccccgcttccacagaggctttattggagctgatgaagcattcccacattgctgtgatccaactaacacatttgtgcctgacatgagtggcatgataatttcatctttctgacaagtgataacttcctaaacttttttccttccatgtgctgggt

SEQ ID NO: 58273 - DNA, 1224 bp, Bovine  19866880603569
  misc_feature (1)..(1): n is a, c, g, or t
ngagggctgatttttctcattgctaggtgagtcccctgtttttgtcaggagacatatgtgggaacatttttggaatctcctgcttattattgtttcaagaccctaaaaggagaagaggggagaaataagaaagcaaaatgagaagtgactctgggcatccctagagggggcattcctccacgcagatgtcccatgaacagtgccaccagatcttctccagatcctgactttgacaggtcctggggttgaggagacaccaggatcatgactatcaggtgtccactggccagaagaaactgtgacactgtgcaagtagtcaagagggagagaattaaagcaaaaagtgctcaggtaatctctggaaggaaatcaacactgaatattcattggaaggactgatgctggagctgaaactctactttggccacctgctgccaacagccaactcactggaaaagaccctgatgctgggtaagattgaagacaaaaggagaagtgggtgagaggatgagatggttagattgcatcaccaactcaatggacatgagtttgagcaaactccgggagatagtgaaggacagggaaacccggtatgctgcagtccttggggtcaaaaagagtcggacacaacttattactcaacaacaacaacaagaatctctgaaacccaccttcaaccaaagagtcactgagaatgagtgacaccccagcacctttccactgggtcttgagctgaggctgctcccagtgaatcaggaaaacaaataaccttggctttggggtagaggagaattttgtccacttggtctcagcctaacttattgactccagcagctggaaggacagggtaggatctgggagagagcaagaatgccgaggaggaagggatgccaaggagatgtttctggcgatggagcagctggcatcctgctgtcactgagattggcctgcccaggaggatcctaattacggcacaactgttgcctccataatcactgtgacaggagctgtgtgggccagaaggagatgtgagatggagctggctaatgctgaagaggatgttggaatcactgcgacaggagctgtgtgggccagaaggagatgtgagatggagctgggtaatgctgaagaggatgttagaatcactgcttcttgccccagcttcaaacaagaggctattactgccagctgcctgctaaggttgaaccagctgctgccaagaaa

SEQ ID NO: 58274 - DNA, 1783 bp, Bovine  19866880620812
  misc_feature (1)..(1): n is a, c, g, or t
ntagctgggcaaccctagaacactgtcaatggcatcctactttctaacaggatgaaatgaccaagttccttcattttctagtgctggatactaaagtaagaaaggaattagctgtccttctctagtttggtaatcaaagtcataattacacatcctctcattcacatagtactttaccacttacaaagtatgtccatgaacattctctcattgatccttcacaaacattctatgaggtggacattggtacctccacattatgaataagaacacagaatcatggactcagatccaggatatttgacaataaccttggagtactttcaactcttttacaactgcctctttcacttcagaaatctttatttacaagtatgtagcacactgtggcttatgggcagtaaagacatgattctaaattgaatttttttctggtgaaattatggttgcccaaggctgcctaacctccctccacccttagtcagtacgagctcaggtaaaacaaagtaattgcaccagtatcctaaacaaaacataatcatgaaggttaaaaatcactaggaaaaaaaaaattattcataaaatgtgtggatccaaactttatattggtagcagctgggaaaaagaaggaattccttccataaaaatatgtgctcccaaaacccctccccctagaatgtgtgcactaaacaattcattcacaagcacgttttcttgagtactgtcttaagtgtcaaaatataacagtgaatgtgaaacagttcctgcaaccaaaggtctatagtcgaatcatcaggcaactgcagtagagtgggaaagtgcttatacgctaggaacagcccccggagctacaagtgcaggaagaagggtcctctgcaagtctcttagagtcaaggaagcaacacccgaaagccacctctgaaaagtattcattattaaggaggcatggggaagggagaagggaagttgatgttttctcagattggatacactctgtggcctggatatttctctcttagctgcactacagcttttactggtttctctgttttcattttataagctcgaaaagacatgttcagaaaatttgagagacttacccaaggtcacatagctagtatgttagagatccaagaactaataccaagtctgtatgaccactgtggatttagagaagaaagagcaccagactggataaagtcagacaactggaattctattctgtcaccaaatccctgggcagccttcaacaggtcactgaacagctatgctctgcttcccttatctgtaaaatgagaagatttaaactgcatgacctctaaagtttctgagtttttagtctaatacatttaactctcatctcctgatgagaaaaattcaagctcagaaaaattcaagttcaagaaaatcctgagaaatgaagaggaactactaacaggtatctataacaatattaattcctctcatagacatatacagaaggggagatacaccacaattctctctgaagcataatataatttttgacatgatggatgtgttgcttggactaattactcttttggatgaacaaagaatattgcaaaatgactacaatttgatagtatttcacctctgtggttgttgggggtggtgaatggcaaatcagacctattaagggatttttgtggctacttctcataagtttctttattttgctatgttttaattttctggttattgtgtaggctgtacaaaagccaacactctaagtataatgaataagacactcaagcttccttgg

SEQ ID NO: 58275 - DNA, 1134 bp, Bovine  19866880661817
  misc_feature (1)..(1): n is a, c, g, or t
naaaagaagtctttaaaaaaagaaataaaactaataatccagagcaaaaagagagcttttcttcctcaaaggttctatgaaaaaatacatggaattgggtctcattgatttagtttccgccaaatgcccagttataaactgaccattgggacaagaattcgtatatgtttattgacaattccagtagtgtgcacctccaattgcaaaaagccaaatggaataagaatgaggaaggtctcacagtgatagaaaattagatgctgttatcagaagaagggtaagaagaaggatgggtaccagctagcaaaaaatgatattcttcactgtaaaggactgataactattttccaaacatttgtagggctgtcatgtattagaaggattaggactattctatgtatccccaaaggggagaactggtatcagtgtgcagaagtgaagaggaaataagatttttgtttctacataaggaataatattctcatagagaaccagtatggtgtgtgttgtaaggtaacttgtgccctgtcgctagaatttatgtaaaaatttgatggatattatagaggcaattcctgttttgtattaaagaactgcccaggtatatgagacaatcccttctatttccatgacttcattatcctatttcctatgtgtgtgtgtgtgtgtgttccagtgcatacacacaaccttgtggttcttaaatctcccaagagggaggtttaatccaattgcttgatgagggcattgtttaacacctgttgtttttgagtggttacttctgtgcctgctgaattgattccatgtttctagttcttaatagagcattaaccatggtataagtaggtatacatgtggcaaaggagatataatgctgactaggggcaaaggattggaaagacatatgggtggggtccactttatcctcatgtacaggtcacttccccaagcagacggaatattcaatttccactttaaattccagttccagaacgaaacagtgagagaatgcagactataaggaagaaataacactaaagggaagctctcaaagataattccatcatccataacaccaggcgcttcctggcattatgactaataaaactcagcaaaaaacatgttctaaatatt

SEQ ID NO: 58276 - DNA, 1794 bp, Bovine  19866881086435
  misc_feature (1)..(1): n is a, c, g, or t
nctaagggagatggaaagtgaagtgagactggttaggttcccctccttacactccggtagaaccctcccatgagaaactaggtctctggcagccagccctcaggtaaagaaacagagttccctgagcccatgtggtgcgcagtggacaaacccagtgaatctccttcctgcacctcgggcctttggggtgagggttctgcaggaaggatgttcttcacaggcaagcattgggccaagggtcttagatgtgtggagcctgtggtgggctagcttcctcctcaacaagagctgcgtctgtcctgaacctctcagtgtgaccttactctgccagattatgcttcctcttgtgagatatataaaggttttacatattcactgatgggtaggagtagaatatcattcaagactaagatttcttttcacccaaggctgtcaggtttgtgttaggataagtccataggatgtaaaacattactactttagagattataatgccctgctgaataaggactaatttggggaaaaaaagcccctattggtactggggaccctttacatccctatgtgattagatacatgtcttgtttctgactccttctgagacttgaaagaggattagatcacccacccccaactggtcatttctctctgtagatgggagaatcagagctaattgatacttttttatgtttaattacacttaattttttctgactggctgccctgaaactaagaagaggaaaacagtgttctacacgcaaatcttctaccataaacatttcttaacctcatttacttcagaattggttcaaatacagactccctaagataaaagctattcagaatggtttcttatctgtatctgatcttgtttttgagtccttccttcttggaaccatctctgtgatttctgtcatgggaatttgctcagtcctttcttctctaacattgatctcttctgtattcactataataattttccagtccttttgttagtttgcttaaatgaattcaaaaaccttaggtccccttctcctttgaaccaccaggcagagggctctggtcacagtgttcttctcaatggatttgatggcatcaccccaccttcaaaactctagtaactttctgcttacttctgggtaaaattcctggcttggtcccaactcactgttccctattttctgctattccttgtacctgtccagctgttttatgtgctctctcctcagtgtcctgtgttttccccatttggaacatccaactgcacctccttgtccttctgaattctgcccatctctcaagaagcagagcccttctctcctgctctggaaggccttcctgatggcttcagccagatgacatctttccctcctttaacttcccatgaatttactgtcaattgcactgatttggcaattaagggagtcagccaagggcattggaaggatagaaatctcttgtgtatctaatcctatcttggtatatgttccaaagacaatccaaaataatgcagaaggggttccagcctcccccgtactcaccagaactcttagacccttgttttgacctatgccccttctttcctggtgagctcctctttgggactttcctctttgccagtggaccttgggtaagagcctttctggtccttgctgacagagtgtcctaattctgaatttcaggcactttgagttttccttcttcagaagacctgtagtgtctgcaaattgtctcaccgctcatcagctctcatccagagctcagcagtcaaaggggagacatcttcagtgtctg

SEQ ID NO: 58277 - DNA, 1228 bp, Bovine  19866881099710
  misc_feature (1)..(1): n is a, c, g, or t
ncctggggattcttgatgtagaatatagtctgcacatcaattgtataattttgtttttgtaaccttttattttgatatcattttaaacttataagaaagctacaaatatagtggaaaacactcataaatattcctcactcaaataccctagttattgacattttatcaaatttgctttgtcatcgtctatcttcttttcttcccctacatctcccataaacatgtattccatttttttgtctgaatcatttgagagtagattgaaacatgatggcttttaccaccaaatatcttagtatatattagttaaaagaaataattctcttatataatttcagtataattgtggaaatcataacagtaaagtttataaaatattaatatctaatttatagattattaaaatttcagccattgtcttattaaataattttacagagaaaaaaattgtggacagaattccatcatgaattgcatctagttactatgtcttgtccactttactctggaatagtttcttggtttttgtgaccttggcatattttttgatgatggacagctattctgaccagtgtgaggtgacaccttcttatagttttgattttcatttttctaataattagtgatgtggagcatcttttcattttctaaatgttttaaaatttgtatatctagttatcagatttgctaaataaaatatatttactctttctgaaaaatgcagcatcagaattacaaataaaggtatcaagataaagctttagcatgactaaaaattagcgaaaagaagccccccgatctggctggatttattgttactgcacatatctgagttttctcttgattgtacactgatgtttcccacgtggaaacaggccccaaggaaagacctttggtgcaggtaaccaatttagaaggttaccctaaaaagtacaagggagagagcagggaaattgagacaagaagtggagaaaagccaaaaaaatgtgtgtttttgattagcctagcacggtggacaagtgagcctcagtccaccttggaggaatatctttaagaagccagcttttgcctttatacatgatcatgatgaagttgtttctctttaatatgtagttcaattacaggaaattaattttctatgctggaagcatatttgaaggttgattagtttattttcctctgaagcattttggaaactatttctcctttcttataatagctgattaac

SEQ ID NO: 58278 - DNA, 756 bp, Bovine  19866881279012
  misc_feature (1)..(1): n is a, c, g, or t
natttaaaaacttaaatccagttatttcaatctattggacaaacactccccactccccacaaaaaagtaagctaattctttcatagtatttctgtgagaagacatattccttcaatttgccaaggaaagagcattaatgctttcttcctccttttcttcaaattccagagctctgcttctgataatgtagcactttaggttacgtgaaatcagcccctgtttaaagattcttcgtggatccaagcttggagagtatattaatgtgggggagtacattgccatgacagacattcttgatacaaaatttcaatttcagttgagtccctgtgatcccctgagcagctgtaaatgccctgttctataatgaggcagtttaagacaaagaaaagtattcaaatctatgtccatttatatttatactagtacaaaacagtgatagaagaagatactgatttttttttctgacgtatttatagtttcaaaggaaaataaagacactattgagaaatctctaatgaatgattaaaaatagtttggggtgggcctgccattcaaaatttttcccagagttctcatctatgttctatacaaactgtaaataaaaatgtacacaaccaaccagatgtattttacatacattggatatcaatatgtacttgtgaatttaaagttccttaatatacacatccccacttagaatataatccattacataggcaaaggcatcattctgtaataacaggtcagggatagcag

SEQ ID NO: 58279 - DNA, 796 bp, Bovine  19866881447052
  misc_feature (1)..(1): n is a, c, g, or t
nccccccccccccccttattttataggtaacacataaatatctttgcttgttaagaataattctggttaaggctgaggttccctttgtgatgctctgtttgtattacaatacatgatccttcactgttcattttcttataaaatgcatggaagtataaaatttttcctccttaaaggacaccaggaatttaagttctttcctctgaacgctttcctatgtaggtctagctcacagagttgactctgcttcatatttgtgtctcctgcaagctttaatgcttccaaattggctcagctgtggctctttgccttcacttcaatttatcaggagtagcttcatcagcaaaggattcaatgcccaatccaaaacctgtttgcttatgtaagacacagtggaaaaggcagctccccttcaatgtcatggaagctggtgggagtagtgactggagaacttgtgtcctagaggggcacccactgggagccagggaaaaggaaaactttcctctcttgtgtcatctggtccttccagctgttgctcagcagtgtttgatccaggaatcttgtccaacatggaattatgaaaggcaggacacagatggttggttctgatagcattactttaggcacagcctttgcttgaagttagtagccctgttaaaaaggtggtgactcactggaagcagtttccttactgtgttagggcagtaacataaccatcacttacaggggaacatgaaccatgtgtctggaccatgtcagatgtgagcagcaagcacataaatgcctaccatcacag

SEQ ID NO: 58280 - DNA, 649 bp, Bovine  19866881695346
  misc_feature (1)..(1): n is a, c, g, or t
ntggcctaaaaccagtccctgtgacttccttcttctcaataatatcaggagagagtatttgaaacaggaaagaaacagaagggccagagaggaaaggaagccagagagcaagcaaagaggcttccttccatagcattcatagctgtattcctggctctctgtctgccccagctccgctcacactgcctcttcaactgtgattgagaaactggttttacctgaaaagcagctcactcctactggagttttcaaaggcctccaggatcactaatgagaatgacactgcatttcaatttagaatccttttttaccataatctctaagcattgtctaacctaagctccagtcttgattaaattacgtattcaatttgcctcccacccacattcctaacattcaggtctttgaaggcaggctgagctaagagaccctgaggaaagggagggtatcctacagaatggtgactgcctgcacaaatttctccatgcttccaaccctgcctctggtcactcacaggctggccctgcagctgctactgtcaccaacataacacatgatgttgccgggaaagtgacgctgggaacctttttgcaggggctggaacgttgtttctgacatatgttcccacggccagaacaatgacaaggct

SEQ ID NO: 58281 - DNA, 914 bp, Bovine  19866880562898
  misc_feature (1)..(1): n is a, c, g, or t
naaaaaagacaataaaacttcaaaactagtttaaagctttgcagtaatattttactgccaaagaaagcagataagactttcacactgtgctgaaaactgcaggtaattaattcccatggcagggaagtgaaggaaaagcacattccatattctcagggcaaagtgtaaaaggaatttgtagcagatcctattaggtttcagcattagactgcaagggatacttagagtagactaggatgaggggaagctatgagagtacaaataatataatagaaatgcttctgacaacaaatcatccacaacaagagaaaaagctctaagtgatacaacagaaggacttcttaggtgtccaagtttttcactcatttcacttttagccaaatcattgctttcctttccctgccatgctttcctaactcgaccacaattaagctcagattttcagagtgtccttggcttttgcctactctatatcctgacttttaaaaactagatgtttcttccctttaggatttataattctgatttgcctcatccatttcagtcattgatttcaaggggtaatctgtagtttgtcactaattcaaggaaatatgtgagatctcacaaattctggaagctgtaaaaagaaggtggggatggagtgagtagaagacaaaggcctgcacacaattaatgaggaaaacttgtaattttcctggattttgccaaaacttgactgtttcaaactgtctgcggtgtgtttgaaatatcaacagggaatatagtaaacagttcaccaggggagccaaggcagatcataacttcatatgcatggcatgtatagaatatcaactttctttaaattcttcgtaagaagcattcagttgggcagtgtttaaatattaagattatgactatgtgtagaacaatga

SEQ ID NO: 58282 - DNA, 2425 bp, Bovine  19866880626691
  misc_feature (1)..(1): n is a, c, g, or t
ntgaactgaactgaactgaaggaaaaatctaaacagatggtgtatgtttatttcttcctcatttgtaaggtatggagaatatattttattaaaactatgttaaagagtcttgtttgctatattttattttaaaaagaaaaaaaaaaaaacactagaaagaagctgatttgatgtgatgtatggcagaaaccaacacgacgttgtaaagcaattatcctccaattaaaaaataaaattagcgtgctatcccaatttttttctccatttactatttcttcaacatattctggggcctatggtagctaatgaggatacaaatatgaataattcacagcctttgtgcccaagctgcttagagtctaggtgcagtgaaaacctgaaaaattggaatgtgtcatacaggctgtaaaggaaaagtcgcaagattgagtagtgccactaaggagcaagtagatttgaaggtagaacagacctaaacatcatgtttgaaacagttttcaaaattaaatcctggcaagtaataaaatagattaataatttgatttctttaagttaccatttataatagatcagcaattctttcaaagtcaggtaaaaataaaatccttactacctttaactaaaaggaaattaaggaggagatggggagagatcatgggcaaaactatttcagttctttctgatatatggggctctggtatacttacactagggattcatgagacacacagcctgcattctcataatgaaaagatgattatatttcacatacccctcccttaggggagaaaacattgtttaaaatcaggttagccagcaaatacaattgcttaatttcatcatgggtttggaacccaagtgtagctttatagccatattagcaagcattagttttggtgtgtttttctaccaaatccttttaacatttctttggggagatgaaaatacagattatcagatttcttttaatgcctttatccactgtctctataaccaatttcaagatgaaaatgccagagagactttatgataaatagcatcactgtgctctgggatattacacaatacaaactataaatcaccatcctcagagtggctccatcttttgttgttgtaattttactagcttctagcagttaaagcagcaaatagaggtgaattaaaaagtctgcaaagtactgagactatcgataactctattctggtctgaatttccctgtctctcagtgttcaaatttagagtgtatttatttaaggaaaatgtcttaagaagagcattcaacacacactccttttaagtcatgttgaacacagtgctcttgcattacctacatttgctcctgtttcaaatctgaattctttttctaaaacatttgttattattttaatttgttccatttaaattattaaatcatactatatgacacacaacaccaattaacaagatcttagtaaaggccacagataaagatttgaattattaaataaacaaatattagtttccttgcaaaatttcccccttatatcaataaataacactttttcagttcccactctcttaccaatttatgtataattaaacactctcttcaggtgcttctcatgcttccttgactgccttctttgtcttttattaattttccttctcttcctatgttataaatattagtgttacctgaaatgtggtgcttttccctatactcatctctacacttttcctgagccattttgtctgctcctaagttttcagtatatttcaactctgtaagcctattaaaattataatcttagacaagtcttctcttctaaaatcttcaaagactgtatacctcaatttgatattcaaatattttacaacataggtttcaaacattggttatgtccttcattttccaatttgatgtggaaattccagtttttttcatttacacattatattaattgaaacgttctcaagagataaaatcaggagtgttgcatggaaggagaaaaaccttgtttcaaccttgttccaaagagaatgtaatatatgtatttttggctcatttcattcaaacagtatctattctaacaattagtcaataattgaattattaaacaattactttgatagtctttatggaataatcttatctgttctgttctttattgtatttgaaatatctgactgatgaattatgtatattattccctgccaataatacgtagtcttaaaatattatggttcactatttctaatggatgcttaatgaactatcacaaacagaaattaattcatgtattgattcagtttacaactttatactgctgttcattttcataaacatgaatatctttacagcagaactggtgaaaaataacgcgttaaaaaaaactttaagaaccacttaattttatagtgttttggagcgatttttataagcag

SEQ ID NO: 58283 - DNA, 4036 bp, Bovine  19866880731002
  misc_feature (1)..(1): n is a, c, g, or t
ncattcacgtttcataaaacattcatctctaagaaaatatgaaggaaaattttatgtttcaagagctcattgtagcttttcagtataaactactgtttttaagttggcttctttataaatgctaactagtcttttaaagccaaattaatcacattaattaaaaatccaaattaagtacatcaaaacccccccaaaatatttttactagtaaagaaattaatcatattttactataatttactataattgaattcatagtaactattgcaaatacttattgaccagacaacagtgttctgaaattgtgtgtcaataaatactttcaaaattttgattattatttagtagtaatagaaaaggataccatctttaataattagaaataaattataaataaataaagccagtctagtttcaggtattattatattaattattgaatattcaatcttttcccttattcacttattttattggctcacagaacattctagtagtttaatgactgataccttttgaaagtaacgtcttaatcaaacactgctcccttttacatgtgggactgggggtaggaaatctttgttcaaaaacagatgaatgacctcatttaaattctcaccaaatatttttgcctttgcatttcttcattagatccagatgttacagcacgaactgcctgtagccatttatactaataatccatgaattgagattttttgctaataatatagcaagctaagtttttattgtcatttttacttaaaatgctagaagagatggaggatgatggcaatttgcagtccacatagtagcctatttccaaacctccctctttgaatgatacattaggaagtaataggcaagatgttgttctttcaaaacttcactgagtcatgtgatttaaaaaaaaagattgaaggacatattttactgatgtatgcaattgatcaacatgagagcaaatgccaaataatttattacttagtcgcaacactaaacaaagatcacattataaaaaagacattactcataaattaaatatatttgtatatatttccatacatatgtgtataagaggaatatgtggtatgacttcttacagaagactgaagttactgtacttcccatgttagtattactatttagatggtatcaaatggacacagtactcattcatcaaaattagtagtgtcttattttttaatacatgcttttaaataaatgacagccacctgtggtcttttagcataatccttccaaatgaaaacttacaatttttctgagacctgctgtttctatgggagactttaatctgctaagatattttccgatttcatcttattctgggtagtatttatttttctccatcttagtttcattataatgactgactttctttgctttctgtcttgctaatttttttttttaatttgatgccaactgttccccatctatttttttaatcctagtcagaaaggtaccagcaataaggagacctccacagaattatgccttaaataaaagctattaatttggatgtttctttccacttgatgacacctttctttctttggaaattcaataacatttaccacaataatctactgacaatataataaaatgctattatatataatatagatagttgatattcatatctggttagtatctatatcacagcagttatattttattcaaatagaaaatctgaattattgtaaaagttaaaaattaatagaaaaattaacagagactattgattaacattatatggagacagattttgttaataagttaatatattcagttttttacctattcttcaaaaagaatgaatttacacattataaaagagagagtaaagtataagatttgacattgttgggacttaggtggtccagtggacaagacttggtggtgcttcctctgcagggggcatgggtttaatctctggttgggggagctaagatcctgcatgccacccagtgtggccaaaaataaaaacaaaaaaaaagatttggcattgttgtcaaggggttttcaacattgttactttaaaaaaatcaataattttagagagtatatgtaaagtacaaggtaacagtttctctaagattcataatggaaaagattatcatatgttaagcatcaaagaagattccacaaatttataaaatcctgacaagtaatatattgaaaatcaaaatgaaaagagttcaaagatgacaaattgtcttaagaaagcataaagaaagatatggcatgagcaagtaccagtgcatatatccttcataattgtattcattctactgtctggaaacaactgaagaaaagagaatgtgcaagcaattattagaaataaaatgaatttcccaacaacacactgctattatagagggcagcatttatcaggaacttactatatgctaggtactattgtacacatgttaactgaattcatacgcaagtaatttatgaagtaggcattatattccattttaaagatgaggaaactatccaaacaatctaagtcacttatcataaactacccagataattctatcctagaaaggctgactccagagcccatattcttatctactacactatacttgccctaagccctacttcttgcctcccacaactgacagaatactttggattggctggaatgaaattacactttcttagaatacagtgtgaatgggggctgatatcccaatttccttgtctctacatgcttcaattattccatgtcccttttataaaaaactgtatttctcagtctcacttatgttttactttagtggagcatttgttttctatctctttctctaaaacaagtgtttttaagagtcaaaattatttttgaaatactcataaatactagaaatcctaatttccaagtagaattcacatatccatacataaggttctcagctgcatatttctccccatcaattaacacaaatgtttggctattgtaatcaatcatattattattgagagcctcaaaatttacataatccattgatgacaaaggttttataattcaattagttcccagaaatttatatttaatatattaaagtcataaagtaggctggtaattttaaaaacactttaatttactaatgctgcatatttagcatttaaataatatgagtaattataaataaataatacaatatttgaacttttattttcatatcttatgatcactttaaaatttttattaaatcaaaaattgcttgatttccaaaaggatggccaatttatcacataaggagttagatgtaaaaacaggaaaagaaaaaattttactgtaaacattctatcttctttatgcataatcaatgaaaatttatcacattaaaacttacataatttagtttaatatcaaaagtaaaacaggaatgctatttactgaaaaccatattttttaaatgaagctctactattcactaagaatactacatattgagatctataagtggctattttgaaagtaggagtacatatatactatacagttctaggagcatttatgtaatgaatataacttcaatatttattgtgtaagtccaataatcactttccaaatttcagtcaactaagaggaaaatgatgcgctaattaaagaaatataaatgtttaacaagaagcagtaatctatatatatgtattgtgcatctgttttatttcttcatttcaagcaccatgagcatttttttttatatataggatgtctctattttcctaaccctacactgtctaccaaacattatacttgcatttttatttacttcctggtttatattttcctctggatttcctttggcctacagctaaatcttatattgttgaaaatcagaattagaaacttgaccctctttttgactctgtctttcacttggcatcagtattctcccattcactatctttatagacatcatatcctcagaatcttccttaattctaggacaccagaaaagataaaggaaacagattctcctctcagattcttcataggagc

SEQ ID NO: 58284 - DNA, 3096 bp, Bovine  19866880805136
  misc_feature (1)..(1): n is a, c, g, or t
nctggaaggggctgcaatggtaaagcgtgtccacaggactcctcctgaaacattcatcactatggaatccatggtgacaaggaagcatcatagatcatataagaaaacaaaccacaatactataggattgtttaatttttcttcagcttatttacattgatgtcatctcattcaaatttttagcagatacacttttttttatttactgtagtctaagtttctttttagcattattgatattatctgaaggaagaagttgattgtgactgaatggtagaagttttttacatttaaaaatatatgaacaagcacttgagactatcacaacattgtttattgtctatgttgctgctaagtcacttcagtcgtgtccgactctgtgcgaccccgtagacggcagcccaccaggctcccccgtccctgggattctccaggcaagaacaccagagtggcttgccatttccttgtccaatgcatgaaagtgaaaagtgaaagtgaagtcgctcagtcgtatcctactcctagtgaccccatggcctgcagcgcaccaggctcctccgtccatgggattttccaggcaagagtactggagtgggttgccactgccttctccataattggctataccccaatacaaaattttttttgtattaaaaaatataatattaaagaaaaactatgcgagcaagcacggacttagaatctttctttcatgcagctattacaaaacaagacaaatctctctccttgaatgaatataaactatatccattgtgtggtaaatcttttcacattttaaaattattttgtgaatattcatctgtgtgtactttaattgggcaagaaattttaggaagtttggaaatttaaaatgtaccaaagtacatatgatcatacagataaaatatggcacatgtctctattactaaagttttatacatctctacatctgtagcaataaaacataattcacaatttttatgtgtatcttgctacaatggtctgaataataactggatataaattaaaaaaaaaaaaagcatatctcttagtcaaagagaaaacaattatttagacctccatgttattctgacctcatgataacctcagtgagaatatacgggcaaaaatgagaagcgctgctgatacgactaggagtcagaagtaatccacgtgttagtaaaacctgtaatatttctcttccactttcagaactgaaacatgatcacatctggctcagtgtatcgttgcattccagatgttaacagagttggtgtgctatcaccctcttaatcacctttcactaaaggaagaagtcagggactggtcacctcaggcaattgctgtagtttcacatgtaagaaactgggtgtttttgaatggttcaaagtttgtcccgtctttatatggcattaaaatcctatgcaatgtcattcattcaaagttccaacatttgagatagcttataccactctgttggattatatttcatttttgaatcagctaggaagtgttatattcattttacaatacaacattgcaagagccaaaaattcataccccatctgttatgaactaccaagtattcctggagaagggctgagaatgaacatactatggtctggtcattatagaatgccaagtgatcaagtgaagtgtgtgtgtgtgtgtgtgtgtgtgtgtgtttaaaaggaagtttggttttttttttagcttttgattttgttatttacttgaagtagacaaaaatgtttaaatgaacacatcactatccaaaattttggaatctgtactatacatatacttaaaatagtatttgtaacctacagatgtaaagtggaaatgtaagccttatactccttgaaaataaaaggtaaaaatggttgaggatatgagactgaaaactactatgttgggaaagcaaaaacttgaagactcattgattgttaaattacaaaacaagagaaaatagggaagtattgatattccctatttgtgacacaagaaaagatgacctggaatgtgatgggtcaatggtgggctagagctactgagagaggactttgatggaagttgagactgaattaaaaaaagactgaaaaacaatggaatggtaaaaaaaaaaattataaatgataaggattgcagtttagtttattagaagttactttaaccactagagttcttgaacaaaagacttggaataaaaatggttatttttgaaaaatatattttagagattttatgcaacatagattcccaaggataagaaagtcatttacaagacgtttagatgtgcaactgtataatcttgaaaaccagagcctgaattttttttatattcaatttatctttgtttgggaaaatatcttgcaatccttctatgaattgcatgagggagtttggagaaatgggctctgagaaaccaaggtaaaaaagatatttgctacaaagctagagcctagtctgggaaaatggtcaagagtcttcaggaccaataagtatctaacatagattcttcatcgcttgtagtgctatttgcaaaatcttttatttctgcaaattttaacaaagcatgaaatgacaatatgtgggagtagaaggtgctttgcagcatccatctattcagttcagttcagtcactcagtcgtgtccaactctttgcaaccccatggactgcagcacgtcatcaaatccatgatgccatgcaaccatttgatcctctgctgtccccttctccacctgccttcaatctttcgcagcatcagggtcttttcaaaagagtcagttcttttcatcagggggccaaggtactggactttcagcttcagcatcagtcctgccaatgaatattcaggactgatttcctttgattgactggtttgatattcttgcagtccaagggactcccaagaatcctctacaacaccacagttcaaaagcatcaattctttggtgctcagctttctttacagtgtaacactcacatccatacatgactattggaaaaaccatagctttgactagatggacctttgttggcaaaatagtgtctctgctctttaatatgctgtctaggtggtcataacttttctt

SEQ ID NO: 58285 - DNA, 1462 bp, Bovine  19866880814749
  misc_feature (1)..(1): n is a, c, g, or t
naccttgttagtaatccccttaaagttaatatcttttcgagacgttacctttgttgtcatatacacatgatcctctaaatattgaaatcttttataaagtatggttgctttaaaagctgtctataaggtaaaaaaaaagtctctaaggtaaaaaaagaaaggtgagaacaaactacaacttgtgaatcacttcacgattgtgaatatacactgatgactttaaaatttactaaaaagtaataaagaatatttatttgaaagtattttcctctggaatataaaacataaacatgaaacaatagttatccttgcttctactagtctgaaaaatttcaaagttgtttaaagcatatctaactgtctgagaatgcaggaatcataatatgattctgggtaccttataaccacatctagtgatgtaagttttggcaacaaataacacctgcatttttatagagtacaaatatattcatatatttttcttgctctcttttgaaaaattttccctatctggagtgtttatgtatctgagggacttgatttctaagagaaacagaattattgtaatcatccattcctttacatgctgatgattatctcaaaaatgaaatatgcaattaaaactgttaagaagaacatcaacagattaatgtcagtaattcagatgaaaacagaagcatgtaaaaagtgttactgggtaattttttctaaatgactatgtgcataattacctttttagcaaatattcataaaaacccatgaataacaaattgttggttaccaattcatgtttatgaacactttttctttaagtttgtgtgcatgaaagatgatgcaactgaccatttgtttcagaaataatcgtctttatcttcatgtaaaattaccagtataatatttaattttaacatgttttaaaacatattcatatgttaatatacaaaaattggtatctgacaatcaaaaatagtagctaagtcaaaactgtatttttcaaatattattataaatttttcctttattcaaaagaattttcatacaaaagttaaatatggcacaataaattttcgctaatttgttttagaatgcatagcatgtcctttgtatcaacattatttatttagcaccatttccattcctttactggacaacaaaatcggaagcatgaattttgaagatgcagaactatatccactgtgacaacagtgagaaaagggatcagtctgcacctaagtgtgccttatttctatctaaaagcttacaaaaggtccaaggaggagccgaatattgaagtgcaggaaatttttatggtcaaatacatgttatgtaggcaatacagcacatacccaaccgctgatgtatatttattaacagtatttttcaaaattacttctaaagtgatattaatatattatcaatatattgcttacgagagtcaaggcagtatactcgttagcttcag

SEQ ID NO: 58286 - DNA, 2163 bp, Bovine  19866880927597
  misc_feature (1)..(1): n is a, c, g, or t
ntaacccaccccaacacacagacccacaattaccatattgaatataatcactatttcagatctttgtcagaacctattgtgcttctctggtggacctgcctgactttatagaaacttgcttcctttttgtaactctctgctgacatgtgcctgcttcttttgattttacctcctgccactcagtctcagcttagtctgaatccctggcacttcaatcatcctgtccatttggtctttgttttctgtttcttcccactctatttggaaatcttgctgatgacctcagactaagcacttggattttacgccctgtttgctcctttcctgttgccacgggagtcattagacttggagcacgtcatctctctctggagttacagtatctgttttctaacctcctgggtttgggtctgtgcctgccagacattcactgtcttcaaggtcattccagttggactcttgatcttggctttcactggtctgccccagctggctctgtgacagtttccaatagttagcagacatgaaagaagtccttcctttcctgtcacagctttaagtaagtcaaatataacacttcctacaaactcacagggccttgttcaatgcagttcagtactgttttcaaatgagcactttctcttttaggttttctcgtaacatctatttctcctcaccacactctctattctccttccttactgtatttttccccactgcacatactatataatatacttacttatttaacatgttgtctccctcctactgctgggacatgaacgtcattaatacagggctttttctgtttttctcactgataggtctctcagcctggaagagtacatggttcatagtaagacacttaataaatatataatatataaatggatacatgaatgaaaatgagtaaactcttggtaggacagacaaagtgggagtaataaaactgcaactaacaatttccatttccggtaggtacactaagactggcccactgtggtattctctaaatagttgggaatttgcactctgggcattcatgtctgcaataatctcactgtttactagcagggaaatcaaaagttaagtttaccttacacaatcctatgagcaaaatgaatagctttttaaaagtacagatttcagtaaacttactgacacttaaaaggcaggcatggcttactctttccattagttattttatgagacagaaatcacattgctcagtgattcctaaccttaaattgctaaaaaaaaaaaaaaaaattacatttttcatcattcatctattttatgccttttgtaactaaaatatgttttattctcattgaaaatttaaagtttggaatctcccagttgagaggaatgatcatacacttgcatttatattggatgttggaatggcaattaatggtgaaatgaaagcattagtagctcagtcatgcccaactctttgtaaccccgtgaactgtagcctaataggctcctatgtccatgggaatctccaggcaagaatactggagggggtagccattcccttctccaggggatcttcctgacccagggatcaaacctgagttttctgcattacaggcagattctttattacatctgagctaccaggaaagctaaaaatatgttttattctcagtgaaattttaaaatttggaatctcccagttgagaagagtgatcatttctcctcccactgtatgataattggattgttttcactttttggctattagagataaactatgagtgttcatgcccaagtttttgtgtgaatataagttttcagttctttgggcttgttgcaaatagcaataatgccggatcatgtgataattttatgttttgttttatttaaaaaattattttctgtattggctatgccattttacattctacagcaatacataagtgatctagtttctctgcaatgtcaccgatatgtattattgtcattatttagcctttgtgataggcatgtggagacagctcacagtggcttcaatttacatttgcaaataaataataaagctgaccatttcctgtatttatttgacatccatgtatcctcctcattgaaatgaaaagtttgtgccttttactcattttgtaaagagggtgcttatttatttttactggttagttttaa

SEQ ID NO: 58287 - DNA, 1120 bp, Bovine  19866880948477
  misc_feature (1)..(1): n is a, c, g, or t
nttaaaagttaaagtggttttatgtatggtgtgatttgtaccagtgtttataatcatgcattttattgtattgtaaatgttcttttagcattttgtgatttttttaacattagacattttctttataaaattggattagatttaaatgtaaactgaattctatcagatcaaagaaaagaatggaatatatgataaacattccatctggtgagcattgagagagaattgcaagtaatttgccatcagtctcagtgcaattaaggaacaaacaaaactgaatacgtgtacttgtataggtcatatagaattaaacccaatttagtgcttcccaattactttgctctcagtatggttcttttccacataccttacttactcaagaatagtgttttcaacagaaagagactcacatacttagagaatgaacttatagttgtctggggaaaggaagggggtaaaggatagttaggtagtttgggaaggacatggacacactgctgtacttaaaatgaataaccaacaaggacctactgtaaagccctcatcaatgttatgtggcagactggatgagaggggagtttaagaaagaatggatacatgtatgtgtatggctgagtccccccactgctcacctgaaactatgacaacattgattatcagctataccccaatgcaaaataaaaggttaaaaaaaaaaaaagaatagtgttttctctcttaaacacaattgcattttattcttccatttcataaaatctttttttttttaatggtcatttttgggtcaaagttatatttattaataattttctcaaacttgtgttttaaagtgagacctttctttataaaaagtggtagtctctaacctctcctcaaaaaactgattctcaaaagcaattacttttaactatgttacgttgttgtatttgttatttacatctaagtctccgggagttagctccctttcccacaaaatgcaacaaaaacactttccttctgtccattcgtaaacacagttatagttctggatagatcacttatcacatttatatgattatgactatgtagacataattcaaaactgagtcatatagaatattaaggctactttttttctttt

SEQ ID NO: 58288 - DNA, 873 bp, Bovine  19866880997882
  misc_feature (1)..(1): n is a, c, g, or t
ntttgaaatttgtggtaactggatgtttgttgtttttggctaaaatattctcttctctttcttttcaaggccaatgtaacacaaactgaaaaaaaaaaaaaaaatcaggctccctctgtctttttattcttctaagttttctacaataagatggagaacccttaattaaccacactgtgtctataatagaaaattgattaaaaaaaaatacctgtggctacaggagtaatttctttataaaagtgaagaactcagctgttctatattagaagaaattttgcttgttttcacagctgaattatcttgctttctatattattagggaaagtactaagaaaatcaaatatgagattttcaagggattttaaaggaaaaaaatgcagcttctaacagttaagctttttgttgctagcatatttttttctagatcatgaagcacatactttgtaaccctcatgaaagagcataaaataaatatgtcaggacttccagcagctcaatactatggggcagcctggatgggaggggagtttaggggagaatgaatacatgtatatgtatggctgagtccttttgctgttcccttgaaaccatcacaacattgttaataggctatctccctgtacaaaagttgaaaaaaaaataattcttaagtgaggcagatttaatattgtcaaggaaaaagttatattgaaacagtttattatattagtacagacactggaaaggtcagttagtatgtatccaaaagaactttaattccaaaaatataaccccaaaacaattagggatgaacgcaaaggagcacaattatttataatgatgaataacagaaaatctattcaagattacaagattgaattattctgcttg

SEQ ID NO: 58289 - DNA, 815 bp, Bovine  19866881071980
  misc_feature (1)..(1): n is a, c, g, or t
ntcttgcatgaatacagctaaatctttaagattgctgttatttatttaagaacaaagatacttcaacaccttatattcgtatcaagcactaagtaatcataggtaaaaagatctattatcatcacatagcattttcttattactgttttttctacctgttaatatgttacttatttctaagaattatcaagtttttaatgcacttattttttcaaaaacaattgtctttatgaaatatggtaagtgaattagtgaaagtaaaatactgaattcaaactgagtgggtaggatttgaaaatctatgatttaaattattgttaataacaaagaattttactcaaaattgtatttctttttccattagaaatagacttattagatctactgccatgaaaactaatgcattccattcaccagaacaaatgacaactatgggctggttttcattgccatagaaaacagatgaaaatttcaaagttagcttttttgggattggttcctgtatatgcagtaccaactgaaaactcaccccatccttgaagatggaaaggtaaacactccctcaacgttttgtgattcatttatcattcatgataaatgaataatggaacggatgttttatacagatgaatactcttttcctctctggaagaggcaatgaatgaacaacccttcactatcatttgttcagtgtcagacagagcacttggagggaagtttcatgcaacagggttttatgggaagaaaacatcttttgactttttttttttaatgtttgggaatcattttatatgttggcctattttccctcccag

SEQ ID NO: 58290 - DNA, 1340 bp, Bovine  19866881090252
  misc_feature (1)..(1): n is a, c, g, or t
ntgactcaatgaacatgaatttgagcaaactctgggagatagtaaaggacagaggagtctcacgtgctacagtccccgaggtcacagagttggacatgacttatcaaatgaacaacaataatccaggtgacctgatttgaaatgtcacatatgagatgctaacttcctataagtatcctcagttcttctcattactaaaaaaaaggaaagaaacaggaatgtatcaatagcatatcttgccatttgtataattaagaatagtgcaatgtttgttgacaatatatccatgattttctgattttttaaagttcctaatatagttatgaacctcatttcaatgtaacaatgaaaaaataaagtgcatgttaagtgatgctgacataaatgacttcttccatgtaaattgctataggtaacagaattcatctttgcagtaaatctttcaagtgtatgcctaggagtaaagcagaacaattttgtataaatcatgttttgtaaaaaaggacgtagaacaggatacaaatgtatgtaacttaatggaaatactatcactaaggatacagattgacaaatggaattctcttgtctccagaagctgtgtttactgcctttttccaaagtgacttaatggatttttaaaaccatgtcttcagttacattgttcttgttaaatggaaactttaattttaagtttctcctgatttcatttaatggaaaagtctcttttgcataatcccatagcttttctttattggaaatatcttttgtaaaatttttctctgtacttatagttgatggaagaattttgaaaaatgaaaaggcacatttcgaccataagtcttgctccttatttaggtatattactggaattacctctgttaaacagctccagatttctcaaatgatataagatctaattaagggaagagagtgcattatgacataaaagatttttttaaacatatattcaaaataaaatttccatatatttgttcaataaacatgtgttgagtgcttactatctgccaggctaaggatcaagaattggaattacatagatatataagattcctagattattcccatatgaactattttttgttctacactttgagagtttttgcctataaaattaaaactttattttctgagctgcaataactttattataattaacgctttttgaaaatagtaaaaactcatcattcacaaaactaagatcatggcaaccattcccaccacttcatggtaaatagatagggaaacaacagaaacagtgacaggtttattttcttgggcttcaaaatcactgtggatggtgactgcagccatgaaattaa

SEQ ID NO: 58291 - DNA, 871 bp, Bovine  19866881313502
  misc_feature (1)..(1): n is a, c, g, or t
nggtggtggtgtgtcaggatgaattgaccctgctgcagaaagtgactaaaactaaaaaaaaaaagaataataatagcagtcaatttagaaagtacttttagaaacattttctaatggagaggtcagtagtttgcccttaaattcatatttcttaatctgtttaaagtatgtcttgtcattcatcatgttactttgcaggaacacttttaactctcatttcattttacttgatgtagtgtagattcaattggcatgctagcaaatgttcagaaacattataactccaattggaatttctctagttggcacaaacagtaagataatgagacaactgcagatttatggccttctgcttcaaacccccattttcatctgaaatgtaattcaaaaagatagtcttaaaacatacatgtataaaatttttcctatgttagaaatataaagtctacaataatacatttaacattcaaataattagctaagctatatggatcaatataaaattaaatttgaaaacatgtcctatatattaataaataaaagtctaagtcagtgccaagagtttaacttattctttgttcttaaaaaacatttgcatcatatactgtgactgaagtgtgggaagtttccaaatatagggaatattacattaccagttttctacttaatctatgtattataagagcacagattcaatgtgattatatacagcaaagtatgttgtaatttgaaggcccagaaattatatttctaatttgtgcacatattacaatttggttacttccagtgtattaaattgttggattattagtgttctatagagatagaggggctttcttggtagctcagctggtagtgaatccgcctgcaa

SEQ ID NO: 58292 - DNA, 1520 bp, Bovine  19866881347818
  misc_feature (1)..(1): n is a, c, g, or t
ntcatgttgtctgctgttctctttatgagccaatttacatcttttgggagtagacagggtgaaattcagaatgatttaggaaccagctggatacagtaacttgcccatgttttttctctgcctatgaagagaacatctggctagatatgctggatggagtgtgcttttgtcttcagaaggaatcagacatgttcatgtatttccattctgaagagaaaatgttgctatggtgtattaaaaagaaaaaagtcccacctgtaagtaacaatttgctaatacactatggcagagttatgttctattttaaggtcttggatggaatgcatcttcactgcacaaagagtgaggagaaaatgagctgagaccatgcttgccatggcctttctttaggttgttaaatctcctgctgagaaaacacaggaaatattaatattctgacaggagctgtcaaggttcacatggcggtctcatgccaagcaggcttagtaatacttgaaggaaaataatcctaaacaagctggagaaaaatctgagcataaaattgttaccattttaaggtctttcttttaatattgaaaaaataatacacttattagcagctaagatgataatacccaatctttttggctaaagcatattgccaataattgactaactataccactaactttcatttctaccaagtagtatataaacacatttaaacacatgtatatgacacatatagaattcttattttacaaatttaaaaatagatcttgtatcagaaatagctgctggtagatattgttacattatgtctatagattcctttttcctcccatcatatatcagtactacaaatgaccaaatacacactgacattaaaggtactttgttgttggcaacagccatcatttagacttctaattctttgattatttcctggtagctttaaaatgcaaaaattacttcttgcctaatacatgcaaatactcatccaaaaacgttttattctcagaaagatccttaaacttcattcaaatggtaatgtaataaaactatatacaaatcaattaattatatgtatggcattaattttatcttcatctgtaccacatgttcttagtctaagctaccagcatcccttctcttatctattgaaatacctactaaccaattttccacatcaactgttgcttcctctttgatcacttaccatgtggcatactgagcaaccatttcaaaaaacatatttgaccttgacattctctgctgagaccacactttgtctttccatcactcttgacaaagacctacagggctctgtgtgccccagcccctgcccacatccccagatctctgtggtcggtgtcatgcagcttctttcctcccctcctgtaagtgaggctcatacccctagtaggtctttatcaacttgttcacattgtttggagccctctttccccttctctctgtccttagttaactcctaactcatccctcaaagggagtatttcttactctacttccttccctct

SEQ ID NO: 58293 - DNA, 2405 bp, Bovine  19866880397329
  misc_feature (1)..(1): n is a, c, g, or t
ngttcatctagtcaaggctatggtttttcctgtggtcatgtatggatatgagagttggactgtaaagaaggctgagtgccgaagaattgatgcttttgaagtgtggtgttggagaagactcttgagagtcccttggactgcaaggagatccaacccagtccattctgaaggagatcagccctgggatttctttggaaggaatgatgctaaagctgaaactccagtactttgtccacctcacgtgaagagttgactcattggaaaagactctaattgatgctgggagggattgggggcaagaggagaaggggacgacagaggatgagatggctggatggcatcactgactcgatggacgtgagtgtgagtgaactccgggagttggtgatggacagggaggcctggtgtgctgcgattcatggggttgcaaagagttagacgcgactgagtgactgaactgaactgaactaaagaatcctttaataaagaagagtactagtatcattgaacactgaagtaatgctctatgttggttattctgtgtcagagaataatgggaacaatggaactgcattccttgatgatagtgcaaataattggatgccaaagagttagaggccaattaggggtccttattcaccacagaccaaggtggacacaattatataataagccacagagcagtgataaaaatccaaacattttgacctttggggatgtttggtggcactgaccatggagccttcagaaacaaaacaaaagggcagtcaactagggagcttcttggcatgtgtggggagaaaaatcttaggcctagtgggcacaaaattaacttgaggtacagtaatgaggatttattcttatcttgttcctagatttgagctacttcgcaggcctggagctctttatttgaggaggccagggcctatatggaatgacccggtgatagggtcagagatatagtatgactctccctccacgtctgccttaaaggtacctgcagctagttaacaatgattgggtctagagcagtagttcttaaacttacctaagcttcagaatcatactgatggaggactttaaaaacagatccctgggtcctattgatttggtatctttggtgtgaaaaaaaaacagaatctatgtttctaacaagttctcaactgatgttggtgttactggtttagaggctactctgagaatcactccacttggaaggaaagcagatagacctcatgggtttattagatattgtcttttacatgatgctaatgcctgcagacctgaaataccactgaagtccattggtcagagttggaatatttgaagatctgataattctgtattattggatggcccaggtccgtttttagacgggtatctggaaagacttcagaaccagttttttttctttctaacagaccaagaatatatggtaagaatatgaaaatttcttaacaaagaattccctgatatggagagagttctattgcataataaggaccaaatgaagctcctcgatttgtcctcctttgccaagattaatcaaaagcaatacctcatcccaagagaatgtgccacttccaatatttaaagcaattacagagatggtgaatgctatgatagcctccttttcctctcttgctatgtaaaagttagatgggtcttcaagaataaagatatattatcaaaacttaatcaagtgatggtgctaatcacatctgatattcccagggtagtatcttataatgaaagtgaaaaaaaaatttgtaacttgtttgtaactgatgcgggtgacttcttaaataaatcagatagtttttgactactggaagaatatattaccagatttaaaaattattattcacaatgtagtggctacagacatgaaaacctttaaatataaccatataactaatactttctctgtcactttgtcaaatctgctaatttctgtggtgtaaattctctatctatggctagttttaagctaacactgtggtatcactgaatgtaaagttacaaagagatggaaagtagcctattatgtattatttctgtcaaacagttgcaatagacttaaatctcaagaacatatataatagtaaaatatagtaaaataattgagaactgatgaattttgaatatttactacttttcctttaagtataatttatttagttgtaagtttgtatagcttaatttttaataacagctgtttgacaaggacttgcaaacctcaaaaactatactagcctgttttcactaaccagtccatgcttgctctgccacaccattataaaaataaaattgtaaaacagctctgctgttatttatcccaggatactgtattatcccttatgggattctatatcttgtctgcaccttgcaaataaatagtttgt

SEQ ID NO: 58294 - DNA, 1055 bp, Bovine  19866880448499
  misc_feature (1)..(1): n is a, c, g, or t
ntgtggggaaggtgggagaaggatgaaaactgcctgtgatgaagacagactccacggaaagatgcaaggaaatgcagtggaatcacagcatattaaattatgatgcaaaggcatgctttgcggaatataaaagtgaataaatctgtaggataagtgacagagaaccttctagagcctcatgctcagttaccagagaggtttatgtgattcatgagctcaatttcaaaatgtcaaaggaaatatcttggaaatcacaggttatcagtcatcaaaaactgcctatgggagagaaaggactttactggagggtcttgttcaaatgcgatgctgagtcaagaggtctgggtgaacctaagactctgcatttctaagaagctccaggagatagaggtgctgctggccctggcaccacagtctgagtcacagggaattaggaagcaggcagggtaagggggacagtctgggactgaggagaggggtttctgagaaaatatcatgtaaaaaaggagcaaagttaggaaacatatttttgcacattatagcaaggtctagtaagcatctctaaaaatggattatccaagcaatagctctgagcaagaaaaaaaaaaaatcaatctacctccagtgatggaaaatgctctaaaatggcccaggactctctaaaatgatcaaatcaattacaaaatcatctacgtgagaaatgcagcccatgttcagaatctacccaggaagtctagggtgatatttacctcgtttgggggctttatttttacttgctatttctttcacgaattagaaaccagcatagtaccttctacactttcttattgactctatcgtccaggaatcaggacagcaggggaaacaatggaaaaagaacagacccccacttctgctgggcgggctcactcccatgtcccttccagcagcctcccccaatcaaatctaacaccaaaggggtgacccggagtgatgggtttgggacaggtgagcaggagagggaacatggggatgtgcacagggtggagtgccatggtttcatgaacacactgctg

SEQ ID NO: 58295 - DNA, 1699 bp, Bovine  19866880449195
  misc_feature (1)..(1): n is a, c, g, or t
ntaggaacctggcaggctacagtccatggggtcgcaaagagtcggacatcactgagtgacttcacttcaaaatgcaaagaggaaaggctgtaagttaatatgaaagatcaaaattaggtattgcacacatcttgaatagactattaactctattcattaattatattctatacattgaggtcatatactcagctgcctctagaactctgggctttcctttcaatccttttggagcagatactaaactgtccataatgttcccaaagcaatgaccttctatagaatttagatgttctctttgtattttccgtaatgattgggaagtacctaagtttagggaagcaggcatttggaagatacctggaactccctaaatgctatctttttctcctcttttaaatgattagataagatgatcttttaaaaaatttttagacaataatttgcaaaatttttgaatgaattttcaaaattattatgattttcaaaattgttgttacaatttattagtattcagcccacccctgttaaagaaagttaaagtcaaatcttttctccctttattctgtgtctctgctgtatgtaatcaaatatattctcaggaactctctactttgtttccctttattctgtgatgtgttccctttattctgtgtctctgctgtatgtgattaaatatattctcagagcctctctactttccctgattttttctttccgagtgaattattatccttttatgtttattttcaataatgtgtgattcattcagaaagaaaaaagttatctgtaaactctatctcattaaaactggggggtggggagaaagaaagttaaacaggaataaatcacatttaatttttgtcaaaaaaatttaagcacgaaagtagctctacttgaaatctccaaatcttactctatgttgaaaaattcaaatgtgaatttgacagagcatcttcatgtgttaggagaatagatccctattacattattacatcattacatctgattatcattttaatttaaaattttaatttagtcccttggtcatagaaaggatctatctgaatgccactttatacagccataacccagaacaagaacatgtgacattagggtattttaaaagggttcattcacttctttccaaatacagaaaaataatgtcggcctgactcatcttggcttctctggcagaaatgacaaatacactcaggcagacagaaccccatgtcagactgatttataaaagcctggagatgggtgttgtgggaagggaaacctatttgtcaaatggccatgcctgcttacgctggcttctccagtaggcaaggaagccatctcggattaggctataaggaacactggaatacttttttttacattagatatcggaagttcaaatatacttatcctctggaaaagaggtgggtacagaatcgcaaaatgtgaggttgtcacacacgaactgacagcatatgtatgattaccgcccatccaggcagcaaaagagaatcacatctcctcagagcacaggcctggactacccacttcctgtatgcagcacgagggataggtatagaacgagaaaaagagaaatcataaccaaacaagacagtacaaagcaaaagagacaaaccaaccaacacagaggttccaggcaactcaaaagaccaagtagagggacggagcgttccta

SEQ ID NO: 58296 - DNA, 1163 bp, Bovine  19866880460912
  misc_feature (1)..(1): n is a, c, g, or t
nagccaggtcattagtttgaattggcttggatttttctttctgtttcaaagagctgtaatttgtgttatgtgcacctcaacacaaaatggcatgttgtgtcatgcatgttttagctccaagtttattgagcccgtatgtgtcatctctcccaactactttttaccactttgaataaaagcgtaggtgttattacggcagctcctaaaagcaagtctattgatctattaaaagaagcacttttaattaagcaataatgtgtggttgaatcaagatgccaagtcgtaaatttctatgaatgattgccaggggaaggcattgcagaaattttagttattcgccagatttgaaagctgttcttccaagaaaatgtctcttcctcattgggaaacccatatatttaatagttgcactttttatactgtttatgttttaaggacgtcaagcctgaggttagccacatttcaagatggatgatcccacctaacttctgctgggacgtccccttgcatatagagctcttgcttccctggttgctcaaatggtaaagtctgcctgcagtgcacaagatatgggtttgatccctggatcaggaagatctcctgaagaaaaggatggccacccactccagaattcttgcctggagaatcccatggacagaggagcctggcaggctacagtccatgaggtcgcaaagacttggacacgactgagtgactaacactttcactttcacattgagaggcatttttccatagtggataatttctccctgttctcttctaaaaagagaaaagattgataagctattaaaacaatctcatattgttgcagactttaaaattttcaaatcctgtgcaattagaacagcagatctgctagggatccaacaaacccagtgtggagccttagaatcatcaggttcttattgcctgaccctttcagttgcctgagtgtccctttctgtaaaaacattaatgctgtagcatcaaggtctttctcagtcttaactcctgccctttcttatcctgaaatcagaccccacctagtgggttcttccctctctctcctatctatccagatttcagccaccgttaagcccgttcaaaacctaccaccctcatcagtcttcccctaaaatcttgacacatcttcatgtttacat

SEQ ID NO: 58297 - DNA, 1165 bp, Bovine  19866880476872
  misc_feature (1)..(1): n is a, c, g, or t
ncagtcacctctcatggaaagatagactagataagctaaattatgtattgtattaccacagaagccaagtatttattgcaccattttttttttttgatagggtcaaatgtgatggcttagaaaagattagtaataataaggtgaaaataatacttgatcaaggacaataaaaggcagttattgatacaaagagtttaatccagtaatttgattaaaggatcaaagttatctcagaaaatgtcttctttgtttttgcaggcagtttttcttttcacatgttaaagtctctgttttaatggatcttaaaaacaaacaaacaaacaaacaaacaaaaaaggcagaaatacccacgggaatgcttctagccagcctttgtttggtctgtgaacttgaggttctaaggaatgatgctgggtcatctcagctcttgtttcctcattcagtatcattgctcacctggggtgttttctctgttattcctgtctgcttttcagtgattcaagctatgtgactttctaagtgtttattttgtaaatgaaatgcatttatcaaaagctgcacacagaaatggagaaggcaatggcactccactccagtactcttgcctggaaaatcccatggatggaggagtctggtaggcttcagtccatgggttcactaagagtcagacatgaccgggcgacttcactttcacttttcactttcatgcattggagaaggagatggcaacccactccagtgttcttgcctggagaatcccaggggcaggagagccaggtgggctgatgtctgtggggtcgcacagagtcggacacgactgaagtgacttagcagcaacacacagaaatgcagcaatgaatatctgaatgcaaacagcacaacctgtgggcaaaggtttccactatttaccaatgagaagtaagctgagactcagaggcagaggacttttactgcaaagatatatgtgctttttttttttttttttttttatggaaactcattttataaaggtgtcctcttggctttagctacattacttatccccagaagcagtctttcagtaaagcagtatcacatcttgacagtgattgttaattactttaaaaagactttgtgaaaggttctgttcctttgctactataaactaggtcaaggttgggtttcc

SEQ ID NO: 58298 - DNA, 1581 bp, Bovine  19866880667511
  misc_feature (1)..(1): n is a, c, g, or t
ntctatagttaacaatacctcaggtcttagcatctacaaaagacagaagtactacgatgatgtgtacccttttcattgtcttgtagcacatttatcatggctaccatgttcaacattatatcaagactaaatgacctagagaaattgaatactctatgtgacccaattttcatatatgtttttaaaacttatttgcattgacatacttgtcaatgaaaacagtatgtatggacagaaatcattactaatattttgctagagaaggatcatctgttgtagatgaatagaattggatggtcactacatctcattttaataattagctactttctattctattagagagtgaaacagacaaatttcagtttcatcatttttctctctttaggagaaaatgaaaatattcaacaaaggaagcaatttacatattgactgctgctgctgctaagtcgcttcagtcgtgtccgactctgtgtgaccccagagacggtagcccaccaggctctgtgtccctgggattctccaggcaagaacactggggtgggttgccatttccttctccaaggcctcctacacaaacctaacttgacacctttgatagtaccgtccaaaagaagggccatcggtaagttcaggcattcaacacatacaaggagacattctaaaatggagatggtggggaataattaaattaattgaacaaataaacctaaaaatactaaattcttaaactattaaataacaaatgtaaacaagcctctaagaaataagctgtatcttctgcaggatgtcagaaactccctcctacagagacatggattaaatttgaagacagcttgtgatgaatataaaaccagctgacgtggcatacataacactgacaaaagatgtatatattttattttaaataaatgttaaacagatgctggaaggatctaacaaaccctgttagctatgatgtaaaaaagttttaagagttttttttacataataattgcctttatgtcatttaaggttaaggaaaaggctaaaaggtaacatcaccatattttcaacttcagcactttgcctgacgcaccactggaacatcccccatgagcgtgagggcgtaggatagcgccaggccaacctgaccagcgtccaaagctaaatgaggaagaagaaaggaaacatttcagtcccactgttaaccctgaactggactccttctgtcactgtgccgagatcactggcacacagatagtgttacttttactaactactgatagagaccgtgaaagtaaaaaaaaaaaaaagaagaagaagaagaagaaataaaacaaccactatgaacacagaaaactattaaaagagcatattaatcctgacagggttgacagtactcttgacaggtagggaaagaaacacgtcatcatgcagactttcgtcactatggtttcaaggatcatcagtgtaattccactttttacgtgcaacgcagccacagttgaaaaccacgaaaaacaagtcaattggttctaagagccactgcttttaaatctagaatactgctcttgtgttccattattaacccaagattca

SEQ ID NO: 58299 - DNA, 1336 bp, Bovine  19866880671033
  misc_feature (1)..(1): n is a, c, g, or t
naagtatagcctgctagaggatatatattgaacttaagagattaaaatggtataaccattgcaacagaatggaacatatcacgtttctcatttttcccccactaagcatgagtcttttgcagatgtaaaatgcagtcttgtctaattataaaacctggctgaagagctgcagctttctaacttttatactgatgaagtggatattagaaagaaaatgttggcttcacatacagtctgaagaagtcctccgtttgggatttcccatatcaataatttattaaggaaaaatgacacaggtagttacatgcagcccgctgttaaaaggctcgcttgcatgctttccctatttaaggcaaataacaaaagagccaaattatcaagcaggtcttaacataactgggacgttaaatctactatgtcattatgccaatttagtaacattaatgatctgtaatattaattcatcatcctggaaaatagggaaggtttgccataattaactatattaagccacaattaaaaagtcatccaagctgttgtaaagattcgagtgatgataagggtgttcgttatattgcaaacctttctgaccatggacattttgaacataagactttgttaccaacagccccccaaccctgcttcaaattcagatgcgtcaaaagagcagccacccacggaggtggtgacagcgaccagacgccttatcagccatttccatcgccttctgtggtttaacactttcttacagggagaatcagctttgaaagaggtacaaccttttagcatatctactttaattcctcacgggggagcaaaaatgggctgtctagcgaaattcacatctgtgggacagactatctactcccctgagattagggtcatctttgaaattcacatttcaaactgcacaaaatgaacattttgatgttttaaaatgaagatcttgtaacatctaagcctaaatctgagtcgcctatcaccagatgtctacaagctcctaattctcctccccacctatttgaagtctttatcgtggatgggagtctttgagtcatagacaatattgggtgaaagataaatgggaccaggaaaggggtgagctgccgcccagacgatgactgatgtaaccgtccagcccaaaggacttcctttatcagtgacccccaacctttctggcaccagggactggttttgtggaagacagttttttcagggaccggggatgggcaggggtatggttccaggatgattcaagcacatcacatttattgtgcactttatttctattatcattacatcagttcctccttcagatcatcaggtgtgtgttaga

SEQ ID NO: 58300 - DNA, 1385 bp, Bovine  19866880686449
  misc_feature (1)..(1): n is a, c, g, or t
nacgttttggttctgttcctcagtttccccctacgtttgagcatgctctgtgtacacactccagggagcgtgcttacaaaacagtgctaagctttgtatccatgtagataatgatcactaaccattgtaaacacagaactttattttttcactctctatgtctttgtttttgaggcgcaatgctatttgataaaagagaatgtttgtgtaaagtgtcccaggagattattcaggaggcagccatggatagagcatagactgagtgtcaacaggagccaccttttaattcctgctctgtctcataggactgtagagccttgaggaagtcacttgtctggaggtccagcgtcctggtcctcgaaccaggtctagaaactaatgtgacacagatttgttgtgagatatgactaaggacttccctggtgcttcagtggctaagactctgctctcagtgcagggggctcaggttcagtccccgttcaggaaactaggtgtcacatgccataacaaagaccaggtgcagccaaacaaataaattaaacaaatactttttaaaaatatgtggggttccctggtggctcagatagtaaagaatcttccagcaatgtgggagacctgggtataatccctgggttggaaagatcccctggagaaggaaatggctaccccacccccagtacccttgcctggagaattgcatggacagaggagcctgatggtccatgaggtcacagagagttggacatgactgagtgactaacactaaaaatgtaacttagattagaaaatgtttgtggcccatggctgattcttggcaccagtcagtcaatagtaattatacgtattcttaagaatgaaggcactgacctttcaggtgttatttctaaaagactaacacattttggaaaggctttgctctttcttttcatgtttttgtagtccttggtgatttgcattacttttattgcttataatgtaaaccacattgtttatagaaatttaaagagcgaagcaaaattaaaaagcaatgcagtagagttttagtgaaaagcctaactgaaaaatctatgaaatgtcttttctccaaggagcaagaggaaagaatatcactttttctcttagttattggctcccctcccaccaggttctttcctgacgatcaccctgtaccccagtcatacttttcagtcccccacgaagacttctggcatttttctcaatgctttcaacattcttgacagctgtcttgctctccttgaagacatgacttctgtctcttatttctattgctctagtttttattgcagcccctgacaagttacacagtattaataataattcctaacacttgggaattcttaacacacgtggcctctttcctaccc

SEQ ID NO: 58301 - DNA, 1599 bp, Bovine  19866880697820
  misc_feature (1)..(1): n is a, c, g, or t
ngggttaggatggggaacacatgtatacctgtggtggattcattttgatatttgtcaaaactaatacaattatgtaaagtttaaaaataaaataaaatttaaaaaaaaaattacaaaatatttctaaaattaaagaagacctaaataagcagagagagacaaatattcgtaattgcagatccaacattgttaagactcagatttctcaaaatattctatagctaaaaggaaacattaataaaatgttcaggcttttatttaaaaacaaattgaaagatttctaaaattgatacataaaagtaaagaatccagaatgatcaaagcaaacttgacaaagaaacacaaagttagacaatttaaactatgggtttcatctcttgttaaaatgtacagtaactaagaatgcagtattggtataaggatcaaaatattggcataaactgcaactactccggaacaaaatctattacacagatgcagatttccttaattcaatgcataaaagtgtttaacaaatatgtccagaataattggaaaaaataaaactcaaccactaattactctttcacattttaaaattagtgcaagatgcatcaatatccaaaaaggtagaacacagaaaagtatcttcacactcctaaggatgtatccaaagatttcttaggatacaaaaacatcaactacggttcgatgcacgatactggatgcttggggctagtgcactgggatgacccagagggatggtatggggagggaggagggttcaggatggggaacacatgtatacctgtggcggattcattttgatatttggcaaaactaatacaattatgtaaagtttaaaaattaaaaaaaaacatcaactacaaaagaaataaaaaaaaaggtaaacattagacttcatcaaaattaaaccttgacctccactaaggatataaatggcaagccactgacaggaagaaaatatcatggcattgaaacatgtataatatcatatatgaaatgagtagccagtccaggttcgatgcaggatactggatgcttggggctggtgcactgggacgacccagagggatggtacggggaaggaggagggtggagggttcaggatggggaacacgtgtatacctgtggcggattcatgttgatatttggcaaaaccaatacaatattgtaaagttaaaaaagaaaattaaaaaagaaaaaatatccacaaaggactagcattaaatatatattaaaaataaacatccccaagggggatttgaggaaagcggttggggaagtgatcaacacatcacagaaatctcaaaatgacaaactcattattcagtgggagaggctgcaatactctacacactttccctgacatctccacacaatgaaatgcaagggtcagtggtgttgagacaagtaaaggctgtaaaagcaagtgacccataataacctattacactgaatctcaagctacagttctcaatatccagatgcagtggcatgttcttttgtactcccctttctggaaagaaatgaccacattcacattttctttttcttgggcatttttacttcatacaactgcagtcagtgcattctttt

SEQ ID NO: 58302 - DNA, 1659 bp, Bovine  19866880734520
  misc_feature (1)..(1): n is a, c, g, or t
nctgacattgcagttagtaatgaggttctgtgaggcaggtcatcctgacgcacaggtgagagaacgtggggatcacctggtgcagaatcagaggagatctctccaaggacagaggagccgcaggccccaggagctgacgttctctttgcatgtgtagggatgttccattcatgcatgtggagagagtccccaatcccagaaggctgtttgactagcatagaaaatagcctactttattgttcagtgcaaatgtgaaaaaatttaacacttttgctttgaggcacaaaattcagcttgtgctgaatcgttgtcttggtatttcccagtatcatgccaggattgacagttaattaacataaatcttgatgtaaagtttctcatgtaattatatcctcagtttgtgtatgtctttaagcagacatttattaccagaatggcaatttaaaaaataaaataaaaatttcctttctcttcttcagttattttttttccttaggatgaaaatacttcttcaacactttcttctcttagtgtttaataatccagaggataatgtgtagcacacttcatacaatggaaaattactttagagatactgttttgtgaacatacatttgcaactttattgttaataattgcagagaattttgataatttatattttcattcttttctataaacgttggtttaaaatgaaaagagattatggtaataacatttactattttgtggtatttaggaacctgttttattcactggaacagtgaggaaaaatctggatccctttaatgagtatttgggagaagaactgtggaatgtcttggaagaggtaatttatgtaatgtaattaacttgttagcatcagtatctgtgtgtgtacatttgtagcattgcaggtaattaagggaagcttatcacttgagctaactttgtttactttctaggagaacagtgatgaaatgggtacacttaaaatgtgtgtattgataatgaaaaccaacactataatgcctcatgttttcattttaactttttctatagaaccccaagcaactagatacattattttgtccttagcagagcactaaactagacattaaaactgtgggatcaaattctattagtgacctgctgctgctgctgctgctaagtcgcttcagtcgtgtctgactctgtgagaccccatagacggcagcccaacaggctcccccgtccctgggattctccaggcaagaacactggagtgggttgccatttccttctccaatgcatgaaagtgaaaagcgaaagtgaagtcgctcagtcatgtccaactcttcgtgaccccatggactgcagcctaccaggctcctctgtccatgggattttctaggcaagagtactggagtggggtgccttctctgattagtgacctagtaaattaattatcctaattacctgccagtgttcatttttttcctctagccttaggggatatctaagtggaaacgatagtttatcattattaactgaaagataaacaagatcataccaataaaatactatgaagtttcataagaaagtgtttataaaggcaaattatatagtggaatgtgatgacgattacttattgacgattatatcattttaatgctgcagcatgaatgcaagtaacagaat

SEQ ID NO: 58303 - DNA, 851 bp, Bovine  19866880741944
  misc_feature (1)..(1): n is a, c, g, or t
nactgtggtgttggagaagactcctgagagtcccttggactgcaaggagatcataactagtcagttctaaaggaaatcagtcctgaatattcatcggaaggactgctgctgaagctccaatactttggccacctgatgcaaagaactgactcattagaaaggaccctgattctgggaaagactgaaggcaggaggactcagtagttgaagctcatgggctcagtagttgttgtggcatactggcttagttgctccacagcaagtggaatcttcctgagccagggaccaaaccagtgtccgctgcattggcaggcagattcccatccactgtaccaccaggaaagtcccccatcactttccataatactgtccagcttctgaagggctatgtctgatatgtcctaatctcttgcctctcagaccagacccaccttcccccatttccttcacaatagaggtctgcagccactcaaaagagaaggtccagttaaaatttattccctcacatgggactactaacattacatagcaatttatatggctccaaactgaacagtcaaggttacagcaagacaactcatgttataggaggcctattcaccatacattgacataattgtgactctcccccaaacagtggagataattccaaggtaaataatctttccccctggacagtggagcctacctgtttacctaagcagtaggcttgccctacagagccaagtctccatcagaaatctctgacagcacatgtcaggaatccgaaaataaatttggggtaaatactaatccattaaagcaactatggcttgtctgaaacaaaagctccaagaagaaatctaaggact

SEQ ID NO: 58304 - DNA, 1466 bp, Bovine  19866880749649
  misc_feature (1)..(1): n is a, c, g, or t
natgaaccccaaaccttcccaacacatcactgcttcagaattcagcatcataccttagagagcctgattgcgtgggcatgctgtgcagcctctagctgagacttggtgagctgcagctgctccttcaacgtgtcgatctcactttggagcttgtccgtctgcgcccttgtcttatactctgttgtaacagaaatatcgttaaaataccatctcttagaaacgcattggaaaacttacagggtacggtgctactaataagacaaagacaaaggaaactgctttttcttgggatattactgcacgagccaactttactctttactatgtattttcagccctttgcatcattgggcaccgtttatttttaagtagattctttcagccactgggttgaggttggattaccctgcagaggcagggtgagagcccattcagggagcaaaggaataatcctgggctcttctccaagacgcctgtctcaatcagagaaaggaaatcaacggcttcgaccgcaggtaccgcaatattgaaatctctacggtcaccatctttctggctcccacggaactctcctgaacatgtcatcagtgctcagacaagcagaggccggcactcaaaatgcaaacttgggccacaacccatccgcggggcaaaaatgaactactgagaagttgtaaaaggaagcaacaagtgaagggaagaacacttatgttcatgtacttacatgcagatgtacacatgattgaatggatatacatgtgtctgtgagtgtagacatgaaaggtatggaaaccaaagtagaaagtcagaatctcaaagatgacctgaagaaataatactcatttcagagtctgaaatactctctgaaacgagtatgagatagaataagatactgaaacagaagagaaagaaggtcagtttcacactgaagaatgataggttaatttaaaaaatatttaatctccccagtttcttcaatacactgttaaactgtatccacgattcatggcttataagtggaattttatgctattcatattgtttatacaaagctcagctgtttcctaaataaatctatcagaaataggcagaaatggaaacaagcccaaaagggagggaaaagcaggtacaggtaggtagtgagtaacaagctagaaatataaacgtccagctaccaaaaacatttagatctaatgagcatttccatggattactgtggcaatctgtagagttgctctgatctgctcatggagaaataggccttgcattctttgcttctgagaacatttagattagttgcaaacctggttccttgcaagccacagagcccctccccttttctgctccttcaattagcccctctaggcactggttaattcacactggcacccaaacacatcttagtatctcccactgcaaataagacaatactctcccctaggtcccactttccctccagatactgc

SEQ ID NO: 58305 - DNA, 3789 bp, Bovine  19866880797148
  misc_feature (1)..(1): n is a, c, g, or t
ngagggatatacctgttcttggattggaagaaacaatattgtgaaaatgactatactacctaaagaatcttcagattaaatacaatccctgtcaaattatcaatggcatttttcatagaattagagtcaaaaaatttacagttttaatggaaacacaaaagaccccaagttgccaaagcagttttaagaaagaaaaacgaagctggagaaattaggttccctgacttcagaatatatcactgagttggccaaaaatttgttacataagattttatggaaaaacttaaacgaactttttggctagttcaatacagatctagagtaatcacgatggtgtggcactggcacaaaaacagaaatatagatcaatggaacaggctagagagtccagagatgaactcacacacctgtggtcagctaatctgtgacaaacaaggcaggaatatacgatggagaagaggtggtctcttcagtaagtggtgctgggaaaactggacagctatgtgtaaaagaagaaaattagaacactccttaatactgtatgcaaaaataaactcaaagtggattgaaaacctaaatgtaagaccagatactataagactcttagaggaaaacacagggaaaacattctacataaataactgctaaatgtttgattgatcttttcatttcagagaagtgtggcatatttttaaaaatcttttctgtttgtttgtttgttgtttcacaaatctgaggaggattgattgttcatgttggtttgaattggtatgtttgtcatttagtgtcaccctcccatggaagctctgaaatctgtaatatacagatgagccttgactgtgagcaggcagatttggaggtatgaccgtttctagtcagtaattctggtttctgaaggatattaccactgagtctttaaacacccaccctgcttttcagcaacatgtggattttgttttcttaaattaggttgattgcttcaccttctcctgcctgaaaagcagtgcacctctgatttcatttaaatttgtgagtctttgcttcagcttcaacatcagtccttccagagaatattcagggttgatttcctttaagattgaccagtttgatcccttgtttccaagggactctcaatagtgttctccagtaccacagttcaaaagcatcaattcttcagcgctctcttattgtccagctttcacatctgtacatgactactggaaagaccataggtttgattatatggacctttgtcagcaaagtgatatctttgctttttaacacactgtctagttttgtcatagctttcctgcccagaagcaatcatcttctaatttcaaggctatagtcaccatctgcactgacttaagagtccaagaagaggaaatctatcactgcttctaaattttccccttctatttgccatgaaatggtgggactagatgccatgatcttagttttcttaatgttgagttttaagccagctttttcactctcctccttcaccctcatcaagaggtatcactaactcaatgaagtcagtttttaagtgaaccaaaaaccctagttattaatttgtaaatgatgcctaactggatatgtgaacccaaactcacagagttaaactgagaattagtaggaggaaaccactgttttcctctttaggaggaaaggaaaagatggcataaaaacatttaaggtcctctagttctgtttcttcttcctctgcagagatggacactcaggaggaagacattcctatggatgctgcctgtctcattttgttatttttctaaatatgcctaaattacatttttcatgtactgaaaactttccaacttactgtaaactgataaaagttcatcagaaattagtgctattggggagctaaaaagcaaaggcagctccaaaaatataacatgagtagtgcctgaagatgaagcactgtatcattcagaggttaaaaggtcatagtagataaatctctggaagtgaatcattgatgtgttgcttccattaaaaagcaaaaatgaaacaccttagatactgggatttggaattaagagtagagtatgggggcttccacagttgctgagtgatgaagagtctgcgtgcaatggaggagaagtgggattgatccctgagttgggaagattccctggaggaggaaatggtaaccgactccaatattcttgcatgggaaatcccatggacagaggaacctggcaggctacagtccataaggcccacgacttagcaactaaacaataacaaaaatgtcctgtcaaaactgggaagaaatagtacaggtaaatgtctgacattgatagtgtctctgttaggacacaagcgtgtctcatcacacaggaaacaaagatacagaaacctgggcatcagcagcctgtgcataaggaaccacgtggttcagtccttgctgtggagacaggtcacatgtccatttcccggggccttgtgttaggtgaacttcctttactgctggccctgctctggtaaaagctcttccccatctgttgattgcatttcagtgtctccttctgagccacaccagattttcttcttgaaaagtaagaaagttccacaaaatgtggaaaccacctgacctctgtgttcccctcctgtaaggggtgacagcacctactacacagagtgcacacagcgatgatggagacaggatgccttaaagtccagtttattattcttcagttttgctatattctattattttcccaagctcaaaaacaatctgaagtattctatattgagatgtatagttttgaatagtagttatttgttctattttccttaaattataactttttcagtgctttcctttatttaaagtgtgatatgatatcttggagccagttaattgttataagaatatatcctttttacaatgacacttaataagaaaacagtgatatatataaattaattatccatatgaatttagtttctatggtatattttatttttttaatataaatttatttattttaattggaggttaattactttctaatttacagaaacagataagtcacacaattacagtcacttatgccttcattcatgttgttgctgtttgtcgcgtctgatcttctgcaacctcatgaagcctgccatgcccctctgtccataggatttctcagtcaagtatactggagtgggttgcgatttccttagccagggaatctccacccaggatcgaacccaagtctcctgtttggcaggcggattctttaccactgagtcaccagggaagcccaccttcatctagccaacaaatatctactgagagcttgttaggcaatgttgcaggttctggggctgtcacagtcatcaagagacaaaatgtctgtccttctggagcttaaattctcctgaagaagttgaaaagcaggccaatgcatatgtaacgaaatctcagtgctgatacatgcaaagtagaaaagtgaagcagaacttgaggaggggctagccgatagcattattaataatgggcaatatatattgatctgttacaaattctgcatgtactgactcatttaatattcttaacaatgttaggaggtgcacacctttataattatggtatcatagtcttagagtttaggaagctaagatagaaggttcaggaacttgcccagttggtacagccaggcaagacttaatccccaggctgcctggcttcaagtctcgaatttatttttgtttggctgccaaaaaaaaaaaaaaaaagtcaacaaaagaacctaaaatgccgta

SEQ ID NO: 58306 - DNA, 1159 bp, Bovine  19866880848615
  misc_feature (1)..(1): n is a, c, g, or t
ncttgactagacggacctttgttggcaaagtaatgtctctgctttttaatatgctatctaggttggtcataactctccttcctaggagtaagcatcttttaatttctgtactgaactgaactgaactggaggtctcagcactgactcataaggcttcttctctgagtcttaggtctggagatctgtcctagggcagtcattgcttcctaaaattattaccccagtgattcatttttccagccctccaattcttatgtaacaaatttcctttattaaatcctttctgtctaaatactttttctcattaggccttttgtcctcaacgactcccctctgacagcacatattgtgaatgtcccaacaactgggaaattctgcaagttcacctaacaactgcctggcagtctaatgaaatgctgcttttattaagggaatacaaaaatgctgaaagaactgtgacacagtaaaaatgactttgttgcaccactctgaaatctgaagtctcattgtgagtttggaatattttcatggttggataccttaaaaaaacagcaattcaaataaacttttaaatggaaataggaaattactgtttcctattcctaaacaatactggaatgtattgtttaatagcacattctgaaactacacttaagtacttgagttattgtcaaggatgagaggaaaaaataagaattaattaatttagaagttttaatcaagttttacaaggaagaataaatttaaaaattgaaggtaaatggaaacaatgggaaatcccacaaatggccttaccattatcctgtcactgtcaataatggtgcttaacctgtgtgcgatggttagcacagtacactgtgcaaatttctcacggatcttcttttgtattaactcatcagtgctggaatcaaagaagtgcatttagttaagtaaagataggaaaagcagacttaagacttaaaactatcacatgatatttttatgcttttaaaaatcaatacttaagacataatcctgctcttgaaacactaaatataaaaagtctttgttgttgttgtttagttgctaagttgtgtctgactcttttgcaacctcgtggactatagcccaccaggctcttctgtccataggatttcccaggcaagaatactggagtggg

SEQ ID NO: 58307 - DNA, 893 bp, Bovine  19866880857738
  misc_feature (1)..(1): n is a, c, g, or t
ncctaatgcaagagccactcattggaaaagatcctgatgctgggaaagattgaagacaggaggagaagggggtgacagaagatgagatggtttgaaggtatcaccaactcaatggacataagcttgagcaaactatgggagatagtgaaggacaaggaaacctggtgtgctgcagtccatggggttgcaaagagtcagacacaacttagcgagtgaacaacaatgattgtttctgttcaagtattattggttaccttattattattaatcttttctttgtaacacgtgctttattagaaaaaaaggtgaagtatatatttgtcttttatggtaatacaatacacaatttagttcatcttggctatcttttcatgagaggtgcttgtttctattatgaaatatgcttacagtaaagggaatccacaccagacacctgggaggcagagggagaaccacttacccagcatgtgctgcttcagaccaaccctgacatgacagagtagccattcctgtcccaggtgttactaatgttaactcagcctcccaatcacagccacacctttctctcacaaacatggcttttatttaagattaaaggacacatcaccaggctgaaaggcccaccctcaatccctgtgaaaaggccttgagaaacaggctctctgttcttccctgtgagaactctgacaggactgatacattacctggaagaacttttgaaatgatgaaggcagcacatcatccatatacccaatgtctttggagaaacgatttaaaattcttcctgtaagaacgggatatgagaaattactctttgacccagacaggccctttaagacaaacaattcatgaccaaataaaataatattttaaatgcatatttaatatacttc

SEQ ID NO: 58308 - DNA, 2381 bp, Bovine  19866880873852
  misc_feature (1)..(1): n is a, c, g, or t
natattggcctggcaagccagatattaatcacatagttgaggacaccaataatattgtgatctcaaggaaagaaagagaaggaattctaatttctagacactgtatttctccctgattaacttctttcttaagtagtgaagcccaagagatgagtgtggtgaaggggagtttgcatacctgcaagggaataacacatttacgtgggacacttgctgacaaaggatttcactcaggatcaataaaagccatggtttactcagaaagaattgaaacaatccaaacaacagggtagggatccatttctaatccccttgcccattcatgtaatgatgtaagctttagctaaagcaacctattagaatagacaatagcacatatttccagtgactgattttctcaatatgcaattctggtttaacaaccaaaatccagtacagagcaaattaagagtcttcatgcacccactttattctagtagattttaaaaatactcattctaattaattcacagagtaaatgcaactcagactcttcatctgttaagacattactgaattactcctgggagctctagttgttcacacaggctcctagtaaacacctcagactcttgtataacagaccagatgatttacctgagtgaactgttgagtaccagccagaatcaggtatctcaattacccttcctttcccatatttcatggcatatagggtactctgtccatttgccctagggaaaagggaagacaaagaaaaagtattacactctagatagaatttaggtaaataacagaaaaattgacctcgatttagaagacgtgttttacggtggaaaatggttcccagctcactgggccctgtgtccgtctaccttataaaaagtccatttgaatcacaactttcagctctaagaatttgaggaagctgctgagggtcaaatacggggatagtctcactccatcagccagaagtttacttctttttcagagaaactatgtgagagtccgaagaagaggctaaacaagccccaactaacccccctgctgtgggaaagtgaggcttcatgtagacttcacagccctttgggtcagaccaggaatcactcaccagtatgcaagccaccaatcctgcaggacataggtaacctggagcaggaaacaacagtcactcacacactgacatcactgagcctcacaccccgctcactaggttgggagatggaaaggctccagaacgtggagacggtccttccagctcaggtttgtgccaagccccacaccccagatgaccacaggtcaggggagggcatgctacattttaatatctttacaagacattctttttcttcctagaatctttctgttatatacaaacaaaacctcacctcaataagtaagcctcacttattttcctcacagatttcattcagtacaaaccaaaatggactgcaaagcacaataaaaacagtataaaagtcaggacttttcaaagaaaaaaaaatttgataaaaactgtgatgatcaagtttctttgtcagcttgcccaggccagtctctagtggttcaaccaaaccctcgtctagatgtcgctatgaaggtattcagtggatatgattcacatcatcctcggaactgaagtagaggtgatcaccctccatactacggtagccttgtccagtcagtcaaaggcctgatgaacaaaacctgaggcttcctggaggaggaagaaattttgcttcaagactgcagggtcagttcctgcctgaggttccagcctgtaggcctaattttacattcaccaactagactgaacaacctcatgagccagttctctgacataaatctcttaatatatatattaaacatgttaatattaataaattaaataaatacagtataagtataaacaatatgtaaataccaagaagagggcacaaaaccgaaataaatgttcttatttacctgagctgcaatgttcactaaaataaggaaaatgatgataaaccagtgcacaccggctgtgaagtaattctcataggtcttaaaaccaactcttccaaccgaacggccctccagtggtaatgtaacctggatattctcagtctgggagggagaacagcagtgaaaacaaaattttaagtaaggaaccctcaaatttcaaaagtttacaatgccctccactgcaaagctgtgaggaaacagatacatctcatatgctcgtaggactgcaggatggtccatttcctccaaaccacatatgcatttacccttggactcagccatcctactttcagaaatctattagaaaaagaacatcatttgcagaaattattcactgttgtgggcttgctaaagtcaatcatactctcagcacagcacaa

SEQ ID NO: 58309 - DNA, 1871 bp, Bovine  19866880897157
  misc_feature (1)..(1): n is a, c, g, or t
ntgttcttgcctggagaatcccagggacgggggagcctggtgggctgccgtctatggggttgcacagagtcggacacgactgaggtgacttagcagcagcagcagcagcagccagcttaggtaccaaaggagttactgagagcagctgggtctcattcatcagagcctggctaaatatggcatctgggccatagaagaataaccaatgttggtgaggaaaatgaatggctttcatactggagcgttaattgaacaagctgatacttgtttcaggcaaacaaatgtcacctacatctcaataacaaaaaattcagatgtagtttaaacttttagaaaaactgaatagagacaatgtatttctgggccaatgtgctatgttataccaacactttttctgtttgtttttttccctctactttactataggaaatttctattgctggcagggcttgctcctgatattttctagcccagaacaggcgcacaaatggaggcccacatatgtctaaataggtagaatcaacctaacagagtgttcaataatgtgttatcctcccaccttgataatccttcccaactacctggaaggctcgattcgaattggctcgattcgaatttagaattcttggattctcagagttcttgctgaaacgtggaggtgtggggcaagcaggcccatgcccacagcccacacctaaaagagcctccctcacagtagtagagacaccccagctggtacaggcaagttctgtccaccgctcccctaccctgaaaaatgggctcttccaggcccaggactactcacacctgcggtgttgcatggtgctatcaaccttgggaggatggacttgggcaacaggcccatgcatgttctcgatgtgggctggagccatttgagacagccattctgggtcctgagtaccctgagtgtctacattagtccttctggatctttaaggtgccagtaatccccccagggatcttgttagaatgcagactcttattaacatgggagcctgcatgtctcaccagtgtccaggtgatgctgatgctgctggtctgtggaccacactcttgtcaagcgagcatctggaggagagggctctggacacgtgtgtcctcttggttctcagaggtttcaccccatgtatactggggaggggtgttagaggagggttagactggggtcctctaaactgtgagtctcagggcagaggcctcttgccctgctctaagggaggtctggtcccttctttgcccacgtcctgatgcatccgtgggctctgttcccacactgcaggccctcgtcctcccctaccagctctgccaccgcagccctttgatctcccacccactcttcccaagtcatgtttcttttggctcctttttctgcggtgttcccactccctcccctgattttctcttacgccaagaaacaaatgtaaaaataacatttcaaaaatattgaaaattaatgctgatgaaatcatggttttgttttcttgggatgtaagcaggcagtaacaacaaccagagatacaacctctccagcgcctggctgttttcctgaacagaatcctactgctcacccattacctgaaatcaggatttccaaacacaaatgtttgctggatcagagcagactggatttttctccggtatttttattttgacaaggctaagaaagctgctttctcatcatctgatggaatcaaataggctgctaaaaataacccctgcaagtttctattacaaacagggaaacacctctcccgctccttgcctgttagttaccctgctgatgaagcttaatccttcgacttgtattcaagtatttgcactggttttgggttcctttattctttctaagg

SEQ ID NO: 58310 - DNA, 1717 bp, Bovine  19866880899818
  misc_feature (1)..(1): n is a, c, g, or t
naaatacctcagcaaataagagtctgacttgcatttactctattaattaattggaataattattttaaaaatctactagaagaaggtgaatgaagactcttaatttgctctgtactggatgttggaagttaaactagaattgaacattcagaaaatcagccactggaaactggaaacatgtctattctaatgggttgctttatctaaatcttattatatggatggacaaggggattagaaatggatccccactctgtggtttgaatttttccagttctgtctgaataagccctgtgttttattgaacttagatgaatttctctggcagcaagggcccccaagcaaaagcactattttcttgcaggtatacaaactccccgttgccacactgctcattccatgggcttcaccaattacttaagagagaagctaagtagggagaaatccaatgtctgggaattaattaggattccttctctttcttaccttgagatcacaatgttattacacctccaattgtgtgattaatttaacatctggcttgccagactaatattaatgtggctctgttttcacaacagtgcctagaatatgtgtagcattgcatactttcaaaaggaaatactcatctaaaattttaaaatatttgcacaagaaacatgcatactaactttctgcaaagatagagtgaattagatctttgtaagaacccactcatagaaatttgttatttcttttgttgatcacttgctaaaaaacctaaatccattatgttgtttaccttctgaattggtggactgtgggggcttaaaggaagaaggaaaagattctgttgtatattcattttggatagtgggctaaggcaaatgcctgttgatggaattcaggaattcgaacagcttccagagttggaataacagtgatgtgaaaagctgaaggagaataaatacctgatggaatatttataacagaagttatttccagtttccttagtatcatgggttcaagagatgtttggagggctattttaatttttatatgcatagtaaatactcatttatgtcattaataaaacaaatttcaataattatgtgcatttgcaaatgctttttgtttctataaaaaatgagaatagatgctcttttaggttaattatcttgtgttaagatataatttgtattttcatgcagttcaactatttaagacattttctacttgcaacttagtatggtattttcctattttttaaagctactgggtattttgttcaatgaagtgaaataatttctcctgtttcctgttaattcacatgctggtaccaaagcataccacaatttcacattagggaaaattttgtaaatatgatttgaaacatggagaaagaacgattaactactttttataattaatttttctgctgagtttttattcagttcagttcagttcagtagctcagtcgtgtcggactccttgcgaccccatgaattgcagcatgccaggcctccctgtccatcaccaactcccggagttcacccaaactcatgtccatcgatttggtgatggcatccagccatctcatcctctgttgtccccttctcctcctgcccctaatccctcccagcatcagagtcttttccaatgaatcaactcttcacatgaggtggccaaagtattagagtttcaactttacaatcagtccttccaaagaacacccagg

SEQ ID NO: 58311 - DNA, 2119 bp, Bovine  19866880924204
  misc_feature (1)..(1): n is a, c, g, or t
ntcatgcttgactgtcccttcattgtagaagatgaggagataacagtgcctcatcgtgacaacacttctgtggtgaactctcctcccactgcaagggcaggaggggaagtttggagggaaagaggctggcagtcacgattgctcctcagaactcctaaatagagaagcttagggtcacaactttcctaccatctgcagggaggaaatgaatatatctttgagaagttctttgtagttaaaaacacctgatcataaaatccccacctatttggtgctttcaattttagaaaatatacaaatgtaatgagagctattttgaaatccctcagcagaagactattttgtaatgcaagttgattgctgtgggtgagcctgccttgctttgcatggacgtggaagagaagttcctcctattccccaagttatgctgatctgagtatgtgctaagtcacttcagttgtgtccgactctttgcaaccccatggactgtagcctgccaggctcttctgtccatgggattctctagggaagaatactggagtggggtgccatgcccttttccaggggatcttcctgacccaggaactgaactcatgtctcaatatgtctcctgccttggcaggcaggttctttaccactgctaccactggggaaagccccatgctgatctgagtattgagaaagaaatttcgcctccccagtctggctgtacaattgctttgctggactggaaaggtgggtggggtagaatcctgtgctgtttgatatgaagtcagagagcttcacaaatacaggatgttattcatccttcatcctgagattcccaggggagccaataaaatcattttaaaagcttccctctaaaggtaggaaggcagacagaggttggtgggcaaggggaagctgagagcagacccgggtcacttagaaccttctgctttcctggagacggcatatcctcttttccttacctcactttaaaaagctcagaataattaagtcacttcctatttaggaagactagcctccatactgctgtgtctgcctgggtaccatggacatccatttcaatgagcatttatttaccttagactcacagtccttgaacttgaaagagaagtgattatcttataccttaatttcttaactctcatgatcattttacataaaggatgatttcaatagctcacatttcaaatcaatcataggatatgaacacttcacagtcctcatctcccaataacatttacccaagcaaagatttctatgatgctcaaaacctgatcatgagcttgatccctggaccagcgatttcctgattctgctcccaggacagttccgggtgtcaatggtggagatatatcagaggtcactgattcctgggtagggaggatctgctggagaagggataggcttctccagtactcttagacttcctctgtggctcagctgtggtaaagaatccacctgcaatgcaggagacctgggttcagtccctggcttggaaagatcccctggagaagggaaaggctactccagtattctggcctggagaattccgtaattgtggacttccctatagctcagatggtaaagaatttgcctgcaatgcaggagatgggagtttgatccctgggtcagggaagatcccctggagaaggaaatggcaatccactccagtattcttgactggaaaaccccatggacggaggcctggcaggctacagtccgtggggtgacaaagagttggatacgactaagtgactaacacacacacacacacacacccgcaatggggccccactggcaaagttactttttctgattcagtttctatcatgtgatgccccagactgataactctacttgcccgtcagctcgagcatggaaccagccatcattactctgccagcccatttgggaggatttgcaagtcatctttattagcgctgtccattccagtggttctccgggctgtaattgaagtaaacgaggcatgttgttgctacatttctgattctctcaaagaggaggcagacagatgaaggcagaataaatagttcgctcaggtcttcttaaatgcctacaataagttgacagggaagggagagaaggggga

SEQ ID NO: 58312 - DNA, 908 bp, Bovine  19866880976828
  misc_feature (1)..(1): n is a, c, g, or t
ncacaccgaattcaattttttaagtaaaaccaacatcacaaattatttttcagggccaaatttttattgtctagaagttcagggtatcacaagtggaatttgggctaataaagacaaagtttcattttcttggcagagctgtttttataggaaactcatacaatcagagtttcttcagcaatcacatctaacaattcctgaattacgtaaaactgccggccctcgtctctatcaacttgtagtatcctggacattacaagccatttgatacagtggaaggcagagtttacaattagaatttggcaggaggactagagtttgtcacttacccttttgtgccattctatcttaaacttgttggaatgatcaccattatctacagatttggttcatattctggacactgaatattcaatttgcagaaatgattattaaaggggctttcagatccatggatgaaagacataagtacagagaattattattattattagtcttgattattgttattattatgatggctggctgttattattgctttattgaaacttgcgaagattaatagttgtgctgatgatcttgaagttcttagctcctttgtcaatactacttgatctatttagctttaaactgttaaggatttaagccaattgaactattggagcttggtgaaaatagctccaacagagttggaggatgaatcatatcagattctgtgagcaagatgtaaggtaatactcaaaaaatgtgaaaatctctctttattggtgcccctcctatcactacgctgagacagatcattttcatattctatggaaatcaatcaccttataagaaggataatttggcaagaatctactctgttgacagtttgtctataggttttgaatctagattctctaaatgtg

SEQ ID NO: 58313 - DNA, 1897 bp, Bovine  19866881021398
  misc_feature (1)..(1): n is a, c, g, or t
nctggcatttaaaatgagcatttcaatcgcagcagattccagcaagggagcatggctaattcatgcagccccagcctgggcagggcgggatccacatggaacacgatgctctaaaactgacagacttgttgggaccctggaatcagccccagatagcattccatgcctaccatacgtgtccctgctcgggcaccgaaaatataaaacaatgaaaacacggccctcatataatgtcagataggaagctagcaaaaacaaaggggaaacaaaagaaactaaaatacatgttgatatacaaaaagaaatagccagcaatgccttataaaaatcaaccctaaaaaaggaggcaacagagagatattaacctgacataaataatatgaatagacaataattgttagaaatgatttcctcctatattcatatataattcatattgaatatattcatatatttctctctgttactggttcaaaggaaaaaaaccctgcatgttctaaacacttgaagataacatccaatatgtgaagaatttatgcattacgtattataaacacatgcccaagggaaccaatccccctgaaatgatcttaggaaaaaaatcaggggcagtaaacacttcatgaatcagtcagtgagtaaagagaataattacaaaaggccatcatacgtgaaccacaatatttctgaagacaaaaaatccaagtcaactggccatgggtttaagtccaaagtaaaaggctaaatagagaagtggaataaagtaatcattagattccagaaacatttgtaggtaagacaggaaaaagatggtccccctcccactttaaatcacttaacacacagcagaccacaggaaaacaatatattgaaaacataccataaaaactgctagcaccttagttgtataaaagtatgtttataaatattcaccctgtctactggatcatgttaataacaattattaccctgtgacctggtccaagacctggatcctggcagtaatttcatccaggggggtcctactttttcctttggtttccatcacgtgtcttttctagattttctcaaccaatccctgaaactgtttgcttaaaaaaggtgactggcttccacattgaaagttatacaaacaatcacgtatgccctgtggcatgtgctggttggctggtctagtaggaaagtcacccttttacccgatacctactactttccaccaaaaatcacagatgctccaagaactactcagagttaaaaatctctacttgtgagcccagcaatagatacattttctactttatgcctgataggtttgactagttcatagtaacattacataggaagactgcagttttattaactgttctgcattcatcaaaatgttttgtttgcataaataacccccacagaagcacttttcagttaataagttatctaactcaggtggaaactgtatataaaacgctgagactttgctgaaacttaccatgtgccattggcagacttgacttcgcatccagtgtctgggtggctggggcattcactgaaaaagcataaaaatgtaattacagggtcctgtatttacagcatctacatctgaacatgaggataaactgagtattcatcaaattagtcaaggtatattaatcatgaggggacaaatgtttcaaatgacaaagatagcaccaactaacctaaaccaaatttataacaatttgaaatacaatccacccttttcaaatatacaagtcagtgggttttaatacagtcacagaggtgtacaaccacaaccactctcaagtttttgaacatactcattacatgtatacctccccaaatacccacatttattagccccatctctccctccctgcaggcccgggcaatcaaagatcta

SEQ ID NO: 58314 - DNA, 2627 bp, Bovine  19866881034548
  misc_feature (1)..(1): n is a, c, g, or t
nggtggctgttctaaccctccgactgtggtttgctaactcttttcgagagtggagggtggcagatgtgattgaggaaataatttcctgatttgctacccacttgattatgttgttatcagtgaaattttttccctaggtagaaaattcgggatttcctctaagtctataaaatccaagccaaactttccaataattattgtattttgaagatataaatggcattttgaaagtcacatgcagattctgttagctgatggtcatatagacactggctcctaagaataaacactatagggccctgtagtgaggacagaaggtgctggaaacagtgtgagctgtgctctctgctatgtgagagctggtagcagtcggccctgtgagaggatgatcttcacgctgaggcccagcactgcagggaatgcacagatgagatgattttccatcttccttcttgtgatcctgtttctgttgataacctgtgggttgaaattttcagtgcatgcttcctggactgattcctgtgtgtcccatacattgtcttgtgttagaacctagttttctggaatcttcaggttccttgggtgtgtaactttgctgtcctacctgtgtaaaaccttctgtagctcaactgagaaaatactctccctcatgagaagcagctaacatgtttttttctgtttatatattgcacttattatggttcacaaatgcagaggcttggttcctgcttttgacgacgtcccgatggctcgctgtgtatctggatgtcatctgtgccatctttgtcactgttgttgcctttggggccctgattctggtagaatgtaagtacacatgtgaatatttgtggtatgtttacatttgatagctttgtttgtagttattaaactgttgtcatcttgtctaatatatactctttgattctaatgagttgtattaaagtgtctgcagcatgtgactccgcagggtgtccatgtgaagtcatttatgtcttgatgagaacttttatcttttttttttacttttacttatttatttacagtaagcccttgttgggataatttttaaaaaatttttttgattggcatatggttgatttatgatgttgtgttggctttgggtgtatagccaagtgaatctgttatacatatattcacgttttaaaaaattctttttccacaccccacgaacattggggtgcctgtattctttttagtaatttgcacttgattaataattcaaatgaatagtcctttagaaaagaatttctggttttgacttttggaatctttaggagcaaagaccaggtatgacatgcctgctgcagcagacctgtggtgccttgggcccctgctttggctcactcaggccattctttcatttttattttaagttttattggggtatagttcatttacactgttgtcttagtttccgatgtacagcaaagtcaatctgctatacacatacatatatccactcttttttagattcttttcccatatagatcattacagagttctctgtactttacagtagtttcttattaattatctattttaatattttatatatagtagtatgtatgtgtcagtcccggtcttccaatttatccctcccctcccatatcccctggtaaacataagtttattttctacacctgttactctacttctgttttttagatatgttcatttgtagccttttgtcatattccacttgcaagcaatatcatattctacttttctcagacttatttcactcagtatgcaaatctctaggtccagccatgttgctgcaaatggcattattttgccctttttttatggctgagtaacattccattgtatatatggtaccgcatcttccttgtccattgctctgttgacaggcatttaggttgtttccatgtcccggctgttgtaaatagacctgcagtgaagactagggtgcatgtatccttataaattatggttttctctggatataggccctggagtgagattgctggatcttagtagtgagagagtcaattcctaggcagattgataagtccaggggtccccaaggagagaggggtctggaattcttaaggaggaaaaaaggacaaactttttttgtccctctacattccttaggattatataacaataatgtatcctgcttgaggacagtctctggaaaaaaaccttctggctaatcctattatcttaaggtgcaaattatgggagtagatctattgaggtctttacaacctccagacattcttttgattcactgtaataactaattagagagtatataactccatggctaacactagcaagggggtagtctttctgcccccttctgatgcctatgtcagaagctttctctatctcctttatactttaataaaactttattacacaaaagctctgagcgatcaagcctcgtctctggccctggattgaattcttctcctccagaggccaagaatcatggcatctttttgtgtgtctatttttagttttaaaagtaacctccatattgttctccatagtggctgtaccagtttacatggagggttcccttttctccacatcctcttcagtatttattgtttgtagactttttataggtcatt

SEQ ID NO: 58315 - DNA, 979 bp, Bovine  19866881072979
  misc_feature (1)..(1): n is a, c, g, or t
ntcctctgtccgcaggatttcccaggcaagaatactggagtgggtcaccatttccttcttcaggggctctttccaacccagggatcgaacctgagtcttctgcattgtaaacagattctttaccaattgagccacccagaaagccactcatcacttataacaggtttggaaaataacagacactcaataaatattagttataatttgaatctgtccacacaaagaccttaatctattttttatccatttccgtgaatgattcctgggccttgactcaacttatagaaacctgcccagggtatagaggttccaaaccatcgtattcttgcagggaataactttgacaagcagctcacttttcccccacctccacccaaatgcttccaaaagtaggctgaagaggagaaatctatcgtgaaactgaagagctcaagaagtctctgaaatgatatccaagtaaaatttcccctaacatttatcccatcaattttcacagcatctgggcaactttaacaattttataataagtttaaacagctaacattctgcttgtgtgtttttacttcaccagaaaacaaattggaaatgcaaacttagcatctgtgagagcttttctttttacaaaaaggaagaaaagattgaagctaggatgaaaggatttaaggaacaaaatgaattaaaaaaaaaaaaagaactaaaaaacacctacatagcatgaatgacatcaaaattaaacagttgtaagcaatataactcatccatcttttttttctctgtaacaagtgcttgacttcttcacttaaaatattttaattcacagctgtatcttattttttctccaaattactcatcttatagtaagatattatttaaatagcttttatttttaatttttccttaaaatcatttttcctgaaaaacagggtaacatttgtactagggagacactacgggcatattttattggtccaataatagt

SEQ ID NO: 58316 - DNA, 766 bp, Bovine  19866881154981
  misc_feature (1)..(1): n is a, c, g, or t
naatttaaaaaatattctcccggtatattcattcctgtaggtcagatttcaccattacagccccaaagtcggggggaaagggtaggtattgccaagggcaggaggaggacatgggcagggaacgttggctaggtggagaaggtacaggcaggaaggcacacttgagccatccaagacctgataccaacaacaaacacaaggtcacaaaagaactatactgatagccccaagggcccagtcttccctgtcaccttgatgtacactctgagctgccattttggaatggagcagagggagagccaatacatctgaaaaagtgagtgttgatccaaaagagagtaagttaccctaagcatatgcttaagttagtgggtcaggctgagctgaattgtattgccaacaatgaagagcagatgaattatcatgagggaagaaagaagagattgttctctttcatacttacataatgtaagtacacttgcaactctactatgacactattcacatttttttaatagtacatgggatttcatgcttttctcaagaccacagcattcaaagatggttacaagagttttgcccaaggctcagaaaagtactaggaaaatatgcaggtcagagaagaattgagttgattacagggatgtttatgagccccattgcatgaaggtgggaattaggaaggctcttaaagatttataagctcagtggtgagactagttttagagctgccactcatgaagctttctctccttaagaccattct

SEQ ID NO: 58317 - DNA, 2508 bp, Bovine  19866881158616
  misc_feature (1)..(1): n is a, c, g, or t
ncagaggttctcaactcctgaaggcaccttctctctcagaggtattagtcacgaaggaagtatggttactacaaaactcctgttgtttcccactgagatggtagatattatgtgttttaaaagtaatacagaaaatgaaacccatactttcacaggagggtggagaaacagttattccctatgttttaaaggaagaaataacagaaagaccagtgataaaatgtgaaaatagaagaggcaggaggtgtcctaatgagcgatggaaggctgtgcgctgcagggaggtttcaagcaaaggcccctcactgagcagaggaagaaccccaccctggatggattcttcaccaggtgcttggtccgcatccagaacattcctcaagatgtgacctggacagtaagagctcttctgcggctcctttcacagaaatcgtcttagggacaggcctgaagtgctacaaagagttcctaagacacaggtctttgatctttgtggctttgccatgtatgtttttaaaatttctggaatgcacccagggaggcaaatggcttgacagcaaacactataaatatcgaaataaataaatacatacaaacatctggaaccctgattaagcaccaaagttttttttttcagggatgaggggtgtgggtagcagagaagaaacccccactgaacagcatttttatttttatggaaaaatgtcctattctttccgtacgataaacccccctctgacatgacaaaagtttcagaaagctgaagtctgtatgtcatggggaaaggagagtttctgatgttctatagctacaaaagaaggaacttcagtactagcccagaaaaaagatgggaccaaaattcacttttttaataactcatcgtggaatggtataaaataacagtcattacctagaactacaaaaataaatccagacaatacggtaatctcacttgagtttgatgtgaagtttgcacagattttacaaattactcattatacaacaattttccgtgttaaaaggatgctaaaatacattgttttttttcctctttatgaggtcctctgaacaataataaacagtgagaatatagaatttgccatggttatgcctgataaaattaaattaaaaacaaagaatcaaatgaccacaaaccatgtggttaagtgtgaattaagagtaagagttgggaaagtttaaaaaaaagaactgtgtgtgtacaagcatgcgtgctcagtcatgttcgactctttgtgacccgtggactgtagcccgactgtagccaggctcctctgtccgttgaatattcaggcaagaatactacagtgggttgccatttcctcctccagatctctccaacccagggatcgaacccaggtctcctgcgctggcaggtggattctttgccactgaacccccagggaagtgccatttaaaaaacgaaaatgccccaaattcccaatctaccccactacgaggttccacaacgtgacagacctttggaaagccagaaaagtgtatgatcagtcctctcaccaagcagatgctactgatctcaggacagagttgaaagccttcccatcctggcctgggtctgctccctccatcctgcccacagtgatgccactccagacaagcagccttccctccctggtttgcaggtcccatgtcctgggtaatccagactcattctctggaccatcctgtcatccaacagcagcctctcctgaaatctgctcaggtctcttggcacacactgagcatctttggccctatacagccaatcacagcttcttccacaatcactactgtattcagcagaaaacacacaagtttggatgacgccatgcatgatttgagaaatacgtatggagcccttaccccagcagatggattaaaaaaaaaagatgcatagtgcttatagactggcactagagaagagatattatgtgaatcttgttatgagaactgagggcaatgttgagccaggttgacactgaccacccaaaggactgatgaaaaaggatgtgaaaggtgggtttggggacacagggacagtcattggtcaaattcaaaagaagaggaatgctgcaccttctttacgttgcactgcaacacagacagcaacttgtccctgtgacaaaaacatgatggctaggcagagagagatacctccagctcccaggaatcccgccccctgcctccctagccgctccctcccccaacactgcctgaacaacaaaactagtctaaggactgcctgggcacctccattgctcatgctaaatgaggccatgtgctcccagaaacaacagtcacatgtatatggtgcctgtctgcttccatctcaaggagagtaggatctatggaaattgtgtaaactcaacaaagaaaagaggacttcatcatgcctgtcattctaagttccttcctagcagcttcaagatattttaaagttccaaggttgcattcaattgtgattccccacttagatcgtagccaacttctcat

SEQ ID NO: 58318 - DNA, 1174 bp, Bovine  19866881178239
  misc_feature (1)..(1): n is a, c, g, or t
ntaatgttatatgggtttctgggggggagggtgaaggtgatgtggtggggactggttttatagtgtggtttgttgtttggtttcggctggtaagctatattattaaatatgtttataaaagtttggagtatataaaactaataaaataatcttcagtgcgcctttcccatagacttgcctttgaagtacagtgttgtggtttaggtagtttcaaggctatatttattctataattttaaaatataagagttaataacttaatagtagcaacttgaactgtaattttaattgtgaaactgttcttcctcttgacatcacaattcaatatagttagggtttaaaaatcaggccacaaagaagagcgagtgcactcagattctattctcagatactatttcatggcaaatgatttccatactctttgccctttgtccttaaagctcccataaggtagaccagtagcctgaactttgctggcaaatatctgaatgaaacagcatcaaccttatgtgtgcttggaacattgggtgcttgccattgtgtaggggtaagaggagaaatatacattctcgaagttcaaaaacatgtattgagcccccactctgtgccaggaactgtgctggttgtttctacccacagtatgtcattcaatacctctatcaagtccaggagcaaggagctgagaccacttacattccacaaagggacaaagtgaaagcgtgtccgactctgtgactcaatggactgtagcctgccagactttctctgtccatggaattctccaggcaagaatacgtggctgggtagccattcccttctccatggaatcttcccgacccagagattgaacctgggtctcctgcattgcaggcagaatctttcccatctgagctaacagggaagcccaaagggacaaatgaagtggcaatatcaggatttgaactccagttgtctgattctaagcccactgtacaccattcaaaagccgggatgaaaatgaatttgggaaaaggagacagtgtaaccatgatataagccacgttccatcagaacacaccacagagcaggatatcctaccattctgaaaataggaaagcaaaataaattgaggtcttgcagacttgtctgcaaggatgctggtaacttaggccattacaatgttctgctcccagct

SEQ ID NO: 58319 - DNA, 2604 bp, Bovine  19866881194312
  misc_feature (1)..(1): n is a, c, g, or t
nattcttgcctggagaatcccagggtacgggggagcctggtgggctgccgtctatggggtcgcacagtcagacatgactgaagcaacttagcagcagcagtagcagcaggtgagaggtacatgctcagattcccttaattatggagacacactatcaagtatgtcttgaggccttggtttaaaaccctgctcatcacctattaattcactaatctaaattgaaaatttctgtaaggaaaacagaacattagtgtcctactgcatagcagagacatttcacaaggtatctaggatcatgtcaacaaaaaccacatcaggagtacattttaatgtgttttcgatagctgtttcaatagctaggtcaaatagacatagtttgtctaaacctctccaaaatagcacggatggaaacaatagttagctaatagccttacaaaattgcgtgtgggtgctaagtcgcttcagttatgtccaactctttgtaaccctatagactggctgcagcctggcagcctcctctccatgggattctccagcaagaatactggagtgggttgccattgcctccttcagatcttcccaacccaggaactgaatctgtgtctagatcccaggattgagatgggtaggtgaagtctttaccactagtgccgcctgggaagccttaatcaaagaggtatattctaataccaatttaatcaaattacaaatcattgatttaccttttttattttaacaagataacagtaaaggttacctgagttgagagaatattttttcttagagaatgttgataatgacggtttttatcttttctaatgtcagtgcacaaaacaggcacagattgtgtttcatccagggacatagttcataagtcaggatattgtattacaaatacaagctatgtgatttttctttaccttcatgaataaagtgctaatgttttatatttttctccatctttaaaatgaggtcagtggcattaagatacaaggaaacacctcatttaaaagaagaaagcaaccataattaggaattaagggaaataaacttaagaagtgagacagtgagaagtgaggagtaaggccttatggagaggtgaaccaagcacaattgtttgaaaagtgtttatactctcaattcacaagcgatatttacataaggcagtgtcagtaataacagcaaatcatcctcagagtggagcagttcactgtaatacgaaggcaaaagaaatacttcagagtcatgttaactattcagtgaatctgcagcacttctttcttcatgaataacacaaacacacaccaaaagcactgaacaattacatgttaattttcctctgattttttttcagggatagttgatttacaatgttgtgttagtttcgtgtgtacagcaaagtgactcagttatatctctatatattctttttcaaattcttttccactatagttccctgtgctaaacagtaggtccttgctatttatctattttatatatagtagtatctattaatcccaaactcctaatttattcctcctcccttttccccctttgggaaaacataagtttgttttctgcgtctgtgagtctacttctgttttcctctgatttttaaaagacagctattgttatcagaactaaggagtcagaggtgataactgctcatatttcgcatgtattttaataaatgttggcaccttcctttttgtgtgtgatgacactagctgtatcgcttctctcttcgttctcctatgataccttctgcagtggtgatggaagccgagtggcagggccccagacaaagcagagccctaaagatgctaacatgctccggaggactagcgagccttgccaccctccttcttgccaccctccttcttacccattcccctcaaagtccgaccaataaatagagcccagcgccaatacgccttccacccggaaattctctgatgaagctgcctgatttgaatcctaactagaaaaaccaaaggattcgagctcagactccaggggaagatgaataacataaatggccttctcccctggaaaaaaatctaattatatgtgtatagatttttttaaaggttggcactgaatactcagaaatatattaaaatcatatttaccctcaataggaaaactgaaaggggaaatgatattctgagacaaaaggccaactttgaaattcgagagacgatgacagtcacaaaatgcagacatgggatgaaagggtacccataaaatgctgacaacatccttctcatcagacatgtagggagagtcagaagctaaaaaccatcatcctttcactgtccccttctgagcatcttctcagtaagtggaagctccttttctcaccttgaacttaataaaaaatctttttgaacatgagggttttgttgttgttgttgttagtgatgtttatggatttgctataaatctatcctaaagaattcaacagttgttaatatactgtcattactaaaattaatataaataataacataggaaggcaagacagcatagtactgagaacatgagccttggactcagaaaggcctgactttgagttcgatttttttaatgaccagagaaacg

SEQ ID NO: 58320 - DNA, 1304 bp, Bovine  19866881201709
  misc_feature (1)..(1): n is a, c, g, or t
natgggagacggaaagggtccagaatagggagacggtccttccgactcaggtctgtgccaagccccacatcccaagatgatgagaggtcaggggaagacatgttatatgtctgtaaaatgcattcttttttttttttttttctagactctgtcacaaacacataccaataagcctcacttattttgttacccaaagatagcatatttgaatgaaaatccaaagtacatgtcaaaaaaaaaagtaggagtgtaaatgctcagggttttgaaggaagactcttgacaggtactgtgatggtcagttttctgtgtcaccttggccattccagtctctggtcatttaatcaaacactcctctagatattaatgtgaaggtattttttgtggattgtggttcatatctataactagtcaacttaagtaaaaataaccatcaacaatgtggtgggccccatccagtcagttgaaggatgtaagagcacaacctgaagcttcctggaggaggaagaaattctgccttaagactgcagctcctgcctgaggttccagcctgcaggcctgctcttctgctttcagattcacccaggtagatcccacagcttcatgagccagtttttttaaataaatctcttcataaacataataataattaaataaatagatacagtataaatagtatgtgaatagcaagctaaggacacacaccaaaacaaatttccttacttacctgagctgctatgcttactagaacaaggaaaatgatgacagaccagtgagcaccagctctgaagtaattcttgtaggtcttaaaaccaacttttccttctaaacgtctctcctcagatagtgtatcctgtatattctcagtcttggagggaaaaatggcagttaaagacaaaattttaaataatgaactacaaaagttcaataatgccctaaattgcaattctgtggcgaaaacagaccacacctcacatgctggtaggagtgcaagatggtccatctcctatggacagggtatggaaatatctaaccaaaccatatatgcattgactcttggacccagccatactacttctagtaatctattagaaataaagaaatatcatttgcacaaggttattcattgttgcgtggctttgcttaaagtagcagtgctctgtgatgatctagatgtttgggacagaggtgtagggggaaagggagtccaagagggaggggatatatgtatacatacagcggcttcacttcattgcacagggaaagcaacacaacattgtaaagcagttaactccaataaaaaa

SEQ ID NO: 58321 - DNA, 1348 bp, Bovine  19866881211842
  misc_feature (1)..(1): n is a, c, g, or t
ncatgcattggagaaggaaatggcagccccactctagtgttcttgcctggagaatcccagggacggtggagcctggtgggctgccctctatggggttgcacagagtcagacacggttaaagcaccttagcagcagcagcaggtgtgttgaaggatggacctcctttctggtcattttccttggattcatggtaaacatcctcttctccctcagtttttcatccccttcttctcagagctggtgttcacaccttggaggatgaacttaaagctctgtagaaatgtcactattacactctaagccatataaaccctaaagtgcataagagtgcaaccacaggattattgaatcattactgctctaatgaagtgtgttaaggataatgatgcaattttatttagaactttttattttcctcttccatgacttaagtcaaagtgtattacttacaaattagagattctaagatctgttagtatccaagtgattgtcatacctaggttgcctaaagagcatattccattaacaccagaagtgaggttgggtatctgagcacctagatcagagacacccactctgctggtgtctccaattgctggtctcactgcccaggtctcttgtgtgtgcagcaggaggacaaggccctgccttcatggggctccttttatggggagggtgtgacaaagagggtgacttcctggctgtctccttgaggagctggtgcctcctggggcctgagtgacatgaaggtgggggccacacagtcacctgggggagggaatctgaggcagggggtcctatggaagggagctgacctggcaggttggaggaactacaggaagaccagcatgtctgaggagagtgagcaggggatgtggaggagctggtctcctagcaatggccaggggaccggaagtggcatggaagtcttggatggtacagagcagaagagggatgtggtctgatatcaaatttgagagatttctatgatggtcactggaggggtgacagcagaagcaattctaggtcttagtaaagttgagaagacagaagtgtgggctcaggctaaagtatcagcttctagagttgctgtaaccaagtactgcaaactgggtgacttaaaacagcagaagattatcgtcttcctgctctggaggctacaggtcccaaatccaggtgctgacaaggccgtgctctccctgaaggctccagagaagaatccttccttccagcctctggtgtttgccggccttccttggtgttccttggcttccaactgcagcactgtggtttctgcctctgatgccacttggccattgtccccgtgtctgagtcccttctcataaga

SEQ ID NO: 58322 - DNA, 1095 bp, Bovine  19866881244142
  misc_feature (1)..(1): n is a, c, g, or t
natacacttccaaggatacaatacaggggatgtggaaacttggcagcaagcattggctcaacaatgaaatcttctactagttctattctgacaatttctaactctccgagagactctatactatttgaatatcttaagcttcccgtgcctctcgctggctgggagactctaaacaatcatatgcatagctataggggtccaggtaaacctgtcaggcaagttagagagccatctgaggggtttgtgaactaaaacactcttgtcacgcccaggaactttattaactggagctgtaagttaactctttttcagagagggagatggtggtgggggacagccccccattaagtcagaggtgtaggtgagagcacaaagcagtaaagcaggcagactctggttttggggtagaccactcaggcaggcccagaggggcacccctcgagttctggctcgccttgcccaccagaactctcccacataaccttgttatgggtagggactcctgtgctggctcccggcatatgttgttatgaatacttctaatggacagctgagtcagcaccgtgattctgccatgatgtcatctattccaaaaggtgtttttccaatagtttttgcactgcgtaaacgatgttatattttcctacagcctcaacaaatagttacacatatatgatagtttgcagtccatggggatgcaaagagtctgacacaactaagtaactgaactgaaagtttattttgattttttctccatccttacccaatgatttcaagctcttacaaattatttgtatttatatgttatattgtttttttttcttatgcaaatcagaggtacaggctaccaataaaagctatctaccaagttttttgcctcaagagattccagagccaaaactcattttctaagcttaaagataaagtcatcacagatttttactgccccccaaatttcattgtactttccagttatatcagggattctatttacttgtagactgtgaagttgccattctgtctcatcacttcctttaacataagtaagatccattattccacctaaagatctctgttaaaatactacagagaaaa

SEQ ID NO: 58323 - DNA, 1382 bp, Bovine  19866881267190
  misc_feature (1)..(1): n is a, c, g, or t
ncttggctgcggtgtgtggcatatgaaagactagttccctggccagggatcgaacccgtgccccttgcattggtgtatgaaatctcaaccactggaccagaagccagggaagtcccttctcagtcatttctgatatgcacaactgtctgggaaagggaaaaagtgaagtgaagtgaagtcactcagtcgtgtccgactctttgcgaccctgtggactgtagcctgccaggctcctctgtccatgggattctccaggcaagaatactggagtgggttaccatttccttctccagggaatcttcccgacccagggattgaacccggggtctcccgcattgtgggcagacggcagacgctttaacctctgagccaccagggaggccctaagtacttggaagtgaatagtgctaagcgtgaaaaaagtaaattcactggctgtgaactcaagactgctaactccctgattcttgtttctcacaaaaatcccccacttctctgaaagtcaagtggttgaaattggaaaagtttaataaattaatactttaacccttgagtagccacaggcaactctgctcttgtaacaaatattaagtggtaaactgggaagcatatatgcggataaatattgaccaatggccattgcttagtttcatattttaagtgtagactaaagaaattccctcttataatataaacctgtgaggagaattgcacatcttggttttaccccttgtcttagatatgctatacactgttattttgcaaattgctctaaagaaaagaaacagtagatctacaccattcaccatacgtgaatattgccaagtcccagtgaatctatacagttgtgctggaaagagcttaaattttttgcttagagtcttaaaaaaaaaacaaactgcaaaaagatgtatcaggcagattaacagtttggactgatcctttcacatagagcttcagtacagttttgacaatttattcagtattcagaaaaattcataaacttgaatataaactacatacagtcctgtcttcattacaacaaactcatccagttttttgataactggtattgtgctcctttaaaaaatttttatcaatactcgaagatgctgattcttagggcagtggaatatggctgatacagagccattgacatggaaagtagtcaaagtgctatttgaactttttccccctatctcttgactacctctataatccaactgaaacctacgttttctaaggatacaaaagctctcctttacccctacacctgcagtcaccattcgaagtttattgagctttagagcacacaaagagagtgagaaaatccaaaccaatctctttcctttcacgttctaaatcctgacatggtccatcac

SEQ ID NO: 58324 - DNA, 968 bp, Bovine  19866881385002
  misc_feature (1)..(1): n is a, c, g, or t
natttgctctatgtaaaaatacttgctactttgtaattattcacacgccgatcctttcctatattgagtagaaaataaaaaatgaaatagaagtcaaaggtgctttagagctgaatgatttacacaattcattaaggacggtgatttttcagttagcatcagattaaatggttacttactctcaaatagcccttggggagttgaattgctgggtagcaaacagattaaagtttgcattgaaagaaaaattgaattcagaggtaatcaatagcataataggggcagtgagtggtgcctgctgcctgaaatgaaattaccatatttttaatcttaattttccactctgtttatctgacagtgtggatgtgcaatccaaacagataatgagagagtgggatattgacactgctgtcctctggagtgcttgttttcagtgattaaatgctgtgatctgtgattactttgtgcaaagatgtcggggctgctggccagaaccatgggaggggcactcactccgcagctgcagctcccgactctcccaggtcctaatgtctgaaattcatcttccaccggcaatatagaaaaatacaggttgcctatttatgtgtatatttcagctgcacaaattacaataattaatcccgttattattcttgtcctgctcaaaaacatccaattagattaatatggagtgaaccctctaagttttctattaatgaacccacaaacttgcttcttacaggaagatgtgggtcgcaggaaatgataggctgggagactctgaaggggaggtgtattaccattggagaagcaggagacagaagaaaatttggggcattgttgaaggcatccagccccagtggctgcaattatataacaagctgtgataattttctgaaatgcaaatctttttctctgggtattgggagaaagtcctcttgtacatttaattaaattaatacctctag

SEQ ID NO: 58325 - DNA, 769 bp, Bovine  19866881396133
  misc_feature (1)..(1): n is a, c, g, or t
nttgtctgggagctaagattccacatggcttttggtcaaaaaaccaaaacataagagagaagcatattgtaacaaattcaataaagacttttaaaatggtccacatgaaaaaagaagtcttaaaaaaaaaagttcataatctgagaggttgaaaacattctccgtttgtcttattccaaaacttctgctctggtctactatggtgtacttactccagcttaaattgctatacaaatagttatggtttctgggatatttgtatcaaatattgcttgaagggatatttgtattaaacattgcaattggctgggactcattttttcaattcagattttctggtgtggtctttgtcgcaatggcattgatgccccatttctactcattgccttggacccagccctctacacagtcaacatatgcacattctcaagggacatataaattaggcccaatattggttatacattttatcctctacaaggaaggttatgaaataattttaaaatttaaatgactatagtcattttgcaatcataaacattaatttgtagcatacactgaaagcgaaaagtgctatataaatgctaaataataacattgtaaagcatctatattttgtgataatgagtactatataaatgctaagtagaataaaatagaaaatgcactgttttgaattggcttatgaatgtatcaggcttcttgtgttccatacatacaaaaaattatacctaagccttaaagcaaaaagtcaaaatcaaatacttat

SEQ ID NO: 58326 - DNA, 1584 bp, Bovine  19866881416417
  misc_feature (1)..(1): n is a, c, g, or t
natttaaaaagagaataagaagaaatagttgctttcctctatgtagtcattatttttagaatttttttccctttttagttcatcagactgatctgggctcataaaatttatttcctatggtagacctataaatctattattcttcctttttggggaataaagtggcaataacatcttaaaattatatctcatgataatataaatcttcacgctattttcctttttacttagcataaaaatgagaaagttgtcaaatatggcttaatgagtttcaccaatgggttatactgtagacagacgtatttcttattggtgccaacttttaaatgttagtcgtgacataatcctgtaaacagaagggaaacaagcacataattcaagatgatgattaatcagtattgctagaaaattgttcttccttgacttcaagattaaataaatagttgttaacacaaatggctgtggtaataaaatgtagcacctctgtaatccagacagtcagtggtttatcagataagctgctgttttttgtttttttttcttaaataaattgtcaagcctttagaccaggtgagtagatttcactcatacattagggagttctaaaatttgagtgatggtggtttaataccccttgatatctaattttctaaccattcaaatctcctttactagttaatctcctatactagcctccaggtgtatcttttgcttcttgttataaccaagttgctaactaacctaaggttagggtttgaaattttgggtgacacagtgagtaccttataggttttagataaatattgagtatttttttaaaatatataggtcatctttcggagaaggcagtggcaccccactccagtactcttgcctggaaaatcctgtggatggaggagcctggtagggttagggttagagtcggacatgactgaagcgacttagcagccccagcagcagcaggtcatcttttttctccctgttaattcttatgtccatttttcatttgatgtcaggtgagaaaactgtgtcatcagtagaaaatttaaagctattaatggacagggagttgggatgtaggtggaaatgttagagctttcagagagctgtgctagtcatttagctggcacagtcaagttcctttggattggaccataattgtcttaagcagcattgacgtgtgtgtgtgtgtgtgtgtgtgtgtgtgtgtgagagagagagagagagagtgtgtgtgagagagagagaggaggacttctttgagttagattgctataccagcataagatccatattattagattctattaaagagatgtgaaatttaagatttgaaaattaatctagtgaataaagtgatcttggacataccaacaccacactgagttgttttcttttattttccaatagtggttttgaccactataatttgggacccaaagtgcccagtggtaaagagaacagactttggaatcaaccgatctgaatgaatgtgaatacagcctgactgcagatagacctttgtccaggatttaatcttttttgttatatactggggagcattatagggtataataaagtcac

SEQ ID NO: 58327 - DNA, 1503 bp, Bovine  19866881442196
  misc_feature (1)..(1): n is a, c, g, or t
naatgtaagcagctctgcaactgcctagaggcaaatcctggctccttcatcactaacgtgtgacctgaatcaatgacttcacctctgcaaaatgcagatgaactgactgccacttacctcagagatcaatctctaggtttaaatgagttaacactgagaaagctctctgaaaggtgtcaggcacacggtgaatgccagcaaagtgtttaatgaatcatgtcgcatcaggctctggtctccaaatgtaacagaactgacatgccacctcctcttctctgatcatttattatttagaaaacaaaactaaccagtaaatattcccaaagtgggtgaacttactgcattaattcccaaggtttccagtttctccaccaaactctgctccaagacggttcttatttccttagtgagggaagggttattcttcaaagttttccttatatgtatcttgttgtcatataatttctgttcattttctcttcctaaaataaggtttttataatgtgttaaaaggaattaaacaaatgtatcaaacctctaagcagaaaatggcaaaacacaacttctaaacagcaagcaagcatttataatgttttcaggtctttgaatattttagtcattcagcacaatatataatccataagtattacagctgttaaaattatcttaagcctgcttcaaaacttcaggatcttcaaagactttttcttgattactcaaccaaattatagctagataagtaatgtgagaaataagtctctagggaagcaaaatggggaaaaaaaaaaagtatttaaaagtttaacgttttatcctaaaattatgtttactacttcctaaagaaatcatctctcctaaatccagttagaatttaggtatcatctaatgaagaaaaagccttatttcttttaaataattaagttttatgtaatgaatttagtggatgttaagttcacataaaatttcaaaatgtgaagattatgatctctctcaaaatacttaccaaaatgaaaaagaaattgacaaaagtcttaggaaaagtatattttgcttaaaacaacctgaagtttgaaacaaaaaataacaggacagagtctcttaatgtgtccttccttattccttttatttccttccagaaaaaaatgtcttaagtttaagaaggtttggagaaaggggcaggactgtatgaccttgaacaaccaagtgcttatgtcaaaggaaaatgaaggcttaggaaacaatttcagtgctgggcagttcagacccttagtgaacatcacaggcagatctggagaaggtgatgatggtactatcatcactctgaagcctgttctcctaacaaaagcatttcacccaaagaaagtggcaccaaatgccactgcccaggtctggggctacaggtccccacagagaccccattctttcaaggtctcacctgcctcagcagatgggacttttaggttcccatggcatgtggatttgaagaatatcttaacaacatgc

SEQ ID NO: 58328 - DNA, 1321 bp, Bovine  19866881453034
  misc_feature (1)..(1): n is a, c, g, or t
ncttccgaacgggactcctcagttagggtaacctgtatattttcggtcttggaaggaaaggcagagagagacaaaaatttaaataatgaaccctaaatcaacaataacctccactccaaagctgcagtgaaatagacacaactcatatgctggtaggagggcaagatcctacagagagaaaagaatgtggaaactctgagccaaaccatgtatgcatttacccggccatgccaattctagaaatctatcagaaataaggaaatgtcatctgcaaaatgttactcattttcaggtgcctttgcttaaataaacagcatgattaaccgcacacgtacaaagtacctgattaaagcataaacgtagatgctttctccaaaataatacacgaaatgatatataaccaaagtatccatgtaatttatttgtgcccctcagtgacgacagagtggttcctgaatgtggaagttgagggactaatctgaatactcatcagaatcatcccagaatcccgggtatggacaatgagagtctggacactgagaaaactgctagatgattttaaaggagacctagtgcatttgtccatttttgtctataggatttagaatatattacacagtcacatgggccaaaggtttgctgcctactgtatatgcgagatgacaacatatggttccacatcttgaaaaataagaaaggaagatgggaacacattccaaagtgtctgctgtgtgttgggtgctttgcaccttggtgacagaggtgtcctgtcacagaccatctgatgctgaagcaaaacaataccatcagtcacctgcaatgtcagaatattccaacacaaagcaaaagcagctgacttaatggaagtcatagcaggctaggaatgagggattcttcaaattaaccatctggatgaataagggaagccggggtccaccagagcacatacagttaactatggtaacaagagttccactgtcaataccacatacatcgtgcaagtcatagcagtgcaaccaggacttgtctccgtcctacgccaaaaggagaagccgaatcaggctggctccccgcatgctgttttagttctaccaatttcatggaacaaggccgtggaaatttggtgtcttctttggaacacagagatgtcataaacagagcagactgaaggtccatgaggccaccaagagcgacagacccgcgcatgctgcaggacgagaaactcacgtcttggccctctggagtggcctctttcaaggagggtctggaagactgttgagaccaaaccgaagactcggaaaaggtgcggttctcagggtag

SEQ ID NO: 58329 - DNA, 1930 bp, Bovine  19866881453474
  misc_feature (1)..(1): n is a, c, g, or t
ntgctgtgaaatctaccatgaacctcacccttccacagagtcggtgggggaggcgggcttgttcagcctcctcttctgactgaccctcttgcagtttccctgaagaaaaagtaaagatcctgctggtggcgtgtgacctcccatggtccttagcagcttcctcacagacagttcagagagctgaaagtcgtgattcaaattgaaattttttttacagtagagaaacaaagggccctgtgagctgggaaacattttgcagcataaatcatgtctcctaaatcaaggatttgcctggaatgcgggagacccaggttcgatccctgggtcggaagatcccctggagaaggaaatggcaacccactccagtactcttgcctggagaatcccatggagggaggagcctggtaggctacaatccatggggtcgcagagtcggacatgactgacgcgtgtgacttcacaaatcaaggatgatttctttttttaatatttacctaattgtatctatcgtgtaatctttttttcttccctgttccctagggccaatcaacagagtgccctaaatgtcactgttaatggacaaggaaatgtaaccgagaagctcaatctgaactggtacttaggaatttactcaggtaaagttgagtcatctggtctattatccgagtctgagtcgcttacaatgagcccatgtgagcaactagggcttccaggagtaattcagtaatgtcttaacagattaagtttctgagccagccgcatttattctgtgaattaattagaataattattttaaaaatctgctagaagaaaagaggttgaatgaagactcttaatttgctctgtactggattttggaagttaaaccagcattgcatattgagaaaatcagccactggaaatatgtgactattgtctattctaataggttgctttagctaaatcttatattattttatggatgtgtgaggggattagaaacacatccccaccttatggttcagattgttccaattctttctgaatgaaacttggcttttattgaccttggttgaaatcctctggcagccagggtcccaaataaaagcattactgcctcgcaggtgtgcaaactctccttcgccacactgctcatctcttgggctttactaatttcttaaggcagaagctaagcagggagaaatccagtgtctgggcattagggttccttctcctcctttcctgagatcacagtgttattatgtccataactgtgtgattaatttaacatctggcttgcctactaatatcaacacagctctttgttttcacaccagtgcctagaatatatgtggcattgcatacttttgagaggaaatcctcatctaaaattttaaatattcgcacaggaaatatacaagctttctgcaaagatagaatgagttatctttgtaagaacccactcattgaaattttctatgtattttgttgatctcttgctaagaactctaaatccattagctatttaccttctgaattggactatgggggcttgaaggaggaagggtgggtttatgttacatattcatataggatggtggtctaaggcaaatgcctgttgatggaacccagaaatttgaatagctttcagaatttaaatactgaaatttaaatttcagaatttaagtgtctcatcagaagggaataaagtacttaatggaatatttattacagaagttatcccctctctgtttagcattgtgaattcaaaaaatgttgggagggtattctactttttatatgcacagtggtactcatttctgtcattaacaaaatgtaatttaaatgctgatgttcatttacatttataatttgtattttcctacagttcagttagattttttgcttgcagatttatgtggtatttttatactctttaaagctacttggg

SEQ ID NO: 58330 - DNA, 1182 bp, Bovine  19866881545153
  misc_feature (1)..(1): n is a, c, g, or t
ntgaccctctgtcctggaacaatatgttctgaaattctagactaattttgctacctgagaatccatgaaaaaaaagatctcaaacttggaaacaaataggaaaataattaactagtacttcctttttttttaagatgtcataatttcaccattaaatagtcctgtgagttcaagatcagcagatcatcctctcttttttttcacatttgatggttaactaatctccccacctcttctctttagaattgcactgtaaaagactcacaaacttaaatgaaatcagaggtgtaattcttttcaggcaggaaaaagtgaagcaattggcccaacttaggaaaataaaatccccacagttgctggaaagcagggtgggtgtgtaaagactgtgtgcttacattcttcagaaaccagaattactggatggaaattgtcagacctccaaatctgcctgctcacagtcaaggctcgcctacatattacaggtttcagagcttccctggaagggtgactctaaatggcacacacaacaactcaaaacatcacgaacaattggtcactcagatttgcacaatagaaatgtttttaaaagaaatacaccgcacttctctgaaatgaaaagatcaataaaacatctagcagttattttttcatgtcaaaaagtatttttcctattttcctctaagagtattatagtgtctggtcttacattcagtctttaaatcattttgagtttatttctgtatatggtattagggagtattctcatttcattcttttacatgtagctgtccagttttcccagcagctgggaaaaggctgtctttttgaagagactgtcttttctccattgaaaagagaagagaccgtcttttctccattgcacattcttgcctcctttgttatagatttggtgactatctgtgagttcatctctgggctctctagcctgttccattgatttatgtttctatctttgtgccagtgccatacatctagagtactgcagctctgaagtgagttgaccaaaaaattcatttaggttttcccataacattttatgtaacaaactttttggccaactcagtatcttaaatcagggaacctgatttctccagcttaatttttctttctcaagagtgctttgactatttgaggttttttgtgtttccatacaaattgtaa

SEQ ID NO: 58331 - DNA, 956 bp, Bovine  19866881595264
  misc_feature (1)..(1): n is a, c, g, or t
nctgaggttcgaagtttctgcctatgtgacaggagtccggctcttttctttcttgtgttcgtgaggaagagcctgaacatgaactgtccacttgctttcctgactgtcaagtagctgcaatcacattatggaaatcatggggatgctgaggacatgcttctttaaactcctgtgcatcttttagcatacctatgttagacttgatctgcatattgggcttcttgatttctgacaattgatattctaatgttgagttcttagaagtcagtcctttaaactcttttcataaacatttccttgactttttccatttcatcaactagtttctccttttcttcgtctttccatctatcaaataacttcaaaaattcttcctcttttgttttctgtatttcatattccttagagaacttgactgcgtgcacatgctgtgccgcctgtcgctgagacttggtgagctgcaacttcaacatgtcgatctcactttggagcttgtccgtctgtgtccttgtcttatactcaagatgtgaatcttcagggtggcagcactgaatatgactttgtaggaaagcttggttcataaaggccttgtcacaaaaatggcactggtaatagctggctttggcctctatcatctgctgctgggtaggcatcaacttcttcctgcgtttacactcttccttgagcagcttgatcttgctcgcttgcttggcgaggagcttcctgctcttctcacccccagccaggctcgagcacagcagcttctccaggtcatacacctacaaggtgcgcaactcctgcgagtgcagcaggtatttgatggtgagctgctccaggtggatgagctttagcagcacctggtccacctatgactggcagcttaaatatttctcgtcctccagcttgcagaaggtgatgttctcctgcagcatgagcacgtccacggcaccagccac

SEQ ID NO: 58332 - DNA, 800 bp, Bovine  19866881798433
  misc_feature (1)..(1): n is a, c, g, or t
ncttccggtagacaccaaactgcaaaccttctccctttggtccttttgggttagctgcaacccaggcatttggcacttgagtagaatttgactcattcttcacaggtggaggaggttccttctgttctcgcccagcttttctccctatagatctgtcttcctctaaggatgatatgtcccagtcatcatcgtccacatctgtacactaaaaaaaaaaaaaagcggagaaaaatgaatgttccctaaagaaaccgtgtgtgttagagcccctcaaacagactgggccactgacgctaaatggtaagaagttgggagcctcagagtgtctctcatctcgtcatctctgagggcgatgaaatgggtttggaaatctgtgcttcgaaagcagagggaaccacatctttttgtctgttgtcatggaaatgtatgtttcctatgcagcaatcgtgaatttagaaaattccagaaactacgttgtaaagtcaagtcaggatgctccccaaggagcagtcagaccagctctggggctcttacctctgtgatgctaagacatttaactgcaggagacgtcacatgagggccctgcgaaagcggccccggtgggaaggactgtgtatttctccagtgcaccttctaaggaagacacggtggctcttgactgatgtgactttttgtcattttgggcttgggtaacacaaatggcactaacttatgaaagtagttggacagaatgctctggattccacagatgagcagggaagaattaaatctaatgtaggtgaaaaattaaagaaagagca

SEQ ID NO: 58333 - DNA, 1864 bp, Bovine  19866880794281
  misc_feature (1)..(1): n is a, c, g, or t
nccatctatccatccatccatctacccatccatccatttatttttagtttctctgctgtatgccttagtgaataaaccttttccgtttttgaatttcctgtagcttattttcactgttgctagtttcttcataaattcaggtcaaattcattctctaggaagtctctcttgtctcttctaattgacatgattttgtctttctttgagcatccaaagcctataatatatagatttgcctggtaattagttatatattgtcttttaatatcttttgaattgatattaatctactgtatggttatttgttttcaaacatgtatgtccaatttctataatttaaattttaaaattcttaaaattacaagctatgaattatgctttttatattctttcacttgtagaaacacagtaattattttgtgattagttaattctgtaagcaaagactacatatgtagacaaacccattagtgtcaaaactgaaagcactaactctattaaataaagactcactacagactgggacttaatacttcccaggcatatagattctttgctctatgatttttccagaaaatgccagattctaccctcttgctagtagagaaggaacaaaataaatacctggcctaagcatgacttattactagagagcttagtttacctctagaaaaaaaaaattcatgagctagtttaaatctctgtttaaatactaataactactctaaaacatgttttaaaccaaaaaatcttctttcagcctaaatttgattttgcagactgtctcatttctttgtacctatcttcatatttttcagcagctgctgaaatctctagggagtatctctccaaggatacagagccagacagcccaggtctcttctctgttcttgagttcctgttttcaagtaatgatttggataaactagagaccagttttctttcgagcagctctggcagctgaaattaattctcttaagactctactttggaggcaagcagatggtacacatgcacgtgttttagttttgattgtaccagttctgaataatttaaagttccaaatctctataaaatactgtattcccatttcccaacgcaatttttttttttcctttggcctcagaaattccttccttatattttgacatttggctgaaacttcattcattttgtactggcttcattgtcacatacctcctgctgttctttgttacaattttagataagtatggctttagaaaagtaagatgcttttagaaactattttgctggtgattttccccttaccatttgcaaagcattttgtatacataaacagcacattagccaaatgatgttgttatcacagttcctgttggtctgcgcttggctctcgctttagaattaccccaaataggtttgcagagttttatagttgcattatgaggcactcaataatatgtatgaacttaggtattttttccccctgatattttctttgagaaacagcttgtcctatctctgttgaagattcactgctgtgccagtacaacatggtaagaaaggaatggtcacaaagatctctaagtaggtttctccatcttgccaaatgtagtccaaatttttctgtgaggtctagtggtttggtgaagttaatgggggctgtgaggtatgcatgtatgcacactcacacgcatatatgcacacacactgatagttacccaactcaataagaaagctctgctactgtaggcactatagctatgattcaattctgggatgagtttcactaagttttactggcatcttctcttactatggctaatgtacaagcatatctataaaatagaatgggatatattagcacaagtccagaaattta

SEQ ID NO: 58334 - DNA, 2002 bp, Bovine  19866880870651
  misc_feature (1)..(1): n is a, c, g, or t
ntgcatgaaagtgaaaagtgaaagtgaagtcgttcagtcatgtccgaccctcagtgaccccatggactgcagctttccagggtcctccgtccatgggattttccaggcaagagtactggagtggggtgccattgccttctccacaacatatggccggtatactgaatttcacccacttttgtttacccatgagcacagtcactgcatttttgcctgtctttctcaccctcattgcctatttctctattgattattttcatcaacacacaaaatatctgttatttctcccagttatatatggcaaaactaatacaatattgcaaagttaaaaaagaaaataaaatttaaaaaaaaataacaacaaaagaaaatttctttggacttcatatagttatatacttcatatagttatgaagttatggacttcatatagttatatacaacttcatatagttggacttcatatagcagataacatcaattacttgttatctacactcattgaaaagaaaccacctcaaaaatcaagtctgtgtttgttgaattttactttgctcctcctattactttgatagcttggggtctaactgatataaaatagaatgttcatttcttaagcataggatttgatgagattaacaaaggaatatatccatgtaacaactattaacaataagatcaagaacaatttcactagaaaataatctcaagttacaatcatgtcagtctcctagcagaaattatataagacattatgcaaagaagagtaataattcttgtagtgaaaaatgaaatcaagaattggctagatactaaaatgcaaaaaatgcctagtcagaacaccagattacagcacatatgtgaggacttgaagaatgaattccatgtttacatttctgaaatagaaaaataagagctactcatacatagggaaaatattggtctgaaaaaatggatttttaaattcaagttaaaacccagtactctgagtaggtaaaagtgaggaagctgaaatgaatgtaaagttagtctgtagtaaacttacatataatgattctttgatttctttcattaaaggcttaggctttgtctccataggtatgcttctaccagtccaacaggtatatttgcttgaattttattaaaggtacataaatatagcttctggagaaatgatataaaatttgcaaaagggattctaatcaaaagcaaacaatcttgtttttcaactaaaataaaatcttttctaattagtttttttctggttataggaatgcatggatattcattactcatatgcaaaaatattcttttagatgacagtatgttctccttccaaagtagaaaataggtcataaatctcttccataaatcaaaattcagttgtcttctctatgattgatttattactgaatattagagtccttggccacatttgaaattatatgttatatgatatatacaagatatatatcacatgttctttaacctctgcagatttacttctatatttaaaattaatgaattttatgttcacttgcttttctttctatggattattatagagaattctaatgctatttgtctaaactgcaaatgttggtttccttttgactattataaatcatattctgttatttgtagtgagtaaagattaatattcttctgggtcaacataatttttatatatgtgtaaattttaactcggagaaggcaatggcaccccactccagtactcttgcctggaaattttaactaattttttcaggaataaaaaaattccacatagagatattaatgaaaatgggtcattcaaaactatacatgctaataatagcaaatttaattttacattatgagatgtaacaatgttgaaaaaatcaacaatgatgacaactaaaaaattataacaataaatataaatcaatgaaatacagagtaaaatacagccagatattattatttgaaaaacagctaagtaagaagaccatatatcacatca

SEQ ID NO: 58335 - DNA, 884 bp, Bovine  19866881236486
  misc_feature (1)..(1): n is a, c, g, or t
ngattccatggagctttaaaatgattcaaaccctactgtctgtgttttactattgtaatggcttatgtaggaataactctcggtctgatagaacaaaagcagaggggagttgccatattgtaagaggccattgtcccatctggtctgattcctgcctgtagccaactaattttcttttacatcaagcctatattacaatcccatgacttttgctgggcttcaattccctatgatccaattttcctacacaggtggtggtaggaattggaaattcaccaatggaaaaactggtttgtgccaccagaaataaaaatttgtgtttaataattctaggatgtagaagaggtggatagttgttggttgggaacaaaattcgatatccaccatgtacaactgctttctgcagtgttttttattactcaaataattttgaaattttaggatgtgtataataacagtcaaggatttgattgtttctttttaaagatcatgttcaataccatgatgattatcaagatatttatagctatacctaacctttatcaacattgaatcttcacattgatgttaaaaatgtagtaaaatgtgttggcacgttaatttctggggcattactcatcaccgatacgatatttaacaacaaaaaaattcatctaagatgaaaaatttaaaacctagttcacattctataattttgcacaaaaattattagtgagccaacatcaacttaatatattgaaaatttttctgaaatatgtttacttaaaatcacttgcaactattgcttctctaaataatttttggagatcttatacaaggaccatacaattcataagatcaatcacaattatgaatttggagactgtgtatctgtattctctagg

SEQ ID NO: 58336 - DNA, 1112 bp, Bovine  19866881432407
  misc_feature (1)..(1): n is a, c, g, or t
natgagctgggaataatttctaaattgactgacagctggtttgagtttgaagtaggcacattattagtataaacagaaatggcatcttattatatgaggcccttcaagtgtagctttcattattattttaaaggtttccaggagatgttttcagtgagcagtgttatgaaaatatgtaaaatatcaagactcacatgtagagctattttagcaatatattgtttttctttgtaccttggaatctaaaataaatattaaaaatgtaatagaatgagccattagaaggatatttttaaactactttattctggggaataggtatttgatgattaagttagatatggactggatatttattgagataatctggtgtgtttgattagatctaaatcttcatgtatgtataactcagtataaccttaaaggcaacttttcagccaatgcctgatttctattttttgattccatttgctgaaatctaaattagaattctttccatttaaatgcagattcagactttccacctgaggggcaaaagaagccatttcttttgactgaaaacatatataggagatatatatatatatagtttcattcacatgaatgaagtttcatttacatgaatattccttcccaacacaggaaggtattttttcttctgatttctagaatgcttattgcaataattttataacctccttatatttgcttcattgttttgtgctaaaagttcatgtgctaaataaataagctaaataaaaattaaaatttcagtggacattggaaaggtgtgtggaatttttaaatggaagtggtgaattaaatggcactgagtaaccaaaccaaaattgaaatagaggatgctgaaaagctaggcacattcatatgctgacagagatataatatgtagggccattttatgcctttttcttttctttccttttttcattctttaaaaaatgaatcctggttagagtattttaaaatataaagctctgggttatgtatgccaactcatctaatgtatacttgaaaagctgctacagtcacatccaatgggagatttataacacagagaaaagaaagagcacagataaatcatgtaaaggagt

SEQ ID NO: 58337 - DNA, 1133 bp, Bovine  19866881453859
  misc_feature (1)..(1): n is a, c, g, or t
ntgaaagtctatttatgttcctaactggtagatttaacaaaaatttaacagccaagctctctggcttgtgatattaatatattttgtgtcttgcaaataaattcactagaaccactgtcaagatgttcccactttaggatacaaaactgtatatattacattttctaaaatctcctttttataattttatataaaaaaagaagatgcattaaatcattaaaaattaactgttctacatgatggaattttagttgattttttctatttactttttgggtattttcagttttttattaaacaaatatatggtatttatatggagagtataatatatttttatttgtactccttctctttatgtgcctctcaatttagtacccaaatctataagaactcttagagaaaataaatatcagtgattgactttttggctggccaggtgttggataagaaccttattattaatactaccacatttatttattacaatacccctctgttatggatgttcttgtgcttttacaagcagcaactctgggttttctctccaaatgtttgtgattttaaagcccaagctcattcgtatttcacaaaataacttcctaggagctgttaaaacagattttttatgacagtcaaggagggtatacttggaggatcccaagcagaattactcttactctgagtattgttactctgaaagttctgatcttttatcttacaagttaacaaatcagtctgtcacttgctcatagatgttaataagagccacagaacttctgggtcagaaacaagggcctttcttgcacatggcacaaaagacagcataacatcagcatatttgttccatttctctttgctccacaagatgacgtggatggacacagatgcttatgtctgctctcaaaagaagcaccctaagctttgggaactaggatctttaaaaattgtcaacaattagaccttttggggggcttcactggtggctcagctggtaaaaagtctgcctgcagtgcaggagacccaggttcaatccctgggtttaggaagttctcctagagaaggaaatggcaacccactccagtattcttgcctgcaaaatgccatggatggaggagccctggcaggctaca

SEQ ID NO: 58338 - DNA, 978 bp, Bovine  19866881545235
  misc_feature (1)..(1): n is a, c, g, or t
ntctctccatatcccttttacatgccactgtcttaacaatacatttaacctagttgagtattaaaaggatagaaagaagaagaatatttgcttctatatatttgtaggtctattggaggttttttgctttgttttataatatgacaattttattctctatttaatattatttgaatgttaatcatatccttctagctacaaaatcacaattattaatttgtggaaatgtttcaaaagagttgaaggtagaggttgaagtgttgttattattctaatatttattatttataatattcttcatattttgaagatgaattccagtcattaattattccctgtcatgttgccttggttacaattactcatagtaactgaagctgtcgaatgctgcagacagagcatgaagagtattgggtcagattaacactgagttacacagaatgaaaatatagtcatcttccaatttaaagctctttccaaattctcctaaaatgattttattagaaacacctggtataaataaaacacatatttgaatagttttcttaacaaaaatattcacttcaaattggtgtcattttattctacaccagaaatcttacattttatactctttcagccacattctcagatacattgtactttatatgcatttgcaatgggtctcaattagtgtgtttctgcttagtaactattcagaacacagagtataatgacaaagataccacataattccatcataagaaacctgaatatgtagtgctagtaaataatacctaacttggagaataagagctttattttttcccctcacttaaggatgtaggatacagagcatttttaaatccttaaggtctatacaaaaaaagtatttgtatacccagaaggaaataaaattatagaaaaatttatgataatattgttcattttcatgtatgctgagaaacttttaacttgtattagtttttataattaaat

SEQ ID NO: 58339 - DNA, 1645 bp, Bovine  19866880226435
  misc_feature (1)..(1): n is a, c, g, or t
ntcagtgatgccatccagccatctcatcctctggcatccccttctcctcttgcctccaatccctcccagcatcagagtctatgagtcaactcatcgcatgaggtggccagaggactggagtttcagctttagcatcattccttccaaagaaatcccagggctgatctccttcagaatggactggttggatctccttgcagtccaagggactctcaagagtcttctctaacaccacagttcaaaagcatcaattcttcggtgctcagccttcttcacagtccaactctcaaatccatacatgaccacaggaaaaaccatagccttgactagacaaacctttgttggcaaagtaatgtctctgcttttgaatgtgctatctaggttggtcataactttccttccaaggagtaagcgtcttttaatttcatggctgcagtcaccatctgtagtgattttggagcccagaaaaataaagtctgacactgtttccactgtttccccatctatatgcaaatactatatcattttacataagggacttcagcctccatagattttggtatccaggtgagttcctgggatcaatcctccatggacaacaagggtcagctgtacaataatttatgcaaaaatttttacatacaaaacatattatacttgcttacatatgtcacaagcataattataaagctgtgcactgacttcaggagatctgtacttgggatggagggagaaaggaggtagaggttatggggaataggacagcaaagagaagggtttgaaagaatctttattttaaacttcatttaatataacaaagacctgcagtaaatgtggtaaaatgctaaaatgtattatatctacatagtggattcatgggtacttacaaaactgtgtaattgtacgtgtgaaatattatatacattttaaagaatgccttgcagagctaattttaatagcaatatttttttaaggaagaacactccaaatcaccaagtctatgacaaaattaaacattgtcttttactgcacataataaggtgctataataaaaaatgaagtatagatcaggatgaagtatttttgtgagattataaaagagataaagaaccattcagttcactagatgacacaggcaacctaatccacttgcagaagatagatgtactaacatttttcccagcggtaggctgaagcaatcgttcatatggctgggaaagcagtgagaaaaaactcttaacttttataaccttatattttatataaaatactccaagatatatactcaaaacattttgacagtaagatagaaaggagaaactgcctgaatgcaaagcctaaaaaatactattacttccatcatttcaaaacaattttctcattttgaagatttaatgcaatagcaccttaacagtttagcaagaagagaagtaaaatgttatatgatttttaaaaaaataacttgaaacagtgtccttatacaaaaatacagatatattaagatatataaaacaacctgcttaaatgtttaaaaataatttgtattgaattataatgaacatagagaaaagcacaattctaaatctctatgaattttcataaagtggacaaaaatgtaattacaacccattaaaaatagaaatag

SEQ ID NO: 58340 - DNA, 1390 bp, Bovine  19866880256860
  misc_feature (1)..(1): n is a, c, g, or t
nagatgacaatggcaccccactccagtactcttgcttggaaaatcccatggacggaggagcctggtaggctgcagtccatggggtcgctgggagtcggacatgactgagcgacttcactttcacttttcactttcatgcattggagaaggacatggcaacccactccagtgttcttgcctggagaatcccagggatgggggagcctggtgggctgccgtctatggggtcacacagagtcggacacgactgaagtgacttagcaccagcagcagcagtttaatggtctcttcaggccaaagcaattttgtcaaaatgtgatccactacaggaatgaaactttgaaccagtctgtattcccaacccacctacttcacttctacccagtggataagcagaagatggagaggctttaagtaaaaggttgctgacccttgtaccacatttgtttctctctcaagatttctagaaaggatatgtgaatttaaaaatgctaatatcaatatctttcttctgttttttataagtaatgctgtgctatatgtgaaattaaaattagcaaaagtttcatttgtgtaaaaagttattttaacatgaatcactgggttgccatttgaaggaatatatacttgagcaaggtgaatcttaatatgggaatttttgacaaaggattttgtcacattcttaactatcaggctctatctggtacctaaataatatggacctgaagatgagagacagcaccaccagtattttaaagagctttgaagacacaattgctgactgtatttaaatacgtgctttcttttatctgggacaaacacttgctttataaaggcttctctcctgctgtatctaattctttacacttactaggaaataggattctgatcagagcaaggtaaaaattagctcagtgcaatgactaggggttggtccttagaatctacttggccattcatctattgaacctttgtattaacagttcatagtttacttagcactatagatatcttttcattattttggaagaaaatggatttctgaactatactgtaattaaaataatttatgaaattaaggtttgaactgacaatatcacatagcctattattatgcaaaattcctttataaagtagttcaaattacatttccatgcacaacgggaaaggatgacttgcttaggtaagctaatgctacagaccacagggggatgaagtgagttcagaaaagcttataacaggggagaggtgggtaagatggcagagtagggagaccgtgaactcatatcctctcacagacacagcagttacagctgcttacagagctaacatctatgagagtgacatgaagactagcagaaaagagtttctacaactaaagacagaaaaa

SEQ ID NO: 58341 - DNA, 2008 bp, Bovine  19866880275422
  misc_feature (1)..(1): n is a, c, g, or t
ntggctattgaaaagcgagacattactttgccacaaaggttcgtctagtcaaggctatggtttgtccagtggtcatgtatgcatgtgagagttggactgtgaagaaggctgagcgccgaagaattgatgcttttgaactgtggtgttggagaagactcttgagagtcccttggactgcaaggagatccaaccagtccattctgaatgagatcagccctgggatttctttggaaggaatgatgctaaagctgaaactccagtactttgaccacctcatgtgaagagttgactcattggaaaagactctgatgctgggagggattgggggcaggaggagaaggggacaacagaggatgggatggctggatggcatcactgactcgatggatgtgagtctgggtgaactcctggtgttggtgatggacagggaggcctggcgtgctgcgattcatggggtcgcaaagagtcggacacgactgagcgactgaactgaactgaactgaaggagagaagaaaagaaggtggaagagaggagcaaagaaagggaggaaggaaggagagtggaggaaagaggggaaaaaatcattaatttggggctggctttagagaaggaaactattcaatttcagagcactgtgggtttgaaatagagaatcaacccctgacttcaaacagactccaatgataaaagctctatggtgattttctacccccctccttttcttttttttttttcctgcagtattatagatactatggttgcaaaaaaatgtgtttttgaaaatatcagaaaaagtttaaaattctgccatatgcaaaaacgattcacttttactttcaaccaattccagaaagtgtttataaaatgcagtaatatttaaaagttcttttatgtaacttcctcatataggtgtggccactgaacacacaaaggaagctagtgtacaatgagtgaggagctgccttagctgttcagctgcctgaagatgggctttcatgtattctatttgaaatgctctttctcccttgtcatatttttctttatttataattctctctttaaaaacacaattcttcactgaattcaaaggcacataggcagaaacagtaaatgtctggagatattaataagcttcctgcagacttcataggttaaaatggacatgggtcaattatatatgcaaacacctccagatagttatttccattctaacatcttgatagctgcagaatcattgcttctaagccatttaattcacttctagatagcactagggtgctagggcataaaaatggatgaagaagaaaattaataaaagtaaaatattccatcagattgcagcaagtacaagtaagacttactccagatttcatatgatcgtaatcatcttatctcaaggctggaagaatgagagctttgcaaggccttacaaactgtctacattcctctctagcatatattcatgaatgtacattaggtgcaatgaaattttaaaaacaatgggttgccattgccttcttcaatgtagatatatagacaggcaaatatttttttttctgcttctgagtttaatcatagaaaaagcattgtgtaggtaaaaataataaaatatatcacatttaattgtgcacatttaataattttcttactgaaatagtggctttctaactatccaggatatgccatgtctgaagctacacagggtcctgtgctgggctaaacagttaagattagctaccagccagaaaaagtgtgagaaaccacttacagtatgtacttctctgtgccttcatgctcaggccaaactcgactcaaagcaatcagctctcacagattatataaactctaaaatcataatatgagaagttgtacaatgttgcaatctatagagaggtagataggtaatatttaaaggaaaagacagcttactgctggtttacttttttgggttaaaatatctttctcatatcttaatagtccaaataaatgatttcctggattatcaag

SEQ ID NO: 58342 - DNA, 1306 bp, Bovine  19866880421436
  misc_feature (1)..(1): n is a, c, g, or t
ntagtgacctaaatttgagaatgcatggtaatctcaacatgatgagccaaaatttacattcattctacaagatagtaaatctttgaaagaatagttcaaatgattattcttaaacctgaagaaaattttattaagaaaaatttattaaggtctcccttgagcaaattcaaagaataaaatcactacttacaatgcgtgtgtgcatgcttagtcactgtcatgtctcactctttgcgaccctatggactgtgtagctcaccaggcttctctgtccatgggattctccaggcaagaatactggagtgggttgccatttcctcctccaggggatcttcccaacccagggatggaaactgggtctcctgtctcctgcattgtaggtggattctttaccactgagccacctgagaagcccctaccaattacaatatttataagtattttcctttttgactttactgtaaacccatgtgtcacagacatttttcactcatcttttgaaaccccataacagcataaggtcttgcatatattgagtaactggaaacaaagtgttgaaagagtgaatttgacagtttttaaatcatggacctgaggagaaaataaaagatcccttctctttgtttatggacttgatattgggaaatgaaccaatatacaaaatcataccaaataaggcaagcatttactttcttattgaacctcgaatagggaaaatctcaattccacaagttgggataaatctcagagaggtcctaattttacctttcatttcaagttttatggatttagtgataagaaaaaagcagaaaataaaggctgagcatagcataagcatatgctttagcagagaaatagttaatggaactgtagttagtgaaaagaagcatgaagaattgttgcttatttgttgagcttgcttagcctcaaccagtgagtcattgagacaataacttcatacaaagtgatgatgttaataatacttctactaatagctttgtatacattcagaggtcctcagttaaaaactagtacttttctaccattcctttgttcttggtgaaccataatgtacgtttttgtgttatgttattaaacaaaagactgacgaacatttaaagttttgttttgtttcttattttattggaaggaagtttttttttttttctttttcgtttctattgatttcacggtttactacaattagaattaccataatggtaggatgtggttgggagaaatatatgacatcatcctttataatcactagcatggcatttcccgaaacaaaacgcgcaggatatca

SEQ ID NO: 58343 - DNA, 1050 bp, Bovine  19866880452538
  misc_feature (1)..(1): n is a, c, g, or t
ngacacgactgagcaacttcactttgacttttcactttcatgcattggagaaggaaatggcaacccactccagtgttcttgcctggagaatcccagggacaggggagcctggtgggctgctgtctatggagtcgcacagagtcggacacgaccgaagcggcttagcagcagcagattgtaaactcttggaatccaaagattttattatttgcacctctaaatacccagcacctaggatagcacctggctcacagtctatatttagaaacttatttaggatttccatgtaaaatacaagatactattgaattcaaattttagacaaactatgattttttttttactataagtgtattattgcataggacactcatagtaaaaaaaaattatttatctgaaattcaaagtaaattggatgccctgtatttttatttactaaatcaggaaaccctactttatgaatcagtgaatgggtgaatgaatgtcattcttttctatattaaacaagaaaccatttttatttatttatgcagttttcagattagagagtgagccatatagaaattttcatgaatctgaaacccttgactgcactttgaaatcctttttttaatgttagctgagggacttcatcattgttaagagatagcttaatccttaagtactttacagattaatagaagaaacatggcagttatgatggtttctcagtaggtaaacaagaatgaatagaatctattgagattagacctgctataataataaaaataatgacagtaacaaattatgaaaaatattcagagagagaaaatgttctccccaattgctagtggatatattaaaaatacaatctcaaagcaatattaaatataaatattattatatacataaatggataactatatgaaatattttctgtgtacaaatagaatcagtaacttaacctttttagagctccaaaatgtcaacctaaccgtggttaaaggtgttaagaagcagatgtccctgctcaaaaaataccttccttatttgtcatctagtccttataat

SEQ ID NO: 58344 - DNA, 1893 bp, Bovine  19866880475814
  misc_feature (1)..(1): n is a, c, g, or t
nctcctgcattgccggcggattctttaccagctgagcccaagggaaccccaatacaagtggctcccgattgtatctttcactgaattttatcatctaattgtgtctttgtttctcacatcttttggcttatagtctctcccaccaaagaagcctacttagtacccatttgaatctaccttagcattttcctctatgggatcccaaagggttggacacgaccaaatgactgacattactactactagcaattcctctattataataggaaaagtagatcagaacaaattaggagagagttgtactcatttctgcagcaatcaaccaaggctatggataatattgtcatttttgagcagagtcatatgaggattcaactcaaccataatgcaggatacaagtaaaagaataatgaaagactttggtttgacatttgagaagagatttagtgaaaagcatagtagttcttttgttttctgtatagtcatgattgcatgggtgtgtgcgtgtatgtgtgtttctgcgtgtatatccaaaggcataatttagtttaggtctgggacattaatggtaaatattatagagcgaaaattttgacttcataataaggaaacatattttggcaatcatatttcctggaaatgaaggaggctgcctcctaaagtagtgaattgtatgttttggaagatgctgaagtggattcataaaactcatgagacaggtagggtaggagaagtcattactgaattagatccatagctgtgctgcgtgatctcaaaggtcatctaccagttcctccttacacacacacacacacacacaaaccactaactgcttccacacatcttattctgagaaaatctaaacagtgctgggacaatagatggttcttactaattggataatcatgattatgatgttttgtgttttagttattgctttttaaaagaaagggttgtatatgtataaaatatcagtacttaattcatgtttgatggaaataccctgataatctggaaacataattattatactacttctttttatattctaactccgtaggactgattttaagaatattttcttgatctttctaccatggtcaattcccatttgactatttgaaatagatattatgttgagttaatacttaagtctattattactatgctgataggtattccctgctacatttataatttcagtttgcaagaaaatacaagtgattgtcctgatatatgtctattgtaccctgcagttttgtttttgtatttcaaacaacatagagtcccaggtttctttctctgcctcaagtcttattcaaggcatcttctatctctttccctctcctatttcttttatatttaaaaaatggcctttcagatgtttcctaattgctttcttctttctacaaaaccagtgtgaggaaaagaaaatatgtgtattattggtaactagcatgcacttcctgatctgatgggcttccccactccccatgaataaagttagggagcaaagtagatttttaactgagaccacaactggtctccagtttaagtgatctattggcttgccctgccttttaaaattgttttgcttcattttaaactaaagtagcccttactgacaaagtcaagctgtaccaaacctcaggccaattaaaaccaccagtacacaaactcacacttggtatttgtaaaagggacttggttctttcagaagaagattttgagtattcaatttaatatttactcggaatgacacaggttgtctgcggaagtacctgcagtcccttcctgcttctgctgtatctttaagaaggaacacagggatgagcaggttttagttggcagatcatctcctctcctcaggaaagcgggggaggagcccttcaa

SEQ ID NO: 58345 - DNA, 1386 bp, Bovine  19866880490914
  misc_feature (1)..(1): n is a, c, g, or t
ntttaaaaagcaaatgcatagtaattgcatcaggatttttttccttgaggcttcctttttctctggggctttccaagtggcacagtggtaaagaacttgcctgccaatgcaggagatacaggtttgatccctgggtcggcatgatccctggagaaggaaatggcaacccattccagtattcttgcctgggaaaccccacagagttgctggtgggctatagtccgtagggtcacaaaatagtcagacacgacttatcgactaaaacaacaacatatgatctgtggtgtgcacctcaggccatatgatgctgaagataaatcctagacattcattgttggatccatccccagctggatgttatagagtaatttgcccctttagagttatgcacacatttgcggcatttgctttgccttgtatgtctacttatgatgttgattaaatgtgactgtgaaattggatagttctctaaagacaaattaaaaatctttcaaggttttattttctagaaagtgagttttgatagaacaacatctcaacaaatgaagttcagttccagagttcggccactgttcttccaaactttcctcacatttctttgaaaagcaatggacctagaataatgaagttccacgaggctcctaaagtaacctttcccctgagccttatacatctaggcatccaagtagcaatgttttcacactgtggagagtcctccacactatgagcgatgttgtgctttgctggggttctctgcggtgcagctcttccacccagttgcacccaatttcactgatcagtagctctggcatagcttcaccctcacgtattcaattcagttggcaggggagtcaacatacctcaaaaggaattgcaacatcttggaagaatgaggaaaattagtattgtttactctctcttggatccttacattttatttggatccgaggaggatcaatagttttagcatattctggcaccagaaatatttattatttttaaaaagatgaattagatgtttattccttctcctgcaaaatggtttcaatctgtagatttctctaaaataccagcactatctgtagttgttcaaatgtggccagccactgggccatggagttgggctgatcaagcatggggaagatcagaatgacaagtgagcatttccccattgaagaaatatctttctgaaactgcactcatgttcagcagctgatatcctgcagagactgcttttctaaaatttattttgagaaaagttgtaaagacagtgcagagagttccccttcaccaacttctcctaatgtgagcatcttatatgaccatgctacatctgtcaaaactaagaaattaacatggatacaataacttataactaaatataga

SEQ ID NO: 58346 - DNA, 800 bp, Bovine  19866880630763
  misc_feature (1)..(1): n is a, c, g, or t
naattgttcacttagagggtcatctaaggaaaagctatcaaggggagttacaaagcttgctaattctatttgagattcaacactaaccaagaaaagatatatatatatagaaaccaaggggcttatttccaaacagtttaagggaatgtgttacatttgtcttccttctgtggcaaataccagctatgtggccacattgctggaagaggtggggtggacctctcaacattttggtttatcagagaggatgacttcctaagtagatggaggtaataataattcagaaggaaagctaggaaaccaagactcttattacacagtcaggactcagatccattacaaagaacattcaataaaagaatgtggtatgaaattggaagaaaagtagaagctctgtttccctgtagcacctctttaagtgtgcacagaagaggaagagagaacaaagaaatgcccccactggaaagtcagtggcatagagagcacatccataaagactatatctaatattcaagagaagagctctttcctacagaacctacatacaaaagtccctcaacaaatatttgttgaatgaataaatgattagattaataaggaggaatcacttctaaattctagaaaatcttatatttgggaaaaataagtatttggagagtgattgacactgtcagtggatcaataggccaatactgaagtgtgctgttctctgaagcacggatccaagaagtaacagcccacagagacaactgtacaatacatttgatccaactgggaatcgaaaataccacctgaagagg

SEQ ID NO: 58347 - DNA, 995 bp, Bovine  19866880684788
  misc_feature (1)..(1): n is a, c, g, or t
natgtgaatttaggcaagtatcctaacttcacagcattcataaactcacctgtaaaatagggtggaaagtaagagccattcttaccttgtgagaattactgtgaggataaaatgcaacaaaatttatgcagagaccaatgcagagctggcccaagaatgaatgacaactctcattcatattaagttagatataaatttaaaaatatataattaatacaatatatgccttataaatgacagaggctcaataactgacttgaatttaaaaactagagaaatcaggaattccctggcatttcagtggctagtactccacacttttactgccgagggcctcagttcaatatggttggggaactgagatcccagaagctacatgatatgccttaaaaaaaaaaaaaaagactgaaaaaatcatcacttgaaaattttttcttccacttgtaggtaaaccacctactgtcgtgatgagaatgaccacattacacagttttagaggttttactgcacaaataaccaatggggtatcagtcactacaaactaccgtcgtaacaaatttaaagtagctgaaaaaattagagcaggaaataaatacctaaggctttccagctgtcagcaaaatgctaacctgcttgaatattttctcggtgtctgttttaaaaacatgagggctgaggtactaaaatttgtgatccaaaactaaacttagtaggacacaaataacagtgtgaatgttttggttgtgttatccatcctactttggttgatgggacttggggaaacagacagtgatgtccatgactgatcactgacagatcctgtattatgcagctacgcattgtgttcatcagaaaaatttgacctctgtgctgttcatggctcagaatgtgatactgatgtggcaaatgacatggcgctcaaaagagaccatattccggaatctgagtactttaccagcaaaactaattctaatatcactacatttccatgaggc

SEQ ID NO: 58348 - DNA, 753 bp, Bovine  19866880716419
  misc_feature (1)..(1): n is a, c, g, or t
nagctggtacttaccctttacatacagtaagcaagcaaaggattagatcaccagcaaaataaacccatcaaaatcacctttttttaatctgaaaatattttaaaaatgcattttaatattgtcatacatagaagttttacattttatggttaatattaagctgactgtgatatatctcaggcttccctggtcgctcaggctgtaaagaatccaccagttccaggagacccaggtttgatccctgggtcaggaggatgccctggagaagggaatggctaattcactccagcattcttgcctggaaatgttcatggacagaggagcctggaaggctatcgtccatgggatctcaaagacttagacatgattgagtgactaacacacacacatacatgatgtatctatggggtaagtgggtgagagtttcttaaacttttctgagctctgagcctctgaaggtcctgcctggaagaacactggcatctcagtttgtcctgccatcacttgttggtatacaaggccactgctgagcttgtgggggcttctttcctctgcttattgctattgtttcaggccaggtccctgcagaggcctgcctggtcttttaaaggagggtggctctgagtgttatttcattctcttgttaccagcttggttatgattcatccttggtcaagtttccaagccctgggtctaatgtctagtccattctgggtacacaaaccaacatccttgtcagaagtctttctgcat

SEQ ID NO: 58349 - DNA, 1525 bp, Bovine  19866880722809
  misc_feature (1)..(1): n is a, c, g, or t
natctgagatgcagaagaaaactagcactgcctgccacgtgagtttgggaacatagcagtttttcactaaggaaacccaggcttggccgaagtgatgtgaaatggtcacaaggtcacttaactggaaaggacttcctacctgcaagtccacttctttcccttattctataccttagtcttccctctttttgctaatgaaggattacaatcccggacctttggtctcccactgagaggtaccttgttgcttaatagggtctcctggtcacagtgagaatgaactaaaacggtgctttgtgaagattcctcatgatttaaattgacctgagcttgtgagaccacatttgaatttataacctaacaaagtgccaccatctattttgacagaacacaactcatgccgtgatccaccctctccattcacaatgcgtacaaaataatctttcttctaaggctttttatatttcctgagaggagttttcttcctcttgctttttcctgaatgaggaagtgcttataatctcacctcttaaattacattttaaggcctcacaaaccatagtaaagggacagagtcagcactaatttcataagctatctctaagggaattaattacgacctgacttatttttcttttagaaagaagtcgtaaaggaatcctgtaaattttgaaaaaggaataaattctttctcaaaagaagtgagaactgtagtaaaatgttaaaatagcacacattaaagttgactggaatctcccgtaaaatcaaaccaaggcaaagggtagtaaatatcactctgaacaaaaatcagtctttccagcaataaagctgattaatatattacatttaaatgtatattgtgaaagacaatctgagccaaaatacacagaaattctacatgtcaagaaaaaggattttgagtcaaatttaatatgctttctcaaaattaacactcaaaagagaaaagatactgatttttttctgaaaagcttatacataccggagaaatagttaaagcaagatgttacctcaaaaaaagtagggtcactttacctgtcatcatatgaaatggaaatataattatttctttgtaaattttttattgtagtaaaagttatgtgatataaaacatactattttaccatatttaactgtacagttcagtgacagtaagaatattcacattaccatcatccatctccccagtttttcacctccctaaactgaaactctgtaccttttaaacacaaactccccattttccttccccacctccccagcccctgacctcaggtatctatcaaggcctgtgtactttctgactctatgaatttcactattctatgtaccttgtgtaagtggaataaaacagtatttgtctgtatttactgtatattggagaaggcaatggcaccccactccagtactcttgcctggaaaatcccatggatggaggagtctggtgggctgcagtccacagggtcactaagagtcagatacgactgagtgacttcacttcacttca

SEQ ID NO: 58350 - DNA, 1085 bp, Bovine  19866880788535
  misc_feature (1)..(1): n is a, c, g, or t
nactagaatggattaaaaatttgaggtgttttcttgcagattaacactgctctactgttcaaacttagaagaaatcatgtaattatggataatatttatcctgcacagattgctgctatgaaagcatctttgtatgtataaaaacattcataactgggaaaacacttacatggtagccacctggttagagtctagattatacatgcatataaaagctattttatgtattttatatttttttctaacatctattacttgtggttactgttctttcattgcctttaatttgtggacactttctaaccaccacttgtgggtcttcagggagcaaactctttcacagaaacatttatttgccaccacgaagaccatgaggatagagagccaattcaatatttattctgtgtttaacagcatcctttgagagctggagcaaagctttcaaaatgtaaaaccagagggaaaaaaaaaaaagccccaaatccaaaaaccccccctggagttctggggagaatggaacaaatagagctgtttctaatacatacagtatgggaggtatttcatagaatatttgacataataacagcactggaaaaatgtaacaagagaaaaagagagtaaacctgtaaagtaaaatatgaagaccatcggtatgtttttattatatgatacagaacgattcacctagtcttttgtgtctctgcagtgcaaagttactaataggcccatctagaagaagctgaacttgaatggttgtatgaagacctacaagaccttttagaactaacacccaaaaaagatgtccttttcattataggggactggaatgcaaaagtaggaagtcaagaaacacctggagtcgcagagtcggacacgactgagagactgacctgactgccctgacctgagatggttgcttcacttcttaaatgcagaacacaggcagacacttcacctttctgaattctagacttcccatatataaactgaagacaatgacactgattatttttatgtatatcatatgtatatatcacatatgtatatcatatggaaggtaaaaaccaaaatcaaataatacctgt

SEQ ID NO: 58351 - DNA, 3169 bp, Bovine  19866880810340
  misc_feature (1)..(1): n is a, c, g, or t
naccaagtccagagcctgagacaggggtggtcttggtgtgtcaaaagcagcagggtgtttgctgcgccttcatggatgagtgtctgtgcacgtctgcgtgtgtgtgtgtgtgtgtgtatggttagtatgcacgagcatgagtgcattcataggtatctttatgtttctctgttgaagacatgaatcttgaacataattaaccatgtgaaccaactcacattggcccagaaatgagaactgtcaaaatactgacaatttgaagtgggaattgtgcagtatcaaagaaaactgccacccagcattgtaccagaagcccctgggaaatccttctaagaagaattatttattaatctggggttgaaggccaggcaggcccatgttgtccctgtccaccaggctgattggaccttgtattgccaagcccagcctcctcccttaccctaaggcatctgccagcaccctgctagagggccagtttccttgtgactatatccctgatctgcagaagccctggtgagtactttggtaaatggatctggggtcctgggtcatatagttagcgctttgacttgatcttggaggcctataagagactttctggagtggggggaggtggggagagggcaagtagaagccatgctggagtgtctctttctctgcttatgctggggcatctggaacttttctggattcacctgaacatttgcaaatgagattgtacctttgttttcaaagagagccaagagggactagatcctggatcctgggctgctgaggtttcctgggggagggacgtctagaaaacaactttgaagatcagatgaaatgttaggattgaaaaatgagaagggtattcaaggaatattgccagtgatcttgacatataggaatacctgccaggaaatagagagggatctagcatcctgcctgggctaagacagtgagaaatttccagagaaaattctccccctggcaagtctttcttgcagtgagaaacaaacatcaagagaaagcaaactcaagttagttgtggctgggttagtaactagtagtgactcttcctccctggatcattagctcgcagctcagtgcctgccactgagtagatgttggttatctggcactgagggcaaaggactgtccagatataaggatgggatgcaggtagcagtagggcccaagtgggagaagtgcaagagcaagctaggtctccattcacgattattccctaagccagcaggcatgagtctctggccatgagtatgcctatttgctcttgcagaggacacagagaacataatcagagatttctgcagtaacaccagaggacaggcactggtgactcattcctctcaacaatgcaattatttacatccacctttgttgaagtattaattaaccagtgtcattgaagaatgtattaatacatttccaaattcccagtttggaggccaggaatggattatccatctctacatcacatgtgcccagttaggttataggttcagtaaatacgtgtagataaagagaacaagatgagataatctcccttgacctttcttacaccaaggtgaggatcatgtcgctgtttacatcacttccttttcttctcctgactgcggtgacagcatcttgtgcagacacagaaacagagaactgtgagaacatccggaagacctgccccgtgattgcctgtggtcctccgggcatcagtggcatcccaggcaaagatgggcgtgatggtgccaagggagaaaagggagaaccaggtacagtttgggctgttctttctctgcaactttatctcccaaagcaaactgcctggattgggaggagggtaatgtatgcatgctgcttgtattactctcaaccacatattatcatttgaaacagagatacggctctgattctggcatcccagactctcacacaggaactgctgacacctggtggtcctgccggctcagggagttgaccctcaagacatcccatgggacataggaggcctttcttctatgatccttacaaacagcagctcagaaaagttaaccctagctcagtgtctcctttcccctgggaagggattgggcatcatatttttttgagaaatagagaggaacacaaatattgagtcatgtttcctttttcctccaacaggtcaaggactcagaggctcgcagggcccccctggaaagatggggcctcaaggaacgccagggatccctgggataccaggaccaataggccaaaaaggagaccctggagaaaatatgggtaaggagtttactttagcaagggccaggctgaagtcccctggggtctgtgggctcaagtatcatgtgggacatgccccttctgctgcttcctggggagatgcccaactctgcttcctgactaagcagcctccagcttctctaggttacttagagcctcaggggttcctatcaattcctgaatacagagtcacaaaccgttcagagccaaaccctcgccagatgcctgctggaggatctgagccctggatatccttcaactgaaacaatttgatccaaaagggagaatatatgcattgggcttattatgcctattttcacaagagtggtagatacatggtatgtcaattatctcttacttcatgagaaacaacacacagccatttatttaaatcaaaattctgtgaatcaaataatttctttgctggtctcagctggagtcactcatgtgtggtctcacatacatgttggctattgggcgcccgtcagctggagtgatgaaggtgcctgagccgtgggtctctcatcctccagttgactcacctggccttaatcacacagaggtgattacaggattcagatgaaaaggaagagcggaaggttaaggcctccttaaggcttgggatacatacactattgcttccgccacaccgtattggtcaacacaagtcccaaggccggctcagattcaaggagtggggaatagactccatttcctcagagaagctgtgtcatatccaagtcatttttgccatctactacacatagcttgtctcatgccctcccccatggataatggacaactcacagaaatcctagtttactgattaacaggacaaactcagggaaaaacaaacaacaaaagaataaaaacaaaacatcgccaaagataaact

SEQ ID NO: 58352 - DNA, 1134 bp, Bovine  19866880824477
  misc_feature (1)..(1): n is a, c, g, or t
ntggagaagctctatacagttagcccttggttaaaaatataaattttctatggtgctaataatccaatatttatgattttttttttttactactagataaaacaaagtgaagggaaatgacatgcacttacaaaaggcccctatattgataggacagaaaattatttttgaagtaaattccctctaactgaggaaaacactttatttaatgtgtaagtgattttttttattatggaaaagttttttaaatgagagaggaaattaaaatatcactaagagttctcttaccacaaatgactaatagggacatctttatgtattgataacttttttttttttctgcatagctttatttttgtttatagagatgcaagcataaaatagctatgattaaatatggtttattattttgactttaaacctactataataacataagcaaatgtgtttattctttaaaattccataagcaatattttcacaaaataataggccattacacatatacacatgatagaatatctatgtgtccatctatacacagaagcacagacacccaaagacatacacactcacatacacatagagatgaaggagtagtcatggcaacaccctataaaaaacatttacatttatactctcaattagagattaaacatatggaatttcttttcaaaataaaaatattcagaagtataatcttgactttataattggaccatatgccccttataaataatctttacttagaaagcaatcctgtccaaataatattttttgaaacatgagacaaatacattctgctaatattctaagtctcctaaaacaataagttaaccagtatagctaactagaagtttaagaaaatatagaatttttgagcaatattaataagctccaaataactgtctctgtatctctgcactgatcaatgaataatttaggacatcttgataaacataattgatggcattacagaatttagcattcctggtgcaagtctgaagtaactagtgtttcatggctccctctcacagacactctgtaggaacacctgccacctgtatggaccctcatcaaacaaacatttgaaacaattttgatatcacatgcctttttaaatatttacttggg

SEQ ID NO: 58353 - DNA, 1645 bp, Bovine  19866880905745
  misc_feature (1)..(1): n is a, c, g, or t
naataagatgctgatgtccttattacgtctccctgtcatttaaaattttttactctttggtaaacaacaaaagtctagaaacttctcgataataactaaacagtactaaaccccattatgagatttcttagaggaggacttagaaaaggatattaaagcaactatcagaattctttcttctatgtacttacttttaaaagaagtctagttaaactgagcccattgataatgttcttagaattcactgtatgcatccagtatataaagcaatgacacaagttcattttcttttaaaaataaagtacatatccctacttttacactcttgcttcaagtgtccactattagaaatgacatttttccatctttgcttcctgcatctcacattgtgtgatgcctagctcaaatgtctttccttttttacctcaggaaaaactcccagaatatttccacttgcttcttaaaaaatcttggaatatctatcataaactttcttaatattctattttatctacttccttaaggacaaacataacactcttatgtagttgcattgttttcctagcactgtcaaaacgaagtacaaaaaactggctgcattaagaaaaaagaaaagtattgttttgtcggtctcgaggctcgaagtctgaaattaaggtgctgacaggaccacatcatctcttaagggttcaagagaaggaactgttcaaggcgttttccctagcttctggtggtctcgggcattgcttgacttatagaatcatcactccaattctctattttcacatggaattctactgtgtattttcacataatcttccctctatatgtttccctatgtccaaataatcccattctataaagacaccagtcatattggattagaaagcatcctaatgacctcatttcaacttggttacccctgtaaagatctgattttctaaggtcacattctgatgtgctagcagttgggaccttaatacatctgtaggggagaatgcaattccatccacaatgttgtccagaataattaattcttgaggatcctgggagacactgagagataatgtttaaaagataagctgtgaacacaacataaagccactttctaccaagccaggagcttagatttgatctaacttgaaaagactggaagatatataggagaggaatggatgatcatatttaggtttttaggaaatgtatctattgtcttcatgtctttgtattactcactcaagatttaagagtcctgaaagattggaaggtttaattattatccctttgctacttaaggcaggtagaaaaaggacctagccctttggcagctgaagacatactttttgccaagacttctcttaatggtggattttcccaaaaggaaaaaaaaaaaaaaggactgtatttagaaagagaggttggaggcaaagttgggggggtggggagggagagaacattccttaactcaaaatgattaaaatagagtttactactaattctcataaaattcagtcaactttgcaagaatatagataacacaacaagatttgtgtgttccagttgtgtgttccagttgctgtgtgttacggttgctaacaaaatacttggaaaccttagcggctagacataataagaggttctagac

SEQ ID NO: 58354 - DNA, 1405 bp, Bovine  19866880948972
  misc_feature (1)..(1): n is a, c, g, or t
nggataggagtcagaccagtgataagagtccacagtactcttgcctgaatgcatcacactccagactcattggaaaattactgattttcttggatcaatttaatccaacccagaattatctggcttctggaacctcctgagactttcagaggggttagcactattgttctcaacccttaactgttcatcagaatcacccagagagtcagccagggagctgtaaaagtgtatagataatatgatacttcttccagacattgctgatttactagccctgtggtgggacccctattaagtggtttctaaaagatgctcaggaagttctgatgtgcagcaaatggctgaagatgacttgtttggatatttccagaccaattttccaaagctcaaatataaggatgtggggtcggtgggtgggtgggggacattgcaagagcttaagtaataacaccatattgtaaatatataaaatggtgtcagagtagtctgaaacagtttactcccttagtatctgaaatttctaaatccagcaagcacatggaatattattcaaaaaaaagtcattaagaatttgactgccaggaaatgcttgaacacatacaaacactgtcattgggtctgatcccaacagatgtcccttttagacacctgttggagtgaactgtgccactgaccctttaaatgggatggagctttaattttccaaaagcagggacccagttggaatgctagaaatgcacatttgttgcttatgttccattctagtaaaccatctcctgaagaattatgttgatctcttgattgtgtagttaatgagataagtctacaagtagcattcagattgactagcagtcttatttatagaggtgtactggaaggagttgatttcccataatcagctaaaaggagaagcaatgttatttttaccttctcaagagtctttcaagaattgatgtgtgaaaaaggagaactgtcctcctaaactagaaactgttgaaagctcacctagaaagctatttcgcatttctcccaagtggggagtctgaatgtgtgtttgatcataatggaatagctaacatgttagcacagcttaacaccaaacatgcctgtggatgattctttccaaaacccgacataaacaagctgtcttagtatcattatttcaggcacgttcatcatgtctatctatagcatactactgaatcaggtactgcctggttgaaggtcatggattacacatagctattcaaatactttatttttgagacagctgaattactccctgacctgactttagtgagtgggaggatcatctttatgccttcctgccctttctaaaaatagtagagccttttaacaaggagatattttaagcagctcatattcactgtctcatcaggagaca

SEQ ID NO: 58355 - DNA, 748 bp, Bovine  19866881064971
  misc_feature (1)..(1): n is a, c, g, or t
ncccaataatcgagactttatttcagtgtgcatgagattgggatactaataatatctaaatgttatgtatatcaaaataactgtggatttaggtctgggggtggcaagactataaatatatataattacattttttcctatatatgtatattttttctatactgttcacatgctttaaaaatagccttttcaccaacataatatgaaaaatgatatacttgccttcacactgaattatcaaattgcttcttttcaattcagtatcataagccaaaagaaatacaaatagtcacactttacaaagtaacagcatgtttttaaagttaagaaaacaagttagaaaagtatccaattaatgcatatggcattgagaattttcacgaacaaagtggaaactgagaaaagaactaaattttactttattaagaactatctgctactgtcattctcaataagaagtgaatgttttcactaaaacaccattactcataagcaatttgcttgaatctccataactcggataatactaagctcttttgagaagagacaattctaagatgtgacttgaatccatatttttgttttagaggagatatatgattatttttactcatgtttctggggattaggatttgggaagaaaaaacttccacttcatttcttatttttttctgagcccttcaatctcctttaaacggaatagggtcaattcctagttgggaataaccacaagacaattagaagttaa

SEQ ID NO: 58356 - DNA, 1076 bp, Bovine  19866881094329
  misc_feature (1)..(1): n is a, c, g, or t
nagcttgctagcctcctctgtcctgggattctccggcgagaatactggagtgagttgccatttcctcctccaaaacaagaacatctctgaataactactgggtgggtaaaattatttttataactgcttcttaggaaaaagatgttatctgtttttctgtccaatgggatacattttcatgttaaaacatgagcaagaaatttacatttctcaacaagactcaaattagtttaaagagagaccaaaaaaaaaaaaaaaatctaagtctatacaactgagatagaaactagtgttgtcattgatagataagctggagccactcaaattagccagaggttgaggatgtttggctatttttgtggctgaacagtgctcttttctcagtgttcagacataattacagagtggtcatgtttgtatcttgtttgactacagtccctggtagcctctgattattgataatattctttgaaaaacatttatattctgagaaaacagtatgttgttagcaaccaggacaattttttttaaccttctagagtttcataatttcaaaaccataggattctttccccattctttcccactttttcttaaagattattagtcagagagtttcatcaaaattaatcatctataatttcccatgtcagcctctgatataaaatcaattagagttggcaagttaaaagcacagaagcattcaagatctatttgcaagattcatttgtagtagaaagtgatgaaccatataagatttatgcgtagcatattgaaacacgcatcacttttctattagaaaaatttacttaactagctgtaacaccctctgcaaatcaaaggaagcaaataaatactgcaattagtactctgatatacaataagcaattaccaagtgaaatgtgatggacctaaaagctagaacacaacattcagaaaaataagaccatggcattcagtcccatcacttcacggcaaatagatgggaaaacaatggaaacagtgacagacttatttttaggggctccaaaatcactgcagatggtgactgcaaccatgaaattagaagacacttt

SEQ ID NO: 58357 - DNA, 1671 bp, Bovine  19866881197483
  misc_feature (1)..(1): n is a, c, g, or t
nagggagagaatatatgtgtatacttaggggctgattcacactgttatatggcagatcgatacaatattgtaaagcaattattctccaattaagaataaattctttaaaaagaattcctcatcctatttttatgaaagcaacttcaaacttactttctaaatcatgaatttcctaaggaaagtcattgaaatgaaaagcaaaaatagcaatttcattctttatgcaaattacaactacagagttaaggaggaagagaaggactaacaacatggtcattactaaaatatattttgtgatgtctatacagtcaacaaggcagagtggaccagtgtgtcttccaggtagggcatctgcctcagctgcctcaagcttctaaggaaacttgtttccaccttcttcagtataatctaggcagcatatcctttaacccattgcatattgtttattctttggcatttgaataatggtaaaccttagtaaatgcttgcgtctatgtgtgtgcatgctaaatcacttcagtcgtgttcaactctgtgctgccctatagactgtaacctgccaggctcttctctccattggattcatcaggcaagaatactgggtgggttgccatgccctcctccagggtatcttcctgaactagggatcaaacctgggtctcctggattgcaggcagattctctactaaccatataaaataattaaatctctctatataccatttaggagtaaggttaaaaaaaagtctattaaaatatataattcagactgaggtggtttgctttagaccttagattgggagattcactggatgttaaccctgtaaccgaaagaactcagtcacatatacttatagatattttacctagcagatctctcaagggaactgtagcctctttcaggatatgcatttattcctcttcaattaaaaataaatacaacaaaaggaagtaggataaacttacaccctagtaggcttacgattcagaggtggaaggaggcaaggtcagaagagccttgggtactattttggaaggaagggaaacagagcctacataaccacccttgcatgacctgtggtttgagaaacagagctccgaacagttcccacacaacagctgtttccctgcatccccatcgttgaggacaggaagtggaatggcacagagagtgcagtttataggatctgttctctcagaaagtgaaacaggatctccaggctattaaattcactccagtggcgcatctgaactcactggttaaaagcaattgtctgcctacgaagaaaaagcttgcatttgtgaaaactgaagagcttttagaagtattatgtaaacacttgtacagtcacctggtttaaacaaaactatatgaaaatttagagacattttgatccatttaattctcataacaggatcaaggtgatctggaaatatatatatatatatatatatatatatatatatatatatatatatacacatatacacacacacacacacacaaccacataaaggccaaaggttcaattctctctaagggccatggaaaaaaatgggtatctagttccagccataggaatcaaaacctatctaaggtgctctacagacctgcttttactaattgcatctaattctgggactaaactaatgcttaaaggcaaagatgag

SEQ ID NO: 58358 - DNA, 1188 bp, Bovine  19866881240328
  misc_feature (1)..(1): n is a, c, g, or t
ngggaaaaaaaaaaaaaactctggggagagaataatatatagagtaaggtgttgggattatttgttgttaatatttatttcctaccttactggtaatgactatcatattctggattatcagtgaaggcattttagactcaaaggattattgaatactcatgcaggcagtttgtaatctgaagggaaaacagtataattgcattttctaattggccaaatcattgttgttcttttcagttaatttctttattttattttcccatgacttttccaattctcataagcttgtaaatgggttgtgcatggctaattaaagcctccatgctcaaaatctattcctacgagtatgtaaatgtttgatgagtcatttacctctagtgtgaacacagaaaggaagaattccttatagaaaagctcactatgaaaataaagaagtcctgcaaggggacatgcttcttttctttattttcccattttcgtttcatttcaaatagtgctatcatttgcctttcatgcacagtttctctaacttctgctgaattttattatggtgaaatacaagtgggtaatattgtctcatttgctcaacaggctcttggataatagaattattagcattaaattatattttgttaaaaggtttgaagaattaatgatgataagactcagaaagatcaatggcatttttggggaggaccagaaaatgataatgatttctttactatcaaatatttggaagatacctaaagggcagttcacctagaaaaagcatcccaaaccttattaatttttaaatttaacaatacaaaataaccaccgtacttttgcattaaaaatatttccaagagtgataaatatagaataaaatttttaaaaaagtaaaaccaaatccaaattattcaaagttaaagcttcagtttaggttaagagaacactgccctcagttgctatgaccaaagattttgtatttcagctgttcacacaattcagtatctttgtgctcaatcaagaaggaattacatccgacttaagcacaaatcagccagaaggctaagaaatatctaatactttctgtctgtcctttctacgactgtcttgtcaattcttaaaatgagaattacttgggattcagtatttcttaatgatggccttatgcttgtgatcaccacaccaggcaaaaggcactga

SEQ ID NO: 58359 - DNA, 1215 bp, Bovine  19866881356961
  misc_feature (1)..(1): n is a, c, g, or t
ntgcctttacagcatcggacctttcttctatcaccagtaacatccacaactgggtattgtttttgctttggctccatcccttcattctttctggagttatttctccagtcatctcctgtagcatatcggccccccaccgacctggggagttcctctttcagtatcctatcattttgccttttcatactgtccatggggttctcaaggcaagaatagtgaagtggtttgccattcccttccccagtgggccacattctgtcagacctcttcaccatgacccatccgtcttgggtggccccacatggcatggcttagtttcactgagttagacaaggctgtggttcgtgtgatcagattggctagttttctgtgattatggttttattgtgtctgccctctgatgccctcctgccgtctcatttgggtttctcttaccctggacgtggggtatctcttcacggctgctccagcaaagcgcaactgctgctccttaccttggataaggtcaccccctcctgaccttaaatgtggagcagctcctctcagccctcctgtgcctgcgcagccgctgctccttggatgtggggttgctcctctcagccgccacccctgacctcagggccaaacaccatacgtgacactaaatatgaataggtgattaacagagctttggggcttaacgttgaatagggagaataatggtattaataataaatatgtcattaaaattgcaataagtaattaagactatgatggatttctcacaaatgtctgatacccttccttggggaaggattttacttcccagtcctattaatggcaggctttttggccaacaggagacacttttttggccaacaaattgtgggagaacatagcataaattattttgctgaagaactttaagtaccaatatatggtttgctatatcttttttcctctatcacaatgacaagcagtgttccagatagaagcatctctgtcagtctaagctcaaaagtgaagaaaacatagagtccagttgcaaccaccctgagatgtactagtagcaagaatataaaatacatttttgaggttgcaagccactgagatttttgaggtcactagctaccacagcatatcctagtctgatgattcactgacttttcttttaattgaaaaaattgaagtgcaagagtgtgcgaggccacataatagagtccctaaaagcaggaa

SEQ ID NO: 58360 - DNA, 1080 bp, Bovine  19866881375092
  misc_feature (1)..(1): n is a, c, g, or t
nactggcacagaatgtgagttaaagaaccattaatgagttgggagagttgaaggaaggccagccaagcaggcaggaccaaggcatggcttgtcaggcaggaagagaaatacataccatgagatgagatgacagcaccagccacacgtttccttctttacaatttctctctctagatttatacatgtgttaaacaaaaatacctatctatacagttttagaaacccaaacagatatccacaagcacacacatacacatgaacatacaagctcacacacatacagtgggcaagtggagaggagagaaagagagaggggaaaaataatggaaagaagacaggaatagacactgtccttttagagaaaatttggaaaatatataaaaggaaaagaaaaagtgatgaagagatgagtgcttgtgattattatcctatctttcatataacttagctttcctggtatctcagctagtaaagaatcctcctgcaatgcaggagacctcagttcaattcttgggtcagaaagatcccctggagaaggcttaggctatccacgccagtattcttgggcttccctggtgtctcagtcagtaaagagctcatctttaatgcaggagacctgagtttgatccctgggttgggaagatcccctgagaaggaaatggcaatacactccagtattttgcctgggaaatctcagagacagaggagtcactcctctgggttcttaaaagagtaggacacaactgagcgactaaacaacaacagcagtttaacttaagatgaaaggtttttgcagagtttggaatgcggggtggggagagccaggaaaaaaaaaaaaaagaggaagaggattttacagaaatttagggagataaatggcatacctaagaatgagagctttgcattttatgttgttctttactcgaaatactcttgctattcaagatctgggccttgcttggacataatctgtcattcttgccaaatgtgtgtggtattctggggatgtggacaaatctccacaggaacttggctgagacctacagatatatttttacctccaaaggcaaacaaccaggg

SEQ ID NO: 58361 - DNA, 1383 bp, Bovine  19866881427271
  misc_feature (1)..(1): n is a, c, g, or t
ncgggcacatcaggcaacacctggatcaaagttggcaggagaagccggcaagcaaaggaggctctgaatccttcttacttctcttctgataaagttgatacttcctgaaacagaaaagccaaactgtgagtgaggcttgtttttagacatgggcattcaaatgacctgatgttggtcaaactttgatttaaaacatttttagaagtcatttcaaaagaatacaaatatgctacaatatgtaaaaaacttacttacctttgacattttagctattcatcccccaaagctttaaattagtaacattgccttcaatattttaaaatttcctataaaatttcaaacttttaaatttcatgtaactttcaaaactccatcttcttttaacacaggggttttttattttcggtttttgtctgaaaattcaaattttttgtgtatttctctgcagagctaagccttcagtgttaggcagctcttggagctctatacaaaaccttggtttatgagataatctctaaggatgtgaaagaattggatctctgcttttgcacttgtgaggcttacattccacccagcatgagaaatgagctcatgttggctggttaaaaataagtaaacatgtcaactgaggacaagattatgccaagtgactacacagctcattgtttcaaagcacgtttgatgtagcctgaatgaaattaacagaagagatacacttgtatatgacaaatattatgtctttgtgaagattacagaaaaggctttatcctgtaaaagaaacacctagaaactagtcacaaccctgcacttgaactgtccatactcagatgcttattctggttactttccttgctaagtcatggcaccacctggtctgtccatttgaaactttgattaactcccccaaataccagggtagtcacactgcatcggtatcttcctcgcatagaacattagaaatagaagagagatacccaggtccaacgccttcattttacaggagaggaaactgttagctgttctagagaggcagacatagtcattttaaagtcagacttcttggaaatgttatgaaatatggcttttcagtgttactgtacccacagatgaaatattgaaccagtacaagagcatcttccttagtgacacatactctgggatgcttaatgtaccttttctggtccctagggtaccatttggaacagtgaaggagttgagttacattttggtgcacacatgaatgtctcagagcagctttttactccctgggagaactcaacattatttcatcactcatttcagttattctcccagtttgattatatgcacataaactccaacagtaaaagacaaacacaatgttataaatattcaaatagttta

SEQ ID NO: 58362 - DNA, 1180 bp, Bovine  19866881455554
  misc_feature (1)..(1): n is a, c, g, or t
ntctaccttctgtatctctaagtaaaaaagtgctatcctatagattgtagaacaagtctcccctgaatatctagatccctaaccccttctgcactgtgtttagaacagaggggcaaggaattctagaaatccagaaatttggggctattagttgagagctccggaagatttgtaataataagtggtaagcctgattgcttggtgcacaggggcttactctgacgaatttgcaataaaggtagctcagggtcctgggcagaaaactccatacccatgaatttagctcttatacaaactgctggactccagctttcctggaatcaaacacacatactcaaatctggcatcacaaactcattaatcactagaagctcacattaaatatgataaagaccttccctctcactgccacccttcaacactgccattcatttcaccttcttctccagaagtctcttttcccactagcagtcactaagcactcagtgtccactcatggtccctgagaaaccataggaaaaattcttcacatatcacagaaagtgtgtgctctccaagtgtttgattttggccagtaacatggctagtctcatgcctgattgtactttcaaaccatattcgctgcctgattaggataatctgtgtcaaaattgctatctctgtgtagcatatctagaaggatcctaaggaccagtactgtgtgtactgaccttaatttatcctaccttaattatttcccaatctatttatctttctcattgtttatattttccaccaattggtctgtttttcttccattggtacatatacatttctgggaactacatcaaattctttcttcaaaggagaagtgttatataaaaacataaataaataaacattttttgagtagcactgaaggaacattatggttaaacctttagccagaacttatttaaatgaagagcattggtggtctgactttcttaaatgttttaaaaatttcctagcattctgtgagggtgtgaatgataaatgatacattatctgctaaaattttattatgagaataatactaattttgaccatataggaggtaaacaggaaagtaaaattagatgtgattcagtttggcacttataaacaagatggtattataatgttgtttgaggggataaagtttatttatgaggtataaagt

SEQ ID NO: 58363 - DNA, 1738 bp, Bovine  19866881619068
  misc_feature (1)..(1): n is a, c, g, or t
ntagatttcaagtaaagcaaaagtttgtactattgaattttcctagcaaaataagaagaggggatagggaaatgacttgtttgcacttttatttaataattatttcaaaatcaaagcaatagaacaaggctacctttaactgaatgtcatagattatcgtttactgtgaaattgataagatacacctcttctctcttcctcctgttatgcagttaaactgcataaagtttaatcctcactggatccttgataagagacatctcgtcattttgcccacattagaccttatgagtagctacagcaagcatgctttttaaattcgaattttccttcaaaaacgagtcattgtcttatcctacaactatatcagtacaggaaaacacacagaaaaaatctatactgatggcacaatatttgtcataacaaaaacactggagacaatttcaatatctctcagtagtgactctaaggtatagcttttccaataggctacactcttaaggcaactgttgaaaggaataagacacctctctgtattacacagaagaatctgcaaggcacgttaaataagagtgcaaggtacaggatagtgtacagtatgctaaactcgtttgataaaataccttgggaatgcattcccaagttcatgtatcttccattcaaataagttgtttagaaattcaagtttcagcagccgttgtctcaaatgtttgagattctttaaatgatccttttgattttgtattgtatctgacttccaacttctagcctccattactaataaagtgtctatagttttgataaattcctttttcacctttttcgatgtgcagaacctctttgtgatatcccttcgtaagtagtcagttgggcaggaggaagaggcatgcctcctcggtgggcttctcattctcccatccccattatgggatgggaagcaaggagggctagaaccagggctgatgagctgatacatgcagaggtgaagtctggccacagctggttcctgtataaatgaagggatcccatcaccaaggccttttaaatgattgctcctctcccttctggaaacagaggcccttctttcttctttccgaagaaagggcttcatgtttcctttcctctcttgtgctttattggagatggcaggccttagaattggccttcttggcacatcagccaactagcacaggtagaaaaagaaagtttctccagggtaaggaaaccggagcttccaaacaaaaggaatgtaatagcagacatcccgccagttctcttctcgggcaagaaccaaccaacacttgtgtcctgttggcaaaaccccttgagattgaaccacttccgggaatacaaaaacagcaaacattctaggacatctgtgttatttcatgaaactttttagacaaattgatcagtgacttttctctggaatgccttggacctagcattttgtggttttgatgtagactttttgaatattaacgaataggtgtgaattgggacagttgctctcttcttcagagagagcatcagatttgtcagtatcaaagttggcaaatgcaaatacaaagccagtttaggcttcatttctgtgggttttcttttaaacagtatatcctatccttttccagtgaacagatgtctggttgaacaaaaattgaaatagtcaattcacctagcaagagaagcaaagaacaaaatgagagaggatttgtgatttttaggtaataattattta

SEQ ID NO: 58364 - DNA, 1391 bp, Bovine  19866881782493
  misc_feature (1)..(1): n is a, c, g, or t
naatactggagtgggtagcctttctgttctccaggagatcttcctgactcagggatctaaccctggtttcctacattgcaggcagattctttaccatctgagccaccagggaagcctcaagtatatatgaggaatttcatgaaatgaagagaatgatgcagagttaaagatggaggtgactagaaacagaggcagtgttcaaaatctaccctctcaaccagtttgctgtgaggagaaggagcaaggctgggcactgtaagtggtaacaacttaaataagaaatccacatttgttctcttttaattaaatctgtttccaggagaggcaaagtagcacttgaaaaggataagcttggtagtatgaacaaaagtatatgttaggaggaaggaagagagggggaaatattgcagctttggggccccagataggaaaagagaagaggaaaggaaattatttcagattgaaggaaaacggagaaacttgttgtcatgggattatctaagccagctttccctgtccttctcctgaccactgacacatatttttgagaagcaaaataactggaggggggcaagaaatgcacatgtagattctggcaaaacacccacaggctcattaacaccagccgatctatcctgcccggaactatgtagcatgaaaaatggattctaaaaataaggcctggatgtctccctaaaggcacaaacttaaaggaaaaagctctttgtggaattttacttcaggctatttggcaaacccaagcagatatagatccatacagggacacttaatgaacacaaactaatcatgtcacattttgctctgggcagtcggtattctaaaattaaatgctagctcccacttgttacccataacagagctgaaggaactgtctaacactgtcagaagagatttccatgcttgaatcaagcataggaaatgtgtaagatctggggttaataaacgtctcagaaagggactgaacagagggacaaaatctaaaggtgttcagaagtcagaggcttgtctcagccagcacagtcaccaaatttggctttctttttgtgaaggacttatttttgctgcatttgtaagtattctaaagtttatccctaaaaccagactaataacattggttgcaagacagtggataatggagaagagaattcaatataagaatttacacattccctcttaaaaagtaaatgtatatatatgtataaccaaatcactttgctgtacaacaggaattaacaacattgtaaatcaactatacttcaatttaaaaaagtgaaaaaaacaaaaatgataatttataccattctttacaccactagtttcacatcactggcagaggtttgggggggttgggaaagccatgggcttatctg

SEQ ID NO: 58365 - DNA, 1201 bp, Bovine  19866882056595
  misc_feature (1)..(1): n is a, c, g, or t
ntgccccatcctgggcatcccgtcatggaactgcggcacaggtgaaatgcgaggtgacctttgccctccacttggcaagagccagacccttgttgtgcccaaccagggtgccgtggtttaagaaagttacggagaaagtggatatgatttaggagtttgcaccaaaaatgatttcctatccagaggttaaggggtgaggctttacaatttagaagagaaatggatacgttagagcagactacttcaggttcacaaaggttaatgtgaggatgactgaaaattgtttcccatctgcactcatgacagatcagaaagtaaggagcttagtggtttgggggaattcaatacaagctctcatagtagatcatttgaagacctcaggctctttcttatattggggaaatgcgtgtattctcaggacttggcctgacaatggtagaaaagaggaaaattatttcatcccttcccttttctacaggcaaagctgaaaatgatcaatgggtagttattattagcatattttagtaataataataacactgccaaaatgtactaacctattatggggaaggcactgttttatggagtttaactcattcaatctttgcaatctgttaggcacatacccttttattattctcaataaaaaaaacctctgaggctcaagaggtttaagtaaatgactaatcacacacagttggcaagatctgaatccagaaagactgactccagattctagcttttagctaccatgtcatactgtctcatgtctatttttccctccatagatattttaacactaaactaggagccacaaaagagaaaagagactctctgaaggtttgacagaggaagaggtgaatagtggatcatcataaatacaggttcttgaattctaacagactttttaaaaaaaagaaaacaaaggtatacatatgataatgaagtgtgacacttgtctgattttataatggtggctgttactggcgtgacagaatctaaatatttttagaagtcagaatgattacaaaagaaattctagtttaaaagtcagtagttctgggcaataacaacagctctttcagtgccctgtgatcttaggtcacttatacacattactcctgacttctttcctgtgaaatgtggattatacctcccagagtagtataaaggcaaaattatacacaggatatgagagcaa

SEQ ID NO: 58366 - DNA, 1458 bp, Bovine  19866880408608
  misc_feature (1)..(1): n is a, c, g, or t
ntcatgtatggatgtgagttggactgtgaagaaggctgatcgctgaagaattgatgcttttgaactgtggtgttggagaagactcttgagagtcccttggactgcaaggagatccaaccagtccattctagagatcaatcctgggtgttctttggaaggaatgatgctaaagctgaaactccagtactttggccacctgatgcgaagagctgactcactggaaaagactcggatgctgggagggattgggggcaggaggagaaggggatgacagaggattcgatggacgtgagtttgagtgagctccgggagatggtgatggacagggaggcctgatgtgctgcgattcatggcatcgcaaagagttggacacgactgagcgactgaactgaactacaatgactaaatataaaatacactcaaatgatttcagtatgacttttactacctaaaaaacaatggaacttggaatttaggtaattccatggcagttcttcccaagccagtaacaataaatcacaaaatttaagagttagaaaaggctgtaaggataatttaattcaaccccttatatcacagacatagaaacaaaggccccaaaagtttaaacttaaacttgtacaactaatatatgggggaaaaaataactagaaccttgatgttctgcctcctcaaccagtatgatttcaagtcttgcctctaatatgatgtaaagttactgaaagtatccttcaaatttctttattggttctatattatactgtgataatagtcagaaatgaccactatttaataaagaaaaacaaggaataaatcattaaaagtattttaattactataatcttgagatcaacaacatattggcaagttttctgcagtagaagtacattcctaaataagtagatccagggcaacagctagcaaaaaagaagtaattttatctcaaatgccaaaaagtcaactttcaacataactttatcaatgtgaattactcttaaatagaaataggaactaaacatacatgcatcaaattgtaccttcattcaatgatatgacaccaccaatcaagttcatacatgggcaaatacattaagtatatacaaataaatgtatgtttccaaataagaagctacaggctcactcattcctgaaaccaaaatgttcacataaacatactgtcaaatatggcaacaaaaaaaaaatgtaaaggaacatatgtacaccagaacccaaactgacatgtagacataaaacagaggtgcttatacagtatacttaaacatattgctcagccagaaatagctcaaacataaacaaacggtgatctacaaacaccaaaaattattgtaagctttttgctaccagtgaaaactcaacagttcaccctaaaattgagtttaaaatgcttatgcctcaaataaaagaaactaaaaggaaacctaagccaccccccaccca

SEQ ID NO: 58367 - DNA, 1214 bp, Bovine  19866880463461
  misc_feature (1)..(1): n is a, c, g, or t
nttttcactttcatgccttgagaaggaaatggcaacccactccagtatttttgcctggagaatcccagggacgagggagctaggtgggctgccgtctatagggtcgcacagagtcggacacaactgaagcgacttagcagcagcagcagcatgcaaaataaaagaaagtggaagagtttgtgcatgaaaatctatagtcaacttcagaaaaacaccaaaattagaaagcatcttcttaaggatcaaaattaaaaagaaagaaattttcacccctggttgtacaagctgatgtggatctttctgcattggattctaacaaaataatactgagatttagatccatagtcaattcaaataaggtgagatttattcccacttcatttcaaaatacctcatttattttagggtagtgtttaagttcccttcaataaaatccttaggatatgtaggaagcaaagtaactgtgggttctctcacatctttcttctttgtagatttaaaacccatgaacaggtcagcaacacacattgtgatggagtttgttctcctgggattccctggttgctgggaggtacagatttttctcttctcactatttttggtggtttatgccttgactttggtggggaatggagccattatctgtgcagtgaaatgggacccacgactgtacacccccatgtactttctgttgggaaactttgccttccttgaaatctggtatgtttcctccactgttcctaacatgctagtcaacattctctccaaaacgaaggccatctcattttctggctgcttcctccaattctatttcttcttttccctgggcacagctgaatgtctcttcttagcagtaatggcttatgatcggtaccaggccatctgtcacccactgcactaccccatcatcatgactcggaggctctgtggaacactggtatctctctgctggctcattggattccttggctacccaatccccatttttttcatctcccaacttcccttctgtggacccaatatcattgatcacttcctgtgtgatatagatccactgatggctctgtcctgtgctccagcccccattactgaatttattttctatactcagagctcccttgtcctctttttcactattatgtatattcttcgatcctacaccctgctgctcagagctgttcttcagatcccttctacagcggccggagaaaggc

SEQ ID NO: 58368 - DNA, 1236 bp, Bovine  19866880587279
  misc_feature (1)..(1): n is a, c, g, or t
ntccctttgatgctcttaagtcagggtgcaatgactttttgcaccctaagtacactccagaaaggccatttacacccacctcagagctctcctagttcctctgccctcggagatcctgtctcttgatatcctgagctctttggcacctccctcgtctcagcccctcccctttcatcttacaggtggacagggtcattgtctttggccagactacaaatgagaaactgataaatgcagccaaacagctcttctggcagcatgtgaatcccaagtgcctctttgttggtgttctcctaagggcaagttacctgtaagggcgctcatgttccttgctcagtgccggcagatagtgatccatatttcctgtctatccctactaaagcttgggatactcccactctctaggccccttcccatttctgcctcttacctctgttgcacttctagtgctagaaccttctctgaagtcttcagcctggccccgtgcccctttgtgacggtccaccccagttctagtctagcacggaaccctattaaaggtgcagaggtgggggtggtgggggcagtgactctatgttcctggcactgtttctaactgctaatgacttcttctttctttggcagatgtaccgatttgaatcccaatgatgtgacactctcaggctgtactgatgggatactgaagtgagtatagcatggacattggagaggttggcggctttgttagaacatcttttagagattatctgtggtttctgctctaaccactttcattttttaagcacgataaaagattattctgcttttacagctgtctaggcatggcagcaacatgatattacaggtacctggtcatcttctatctgttgctctaccattttcaaatactctgcttctactttatagttcaagatggctactacatctccagccatcatttttgtattaatctagtgggaaaggagaaaagggaacataggagattgtactgtttgcttttaagggtacaactcaggagtttgtcccatcatttctattcattctctgagggctctgttccattccatttcagaggaaataccacgttaattgtatttatttatgcctgatctacagaaatctttgtttgtttttctgtccgctatcaggcttccaatttatttgttttctcctctgctctttcctttggatgccacccattgccccatgttaggaagcctcatgctcctccctccc

SEQ ID NO: 58369 - DNA, 1191 bp, Bovine  19866880625671
  misc_feature (1)..(1): n is a, c, g, or t
nccggtgcctggcccccttcctgacctgaagaccttggagaaaccacctgggcatatgtctgcccactcagacatcctctcctcggagaaccggtgcctggccacccttcctgacctgaagaccttggagaagccacccgggcatgtgtctgcccactcagacatcctctccttggagaaccggtgcctggccacccttcctgacctgaagaccttggagaagccacccgggcatgtgtctgcccactcagacatcctctccttggagaatcggtgcctggccacactcaccattttaaagagcactgtgtcaatcagccccttgctccagaatctccagatatctcacttggctcaagctgatctgtgcagcttgaacagcagcaaccacctgctttctgagcatccagcctcgagggtgcagtacctctctgagggacgaggccttctgacctgccccagggtctcgaaaaccatctctgccccagagagagttcaggaagcagttctggtaatggctccaggcagctgtcttcactgcagccatatgtgttggatgctctagtcactagctttcagtgccacactgtccctctgttctgcatctgtgtaccctgtctcctcacagtctcttcctgaggtgccctttacccaaaggttctcttcatcagcatcaatactcttattgcatatatagttcagagattctgaacagtagagcaaaagtagattttgtttttagaaagcctctgcatgggaggagagctggcattatattgcagtagcagagtcagtcaggtgcttttgagatcttacaaggcagagacacgactgtaatatcctggatcacttcactgtgtgtgcatgtgcaaacacacgtccacttacacatctatataaacacctttggcatacaggtcaggatcgataggcagatacacattccttctgtggagacttgagatttggactgagggaaaggtgaatctgagcctttccccttctctgcctattattacaagccactcagacttgggcaagactcttaaccctttgaagctttaattttctcacctttaagatgaagtcagtgaaagtccacctcattgagtcattgtgaggattacagctactgccaccttacatttattcagcactttgcaatttgcaaagagtcatatacacatccca

SEQ ID NO: 58370 - DNA, 1493 bp, Bovine  19866880673453
  misc_feature (1)..(1): n is a, c, g, or t
natcagcatgatatcgccaacctcaaagttggggttgagccctccagctgcgttggtgaccactagggtctccacacccagaagccggaaaaccctcactgggaatgtcaccttagaagtgaaagataaaacatcagagagttttctttaaaattttaccaatagacccatgcagataaacatgacatacatcatgaaagaagagaaaggagagaaccaaaaatctaccttgcctaatcagctaggtagtaaaataggagagagagctctatctcccttcttccagacccaatcaggcttgtgcccctgttttaccttccaaaacggatagccttcatacatgtggaacctgccctgcatcatcacacaggctctgccattcaagatcccaaacaccagtcgaccagcatgacctggcactgtatacagaaaagagaaggaaatgcatggaatgatgctttcatacaacacatatcccctgagcacctacactggcccgactcactgtgttcaacatgtgagggtataattaaccaatagaaaacatcatcctctccactctcagaaactttaagtctggtgggggtgtgctcagtcgcttcagtcgtgtccagctctttgtgaccctatggactatagcctgccaggctcctctgtccatgggactctctgggcaagaataatactggagtcggttgccattccctcctccaggggatcttcccgacttagagactaaaccagggtctcctgtactgcaggtggattctttactactgagccaccagggaagccactggggggagacagaaattaatcataaacttagatacaagtacactctgagattacagcgatgggggcaaagatgtttaatgtgaatatacaccagttactttttaaagacctttaaaagaatgagaaagacataaggcaagagaataaaagaaataagtgggtaatagaatagtgggtaaaaatagagtaagtaggtaataatgaatgcatcgagtgttgtagtcatagacctcttttccaaaattttcaaaactctcaaaatgcatattcttatgaacataactaagctatatgcttcctcactcgtgaaaggcagctcatggtatagcctagcttcctaaaaaggctatgaacaaggaaaggggctgacattggacccatacaaatcttttttgtgactcacaaaatagtcctgtgggaatacatgtcctgtatgtgacaggtgagggcgtgggactgcaaagataactcctcacacagacacagtaacaattcttactatttctctcatgctaacatttctgaagggaatgaatggtctgggagaagaaccaaaacaaagagggagagctcagagggtactcagagattgaggagcatatgaaaaagttacctgtaatagagcagaggtgatacagttaggaaaacccaaatagtatataaaaaataagttgacaaagtttacaattaataat

SEQ ID NO: 58371 - DNA, 3548 bp, Bovine  19866880715104
  misc_feature (1)..(1): n is a, c, g, or t
ntgacaggttggtggaccagcgtgggcagctgatctcgggactggatcccaaaagatccttccccgggtgagtgtgagaaggaggtgaggtgggatgaggtagggagaggggcttctccagcaatattctccccgctctccttcttcatcactacccttttgtccaaatctcacagtgggtgcacctagtgctgagcgtgtccagtgattctggcctaggggagacccttgagcagagtcaaggtgcccacgtggtggccctggggcctctggagccatctgcccgggcccagctggtgcgagaagaactggccctgtatgggaagcggctggaggagtcaccgtttaacaaccaggttgggtctaggctggcgctgatagatgtgaggggtgaatctgggacctatgagactctgagtgctgaagctaccagctgccccgcacagaccagctccttcattttctcaggaagtctgtgcaggggaagaggattgtgattgctgataatattacctggtccttttcccctggtaaatgtcggttatctatctgggtgggctgaaccagcgggtgtggggggagagtggagcgagctgggcagagcagtgccgggcagagatagctgtgttctgagtagcacggtgggtctctcccctgtgggggctctcagaggagaagctgccctgcactgggcttggtgcccgagtggagggcagtgggccagctctctggtccagtgctgagtcctctgagtctcatcagatgcggctgctgctggtgaagcgggggtcagtgctgccgctctacttgcgcttggtcaccgatcacctgaggctcttcacgctctacgagcaggtcggttcaggatgtgaaccctcacttctcatcttctgtatcctaaccccatttcccattctccattcaacctcttcatccgcatccctcaccccttcccaccctcctcctttgccactcctcatccacacctccaacctgcttccctcccaccggtgtttccttttcatcccttcccatgcttttccttgctgccccatctcctacccacaccgaagctgcctctccccttctctgcgctgacggaggccgttcgcgctcctcccccaggtttccgaaaggctccagacgctgccggccaccgtccctctgctgctgcagcacgtcctgggcaccttggagcaggagcatggccccgacgtccttccccaagccttggccactcttgaagccacacgcagcggtccgcgcttggagtgggctcaggggttggacgaccttggtcgtattggggtctcagcaagctgtacagggagtgattagggattaggtggggatgggtatgctgcctggtttagggcctcagtgaccttgggttttcaggtctgaccgtggaccagttgcatggagtgttgagtgcatggcggattcttcccagggggagcaagagctgggaagaagcagtggctgctggtaacagtggggacccctaccccatgggccaatttgcctacctcgtccagagtctgcgcaggtacaagtgcccccactgagctcccactgacctgtgcctccctgtctttgaggcagggccccatgtgaccctctttcttcatcctcttcctctcttggtatagcccctgacacttgtctccagaccctgcatggctgtcactcaagttaccactgttgggaggtgggactgggagcccacctctgtgccagactgctcactgacagcccttctcccacttctcttgccttctctcccaaacatggggtcagtttgctaggggagggacccctggagcgccctggtgcccggctctgtctccaggatgggcccctgagaacggctgccaggtgtcgttacgggaagaggccagagctggagaagacagcgcacctcctcactgcaggtgactgcagccctggttaacctccggggcactgagcgtggggcctggcactccccattggctggcctcctcacctgccaccccagtgaggggatggctctcactgtagcctgaggagtgtgatctttggagatgcttcagggccgagctcatctcagtgtctcttcctgtgacccacacctgcagctcagctctggaagacgtgtgaccctgatgcctcaggtaccttccgaaggtgccctccagaagccctggcagacctgccttaccacctggttagtccccagagcccatcggcaccttctcccaaggaactgctgtggccgttctgagccccctcttcccccagccaccaccatcatccccacaatcgttacccgccttccacactctctgtacctctcttctttcagttttccagccctcctccttcaggtcctttgtcccagctcctaagtctaagtgtcagctgcacaggcagggtccaagactagactgtccctcctcaccagctttgtcacatccctaatgaattcagtctgactttccagctccagagcgggaaccgtggccttcttgccaagttcctcaccagtctccatgtggtggctgcacacctggaactgggtctgacctctcagctcctggaggcccatgccctctatggtgagatgagttacgggctggagtcttctccaagctgtggagtcctgggtgtgttcgtggggtcctgctcagagggaggtgtaatggaaggagcagttgatttctattccaaggtgaaaaatgccacgagtgtaagcaagtgattcttaggagaccttttactcagctgtcttaaatcttagtgggcataaaattacttgggaaacttgttcaaattgctgatacctgggtcctcagatttggtttcctaggtctagagagggacccaaagctttgcacttaaaaaaaaaaaattatttacttatttatttttgactgtgctgggtcttcattgctgtgtgggcttttctctagttgcagtgaatgggggccactctctagttgctgtgcatgggcttctcactgcggtggcttctcttgttggggagcacaggctgtagggcacatatgcttcagtagttgtggctcccaggctctaaagcacaggctcaatagttatggcccacgggcttaattgctttgcggcatgtgggatcttcccagatcaaggatcgaacccctgtctcccacattggctggtggattctttactactgagccaccagggaagcccggctttgtaattttaacagatgtgcctgatctggaaccggagggccacactttaagacttagcattttggacacatcatatgattggcttggtcctggggttcatgggggtcaaggctgactctgcatctcttctctagcttcctcagtccctggcgaggaacagaagcttcctgaggctgatgttgctgcatttcacaccttcctgaggcagcaggctcccatcctcagccggtacccactgctcctgcaccagcaggtagccaaccagcctctggactcgcctctttgccgccaggccccccgactctcccagcgacagcacctccagtgtat

SEQ ID NO: 58372 - DNA, 955 bp, Bovine  19866880763663
  misc_feature (1)..(1): n is a, c, g, or t
ncgatatagtgtaaataatacaacaaagtaagcataagaagatataggagcatagaagaggaacattttacctagaaaaatataatgaaaatatttatgtgacagatgacaaacagaccttttagaagcattattataattgcatatataagatataacactattatactcaaggacctgattaaagttttccacagataagcctttctaaaaagaagccaaaggcagaaatcaaaaaaggaaataaggatatgaatttgaagataagaatgctcattatagcattttttaaataacttacaatttatgatacaattcaatcattaaaattatgattttatgatttcatcaaacacacaaaaattttaaacctctgtatgtcaaaaaaatcaaggaagactaacaaaagtgaaaaaaatttcttgcaacatctgagttaagtatatgtatagagagaattcttaaaaatcagtggggggaaatctacagcaaatgaaataaaataaaacagataactaataaaagaaaaatatacttaaaatacaggaaaatgtattcatctaaaggccatccaacaaatgcatatttagagagcaatgagattctactgtaatcatatctaactggtgagcagaaagtatggtgaacaagcacctgcctacatttcttaagggaacacaaactgacaagatctaactggagggcaacttttagtactacaatttttaaaactttgaaatgtttcactttcaggtatttaaagttagcaaaaaattaaggatatgaatttaatgataacagtactcatcccagcattttaataacttggaaataaattatgatacattataaccattaaaattatgattatagaatggctaatttttaaatatttaataaaatactcataacaggcataatctattgtcaatttaccaggccacaaaaatggtat

SEQ ID NO: 58373 - DNA, 732 bp, Bovine  19866880847336
  misc_feature (1)..(1): n is a, c, g, or t
ncaaaggtaaaacccttgaccccagatgctgacaagccctgccagagagcgagctgcagccctctctgaaactagagaataaagaacagaccagagtcaccagtaagatgggacttcaggcacagaaatgcacatccttcccctggtccctcatttccaccttttcttgttattttttctgtagctccagcctatccctggcagtttcctcctccccaacagccgtggcgttctcccctaacgggcaaagagcagccgtgggcactgccaatgggacagtttaccttttggacctgagaacctggcaggtatgacactcaagatggggcagagtttaccttcagaaaagcctcccagcctgccccgaagcccaagacaagacaagcctacctgttatcaccctgtttgattcagcaactttactttcacatcagatcccaagggcttggtcaaaaaatcaatcctacagcaaatgcttgctctgtactttcctttgaaggcagtgtgtactaagcactgcaagaaacacaggacttaggacattgtctttgcccaccaagtggtcagttttgttgaaatttaaggcacagaaggttaaaaagggaaccagaacgtggccatgtgtcatagataagagctaagtgaactgtgcaggtactagaggacacaggatgagaagggcaggtgttccaggttgagtgtggagcctgggcacaaacatcggggggaacg

SEQ ID NO: 58374 - DNA, 2344 bp, Bovine  19866880859926
  misc_feature (1)..(1): n is a, c, g, or t
ncgtctggtgctggccttggcccggtatctgcagttgggagccctggagcttcctgtctccctgcagtctgtgaccctcactacaccctcatggcagttcatctggccattcttgcactgaatgttggtggtgctgcagatactacggatgttccaaagatcttcatgaatgaacgtgttgaagcgcttgcactgatgtgaagtcatctttcgtctttgcatcatcaagttgcagtagctgtcattgcctcctgtctcatcagggtccacgtgttgcctcaggaatcgttggtacatgcgatcctggccataggagggctgtaccagccctagccccagcagggtcagcagcaagagcagaagaaaggcctgggtcctctggagagccatcactgccttggagatgcctagagaagaccaaggggcaagaaaaatcatcccaggttcaataggaagtgagcaacccaaagcagcaaggagaatttttggagcaacagacagggcctttttctacacatccagtctaaggtttaggcccagctgagttcctactttgatacatatggttactactgtcctttgttttcaaagatgctgcttcatgatggtggatcacactgtgtgtgattataacgctgatgagggatttgcatcttattccacctacagcttatccttaacaataatgatcaggattaaacataactatcatttgtttaaatgccaccttctccgttcacaaccacgttttgcctgtgcacagaaagacccaaagctctgtgtcacactgctgtgtctgctgctgcagatacgtgatacagagttaggaggagagggaagtgaaggagttgtgggaagcagggtggcaggaagaaatgatgctcaatttactcctcacaccaggaccactggatgcaacttctgaagatacacttagcacttaggtaagagcttcatcaccacaatgtactttgcgttgtctgtcccaaaactaagtgtgcacaattctgtctcctttctctcattctgcttctttgtgaccaacaacatggtttagcaacatgactagctacagagaagattttacttttcaaacaagagcatggatggcctcagtcacagtaaccaactgatttagtaagacaaagaaaaacactatgaacagagttcaatgtagacatccatggggtgcctctcaaagttccacctacaacagaaaattaaatgatctccaaatccttccaacacatactttttggttagagcttgccccaaaggctttctccactgaacacgatgatctcagtaagaacttcttttgatacggtggtcccaaggacctagttctgccacactaactgtatggccttgggaaaattacttaacctctctcagtatatttctcaaaagtaaaataagcataaaggtaatacctacctctaggaatgttgtgaagaaatgataaaatcaatgtaaagtgcttatcataatgcctagcctatgctaagtgttcagtaggggtcggcaatgattatttttagcatttccattttttcttggtttcctttattctcttcattctgctaaaatgacaactatacttaattgcacatgttatagacaccctccctcttatactgtagagaacctatattcccaagacattagaaggctttttttgcagctgaaatatctcagctactaggatttatgctgtgtacctacacgaatgtttcctcttcaaagtgcatggaattttcttccttgcctgtcgctctttttctaaggacttgactattttgagttctttttctcttatccttgcaaagtcagcaaaacatactggaataggatttcaatttcacaaatgattgacctaagataaaatgacttgcctgtgattaatacttcattctaaatagctttttggttgtgagagaacaggagatcaagagcaaaaaatactaggaagggctggctactcagctgctagctccatcagcaagtggagaagcaccttgtctcattgccacatgatttcctgggaaagtgtcatttgttctaacaccagggctgagtatgtgataataatgctctaagctgatgcttggagatgtgaggtttcaaaaaaatttttttcatttatttagctgtagttgtggtgcagttccggtactgagcagtaccactgctcagtagctgtggtgtgtgggcttagatgctctgggccacgtgggatcttagttacctgatcaaggatcaaatccccatccgcttcattgcaaggtgaatctattaaccactggaccaccagggaagtccctggagatgtgagttttcacaa

SEQ ID NO: 58375 - DNA, 1419 bp, Bovine  19866880859927
  misc_feature (1)..(1): n is a, c, g, or t
ngatcgcatgtaccaacgattcctgaggcaacatgtggaccctgatgagacaggaggcaatgacagctactgcaatttgatgatgcaaagacggaagatgacttcacatcagtgcaagcgcttcaacactttcattcatgaagatctttggaacatccgtagtatctgcagcaccaccaacattcagtgcaagaatggccagatgaactgccatgagggtgtagtgagggtcacagactgcagggagacaggaagctccagggctcccaactgcagataccgggccaaggccagcaccagacgtgttgtcattgcctgtgagggtaacccggaagtgcctgtgcactttgacaagtagataccactcaacaggggttatggcccagcagctggcccttaacttactccttaaatagtaatgagtaagcatttgagctgtcccaggccgactcccctgattctttgtttttttcttctttatataacccattctgttaaacacattgcatgacagagaaagatgagacacaaacttataatgaatctgggctcttctgtaatatgctttcttttataatattggtcagctttgctatctttgatcttatcatctggaatttagtcattacatagaatttcaagaatttcaaggtcctttcatctaagctatctcattctaataccatggcacccttgggatgctggtcctagtgttacagtatacaaaagctcaaagtgaagggatttactaagactgaaaagttagtagaaaagctaagacaaaagtctagtttaacaggctactcattcagtgctttccccacttcagcacaaggagttttgaaagttttaatacatggcttttgttattcctaaaagtcagctcttgggagaagcattaacaagttggaaatatatactcgcaacgtgagagctctatctgtattatgtggcaaactagctgtatttggatctaataagatcaagaaatgatacaaggaattttcttttccccttcccaaacttttgagtcaccctagtaagtcagagtattaacatgtgctagatcattaagactccttcactcttcctgactgaaagatttttcatatgttccttataataaagaaaataagataatttcaattccaggtatttaagaagactttgttcttgtgtgtgagattattttttcctcctatcctcttttaattcttctctaatttataaacatgcacatgctttaatatcttcataaactccggtcaagactaaagcccatcatattagtgaccacgacacacaaagctttgtttcatctgcttcagagggaatgattcctcttaagataattctcatgcattctccctttgaatatttagaagcaaattggggaacagagatgtataaagacattag

SEQ ID NO: 58376 - DNA, 1732 bp, Bovine  19866880894792
  misc_feature (1)..(1): n is a, c, g, or t
nagaggttaagtaaattagtcaaggtcacagagctgtcttcagagcccatactcttaactatttgaggtcctgtgagaagaccatgttttagtttctttcacatgacaatactgattgcacagttcttaagttattattggttgttcttctgtttattcattcataaatttatcaaatatttattaagcatgtttcatgtgccagactgctggaaaaaaatttgggcaatggggatgtaaggattatccagataagatttctgcctcctggaaatacacagtctagcttttttctacttgtcagatggcagagaatctcttcctgagttctctcctttataccactcttgatataacagaatctaatagtttttactatgctattaatatgcttttttgacacacaaaaaagtgaaaattcttgagatgaacttttatttgagctggatttttataaaacctctttttttgaattttattgttgagaagatgatatcctagaaaaggcatgaagtaatgagatgaagaatatcataggagaattgaaacaagtttcaacttagctttcagttaatcatatgatttagtcaaagtattattgtatatgggcattataggtattcttattttttccttgtgactatccacatttatttcaatttcttccatttttggcagtgcttacctattcctttttttgcacacacttatctttttcttttcacctcttgctaccattgttggcttgaagtagatatagtcaacattctcctttagttatataactaaagccaaggatgggttcagtgaaagtccctcagtcgtgtctgactcttggcaactccatggactatacagttcatggaattatctaggctagaatattggagtgggtagccttctccaggggatcttcccaacccagggattgaacccaggtttcccgcattgcgggtggattctttaccagctaagcctcaagggaagccccattggaagctgttaaatgtttatcagatctattgtataatttttcttaagggtgtgctaattgatcttgggacgtgaatatgtgcctggttttcatggtagtcatatattttccagagcacttacggaaattgtaaaaaagaaatttgttcttaaagaacctgggacaaaagacacacacacatgaatatatatgatattccttggatgtagattaatagataataaaattatgatactgtaaattctagctctacaaaagtatttcactgtgttaaattacttttggtgatgaggtaatgggtatcactggaaactgcacacagaagcaggtaagatatctatactgtggtaaggggaggaggccatcttttctttatccaaggtgtatgttttacgcaggtcataagtgttgagttctgttaaaatattattgaatgactttgttttttgatccagaagatctgtaaggaaatagatacttaagttcttcccttatttttcttctagggaacaactccaagtttcctttggacggtacaccagttcgaaatcggggtggtggagatgggagatttatcagttcagaccattttttgtgggttctcccacagcacctgaacctgccaacagttttttcagttttgcctccccaaataatgaattagagcagcagccagtctctagcagggcttttaaagtaaaaagaatttagttgacctcacagaattttctctgttct

SEQ ID NO: 58377 - DNA, 809 bp, Bovine  19866881071763
  misc_feature (1)..(1): n is a, c, g, or t
naattattggctttgactgactcctgttcctttccgagttattttcagatgcctttgaaatgatgtttttccttgtctgtttcagatacccctccaacctacaggccttttctcgaagccgcctcccagggccctgggattctagcagagccgggaagcggatgaagctcgctcgaccagagacctgggagcgggagctgagcttacggggaaacaaggccaccgtctgggaggaactcatcggtagagtaaccttgactatcacactcccttcctgtcttactcactcatgcttctacattttggcccctgaaagagaagtttccatggcgtggtgcaattattctcacttggtagttccatcactggaaatgattggatttaacaggtctgccactgaccacaccaaagtggccagtggcctctgctttgagtagcactgacatcataggaaggtcataatttcagacgtgattaggtgatatgttaggtgatataatacaagcctttatcaatacatgacaaaagcattaccttctctctgatatcccttgtgcaatatctgtgtcactcttccagacaaagtaggactgggacatggcacattgaaatctccaccaaagcccatttttaggacacggatgttctaggtcatatgcccacatgagtaaaaataatttcaggtgggggaggaccaagttactctcaatctcttttcttgcttggttatttttacctatagaaggccctttttattccatggtttcttttacttcctccttcatcttttgaaaggttaaaatcagctt

SEQ ID NO: 58378 - DNA, 2073 bp, Bovine  19866881241758
  misc_feature (1)..(1): n is a, c, g, or t
ntctctgatgagctggttagttagtgtctctaacttgtaaatcccacagaacttttcattattggttgttgctttctactatccacatctatcctttcagcactataggaaactcttaattatttataccaactggagaaatgaaacaaatccacaattgtagataattcaattgaaatgtataactgatgctggagtgtagatgcattctctctttctctctcccacatacacatatgcatgtacaagctttctctgaaccaaactgaattccatcctagctcagctataaagccaagaagtagagtttacccaacttgacaaaattaaggagagaaggctccaaaccagtacagagtattgaaagttaactgtactgccactgagatgattcagagaaatagtgaatgacagggggatattattatcattgcttctcttcaaagaaaatgtatgtttatgcatgcacacgagtgtgagtgccacctatgtagccatgggatctgcctgtgccaaaagaaaagatcctttggtttagctgttgccttcagtcaacggctccagccctatccaatctccattcctccatcttttcccctttctatttcacaagttgctacagagagaaaaaataaagctcctattgtaatttttactcaagcatagtttgatttccaggggccctgggagaggaatggcaagctatggagggataaaggaggtagaaagaagggaaatagcaagtctatgccaagtctatttgtaaatctttatggttcaacactctacataaaattggacagttatcttgttcacaaatgtgtgtgtatgtgttctcgattcctcatcatacatcccccctctatggtgagacccttttttaatgtcctaattttattttaaggcaaggaatagtgactttattcagaaagctggcagactgggaagacagcagactggtatacccaaaaaaccattttcaatgtcctaattttaagtaaatgcatgtaaatagaatgttgtacgtcactctctatatacattttcctaatgtttttcatatctggtgcagaattctcattatactgaaactgcaaaactctgacaatcaaccaatatgcaacattagggcagatgtttttatatcttttagctgaattttccttgtcagtatgatagctgcttaaataaacaatcactatggtcttggccaaatactgatagttatgttatcagcaattatttttcacttggcagctggagaagaaacttatagaagtgcctggagtttgagagcctcttctctgtgggaggagactgcaagccctggaagggagccatatcactgggttccattctagggctagttccatgtagccaggctggtgccaccacccactcaccaaacatgagatgggctctgtccgcagtgggagcagtctagtaggtctcctcttggctcaaacttggttcaaatttgagtaattctttcctactatagagttcagctctgggtggtgggcatactagccccagagacaataactatactagctctaagagagttttttggtaatatgtaagaaaaagtaaggtgtctcttgtggctcagtggtaaagaatctgcctgccaatgcaggagacatcagttcaatccctgggttgggaagattccctggaggaggcaatggcaacccactccagtattcttgcctgggaaatttcatggatggaggagcctggtgggctacggtccatggggtcataaaacagtcagacaccactcaagtgactgaacaacaacaacaaaaagtgtgtatatgtcattgctcctgtctcactttgtcccaccctctcccttccccccgtgcccacaagttcattctctatgactgcgtctctattcctggtcatttgtagtgatgcggataggcctagaatctgtcacacagagcgaagcaagtcagaaagggaaaaacaaacattgtatattcatgtatatatggaatctagaaaagtggtactgatgaacgtattttcagggctatcttgaataaagaggaggaaccacag

SEQ ID NO: 58379 - DNA, 1473 bp, Bovine  19866881304097
  misc_feature (1)..(1): n is a, c, g, or t
ntacttttgcacgtgtgattctttctgtcgtctcttctggagagttcctaattgtcctctgaaattcagttcaaacattacctcttttctaaagtcttcctgagcatattcaattttgatgtgtttgttgctatactctcagagcacttttgtgttttaattatttgcatttcctacaggctgtgagctttctgaaggtagtcatcttagcagtcgtaagtcctggctcagtacctgacacaagtgcttgataaatttacatgaaatcaattaataagggagcgtttatgctgtttccttgatggtctcctattttagtctgtgttaatgactgccccttggtgccaggattctgctaacattttccttgtctatttactgatctacataaatctgtgaattgtagagtcagtgtttcattgttgaaagtgactcgagagtcaatttcttccaatactctatcaatatatatattatctttaaatgtgtatagctgcatttctcattgtgtcatatctcttgatattcaggaaaggaagttttccccctttttgtcagtgacttgccaggctgttgagtattagggaattgtattccaaaaactggcagatattatggccttcattctttttaaaactgatacttcatactgaagtgctagcttatttttctattctctcaaactatttgaacaaaaatgctattttttcccccaaataaaatatatggttagaatcactttaagcaagatcactcaagtgtgctggaattcaatttgtttatcatttggttggttttcagcatactctcagctcctggcagatttgcacagaacaggcaatcatgggaaaattctcttagaaagttgtgttatgtatatgtacatgtacatgtacatgtggatggtgatgatggaatgggggaataagtgggaagatataaaggaaagagaactgtcctctctctttacccaatgtgggagacagcactatacagtgggaaagagaattggatcgtggttttctgctccctaattgtaactttattttcttttaattttaggaaattgtatatacaatagtgtaaaattaccaaaaaatagagaaaagaaagcttcatttccactcctgaccccttactccctctgctgtagtaaccactccattttcttacatttttcctggggatattctatgtgtatataaacttagtggcatgtcatttaaaagtataaaaataatactgcctttatgctttgaggcagacctcttgaattttagcatcaacttttaaaaattcttagatggaaatactaatacatagtcaacagaatccacagggattttgtgaccgtcaatgaagtaatgaacatacttgaaaatatttgtgaacatacttgaaaatcatcttgtattttacaagtacaggatggaggggagagtagtgatggaagtggtatggtctatacaagga

SEQ ID NO: 58380 - DNA, 1298 bp, Bovine  19866881319459
  misc_feature (1)..(1): n is a, c, g, or t
nccaaagaatgttggcaataaagcattcaaagtcaagtctactactattgcattgcttctccagaggtaagttggtacaaggacagtttcctttagcagtatccatttgttcaaaaagaagtcacacaaatgtgcttatgtttgcagagatatatgtattctccatatctttaaaaccatactaaaaataatttttagatgtcatttaaaaccataacgcatgaagccaacctgaaaaggctacatattcttatgactccaagtatatgactttctagaaagggcaaaactatggggacagtaaaaaagatcagtggtcatcaggggctaggcaagcagggaaggatgaacaggtggagcacacaggatttttagggcagtaaaactattctgtatgatactataatggtagatacaagtcactacacatttgtcaaaacccatagaatgtacaacatcaaaagtaaaccctaatgtaatctgtggactttgggtgataatgatatgtcagagtccacggactgtaacaaatacacccttgtgatgcagaatgttgatggtggggaagcacatgtgtgtgtgtgtgtgtctgtgtctgtgtgtgtgtctgtgtgtgtctgtgtgtgtgtctgtgtctgtgtttgtgtgagggcaaaaggtatatgggaactttgtactctccactcagttttgctgagaacctaaactgctctaaaaaaataaagtctatttgaaaatacttattaaaaatgtaacccaataatgattattgtcaaaaactgtgcaactactgttcgtttaggcagtgacaaacagaagcagacaaagttttccacaaggctttttgctacagagaaggaatctgtgaaccaaaatggactcacactcctcaaatgatcaattttttcatcgactcccatcactccccagacctattttggacacctcaactagaaatcttctccctctctgccagcaagaacaaaaaacttgaagtcaaacacagtagttggcaaaatctagaagagtttggcactgtgtaagctgctttggtgaaaggactcccccaaggaaccctatacccccaggcctaatccaaagttattttaacagattagaaaagaaacttggagagtcataacagaaaaacctagagtccccaaggtcctagttttagactctctgcagaagctatgctttggttgattaagcaggagctggaggcccctgagagccaattagaaaaggaagttaggatgagggagggagaaatgattctagcaactaccaattaaaag

SEQ ID NO: 58381 - DNA, 827 bp, Bovine  19866881335631
  misc_feature (1)..(1): n is a, c, g, or t
ntcttctaaaggtcataatgaggaagacacatctttggacatgctgaggctggtatttttatatgacacagtcaaatttattaatacctcaatggtgtgtttttcctggtaactttttgccatgtcatatttcatctctttctctaaaaattcttctttaattatctccattatactttctgaaactcctgcaaaaatcacccccaggccaagtagcagcagaaagaagatctccatctcagatctagggcaaactcttctgcagtaaaaactaaaagataaaaatgaagaaaatattaaatgagtagctctcttttctttatgacattcccagggttgactcctacacatgagctaagacatctacacctattaatgaaagaataagataggagaaagacaatcagctgtgtaatctgaagatccaacttcaaacccctgtttatccactaataagcaatttattccacctcatgtaattaacttcagtttcctcttgcgaaaaaaagaaaacatgagaattatataagataatatgtctaaagtactcagaaccaagtagtcattgctctttcttttcaccacatctataatctcactggtaaagtctgtcatctctgcagggggtcccaataatctcacctaacatattcctcactattgctgtgaatcctccagcctcacacagtacctggcacatggcagccacgtgaaaaaaccaccatgatattttcccacctctcatttcttttcccactgattatcagtcatgggaatttctgtctttaccagttcatttggcaagttgattgtgtggagagaaagat

SEQ ID NO: 58382 - DNA, 1634 bp, Bovine  19866881420784
  misc_feature (1)..(1): n is a, c, g, or t
naggaggaaggagttactttagtttgggtagtcagggaaagcctctctgagaaattggtgtttgaactgagacctaaataatgaagaggaatgagtcacgcaaaggtctggagaaagaatgtccaggcagagggaacagcatgtgtgtaggcaggattgagagtggatttgaggacctggatgaaagccagtgtggcttgaatagtgtaggagagtgataagaagtgaagtttgtggcgggatgagtggtgggaggtcagatctcacagtcttctaggtcataataaggacctgaattttattctgtctgcagtgggaaactatctgagtgtttgtgacatgacctacatttttgtaaggccatccagctatagtgaggagaatgggaaagagtagaagcagaacgacccgttaagaagctgttgaaatagttcaggcaagtaatgatgctgatttagttgagggtactcatagtgacatggagactggtggatggatttggggtgtgaggcagaggtagttggtaagacttggtgggattggattatacctttctactgctgttttgttttaggaaagaatagataatggaaaagctttgattgatgtcccaggaagactcaaacagagatatttaaagaggaaggagaacatttatttggaaagaatgcaagcaagccaaaggatgacttgacaaaaacaacaaacaaaacccacaaatatctaaagaaacaaaactgcaaaaatacaaaatttatcaagcttaaattggcctgtttgtcatagagaatggctctcccatgtttgtcatactcacaaatgtcacatattttaagatatcagcataggaaaaatcagaagtaaggcatttttattgttaggaagtccagttttaagggtaaatttcaaaattttatactttagggaccagtactagataggatgatcttattaactttgttttatctcaaggtgcaaagcatttcctctctcctgactaaggtatatgaagtgcttaatcatattggaagctctgctgggtctaagaggagagactgtcaatcatggtacaggttgacttgggacagtgtgagagtcggctgaacaactttccttccctatctgcaacctgcctcttgtgtcattcctgggtgaggtagaggatcagcatttgcaggccaaaagttggtatggctagccagtctcaaagtttacttgtctggtatcctcttcacttaacggagactattcttataatggtctcattcttatattcctaggaactggtggatcagctgtattcatttcgagagtgctatttcgagacacatagtgtggacgatgctgggaggaagcaacaagatgtgcgggaagagatggagaagaccctgcagcagatggaggaagtagtgggtatgagtcccaaaagaacacacaacccgctgttccttattgaaatgtgatggagctttgctgtctctgtagactctttggtatcctgtttgtggttgctacaagttagtacaacagaacatttcttctaagggtgcctgtgtaggatggcagcctttccgttccctaaactccatttccaaatgctgtgaaatgaaaaagaccatacttattgcttgatt

SEQ ID NO: 58383 - DNA, 1431 bp, Bovine  19866881464430
  misc_feature (1)..(1): n is a, c, g, or t
ntccttatctcccacttcccttctgtggacccaacatcatcgaccactttgtgtgtgacccaggcccattgtttgcactggcctgcatccctgctccttccactgagcttatttgctacaccttcaactcagtgattatttttggccccttcctttccatcttgggatcttataccctggtactcagagctgtgcttcgttttccctctcatgctggtagaactaaagctttctccacatgcgggtcccacctgatggtggtgtctttgttctatggaacccttatggtgatgtatgtgagcccaacatcaggaaacccagcaggaatgcaaaaaatcatcactttggtatactcagcagtgactccgctcttaaatccacttatctacagtctccgaaacaaagacatgaaagatgccctaaagaaagtcctgggattaagaattaatcaaaactgagacatctttaaaaaagaagcagaattagtcatttctgaccttaactatttatagtaacaatgatagagaatggctacaataagtcatattttggctcacaagaaagggaaagtcttgtttttcacagttcctttagcagttcaagttcagctcttcaatgataaatgctgaataaacattttaaacatgtacaaaatcactgagtaattatatggtgttattatatagatagatatttttttatgtaagtgtgatgtatctttgctggtttaaccttatctggtgaaagaatcaaatgaatgcatactgggagcctttcaagaatgggtgcaatcctctaaattcagaaaataagtattcttaaagaaaatgggtcaacaggccaccaaataaactacatagtgatggatattatccattgtttgaggttgtcgtcacaccaaaaacagagtatacttcatacctctatcacttacagataaagtacaaactcttcttcctgccttccaagtgctcactcaatagatattccattcagtcttctctcctgcttatccacaaaggccctgcacttcacaatgatcaatcttcttattttgccttgaataatctttctcccaattgtgcatttttactcacagtgcttcctcctaaatccattgtgacaatcccataaccacatattgtatggagtaacaatgccttaaacatatttttgtgcttctcagaaggctatcagacaaagtctaagaaaaatatttagaggaaattaaagcgaaaagcaaaggagaaaaggaaagatataagcatctgaatgcagagttccaaagaatagtaagaagaggtaagaaagccttcctcagcgatcaatgcaaagaattagaggaaaacaacagaatgggaaagatgagatctcttcaagaaaattagagatactaagggcacacttcatgcaaagatgggctcgataaag

SEQ ID NO: 58384 - DNA, 775 bp, Bovine  19866881800634
  misc_feature (1)..(1): n is a, c, g, or t
natgggagcctcaggtggggcgattcgaagcccatggcttaggattcctacccagttactcagcctggagccatgccagagtagcatcttaaggaaaagctggtattattgtactctctctttctctcctccaaacataagccataagcatcaaaaagccaagagctgtctgggttatctttctttatgagttccctaactgcacttcaggcaagcgactgtcttcccaaaccgaaagttaaatggagacctgttatgaaggtcctctctgaaggcttctttttcaccctccttctcaacttcaaagacatccagcaaggtcatggtatagtcactgtgtgtgggagcatgggtagactgtaggtactgggaaatcacctgcgaaaaagaatgaaagacaaggttgacatggactctataagagaccaggctgaactgaagaaccttgggcttcttgtataaattggcctaagcagtctcacaagggcagccagaaagagcattaccttcccaattcttagtaaatagaaattctgccctcaagttttctcttaaccagatgcactcagggaacagtggcatggggagggtggatcttaatggtgaaaataaacgatcatttttcttactttgaactcataactctcatggtctaaagggtgcaaggcacaccgtagttttctatactgttggtccaatgggtgttccggggctttgcagttctgtcttcaccagcttaattgcaatttcaatgtctcccaaagcctgacaagat

SEQ ID NO: 58385 - DNA, 936 bp, Bovine  19866881813161
  misc_feature (1)..(1): n is a, c, g, or t
ntttttggatcgcgcattcatcatataggtccagaaggtgtaggcataggcggtgttggggtagagatgccggaaactgtcagtgagtggcacagcctgcagcaattccccgaagccctgccgctcttgtggagtgaagccagcattctttttatttcccttcgggttgcgaaggtcaatttcttcatgagccacattgaggtccccacatagcacaaggggcttgcgggatgccaaacccttccaggaattttgcgaaaagcttcatcccagcgctggcgatactccaggcgcaccagacctcggcctgcattaggcacataggctgtcaccagcacaaatgcgtcatattcagccacaatcactcggccttcctgatcatgttcttcctcacctacagaaatgatggaacaattagcaaaaagaagttttaagaaaagggaaaggagagaataaaagaatcaagaattggggctggactgggataccagtaatgagtttggaggcactgggctttagaaaatcaatagggtctcaccaatgccataagagactttgagtgggcactggcgggagaggaggcccacaccactgtacccttccttgtctgaaggagctgaccagtactgatgggacaatccagacagttcttgaagttcaactggtagtttgttctctgaacatttggtctcttggaggcacaggatgtctggggcttcttcctttacccactgtaagtgaaattaaatgtagaaaaagtattatcaattcagcagccatttactgaaaaatctatatgcgaaatactagaaatatacagatgagacacagtctctgcagaaataacgtctagcagcataatattaaaacttataaatgcagggcaaagaggcaagaaaagtgttacatgcaacactgaggaattctgtttttttc

SEQ ID NO: 58386 - DNA, 1005 bp, Bovine  19866880373329
  misc_feature (1)..(1): n is a, c, g, or t
nctcccccatccctgggattctccggcaagaacactggagtgggttgccatttccttctccaatgtatgaaagtgaaaagtgaaagtgtcatgtccgactcgtagcgacctcatggactgcagactaccaggctcctcagtccatgggatcctccaggcaagactactggagtggggtgccattgccttcattgacatggtccttggtcaaatattattcttaatatccagaatgccctcggttttgcttatgtgtgtaactatagttttatatataacttattttcttcccatttacctccttttcattgatggatttaagttcaaaatacaaaatctgtcagacattatttggagagattcttccttcttttggactgatcctcaagcagatagttccatgtcttacttgtgttaaaagatttccttatagcgatattaaatgcttcagcacatgaagcagtcatttcctcctgctgttttgagatagctcttttacttattggcaccacatgagataaagttctgtaattggaacagagatttatgtagtgttattgctgaatgtatgtgtatgcttctttctggtggtgaaagacccatgatataagacttccgtttggggattgatctgaggcctcgtgtaacatatatgctgtaataagtcacagcagatgctgcctattcagtctctgctgtcccatgtggttcgagagtggataatttcgctcattcttttggcctttgctatgacttgtcagggactgaactcatgttcataactctgagaagtgctcagctgtgaaataagtactgaaaggatgaaatgcaattgatactgagccattgtgatctttcaatcccatgtaagcaagaaataagtatttaaagtggccccataaatcttcttgagtttaaaagttcatagatttaaaatatttatggactgacttgggcagaaagaccaggaaaaacatatatacggctctaagcagagctagaaac

SEQ ID NO: 58387 - DNA, 618 bp, Bovine  19866880393535
  misc_feature (1)..(1): n is a, c, g, or t
ntatacatgcctcatccaatcagcaaatgacccgcaagacccctatcccactccttgtaccctgggtataaaagtagactaaggactcctgttcaactcggttctcccttgagctggcctgctcttctaacagcgtctcccactctaatagactttatttccctctccttctgtctcatgtctggaaattcttttccaacccgcacccagaccatgacatatagtagcactaactactccctgagaaaggcaaaggaccctcccgtcaccccgcaaagccgcccctgcccttttgttgtcaacaccctcacccctgggaaactaccgacagtttctatccctataatcttgccttttccagaatgtcgtgtaaatcgactcatacactatatagtcttgtgtgtcaggcttcttgcacttaacatcatgcaaggccaatttttaaaaactgttgtctgccaaggtcatctttccctgtgaaccaaggctaagtgggtgaggatcagtgttcatgcttgtcttaacaaattcactggagtacataactgtagaccctaaatcaaacccgctgagtcaaaagcagtgtctctttgtaatctattctgatgtgatgactca

SEQ ID NO: 58388 - DNA, 927 bp, Bovine  19866880408218
  misc_feature (1)..(1): n is a, c, g, or t
ncaggcctagtgggtgataacagctcctgactgttgcaaccgctggggtactacactccccattatttgtttccctaaatcctacccaaagctttgtaaatagtccttttattaactgtacctaaagtatccaatttgaatgtaccatctgtttcctggtgagaccctggcttataacaaggattttactgcagatggtagtcaaatatcttgagggcaaagtaccttttctgtcttgcacctgagctagccccactagagggggtaggggaattgtaggaaagtggtagtggtggttggggtggcagggcttatgcaattattctgaatgccaggataagatgaatatgtgcaatagacattacagattcttaaacatgtgcacgatgctctctaagataattctggcagctttgtgaaaacatcctgggataaaggataacttcagaaaaagaagccaactagaaaactgcggctctattattggaacaagacagtaagggcctagagtagaaaagaaaacctagagggaaaagaaagcatcccatagacctagtaaagggtaaaggcagaatttcctgatgagttgtgttggagacagaaggaaaacggggcaaaacaaaacaggaagaataactgtagaacctatgggtaaactagagagttgaggaagatgatagaaataaaaatgataagaatgactaattgaagcttaggtattttaaatgctccctgagttgtgaccacaggttttaagagctaacaagtattaaccctcttaatcccctaccaactttgtgaaatagatctcgttactacaatttacaggaaacagaagcacagagagctccagttacttatccaaagtcacacaggaagcaagttactgaataactgagctgaaatgtaaagtctagagcctgaagc

SEQ ID NO: 58389 - DNA, 670 bp, Bovine  19866880488636
  misc_feature (1)..(1): n is a, c, g, or t
ntctctttctattcttttatgagaaaatcttgaacaacctgtttttttctcttgatgtataaaattctaaaaatgggaattgttaaataaatgatgacatacagcttctgtaatctttgtggcattgctgggtatcattacagtctttctaaatcttcctttatggaagaatccaaagtaacagaactttgcctgttttcttctaattcatttaattaaaccttctaccaacctagaaaccaagtgaaagttcctaaataatttctgacatgaactaaattttacttctgattcataatgactgattataaccctgtgacagttacagaaaattaattacaaagaccaagaactccagaaataaaaacgcagaggctgaaatttgaattgcagtctttatcacattatgtgaaaatagtcaaatggaattaaagaacttgggtcacttattatgtattggtttttgaaaaaaataagtagatgtcatattctagcaatataaattacataaaatgcacacacggtattttagttgtgattacaaacttgccccaaattctacttccagtcaagcatgaaacttataaaactcatagtcctaatattttttaattacttggggtaaatattaagaagagacatttgggtctctatgccaaatggactgagt

SEQ ID NO: 58390 - DNA, 721 bp, Bovine  19866880497411
  misc_feature (1)..(1): n is a, c, g, or t
nggagaaaaagaaatttgggggaaaatatgattaggcacataggccagggacatattttaaacaaaaaaaaactttaattcccactcctccaacctatctttgactctctgaaaacattagggttcaagaagaagaaagaaagagaaaatataaagagaaaacaggaaaagaggatggtaacaagaagttgacctaatttttttttttttaatattcatcccaatacacacacacacacacacacacaaacatacttctaacacattaatacatagctgttcaacataggccagaagttgtcacaaaaaatggttactttgaatactgtataatttagataataattgatgatatgcaaatttctgcaacccccaagcctgacaatgggccctctgcagggactttcctaggtggatggtacaaggccaggagccacatttgaggtggatgaatttgcatttcacacttcaatttccttctggctcttcagtgctctgcttgctgagtaataacaagcctaagggttggatgagaaaagcaggaaaaaagaggcttggtttgtccagaaactgagtaatacacctgtaagaacacagcaaaccacagctttataactcatttccttatctaggaacctaaagctcagcaaaaatacagccacaaaaagagatgaacaacagaatgaggcagcatacggtagatagactggaacttgtgttc

SEQ ID NO: 58391 - DNA, 1092 bp, Bovine  19866880512914
  misc_feature (1)..(1): n is a, c, g, or t
nctttttaaaaagatctttgtctagcatgacaccatctgatgttgtttgaagagttaatcttaacatatccatacactctttcaacctgggatcagacgttcgcaatcctgtagatttgagtgcctgtttttaaaaaaataagagtctgtaaatacatagtgcaaataatgtatatgcttattccaactacaagtttttaattcctgtatttagaaacttctacccaagacctgaatatatatatatggcatcttagtgtcactattaccctctttctggaaaagtttctcattgtttctttcatttcctttcattgattaccttgaaatgagcatgatgaaaatttgaaaataagagaaatagtgtcagtcagatgactttaagactacattgcaatatcaccgtatattgcttcatattactggtttttaaaagttaggatagaaaaatataaaaacttactgtaataaatttatgaacaggtattttctcttgtccttctgcaattgtatagaacagcaaatcttccaaactaggtaacagaccctgttttattttactaaagaggaaaaaaagaacacaaaattaactcttatgtgaactttcaagtagattttagctacatccatttaaaaataatcaatgaagcagactacagttgatcgattcctcaagacctactatcacattaataatgccgatttaccaaaatcaaacagtattactgaaaccacattgagaagtacgtttaaaacatattcattaatttacacagatattttgtaatcctaaattatcttttatggcaatttcttcctgtatagcctaatacaatacaatcacccaatactaactatgagcctagaaaatgttcaggtaagagtcaatatttcattctgttgttattgtttttttataggatgattatacatgtgtaatggagaaggcaatggcaactcactccagtactcttgcctggaaaatcccatggactgaagagcctggtaggctgcagtccatggggtggcaaacagtcggacacgactgagcgacttcactttacttttcactttcatgcattggggaaggaa

SEQ ID NO: 58392 - DNA, 1817 bp, Bovine  19866880532336
  misc_feature (1)..(1): n is a, c, g, or t
nataatttgcatcatgatatttttttagtgtttgaattgtgtgtgtgtgtgcccagccactcagtcatatctgactctgacccatggactgtagccctccaggatcctctgttcatggaattttctaggcaaaagtactggagtgggttgccatttcctactccatgggatcttccagacccagggattgaatccatgtctcttgcacctcctgcactggctggtaaattctttaaccactgtgccccctgggaagccccagtgctagaatgatcaaatatcaaaattttttatcttctatgatgagatctcagaaggggaaagtctatcagctaaacccattcctatgactacgtacgaatgagtagattgacaaatgtagaaacttgtgattttttgttttgtcatgctttgcagcatatgggatcttagttccctgaccagggattgaacctgggccccttgcaatggcggctcagcctcttaaccactgtgctgccagggaaatccaggacttgtgccggggagggtggggggctggcgagggaatatatattgacattgaagtctctcagtcgtgtccgactctttgagaccccatggacagtagcctaccaggctccttcgtccacgggattttccaggcaagaatactggagtgggttaccatttccttctcgaggggatcttcccgacccagggatcgaacccgggtctcccgcattggaggcagacgctttaacctctgagccaccagggaagatatttgtcctaattaataatagcaacaacaaacgccttacatgtgtgtgaatatgttccccatactttcaaagtatacttgacatcactaagcacctaatattcttttaagtcgggaagggaaacattatcatgcccacgttgctgataaaaccaccagtgccccaggcacacaatgagctcaagagacagaatttaaaacaggttctccatctggcagcgtagttctttcaaagccaaaccacgtgctccttgaggaaaggaaatgtttaacgaaagcacaatattaaatagaataggagattggctctgttagaactgaaatagaacactgaagtggcatcatttattccaactcagctttcacataattcccctgcatcttcaaaataatagcttggtcacatattaaacaagcaaaaagattatcaaagttgggtaaaactaatatatgtgtaatgtaaaagaggagggttttttttttttttttccctaaaaacgagtaaggtgagaaactgtattttatttattcactgatttttaaaatgtcagtgactgagattagatcagaggtcatacactgtgcggggaatagatttcactgaaatagtccagcaaagaccaaaaacataacaacaaaaaacctgcaaataaacatacaaagaacaaaactaacaagccctggagagaggaagagtctatcagtatctaaagctgctacaatgtattatctgaaatgtccagctttccacaacaaaaacaacaaaaatatgagacccccaaagaaagaggcaagtgtgacctgtacacaggaaaaaagcaggtaacagaacctgcctttgagaggacccagatgttggattagcaaacaaagattcaaagaaactgtcataaatatgttcaaagaactaaagaaagccatgcgtaaagaagtaaaagaagacatgatgacaatatctcatcaaataaaggatatcaataaatagaaaaatatttaaagaaataacaaaaacttccaaaattgaagaaaaacattaaaatgcatattcaagaaa

SEQ ID NO: 58393 - DNA, 1426 bp, Bovine  19866880560605
  misc_feature (1)..(1): n is a, c, g, or t
nctgatggcactagtggtaaagaatagacagggtttgatccctgggtcaggaagatcccttggaggcgggcatggcaacccactttagtatttttgcctggagaatcccatggacagaggagcctggtgggctttggtccatagggtcgcaaaaagtcagacacaacttagcacacatcaccagtgctttttagagctccccgcgaggggctgatggccccatgtttggccacagtgaaaccacaacttgagattcttgaaattatctgggttcatctatctctctgtatctctcacccatgagtaccacactgcccccactctgactgccatttaactataaattacaccaatgcctggcaggaagaaaggttcaaacagttttcctgtatttattcttctacaaagactataggatgcatgtggccacaaaggatgctgaactgggcacccatttcaaatttgaacaccagagaataaaacacagtgtcaccagagggggaaaaatattacaactatttccagccttgaaaaagaagtggccatcactgtggggattgttgggcagctcaactcaaagcaggaaacaggacctgtaggaatgtggtaggcttttaatcaagtgagtacaatttttaaattttcaaatcttttttgtttttgaagcatatccattagcttctgaaagatcagctcttactgactgagctggtgctttgctgttgacacagctgtcaggctatccctgcagaaggactgaggggagtcttgaagctcaccccaggctctccacccacacaccttcataaaacattcaggtatttctctgcctgattactgtgcttataccactgtgtaactatcactctcctaaccagatgttatctcaaataacctcaatagaactattatgaaaatctaggaataaggtatggggttcagccaggattgcacaagaagcttttggctacagatcctgccttgaagccagaagtgattattattactaataattactttcatttattaaattcccaccaggtgccaactgctttatatctgaaatattgatgagaagtaatattattaagctgcttattatgtgccaggtactgttgagattctttacatgtatttacatgtagagattctttacatgtaaataatgcaatttacataagaaaatgcacatataaaatagagagatctttttactatataatttgacttatttatttttggctgtgctgggtcttcattgctgtgcgggcttttctgtggtttgtggtgctcaggtttctcatcgcggcgtcttctcttgtggaggacagcttctagagcatgtaggcttcagtagttgtggcacacgggctcagttgctctgggcactcaagatcctcccagatcagaatcaagcccatgtgtc

SEQ ID NO: 58394 - DNA, 1267 bp, Bovine  19866880584839
  misc_feature (1)..(1): n is a, c, g, or t
nggggagttaaaatgtactagtttctaaattttgaaagagatttgaggatatccggtggccatgtttttgcagcctgtttttgggacacactgaaaggactgattacttgctaatgtgtcttttcttttacaaaacgatttgtgaatatgcattctgagtatttatgaatagtttttcttttaaatatttttttttgaaagagagataaacaagtgatgattgaattcaaggctatacctattcctcccacttcttctccatctgatataattacagtaagtctggcttgtgcatatctgaacatcttctggttttgattgtcaagcaatcaaatagcatttctcacccccactcagacccataatttagaagcttctctgaagtgacacttgttgcagtttaattataatgctcttcaatccagaaagctatttaaggaacaatggaagctgtgcctttgcagtccagtcttttgaaaaaaatgcagaaatacatatgtgtagctgatccctcggagaaggcaatggcaccccactccagtactcttgcctggaaaatcccatgcggaagagcctggtaggctgcagtccatggggtcgataagagtcggacacttccctttcacttttcacgttcatgcattggagaaggaaatggcaacccactccagtgttcttgcctggagaatcccagggatgggggagcctggtgggctgccatctatggggtcacacagagtcggacacgactgaagcgacttagcagcagcagcagctgatccctaattgaaacttgataacgtgtgtgatgaatgacttgtttcctttgggaaaatgactgatattttaacatacatgtttctttccgagagtgtccagcacagttatgccattttaaaacttagaagcaagcatgcacaatttcacaatctgcattctgtttacaggaaatgtcttctttcatttcaaaatgaaattctcaaggctcaaacgggtaagtgttttaattcagcaaagaattaaagagctgctttttccagacatattctctttccttccctggcagttacgggtaccaacttgctcttaattatcttccattcaatgctagtcatagccgcccgcctacttcacacctcggcaggccagcccacagtactcacccagccctctctggctgaatcatcttccgcccccatcctttcccactgctgtttccttttcacttcagtgctctttttagagggacatgcttgcttttccagag

SEQ ID NO: 58395 - DNA, 1567 bp, Bovine  19866880606534
  misc_feature (1)..(1): n is a, c, g, or t
ntatatctcagtaaaactggaaaaaagtttacaaaaacaacaaaactccatgcagttcaaattaaaggaagataaaggcaccatcttgggagctgaatgacataggatcccaggggtggctggtatggatcacggccttgcttaaggatgtgacggacagtgtgtgtgacttcacagatggctgagggccatgggatttttcaggttacaaattatgcatgttagaggcttaaggtgtgaaaaattactgcatcatttttagtaacctttccaaatctaagatttttgtgtttacatcatattttttagtttattatgaatgaattgattgtgggaagactcatttgtgtataaaagcttaggatcctaaccttgataacaaagtaatttgaagcaatgcgtaaacttaggtgtcatcatagatgagtgctgtttcagcaatagaatcacaggctctaaatgtccaacaggtcgtttgctattcattttcaacaagatgtttttgaatattatatagttcgccaatatattttccttcagtagtcacaatattcttgaaagctacacctttgactattgaattaaaaaaaaattctgagccattattatttttcaattaaaaaataagccttgttttgaaaaatttggacagttttggattgtgaacactaatattccacctaagcaatttaaaactgtagtctaaaatttagaaaatcaatcgctttcctgaaaattttttctggtaagttttgtgaccgaagtaatttgctgagggaattttaactttcagaagttgtgactaacacttctttcttcataaatgtaacattgcacttaattatttccctttaagaaggggggtgggggaaggaacagtggtaatacacctaatatagctaaattatctcagccccaaatccccttgcatatgtgattaaagaaactcatgtccatgtaggatcctggatacataaaggaaatgtttcctttcagcaacacctaacaataatgtttattctggggatgttatgaacacacttgatgcctgagagtccacacttcccccagattttgtgtgtgaagtgtttaagtgctggtcagaggatgtcacggccttgtaaagagaagaggagagccgtgagactttgccctagcggaagtgggtggggctaatggtcagtagattgttctccatggaatggagacgtgtgggcctgtagaggcaatcaaaggaacaacagcctttatttagcaaagtagaagtttcctgatttttttattgggtttagttgggctgacagctcttgggataaatatgatcacagggtctgaatactcagcaaacaaattctcaactcatgtttaacatccatttcgaaatttaatatggaaagagaattttattctaaacagatgattcttgaaacatagcttgattgcattgatcattaaaagcagcatcccagtcacatcactttttttcccagtaaaataaactattttgaacacgtgagcaatttggaaacatctgaaaccaattttccttctcaagctatgaatccaa

SEQ ID NO: 58396 - DNA, 1325 bp, Bovine  19866880749774
  misc_feature (1)..(1): n is a, c, g, or t
ncttttttctagtgtgtatctgtggagaggagcagggctcattgtcattcctgccttacaagcaaaacaggcaaagctgattcttctataagctttaatcaagatcttggaccatttctttttcttttctgtccaggaagagagattatatgtcaagtaaagaaactttgatcctgctatctaatcctttaactgttatactccaagtaatgcgaaattttttcttctttgaaaccactacttgttcttttattccttggcttattaaaagactttcttttttaacaggtgcaaacatggacattttacttctttcatttcttgtgccttagggaggttgtctcagtgccaggcacatgtatcagctatgaactagcaagtaattagtcaaaactaagaaagcccctcagttggtctggtgctgttaatagtcaggtgtcagtgtcatggtggagtcagggggggaagttctgattccagaatttctttgtcccttcccattgcttttcccctttagaatgtcttcataggtttctttcttccctttaaacttaaatttatatcagatatcaaatgggcttccctagtggctcagacagtaaagaatctgcctgcagagcaggagacatgaatttgatccctgagttaggaagattccctggagaagggattggctacccactccagtattcttgcctgggaaatcccatggacagaagagcctggtgggcgatggtccatggggtcgtaaagagtcagacacaactgagtgatgaacactttcacttatatcaaatttaatatgaacttagatttatgtcttgagggaggaatgtagcttcactggaatatatggaatatatggagattattttactgtcttctctattaaatatctggtgtatcctgtactcctttttattaagttgttagcagagctgcagtcttgttagcagtggtagcagaagcatctaaaacaaaagaggaggccgtggcagtgttttgctttgccttaagtcagggtcatacttaaataaatttaaatgttcaggtggcaagtccttagagtgaattgaatttatttgagtaattatttgatatggcttcatgctgttaggttatgttggtgcacgcacatttaaaaaatagaatagggaatggctttaagcactagtaaattatttgggagcaaacattttcctgattacttttctgcctcgaagcttataacttaaagaaaagtcataaagaaataagctctgggataatcgacatagcattttacgtggtaaaacccttaactgctttgtagtaaaaggctctca

SEQ ID NO: 58397 - DNA, 1747 bp, Bovine  19866880784529
  misc_feature (1)..(1): n is a, c, g, or t
ncccagacagccattttgcttttttgcatttcttttctatgggaatggtcttgatccctgtctcctgtacagtgtcacgacccctcattccatagttcatcaggcactctatctatcagatctaggcccttaaatctatttctcacttccactgtataatcataagggatttgatttaggtcacacctgaatggctagtacatattaagaataccctttttttttgtcctaaatagaacccttttatatttttacagcaaacatgcaagacattgtccctgagagtatgattagtggattaatgcattcattttactcaaaagtattgtcttggaaaaggcttactgttttatattgtggttgccaaggtcatgcttagttggttcctgtgatagttaacatgattcaaaaattgggctttgtagtatcgaggaggatgataatttaattcttgattctcctcagaaatgtaatatttttcatatatagaggtgattacataaagttttgatttagataaatatctaaatatttgaataaagatctaaatgtatttgaactttagcattgaagagccaaggaaaatgaagcagaaagtctcattagatagctattatttcttgtctccagcatggtgaaatatagggaaaacagtctctgaactactgtggaccttgccacttgtcctacaggtttacttattttctctaaagtagtcgactctcttgtgagctacttgagttaaagatcaagtattatgtcaggaaaaaaaaaataataagagtagtctcttttagacagtgaggctttatttggagaaaattacccttaatcccagcttccaaaaatgatttattaaaatgagcccagtagtagaattactgaagatagttaagaatctgaacatagaagcttattaacaacttagaaggatcttttgaagtatattaaaacattatatttgaattacttaaatagattttaaaattaataaaactgattcctaatttcaacttaagttaacctcatcgtgatatctcggtagatattgtgggtttacatacagttttaacagctgtatgatgtcagccaaatccaagttccaaaaaatctgctactgatgcctttttaaaatagatttgaccccgagagaatttgatactatttcgttcaggccattaaaagatctctgggaggtcaaatcaattcccccagctaccaaagagttctcgttcctggttgatctcccttcctccctctggctcccatacacatgggcacacacacagcactttgtccctggtgtccatcctggactcgaacaagattttcagagaactgggtgtagccatgtatctgaggtttgaggttttgctgcagtgaggttcataatcactgaaataagcaaaatagcctggcctggacttttaatatttcttgttagtttacctaaaagaaaacctacctttccatctgaaatatgtctgtgtgtgtgtttaccactacctggagcagttcttttgcctgtaaatgcttccattcttctagtagtataatgagtagagggccagaaattcaagtcaggaagagtataggtaatacatgtgagagtgtaggtggggatagggagtaaagaatgctgttgagtaaacaggatgatgagaaagcaagcctggaggtgaatggtttcagaggccacaccataaggttggaatgcgtgggcgattcaggagagtggcccacaggt

SEQ ID NO: 58398 - DNA, 1306 bp, Bovine  19866880816022
  misc_feature (1)..(1): n is a, c, g, or t
nggagcccttttctttcccaggaatcctctccagagggagaggctgtaaagaattttcctgaatgtgatgaatgtcagcacattccctgctagaccacacattccattcttatcaaatgaaactgacctgtttgccccagcttgttctccttgttcatcactgtgattaatttaaagttctcagtgatgcaggtttctagatgaattgcacaggtcatttcagatggcaaatgtgtacttccatcgtctccttatcctatggaggtcatgcactggcttacaagaatgaggattttaaaaatagttggcttacattcagatctgtatcctacaaaatgctctgcccagactggcccctctcctttcagttggcagagatccacctcttcctactcgttttctgtttaataccaagtgactcaagtgggagtcatgaccaagacgaaacgtttaccacatacttcaagttttttttttttttttaatgaaagcatttttttggccaatagaagcaaacaggattcatgagagtccttgagttgacattgaataagcccctgagccacgcttagccactaaagacttccaagttcattggaactgatacatgctgctgagcttctggtgaacaaaattattgttccattcgccatcactgtcaaagggaacaaagtatacaaaataaaatctgatcagaaatcaccctttgcatgtacatttctgcatcagaacaattcaacaatgattgaaattggatttctgtacccttaaactttgtcagagcttttaaggggtccaggttatggagaatgggttaattcatgtttccatcttctccctttttaagatttggtcttcttactgaggtactttaggattagataaaaaggaaaaaaattgttcttatgaacatctaggtagtccaaatatccacatggagagcaaatgctgatgaaggctgggactaaggcagtgcaaaaggattagagaggggaaaagccacatttcaaagacatttctgagatggaaatgacaagattggttgtggatgaggattaagaagtcaacagagttttctagtctgggaaactaggttaatggtggcagttccctctctctgcccatttctctctctctgtgtcctttctgtctacctattttcttcatgatgcttcatctctgtgtctctcattctcttgtttggtcagcttctgtctacattcaagctccaattccctttctctgcggatcaacttcttcaccatctacatttgctctgctgcctggttgcttcatataacaagtg

SEQ ID NO: 58399 - DNA, 1508 bp, Bovine  19866880870450
  misc_feature (1)..(1): n is a, c, g, or t
nttttgaaaagctagactttcgtcaaatctctgcatctttaacgttttttggagactagaattgtgtgtgtttatatggtactcactttacttttctgaattaccaggcatgtaactagtctaagtacagatgtccagacttgcagaattgaaagaagaatgtgattactagcatttgaaagttgtccttaaaggttgtttgatgggaacggctttctctagaaaatgtcttccgttctgtctcttcaatggctctagtgtccctcttttttttcccctttagtgagaaaattgagcttttgtgatttacatgttttctagaagcttgtactgccattgcctttgaaataaatcatttcttagcagtaattttggaacacttactttgtctaatgcttattgaccattctacataaaatgtcccttcctgttcctcctagcccccgaagaaaaccagtctacggagggactccttgaagaatatttgttcagatgtcctgggagtttgaatggccaataagataaccttgtttaccgtggttcaaaagagtctgtttttgacaccaaagtttggagtaatagctagaaaattttaggagcagtccaagtatgtgataaacctgagagctttcaatcaaggatttcaagagtgaaccccagctatctcctatttaagatagagtgaagagtactggtctcgatgattgtgaaaaaaattttaatctgtttaaagattccatttcttgaatgatctggtttcaaaatgtagcttccttccttcgacttcatccattttgcctttatgacgtaaacatttctcttattctgggaggtaaggttccagttgatgcatcctttcttacactcagtttccaaagtataggtcattcctcagtcagcgagtcacctgggatgccagcactcactcaggattctgccagtttctgtagaggattattaaaagaaatacccatgtgaaaaataaaatgagtttaacatttgttatgtatagttcttcagttaaaaaattacatcatttattgtaaaaccttacaaggagattagcctttgaattttaggctcaaatgaaaattttttgttgtttggttcctggaaaaaatttatgtaaaacaatgtaatattgactgtttacccttttgccttgcttaccagttagatcagagtgaatttaattcttaaccatagcaattttattagttcatgtggctgggatattcgcttttcctcctttccttgatcttatattttattatccatgcaatattatattctggagggaggtagaatgtgagttatcttttttcatagtcaaattctgaactgttgtcttttaaggctatgctatctctgtcaacaacttcaattctggtttaggttactgatcaaggttaagattttactactgtcctaagtatgttacaggaaaatgtaatgatctctgctcagttttccctgcagtgctcttatttaattttggtagtattatt

SEQ ID NO: 58400 - DNA, 1197 bp, Bovine  19866880903114
  misc_feature (1)..(1): n is a, c, g, or t
ngcaaagactctgatcttttaaaaaagacttggaaattaaatactataaaaacaatctaaaatgcataggtttaaaatctaagtgtaagaacaggaaatgtttccttatagctatttcttaaagacccaagtatctaaactattctatttacatattaatatatattttactattctgaacttctttaaaatactcacagttacttatcactcctcccagtggatcccctttaaaatcaaattcaatatccatatatttgccctgcaaaagaaagaatttgtgagttaagttcacctcaaaatattcagtctgtatcttaaaacatagcataataagccctttatgcattggtttaaatgtaattaagaaggacatagtttatgtaaccatgatgcaaaacaacatgcctccataaatcagatcagatcagtcgctcagtcgtgtccgactctttgcaaccccatgaattgcagtacgccaggcctcccagtccatcaccaactcctggagttcactgagactcacatccattgagtcagtgatgccatccagccatctcatcctctgtcatccccttctcctcttgcccccaatccctcccagcatcagagtcttttccaatactaaatactccattagctcaaactgaacatatctcattgctaatttaggaatacatcttcctcagccatcataagacttttccatttcagatatgtgcttcaaagctcttaatggtatgtttattcaatccaaaaatgaaaaccagaaaaaataagtatttcttgcatatgcgctagctaggaatataaattatttcagttttataggcaaagtatgttttaagccatgactagacatttcagacatactggatggtggataaaatggaacacttcaagttctgtttttacatctactcaaatcaaatgcacgattatgtggtgtggaccacctcagaatcaaaggctgatcattattctttttggcttttgatctagattatacagcaacatataactcatgctcgtattatactatatagatggagtctcaaacacacaggaatacacgtagagtctctcatactatgatttgtagagaagaatctcgaatcatctggttaaagagttacaaatatatcagaataactgacagctgttttttgtttggaaaagtgtgtgttgatctaataa

SEQ ID NO: 58401 - DNA, 1097 bp, Bovine  19866880916102
  misc_feature (1)..(1): n is a, c, g, or t
ntcctcaaggagagcttatgtagcaaggacagtcactgaccttaaggggccctttggagaggaacaaggcccaaccaagtagccatctggcagcccaagcccagagggccagaaaaatacaatagatatcagtggatgtcagcctgggcacctgcctgttccccattcttcctcccatcatttgggtcccatcaaattgagagctgatagaattgatgaagagagaagttcttttattgactaacactacggttttgcatcttggaagaatttgaacctgacatcggttgtagacattcactagtttctatgttagtgactctaaacaataacagcaacaagcctttttctattattgagaaataaggcattccttgcacacttgaatctgcgagcagagaagcatgttccacacacagtttgctagtgatctttttctgcattcatgtcccgtctccatagctgaactgcaagattttcaaagctggagaggggacccttcctaccctcttttcttcccactcagcatcgtgtacacaacaggccccattttgaagagaaaacctatggaacatgggtgcatggcggttttgtttacatgttggtttggcagagtctcatttcaagagtctttcagctctgacttcatttgtaagtcataaaagttctcccagtattcatttttcactttcagagataacagatgtttgccaagtgtccatcatatacaaagcccacttggacttcttcctagggatgcaggcctcgtccttaaggaacttatcggaaatgtagatgggatgtagatgagggagctaaatgtgcattgactttaggacaacagctaggaggttttgttgcctgttattttaaattcacacataatctcatcaccaaagtgacaaataatctatttgagaaaacttgcaaaatttagaagcaaagaaattgcacccacaaactcagtacctgtaaaattagaagtagtcaatgctgacattttgacatatatcactacttacgcattttaaaatggtatcatgatctgctggagcttgttatttaaagaaaactctgatatactaggttgtatgtgt

SEQ ID NO: 58402 - DNA, 1125 bp, Bovine  19866880918476
  misc_feature (1)..(1): n is a, c, g, or t
nctaacggttttgaaatttgctgcatcatccactccattaactttggccgagtccagactcagggtagttatatctgctgaaatcccgctcaagtttaagcttatctattgaatcacacatatgagttgataagttacttcaataaatctaatcatctttaacatctcattcctttaacccttcagataaaagactttcatactatgcattgaaccaaaagaacagaaataaatggtatcaactcaaatatatcagtaatagtatttgtccaaaatcacctttatcatgtgtacatatttcaaacttttttttttttgcaggccctttccatatttggattatttatcttcaatgagctgtttccttataacatatgatgtctgcctagtgattctcccactgttggacacttggattttctccagtttgttataataaataaaagccagtgataaatgtcttcacacaaaatattctttggattcttttgaatgattccattgggatgtaatccaaaaagtggtgtgcctgggcagcaaagtctgatcattttatgacttcttctgctttgccaactagtcccccaggaaaaagtcctcactttgaagtgatactcagaagctctagatagattgatcagtcctgacaactctgctagctttatcctcttcaataactttagctaatacatgtgtaggggctacttcagtgctgcttcaatttacatttgttgataattaacatctacttctgctttattgactatgccaaagcctttgactgtgaggatcacaacaaactgtggaaaattcttcaagagatgagaataccagaccacctgacctacctcctgagaaatctgtatgcaggtcaggaagcaacagttagaactggacatggatcaacaggttccaaattagaaaaggaatatgtcagggctgtatactgtcatcctgcctatttaacttatatgcagagtacatcatgagaaatgccaggctggatgaagcacaagctggaatcaagattgccaggagaaattcaataacttcagatacacagatgacaccacccttatggcagaaagtgaagaaggactaaagaacctcttgatgaaagtaaaa

SEQ ID NO: 58403 - DNA, 968 bp, Bovine  19866880934357
  misc_feature (1)..(1): n is a, c, g, or t
naaacctgctgtctctttgcccttctatcaccaaaaaggaggcccatgtgggacagcttgagtattggagacggtatctggttctttacatgcgctaatttgcaaattagcatcctttggatgaggcccaaacctagagactgccttggaagctgtatggaaagttattgaaataacacactctctaatctgggggcccaaatctctaatgatccctctgagttacaaaattctgtgactaatggttttgttgactgcagcctctagcaaaaggaggctgtctccacccagggatgctcctgtgacgttttagattcattatgtccctgatgaaactaccaaagatcttctttttaaaaagtagctcttagcgtgccactgtgctcttatcaacactgaatgcctgacccatggaaaccttgtgactctctgatgtgatattcctattttgggtgagtcacctcagattcaatgactaacagagggggacagtcccgataagtttcacttgtcaaatgaaaacagcaccttcaagaacacaaccagcttggcctccacagcacctagattttacacgtagaagtggtacctgttcctttaggggaaactttatgccctattactagctttgtacaaaagtaactacagttttgcactgctgaactttgccatttgatatggaatacattcttaaataaatgtggttatgttacatatcattttaatgcacatctctcctttttactttttttttttttttgctaatgacattgtgctgtgcttagttgctcagtcttgtctgactctttacaaccccacagactgcagccctccaggctcctctgtccgtggggattctccatgcaagaatactggagtgagttgccatgccctcctccacaggatctttccaacccagggatcgaacccaagtgtcccccactgcaggtagattctttactgtttta

SEQ ID NO: 58404 - DNA, 1892 bp, Bovine  19866880937270
  misc_feature (1)..(1): n is a, c, g, or t
nctcctcttgaattttctacacaatttaatgtacatttgcctacacgcaagcaagctttgctgcacaagaatagcacaattcagcagactcaaactgcagcctgctggctctgcatgtacttcacagtgccctggagtggctgttagagagggttttctccacttcctcattgcttcagcctcccctgcagccatgtgagaatggaacagtgttcaaggcgaaggctcattcctggagaacctgggtaggcatagaatataccagcaatggctgagaagaagaaagcgattaattatatatcctttctgccctatttgttttgactttcactgaagtgaaatttctgcagggaaaagtccattttgctttaaaccccaaactgtccattcccagtagtgggctggtgattggataggaaacattatactcagagctagtgtgtgaactgtagcctttctttacccctgttgtgtgtggtgtgtgggatgtgtgtgaaatggcaatgatgctcagcttgccttttggagtcattgtggtatctacatatttttaatgacttttgatgtagtgatttccagtaaggcttgtttgcaaaagtagaaagagagtccatttgtaaattcaaaggtctcaactgatattaatcttaatcaatcatattaagtttgtgcagcttaactttgcagaatagtagcccaaagattccttgtataatagcagaaccctgtcttcctggggtctctttaacaattcaagttcaaagatcttatttaatccaaaattttataaatgtccttttgcaatatgttttctttctgagacttactctgtatcagattcttaagtttatgcttgatgctaatgtgcatttgaccatatttcccgaaaatcttcctatagttatttttataccaccacccaccaccttcctttatgtatttcttgtacttctgtttttctgcttggattgctcaagagtctgttgtgacagcagcagtgagctgagaacttcacatactcaaggtcactgccaccagaagctctgcattatcgcatggtatctgtcatcactaggggaaaatatcgtacttcaacctgcctgcagcccagcccaactctgaaatgtctttctaatcatataggatctcagaaggtgtggtttgcctgtacaaccatcagataataacaacaaaagtcctcagggtctatgtgaatataccgccttctttaataaaaaataagacgactctctttggagagtctggcaaaagaggcagctaaactaccaggactttgcagcgctcaggaaattcacctttccctgaagatgacgtctttgcattctgatcacaaagaagttagtatttcctagtgcaactgaaacaaagtcttctgattcaaggtaggcaggtcacaaggggaaacgaagcacagagccccgggaacaggaagcagggttctccagagaggtgctcacacagctcagaataaggggactcactggggcataggctgaaaatactagggggttctatgtctgtttctcacgccatcctttgaaacttcatgtgtatgttctgtgatgtacagagaatgttagtgtaatgtacatgggctccccaagtgtctctggggtaaataatctgcctgccaatgtaggagatgcaggagacgtgggctggatccctgggtagggaagattcccctggagaaggaaatggtagctcattcctgtattcctgcctgggaaatcccaaggacagagaagcctggtggactacagtccacagggtggcagaagagctggacacgacttagtgactaaacaaccacagtgtactgtgtgcaacgtgtacatttgtacacatggagttgaaaatacatgttccag

SEQ ID NO: 58405 - DNA, 1287 bp, Bovine  19866881003702
  misc_feature (1)..(1): n is a, c, g, or t
nctttcagagaatcattagcgaaaggagataccccccaagtaaatagaaagcaggtggactggtacaaatggtgtcacaaaaatatttttcaagtcaattactgtagggtgtttttttttttttttttaaggtgctgggatatctaggctccacttatctctaaataataaaacttttcactcctagcaaccacttcctggaaaacaacctgacaaaaagatcaaaacagtgaaaagaggtcttttgcacatttgcccatgataagagaggtttaaagagcaaaatcctataatagcttcaatccactctctctcagatgaatagttagggtcaggaatacccttactgaaaaaaataacatgtattgatattaacttttccatgatcactgcattctggatttgactatcaactacccacagaattttatgacaaaacaataattgagattttattggctgtaaataggccccatgcattaactgcacaataataaaacaaattgcactaatttctttgcttctccctgtgctatgccaggcagtttatataacctcagagggccttagttcccttacttgtaacttgaagataataatattcactttgtggggctgttgaggaaattaagtgagtaatgcatgtgtattgttcagggacaggcccacacagaaattcaacagatgttagctccttgtcccttgcaattcatttctatccagaagctagagtgctctccttaagctataaatcagaacatgtgattctgcagcttaaaacccttaatgtcttcccattacactcaggataaaattttttaaaaaattgcaatcttcgctacaaggcctccaaggaagcaacagttagaactggacacagaacaacagactggtaccaaataggaaaaggagtatgtcaaggctgtatattgtcaccctgcttatttaacttatatgcagagtacatcatgagaaatgctgggctggaagaagcacaagctggaatcaagattgcccagagaaatatcaataatctcagatatgcagatgacaccacccttatggcagaaagtgaagaggaactaagaagcctcttgatgagagtgaaagaggagagtgaaaaagttggcttaaagctcaacattcagaaaaacattcagaaagctcaacatggcatctagtcccaacacttcatgggaaatagatggggaaacagtggaaacagtgtcagactttattttggggggctccaaaatcactgcagatggggatttcagtcatgaaatt

SEQ ID NO: 58406 - DNA, 748 bp, Bovine  19866881052741
  misc_feature (1)..(1): n is a, c, g, or t
ntgagtttgggtgaactccaggagttggtgatggacagggaggcctggcgtgctgtggtccatggagtcgaaagagtcagacacgactaagcgactaaactgaactgaacaaaatggcagatcttgtcttcttttctgggtacaagaagctaacttttggcagcttggtgagaacaagagtgggtttacccatggctttatactcccttaagacagcaggcagcagttccctgtggccacctatgagtcagtcctctgtctatactgggtgaaatttcctgctctcaccactaatgtttccctctccttttcaaaccaaaggatactctaaaataccagggtgttcccactaccacaaatttcaatattatttcattgtgggaacaaatggtaacagagaccatttgaaatccattcatgatgatatattaatcttcactggaaatgaactgagtgtttactatttattctccatggatactgcaagaactagggacaggaagacatttctgtttgaaatttgaaacttcaaaatgtaaaatccaagtgattttctaatacttgcaatctaagtcatccttaaatattttcctagagtcctcaagagtaacataggttcagtcatctcagaatattctataataaagacagttcatttattctcattttaaaaataatgtgctattcaattaataactagagctaatttctcttataaaagtacaagtgctgtaaagtgtgttagtaa

SEQ ID NO: 58407 - DNA, 1171 bp, Bovine  19866881149723
  misc_feature (1)..(1): n is a, c, g, or t
nctcagccagaacaactcaaaccacagtggtttcactgtctgctgggttgttcctaccaccacatcgatgcaaggcatgaataaatgccacagtaacttcaaaattgaaccctgatcaccaggaaggtctatattaggatttaaatcatgatttaaaaaatcttggttgtggtataactctgactcattcactgtttggatgtcttagatacctaacggatatctcagtaccattcaaaacaaagctgctgatttccccatcaacccattcttttctaaaacctattgtgtcctgccaaaaccctactcctgtctctttcctatcttccccagcttagtaaacagtatctccaagtgacgcaagtcacaaatcacagtcatcctagattctttgctgcttctcacttccacatcagatccttcagtgtaagccattttggtaccatgtgcagaacataatggaatctgcccacgtatttccacctccactgactacgcctcaacctcacatacttcccctctgctccttcagtctgttgcaagagcccactagccatctgctgcttcctttcctatcctggcacctcagagatgattcctgaccctgatctaaagaaacaacccaaaactccactactgtccacattgtatcatgctttattatcttcacagcaactaagcaactattacaacctgaaaaggtttttcaaacctagaatgacttctactataatagggtcctttctcaaagtctggatctgtaacatcttgatgcttatttttccccacttcttgggggcaataaaatcagagagctagtcaccactgccttgaaacagggtctcaataaaacttgttggatgactgaatcaatgtttattgctttattatcctttatgttcagttaggaaaaaagtacctggctgattctctgggcatgatccaagatctttctttcctccttcagacagttacagatgatcatagacatctgtattgggtcttcctgaaaattatcctagacatgggttgttagaataaaagtaaattaatcttcagaatgtttaaaccattgtgtaatatacacggaaatgaagtttgttcatcctgaacttactaaatcctatataagctatttttggtaacatcaaaatattcttttcacatatta

SEQ ID NO: 58408 - DNA, 1624 bp, Bovine  19866881150013
  misc_feature (1)..(1): n is a, c, g, or t
naacaacatggattcccctgggggagtcttgggaagggtgcaggtggtgagcttgtatgcatcaaacacaaagtgtcctcggtgctctccatctgttcccgtgtggattcttctgatagtttatggaacccttgagttagcaagtcattctgaaatttgttcctgtagtcagtgttgctctttcagggaagaaacaaatcagtttcttttggctgaattaaatatacgggctaattttgttgagatgtcagagtgacccaaccaggcctggagatggtagtcagggaaagtcaatccatttgtgtgaagataggaagtatctctgtgccattttatcagggttccagtttcaccagaatgagagtgtggaggagggtatcactatttgctccccccgagaacctagatgctaaaaaaaaaaaaaaaaaaaactggtacgaaacaaaactctgctggctggactaaatggatgttggcatcaccttttcaattggtttactttattgtggtattttgagctgagaaagttgtgttttcagagtttttcccttttacccactgcctataacagcatttgttttgccctcttccgcccttgccctttggattgattataaagttgggaaagaaatgtaaaaatcagaacccatactctcgcttgaaactcatatttgaaaccatggtgaagcaggtttaattacagagaaagattggctgcttaattgctgttacctgccacgaagctgttgcctttctgtagctgtttccataaatagactttatatacaggaatctaccctggggcaaagagttcccattcggcctctttacttaattcaaattgctaggttgaggtggttatttttgaaactcttctcaggttgactttccccttaatccctaagccttcttccctcatctgccaaattacatgtaatgtatcgctgctagattgcttttggcatttctcaagtctgagaacttgaaatttgattgaaatgttaatttattgcgacagtttgggcactcacgttcctattcctgaacaagtctctgaaaggacttagtgtgggcccagccctgtctctggcttctgtgcatctctagagcatggcatgtctccttcctccacctggtttattttgaaagaatctggcctgattcaaggtatgtgaaaccattcttggtgtgactgttgttgggttttagcaatacctggggctgtttattccaagtatagttggcatgatatttaaaaagattaacaaataagttaactttggttttcttcttttgattattaaatagttgcttattggttgcttttgtttgtcggagagccttgctgctggtccttagtctctcttttttggcttttcagtacacacttaaaaattttttttttaatgttgttgttcagtcacttggtcatgtctggctgtttgcaacccatggactgcagcacgccaggcttccctgtccttcaccatttcctggagttgctcaaacttacgtctatcgagtttgtgacgccatccagccacctcatcctccgtcgtccctttctcctccggcttcaatctttccagcatcagggtcttttccgggagtcagctcttcgtat

SEQ ID NO: 58409 - DNA, 650 bp, Bovine  19866881156203
  misc_feature (1)..(1): n is a, c, g, or t
nactcaggttcaaatgccactctgtctcctacggctctaaggggctagacaaggctcttggccagcctgtgagggagatctgcctgcagcacctgtcaccctgtgggtcctcaagaagtatttgaccatagagcttgccaggcagtttccacttcctcccgtgtggctgcacagggatctctcccaaactgagccctcagaggacaagtaaacacgtagacgggttaagagtcccaaagccagtgtcttgaaacaagtcttttaagtcctctaagctgaactgcttcttctgaaagatgggactcataacagtacctctctaagagagttattttgaggatgaaataagataacatacatgaaaacactgtgcaaacacacctccttttttactacaatgaaaattatcatttctttgatcatcagcttatacttgccttataccaaaggtttatataaggttggtttccattaatacatggagcactgtttcagaaacaaagaaatgttctctctttaattgcaccagaagtaaaacaaaaattacattgctccaaagtgcttaggattttataacatggagaatacattttctaaaccctgctgaagttataataaaattatcaaagcttaggaagttattaataatt

SEQ ID NO: 58410 - DNA, 1467 bp, Bovine  19866881217212
  misc_feature (1)..(1): n is a, c, g, or t
nttaaggtgaatttcagttttacagtttttctactcaacataaattctactgaggcttacaattctattctaacgcaataatactctgtttgattttagcaacatttctcctattctggacaactgataaagcaacaattacacagtgaatcagtgatgttcttgctcagaaaacagaatctgtaaatggaggagagcttttttccctaagtcattaagtggaaaaacaacaaaaaaaaaaaaaattaggaaaaaagtctttattcaatacttctaatacaaccaattgaaaaacatcctccccgaaagtaagaaaaaacccaccaacactatactacattaaaaaaaaaagagaatcaaatgaagcctttgagtatttctatagtttctcttcacagaagtctcagaattaactaaaattataaagcattttaattatatcttcataaagcatgacttttaaagttaaaattccatttgttatacttaaaatgctggagttgcttttattaaaaaaaaccaataaaatcagcttaaaataaatttattgtacaatacaaaaagtaggcatactggaaaataaaaggtacattaatatacaaagcaaataaaagaaagctaaataacacaaatggattaatccaaacactaagataaaatgcacaacatttatgctaaaaataaaatatttcagaaaggatatgcatttcaaatgaaatgttaatgatggaaaaaaaaagaaaaacaaatatgctaacttcaaaatgcttgaatatcaagaatcagtaatggcataaaacattaaattcaacaatactgggtacttttcaataactttatttgaaaaggtatttaaaatactgaaagaatcaaaataatgtttttaaatctggcaaagattttcctctttttttttttttaaagtaaagtttgaggacctattcacagtatctttcttcttccatttgtaccttcctacaaaaacttctggatgctcatctttaacaggatgagtagcttagaaaacccttctccactggtgtgtatttaagccttatcaacatagtaaatgacacaaattaacatcattttgaaatctgtacaaacgtggatacaatatgaaacatgaaattttcattttataaagtaaaacccacctccaaatgaaacagtaaaatataacaattagagcgtgggagaggggagcctttttttgggaaactaccaattaaagacattcagtccccaaaccacaaatagctctgtgaattaatacgaatcactgttcaaaggtatagcagagttaaggtataaatgtatggagagaacagacacaccactctcatgtaaatggccaaaccagaaacatccagttaggatatgcatctgcacatcagaggaacaattagccctaaaatccttggctaatatcctctaaaacttactggataactattttttaaatat

SEQ ID NO: 58411 - DNA, 1342 bp, Bovine  19866881231612
  misc_feature (1)..(1): n is a, c, g, or t
ntaggcatatttttgttggaaagcacattcactttaccatagctttgaatataaataggggaaaagttcttgtgtctgggtattatggacaaattaaggtagatatccaggaaatgcagaagttggaatccagtctgtctgctcatctccaaggcagtttggtaacagctgtctttacttccttgcacaaattggacttggatccgaaaaagaaaagggatctggtaatattaaatgaaaagcagttgggagctggcacagaaacattataaaaagggaaggaaatacacccaccgatttgttccttccactagaaagaaaccccacagatgaggataccatgtggtgtcttgaactgcccccaaaccacagcagacacacagagtttgtttgaaaccccttatttcacaagtacacatgcagatatgtgtacacgcagacacaccattcatctctctttctaaagatgccatttctaatgggcacttgcatgtacaggtctgctgtccgcatcctggattgctcagaagtcatcgttagtcacatggttgtcaacttacctgccaaacagacccacctctggatacttgttctttggggcaaccgtttcaggatttcgttctacagttgacccttgaacaacatgggtgtaaacttttcagtccacttacatgcagttttttttccaatagtaaatactgtagaacaacagaatccacagttggttgaatccctgggtgctaaaaccacagatatggaggagcaatatacatggagagctaactataaggtacgtgaattttactgtgtagagggtcatgtgatgctaatccctgcattgttcaagggccagttatattttctgctaagacatgctacattctaggaatgggagctactttatattgggtgcaaagatttaaattcttagttttgccatcaagtcctattttgatgtgaccaagttacttatcattcaataattatatcactgttcttttcatgaaggtaataaaatgtctttaaaccaaaatcagatccctgaatgggccattttgctttatcttagacttcacctcaacaagtcttgccaaatgtacaccgttagacaaaaatgccatttgattgcttggtagaaacctgatactgctcttcaaatgaaggtacattgagagtgtctcacaagttgccattctgacttagtgtggatgctgaggattaaaagtgttagtgaagggaaaacactttcaactcttgcctgaaacgagaatctttcctttcacagtggagtttcaagagtagcaatgaaacaatattgagatcttctctgtcatgtaattgg

SEQ ID NO: 58412 - DNA, 756 bp, Bovine  19866881271587
  misc_feature (1)..(1): n is a, c, g, or t
ntaattgtaaccctaccataaagctctctagttctaaaggaaacatattataagcaatttgaaatatataattaattagcaattaactagaaaagctgttagacaactaatactctgttgcatatctaaagatatagataatactctattggatagatcttgagttataaattaaggcttgtgttaaatttcttttctttcttgagggtaaggggaaactagaccacaaaagtatgtttaaatattcaaatcattatattgtggaagcaaagaatccagataccttcctgacattgtacagtgcaaaatttagtttgaaatatcctgaactctttggatatcccgactctgccattttctaatcatgtgaccttggtaagtcacttcgataaacttcagtttctctctctgtgaaacagagtacctactcgtagtacctacttctagggctctttctaagcgtaaaataagaaaagcagtcaactgcatagcataatagtagaattttaggatgttggattgtatatatccaataacttaaatactattagaattattatattacaagcattttacagttcatagcgttagctgttctattcagaaccattcattaaaattgagagtcagggtaagatctgtcttcctccacagtgtcaaaggcaatggcctcccttcacagatgccccatgtcacacttaactcattcttaaagactaacgtctgacatctatagtcagaaatgactatggctag

SEQ ID NO: 58413 - DNA, 649 bp, Bovine  19866881308187
  misc_feature (1)..(1): n is a, c, g, or t
ntatccgttaacccataccggtcattgcccatttattcaccagagaaagtggaagattacaggaacagaaatttctatgaactgagccctcatatgtaagtatggtattaaagtatcaagtgtctctttcactccagggatgttgagttgacagatgtgtccagctgtttcctttgagtctcaggaaaatgttattagtcatttttaaaaatcagatgaaggaacatagaagctaattgttacagcttattttaaatttaaaaaaaagaagacttcatttgtcctcaggctctttaagtcctgaagtatttggtttcagtatgtaaagtattttctgttaaaaattctgtgtaagtagcagctgctgctaattatttttgcaaataaaacaggaatgtgtattgtttgttattataaacagcccaagcagtgtttccatgcctttgttgggtcaagaaagattccaggtgttggattgtgtaatgggttttgagaaaaagaaatacataataccttcagtttataatcttcatggacattgttcaccagatgtgtgcattaggccaatgatttcaccttccttgaagttagtcacttgtttgatttttctgagaaggtcacttgttgtaaataattcccgtaagtaata

SEQ ID NO: 58414 - DNA, 1686 bp, Bovine  19866881315901
  misc_feature (1)..(1): n is a, c, g, or t
ncttagactttttaatgtgcttattataatgtgtagtaaatatggcaataagatgcctggggacagattttacagagcacagaaatagcttcttgtctagttgtgttttcaagcttggtttcatccgctaatgattgggtgatgaaattaactagggtttcctacatattaaaaaaaatccaatctacttattatcaattttactgatgagaataactgcattctaggtcaatgatgaaatgctcaactaacagagaatctatgcttttccttcaatttttattttctgtcagaaattttgctactaatttataatacagttttggagagaaaaatgtaattgataggtagaactttttgaaaattcaagtgaattctaaaagagaaatatgggacatactgtaactgtcttactaaagactctgattaaaatgctgatatataacatgtatttttatacatggtttattcattcacaaatatacatacagtcaacaatcattgagtactttctctgtgaccagatgtgctctggatgctggcaatacaaaggtgagtgagactaccctaatgagtttgtaataggacatcggatctggtaggtttatccgttctgttgtttttaggatacattcattaagatgtgacctcaagaatagatttcgtgaagttcccttaaattgtcccagataactgtcagccttttgaaagatgagagatacgttgcagtttggtttctctcagaagcagacacagatggcatcaaaagggcagagtcttatcgggtaataacacctgtgaaaggaaaggggaggaaggtagcttgtgtgggggagacttcagtctgcaatgcagatctgaccaagcctctctagctcaaccaggagctctggagcacagactgcccattggaggagccctgcattgggtagaaatggttatgctaaaggttccagaactgtccactcagattctccaagatgccatggacgtacaggggcactgcaggatatttttaaatttccagggaaacacagtaacatctgtcagataccctacaaacgattactctttccttgtttggatctgactatttaacaaaaggaactgggaggcaatttctttcagtttaggcagtgctatgaaaaaaatgactgagtctctgggtgccatgaactgataaggcttgaggacttctgggctaggctcttgtaccttgggacctcaagaaggctgtgagcacggctatcactaccctgctcagtcactgactgacaccacctgaaaagagtatgtctcagtctgagggcttggtggtccctagtgaagctggaggctgttccactaaccacagccaagcccattttctacgaatgacatgctccacaaatgctgggaaaatgaataaaaacctatttgtatgaccaggggccccatgctacattgaaggaaccatccagaaatgttccatacatagattagggttgtaggagtagcttcccaggggaagtggagatcttagaaaaaatcacgcagttgctccaggttggaggcaatattgtggttcagtttagctaaggttgaaccttgccatgggaggtagcccgacaccttttccaccagcccagccgttcagttccttgatataagcagacatggttgtcaaaagaattattagagagctgc

SEQ ID NO: 58415 - DNA, 1237 bp, Bovine  19866881407662
  misc_feature (1)..(1): n is a, c, g, or t
ntattaagagttcagttcagttcagtcactcagtcgtgtctgactgtttgtgaccccatggactgcagcacgccaggcctctctgtccatcaccaactcccggagtttacccaaactcgtgtccattgagttggtgatgccatccaatcatctcatcctctgtcgtccccttctcctcctgccttcaatctttcccagcatcagggttttttcaaatgagtcagctctttgcatcaggtggccaaagtattggagtttcagcttcagaatcagtccttccaatgaacactcaggactgatttcctttaggatggactggttggatctccttgcagtccaagggactctcaagagtcttaggaatataaaaaaagaggtgtccctgtagagtgattttgggttatgcagcacccttttgaattgctcaaactgcttaatagcattgactttagcaagtgtcacaacatccttttgggtagcaagcattgcgctaatagtgctgtacaactgcaggtcagacaaccaagggacacaagggttatcacacgtctagaagacagttatgcatgaagttcagatggcccacctaacaacgcttcatccacacctgacccaagtggcatcttcttggacttatcatctctctaaccgatgacggttctgagttcctgttactctggattttccgagtgtatctgccatttcctaaacagatggtcagtatcacactgtatcactgtttttgatggtaatagaaatcacatagctaacacttcctgaagaaactggattagatattgaaaattggaccctgggcttttttaaaatttgatttcctgtttcatttccagaaagtcacaggaatattgacagtctatcaagggtattttgaaatagattaaaatctacatttgttacctgacatatactctgaacattttagaaggacctatgggacaagacatgcttctttttgatagcaaaaacagagaggccaagagtacagcatggcttatacattttggggctcagtttcctgtgtaaaataaaagttaggacaaactcacctcttaggtcccatgcagctgtttgatttggtcattgtgatggtgattttctctggtcagctcaaaacctgggcaggaatacctatgtagggatagcattcagcttatttaccagcatattccccatgcttagcacactgcctggcacacagcacgtgcttaaaaatatc

SEQ ID NO: 58416 - DNA, 1437 bp, Bovine  19866881411552
  misc_feature (1)..(1): n is a, c, g, or t
naaaaatttagaaattaaatgctaagttctcctttcatattgcagactttccagcactactacattttccttatcaaatatcttttctcagaacctgccagaatcagacaaccttcttagtttatttgtacaaagttatgacaagagtggaacaaaaatgttacagttcacatgagttcatttaacacaggcatgcttggcatatcaaaatcatacattttcccaaaaaacctagaagcagttatagattctatcaattttacaagcctaaaacatgacattcctctcttcagtcctatcattctatttattttgagcctatttaaaagctgaattgtctgacttttgtgtcttccaaataccctgattctggtcaagtagcaattatgagaattacataagcatattactttgtatttatatagtgcatgactttgaaaaagtaaatattaaaaaaattataattgttttcaaacatctctgatgggctgtactatatttgtaaaatattatttgtagatttgtaaaatatttgtaaatatatttttacatttgtaaaatattgtttgtaaaatattattatagataaactggtatttattactaccactgaggttaaaggccttggctcaaggccatatagcacatgaattagtaatgtagctgggatacattcctaactgtgtacaagtagaccatgataatgtgaatccttacacacagactgttatccaaaggatacaagtcaactaagagactaatcagcaacccagttttaaccccaaaagattctttgctaaatactggaaagaagggaggaaacatggaagagtaggagcagagacgggaaaggagatgatgagggagggagggaagactgatatcactagcatgacactttactccaagtattttatttccaattctattaccaaccacaaaaactgtggtttagcctttttttttttttttttaactctgtcttcatacagagaacaaattcacccttctggaaaggctttaatggaaaaagcaggtaactgaaaatccatccttctgttgctaccacgtttggtttgatgtaagctgctctcttgtttctagctcactacagtatctgttgctgtggaacagatactcttctccatctgttaaataaaccatcatcactccacctccaattttgttttaaaagtttacttccaacttggccttttatagcctctaaatgaaaataaattttcagccttctttcataaatatttttaaggtcaggttaaaaaatacaagcctgctatatagtgtagctgaggaaaaactttaagtttccagcaaatgtaaattaatcacttgctgacgagggtagaaatataaaccattacaacatgtatgtgatcaaagatattctctttcccttactgctgagtttatttaaca

SEQ ID NO: 58417 - DNA, 2120 bp, Bovine  19866881464644
  misc_feature (1)..(1): n is a, c, g, or t
ntgcaggagatgggggttttatccctgggtcggaagatcccatggagaaagaaatggcaacccactccagtattcttacagaggacagaggagcctagagggctagagtccatgaggttgcaaaagagtcgaacatgacttagcaactaaacaacaacaaaatctcttcagaggagcaaacttgtagatacctaccactgtttctttgggacatctggagaagaaatctctaggacaagaagggatggaaagcttgatttaaattttaagagagtaggactcagctgggtcctgtgaggggagaaaacaaagtttgtaaaacagaatttcttggaaaaggtaaagattgtgttttttaaaaactatggttgatttacaatattaattttaagagtgcagaaaagtgattgattcagttatacgtacatattcttttccagattcttctctgtataggtcattataaggaattgaatatagttccttgtgctatacagtaagttcttgttgtttatccattttgtatagagtagtgtgtatttgttaatcctacattcctaatttactcctccccccttcccctttggaagttacaaatttgttttctttgtccataggtctgttttataaataacttcgcttgtattattttttagattccatatgtaagtgatattatataatatttgactttgtcttacttcactcagtatgatattctctagatccatcccatgttgctgcaaatggcaatatttcattttttaaattgctatgattgcattgtatatatatatcatatatatgttttatatatatgatatatatatatattatactacatcttaagcctgttgtctgttgatggacacttatgttgctttcatatcttgactgttgtacacagtgctactatgaacagaaataataaatataggagagggtgtggaaaaatgggaacccttgtacactgttggtgggattgtaaattggtgcaaccactatggagaacagtatggagatttctttaaaaaataaaaatagagctgccttgtgatccaacattcccactcctgggcttatattcagaaaagacaaaaactctaacttgaaaagatgcatgcactctactgttcatagcttctttgtttacagtagtcactttttcttttctttcctttgtaagcatatttagtgtcatagaatggaaaatagttgcagtttcttacattctttatcacatattgatatttaatctgtataagagtattttaggcattattgacttttgattatattaaattcaggtctgttctttgtgaatgcaacaaattatagtctttgatcagatgaaactatgccatgttctgtttttaggtacatcatgggctttgttagcaaagaaaaggaacgactcttactaaaggataaaatgcctgggacctttttgttaagattcagtgaaagccaccttggaggaataactttcacctgggtggaccattctgaaaacggtacatgctcactattatttattcatgtgaaattagcattgagtttggttattggtctttccatcttcagaagtgtgtggcctgttgttctatttctcatgtgttcagtgggtttgagtattaattgttacagttgctccagaagaacgtagcatgactttctcacagcctatgtgggtgtcctctatcatgtggccatctgtactctacttaggcagagaaaggctagccttgttttataaccagtgacatgaagagaatgtaggctggaaaaatggccacaaagaatgcctgcaggatcctgaatattccctctgttttctctttttccaggagaagtgagattccattctgtggaaccctacaacaaaggcccggctgtccgctctgccgtttgctgacatccttcgagactacaaggttattatggctgaaaacattcccgaaaaccctctgaagtacctctatcctgatattcccaaagacaaagccttcggtaaacactacagctcccagccatgcgaaggttaggttctttccatttgctttttcttcttaagatttggaaaataatctcagattgcagtaaagtaaataagttcctct

SEQ ID NO: 58418 - DNA, 1803 bp, Bovine  19866881472183
  misc_feature (1)..(1): n is a, c, g, or t
nttggcattagtggttggagcatagacttggattactgtgatgttgaatggtttgccttggaaacgaacagaggtcattcttacattttttagactgcaccaaatacttcatttcagattcttttgttgaaaatgagggctgctctaatctgtgccagctacatatgttcatgggatgatgggtggatatggattataaatgtcattcgtatattcatatacgtttgtacaccagatttccaaatctagttgcttcccctcatctccagggaagacaccactcctgacattttgatagcagttctatcatgggagtttgtattatatataagttgatgataaaggtaaaaatattaggtcttgatagttttcttccagtgatacaaatcttttttaaaaaaaacttactgttttgtttttggctgtgcccaggcttgccaggtctcagatccccaaccgtggattggacctgggcccctggcagtggaagcgctgagctctcactgccaggaattcccactgtcatcatcgtttgctaggaagggcttccctggtgactgagacggtaaagaatctgcctgcaacgtgggagacccgggttcgattcctgtgttgggaagatcccctggagaattaactggcagtccattattcttgcctggagaatcccatggacagaggaaccttcaaagacaagcaatcaatgcttttctgtagaaaggaaggaaagttagacctacataagaataagcagcatctcaggcttgacaagcttttctaagaagtcttttttcccttctctgcagagaacccctaacatgggacatgagtttggtgaaatatgtgcccatgcaaatctttttctctattttctataatcaccatctgaaatcagtaagtgaaggacaccacagtctaatatatcttactattcatcttcatactttaaaataaacatgatttattggtgagtatacttgagaagttttctatttaaattgcatattatgtatgataccaatttttaaaaactgtgtgtgtgtgcgcatacatagggaaaaaaagtctatatgtgtgtttaccaagatgttgattgttttctttcagtagtatgtatgacttctctttatactcatctgtattttttacaaagattattgatttctttaatatttagaaaattgctaattaaacacaaaatgtttatgtatagccttttcaaatggccttccttgtctctctgattcactggagtttgtacctattcattcaataagtaatgaatacctgtcgtgttcaaggtcctgtgctaatggcttagatagttttgctgttttacaaaacccaagcccgtcagctcacagatattcagagtgcctgcgatgtgttcatagctgcccggtaggagctctgtatccaataatgaacaggagagcgttctttctccaggagcttatatgctataaccatgtaaatggataataagtcatagtgtgcaagacatatgttatgaagaacatttgggggtgatatcacagatagtgactaggagggtggggctgctttagctgagggtttgtggaaggcctcacctgatggccttcaacccaaatgtgactgagaaggtcacgtttgggttgaagctaaatattaggagaggctttgtgaagatatgaccttgagcagaaggaacagcagaagggaaagacccaagatgagagcaacttggtttgttcggggaaaacaacaaaagttggcagagtaccgagaaggaagaaatgtaagctgaagccagtagcgcag

SEQ ID NO: 58419 - DNA, 977 bp, Bovine  19866881501090
  misc_feature (1)..(1): n is a, c, g, or t
nggaaaggagggaggacacgaatggggatcccaaggggagtagctctgttgttttgtcttccccagtggaaatctgaataatatgaggtgggaagcctagtgcagagaagaatttggtggtttggggatctggagaggcaagatcttagatctactctctgatgctagaggaggaccctgtgacttaattctaacaggatatgacatattcaggactttgtggtcaccttgatgggttgacatatattctttctgcatcgctcttcactcaagtcgttaattttgtttgactgtatacctctactctggagcggtgctctttgaaaaggtgaagttcattttatttttattttttacgattgatggtgtggaggggaaggatgagacaggaagcagagagataagctgataaaaatgacaaaatacaactttatgtttaaactggaagaacaaaaggctgtttatgagttgtgatattatttggtattgaagagtaatgcagatgtaattaaagtcttccaacccaaagttttatccagagagataaagactttcttttcagagtcaggcagcatttatctcatacaagcaaccctggtgcatgcagctcatttatatgacagctattatgaccatgatatctagagccagggccagaaacacggtcccaaatagaatctttcaatacctgtggcgtgaaggagtgagtatgcatacagagagggtaataaaatcctacatttgcatagtgtttttctcttctttcaaagcagttttacatctattagaacacaaaatggtaatgttagttttttttttttctaatgatcatttggccacaattctctggattatgttgttgaactaagctgaactaagaatcttcaggttgaaaggatatttggtggtctcttggactgggagatgaactgtgagacctaaaggtctttcttaaaatgcaaatacccctggaagag

SEQ ID NO: 58420 - DNA, 1389 bp, Bovine  19866881613694
  misc_feature (1)..(1): n is a, c, g, or t
nttttttttttttaatgtgtcttctttcctctatgcattctgctagagcatttcagtggcttaatcaaaaattggagtgaatattaaataaaggaaaccatttgcaaagctacctcacactttgggttaaggagcctgagctccttaagaaatagtttagcatttcatatctcattaaacagaacacacagtactttagatatttttctttcactctaatgattttgatagcagctgttgttaattggggaagactatatttgtcaaagcagctgatcatcttatattttttaaaaaacagaatgtaacaggaatttggaaatctgcccagtatgctttttgagaaatgatggtgatggttgacaactctttttattgtgcctcttcctgaaacctggagagggcaatggcaccccactccagtactcttgcctggaaaatcccatggacagaagagcctggccagtccatggggtcgggaagagtcggacacgactgagggacttcgctttcaattttcaccttcaggcattggagaaggaaatggcaacccactccagtgttcttgcctggagaatcccagggatgggggagcctggtgggctgccgtctgtggggtcgcacagagtcagacacgactgatgcgacttagcagcagcagcagcagcttcctgaaactccctcacaggggcataacctgcccatttacagggtaaatctaaagacagattgttgtctaatactataatgacacagaaatgtactctccctgaactacactgaaggagaatcaaataagggagccataaattattaatagctgctcttattaacctgctcttcaagaatgcaatactggttgcttttaagggagtctggaaattctttcctctgtgttaagagcaaaagaaaaaaaataattttaaaggaagcaaacaaggagagaggcaagggaagaaaaatgagggcaggaatacttcagcttcctaccattaagcagttctgtatctttgagatgtcaacattttgaaaagaaagcttcttggaatatttattttttccccccaagatttagccaagggcttttattggcagtatatgctcagttttcccccatatatttaaaaaataattatttacatatttcaacactttattttatccctctgagtggctctgtgttgggacatctaaaataactattttagcatttgttgttcttctctccatgaaggcaatttccaattctctttttgcctttgcctatattcttttgagggcccctgatggctcagacgttaaagaactgggttcaatccctgggtcaggaagatcccctagagaagggaatggctacccacttcagtattcttgccaggaaaactccat

SEQ ID NO: 58421 - DNA, 999 bp, Bovine  19866881722630
  misc_feature (1)..(1): n is a, c, g, or t
ntatgtgtatattaaatgtttgtatataaacatttacatttattttgcttgtatggatacatgaatatgtaagatatgaaggggatataattgtaaatgaaattgtttcctttttaaattactatcactggccgatttttatatattaatcttcttttcagcagtttcaccatctgatatttttaaattgttgtagatgtgaatgtctactgatgcttaatatgagagaattggttagcaaaagtagtcacagggactctgtgatttgacctcctttgggcatgtccttgtgtaattgttgtgtattgttggcatacaataatgaattcacaagaacttgtggatagatgtagaaaatacaagtggcgttataattcagctacgctttgacactattattacctgtgacgggatgcagaggagtctactgaaggctgctatagtagggaacaagggcgaggcgtgttggcagcctccggctcacgctttaatccagctttcatatagtttttaaatatggcagatgaagcacagtcaagggcctgtatttttattaaagcaaaagtatgttacagagatgactttaataaaccctatcgatctcactttaaaaattcctaacctgcttttaaaaaagtccaaaatgaattatttcacacttgacttttcctaaggggcgctttgcttctttgaataaataggcacaggtggtatttaagtaatgagaccattgtgggtttcccaaaagaaggaaacaatcaaaatgagtgccagtaggtggagatgtgggggtggagctttggaaaatgtggcctgtgtttttgaaacttaacttagaccacttattatttgtaagtcaagtgtgtgaatctggtccgataatatattttaggatagaagtttatgcatcagagcactctcttcaaactagtaaccatccaagagtttaatagaaattagaaatcctgagggaattaaagaagctaccatcaagtgtac

SEQ ID NO: 58422 - DNA, 1155 bp, Bovine  19866881824727
  misc_feature (1)..(1): n is a, c, g, or t
ntcagatctatttacaagtcagtggaaaaccagggaagacaggctagaatgcttgcttcttgtgctgtttattattttatcatattcattgaaaggatatcctgtgtaatggtagaagttagatataaaaaatataggcaatgtggagctgtacacagaactcaggattctgtgtagaatgaactttgtatcgttgtgtcgttgttttcgatagaatctttttaagagtgggagtggattagaaggagaaataagtgtggttcaactggaattcttctagtatgaatagcattatgcaccttaatgttcttctacacctcttttttgggggggatttaatgtctttcctgtttgattttaagctgttaaaagacagattctcttcatcttttcccagaaccctcacagtgagtatgatgcctctcagcttggaggtgcctgggaacctcacccttgtggatgttcttgctctaacctccgcgtactcttccatattagttgttaggggccctcattcaagatagaagaaaccaaccacacttcattaatttgcgagataaggcccttcagcagcaaagactgataaagtggagtcagcctctgtgcttttaactgcttgccaagtccaagcaggatgctggccctgtgaagctttcccctgtggcctctcatgctcaggacaccatttgcagaaggaagtcctcaacagcacaagggattactgctaagttccaaagagcagcttctagggcctgaaggcagatgtttcctcctcaaggccttcatatcttaagtccagtccttttccttcctgacataatttagtctttttaaacctcttacctacttcctaatgtctgtcttcagtacctggctgttgcaattcacctttgtaaatgattcaccccttggctcagtccaccttcacatccctctccaggagaaggaaggtgtttgttctgttgagggacacttagccagctgaccctgggctcagtagaactgaggaactccatcataattttgacagtggttgggcccatggggatgggaaaatgtgagcatgcctcagagcttcttccatcgcaagaggattgtaaataaaattcctaaaaatcttgaacaactaccctttaagtgctctttgctgtttgt

SEQ ID NO: 58423 - DNA, 1290 bp, Bovine  19866880282394
  misc_feature (1)..(1): n is a, c, g, or t
nactattctgacatgccagttaacccagaatgttaaaggaatccacatgggagctggggttccaaacatctctgattttttttggtgggggaggagaaggactcctttatgggttcattatcaactatagtataaaatccaaactcatcttgtcacttaagacctctcataatccagcccaactttctataaaattgtttttatcaaaattatatttgttcttattttaaaaggtcaaatattactattactatgaagtttctaacaaaagtcatttcctgttctatccgttcctacctgtgagaactacttagctgtttcttttagtattttccactgctgctgctgctgctaagtcgcttcagtcgtgtgcgaccccatagacggcagcccaccaggctcccccgtccctgggattctccaggcaagaacactggagtgggttgccatttccttctccaatgcatgaaagggaaaagtgaaagtaaagttgctcagtcgtgtccgactcttcgagaccccatggactgcagcctaccaggctcctccgtccatgggattttccaggcaagagtactggagtggggtgccattgccttctccattttccactacacttattaatgtactcttgtactagtgatttttgaattttcagctttaggcgttatccgttgctgttctctaggaaatctgcgtttagttttttcatccctgctctttcccttgtttctgttgccacatattattaccattgccaggtactcagtgtttagatggttatgatcatataaagttgcttaaagctgaggcacatagtattctacaattatgtttactttcttgaccaatttttaaatttttttccctggaattagcaactggcctgtgttatcatttgtttaccattccacgtgcctatctccatgctctcctctgggactctagggcaacactcagtatgctggaacatatcagataatcttttggttcattatttcctttggagacatcccacccctccccaggagttttctgttttccagctgtagctttttctaaagctaaaaccctgagtcttccctttaccatcagactggggaattcctttgcctctcttctgtattggctgccctgtttcctggatctcatgcactcatttttcttggtttattgcatctcttcattggaatatatcgtagagtagcttcctgagaaaggatccttgagagattaatgtctttgagaatttgcttatttgaaaatgtctttattctcctttccatttaa

SEQ ID NO: 58424 - DNA, 1463 bp, Bovine  19866880437788
  misc_feature (1)..(1): n is a, c, g, or t
nttacacacagttttccacagctgaataagcactagacacaatagtgtgaagaaaggtgccagaaaataataattttcaaaggtgctaaagaattcatatgattctgataaaaatctttttgtcagctgtctgaaggtggtcaaggaatcttactgttatcatctgaaaagccccagtataaaactaacttcaggactgttcttctcaagagctcagagtatctaactgctcctaacagccctcaaaagaatactgaaggagagtaggggaaatacaggctggggataaaattctcatttgaaagtcagaggcaatgagacacagttacagtaaagtctaactaagaagaaaagaccttgcacatgcatacacacgtaaacacacatattctctcacacgcatacataaaaccaaaaacacagcaagaaagacagtcacaacagctgtctccaggaccagaaccaaactggcctggaccaatcaaaattggtaaacgcaggctcctggaaccatgacagatggagtctggccagaaaacccaaagacagaggacatcccagggaccaactgagcccagccgctggttcagtctgaccttgacctgggcagcctgctccatctgttgaagacggtcccgcaaggcattcccctgagctgtagtctcttctacaaggtcctggaaggacctctgcacttcattcagaagcctcagcatctgccggttctgctgaggagacaagtcctgggcgtgctcggagatcaagaactgaatatcaaaggcaagtgcatccagttgggatttcctctcagccatgggctgtttcaagtcctaagggagatgaggaaaggaagaaaagaggaaagaaacttccaattctctacagaagcagaaactggtggttctaatcaaagaatcaacataatcaaacagaggttaatttcctgtatttttaaaagcaacactgattatttctagggccaacccacaatggaagtctctctcacttctggcctctccagagtcctcacatattatagctaggtttcctttaactataattaaaggaacaataaattaaatcaaccactgatttctaaatgcactacactttccattatttatattaacagaattatagcactgctaatcccaagtatctgtgaaaaaatgctatactttggaaagtatagcatgaatttttggtctgagatagatctaattgtactttattaggtgcaaataactatttgtgtttgtctagccctgagatactggtaaaccagaaatgagaaaatattcaatttcttagtggctcactaaagtttgacttttaaatagttatacatattatacatttaaaactgtacaaaaatgttgaacattttatacattttaaaactgtaaaggattacagtcagataaagcagtaaaaaactgcctaaacactagaatttatcgctt

SEQ ID NO: 58425 - DNA, 4215 bp, Bovine  19866880441998
  misc_feature (1)..(1): n is a, c, g, or t
ntggggcttactcccgggtctcgagctgggcaatgagccggtgccaacggtcttgtagctgggaacctttttcctgacagcgctccaaatccaggtttcgctctggggtcagacggctcagctgctctgccactaccttggctttgccaatttcctcatccaggactgaaaacactgaattcttgtccttcacatcactaagccagtgctataaaaacacaagcagagcaacaggttaaatatattccatgataaaaaggactcagactaaggaacaaaacaagttattgtctacagctggctccatgttacatcggtgattcaaacccagactctacagtgtttgtgccagaaatgcctccatagtcctcaggcacactaggcaaccagtagagaaaagtgcaagaaacctgtttgaaacctgagtgtttgaaacctgattccaccacttataagctatgaaaccatgacaagccacttagccaatctgaaaattctctcctctagccacctcacagagttgcttgtgagcatcaaaggaagtaagagctaagtgatttacaaacttacagcataaccattgattgtatccaattacactatgactctactgaggagaaaagggaaaaaataaatagagaagcatggtcctttatctcccttttgcagttagatatatgtctcgatcctctcttctttggacctacgtaaaaagacattaaatataatatattgcctaatttgaatgcaaactttaatcagtggcatgccatccaaaactgcatttctctgctaaccccaagcaatgagtatgttaagtcaaactaggaactaggagaaaccaacccgtaatgtagaccgatgggactccagagctgaaagatctggtggtactgcttcttcttgactcagcttgatttcataacctttgaccaagagttcagcatcctggatgctacgcactataacatcgattgtcttcagcctgtgaggataaaatcacctccattagtacatgcattttaagagctgggcttcggacctggagcgctaccaggagagtcaccgaccgtagctgtcaaaatcaacgtcatcgctactaaatgacgacagggtttcacaaagataagcatagtgtatgtactgccaattcaagccaattaaaatatagtttggaggacactgggacacacacacacgtgtgtgtgcatatggtgggggtctcacaagaaaagaggactggggacagaaacccactcaaaaccatgaagactccaagatctcctcaaggtcacaggtggggatgtgtgggtagaggaaaaaccctcaaagcctaatacacggtttagataaaaatttcaatttctctttctttagtgtccctttttctgttttaaaaagaagtatctaatcaaacagaaatgagattcaaaatagtcataaaactgcaaatcaacttctcttttccccttctgtgttcccagcatttgttcattgcagcccaaatgaacccactccatgttatttggaattaaagccaagatctctttttatgagcacaagctcttcaaaacctgtaatccccctgcattgttcatgaaacatgccaggtacttttattttccccatccaaatggaaaacattgccctcttgacccaaattctcactcactcacttgtttaaatagacagtggagagaccatacacatggtccattttctccaccagcagattgagttctgagcgcagagttgggacactggaaccagatggggactgatggagaaagctgttgcatttcatggaaacagcatccaagtctgccctcaattgctgcagatccgcttgagtgtgctatcaggaacaagacacacaacaaacacagagacagaattgaaccaagaggttagcaagaagtcctagtttagaacagcaaaatatcagaaacagaccaaatgtcatatataggagaatgatgaaataaaccaggcaacagccaatgaaggcagagcaaggcaaagaatacaaacaaataaattctgaacactgacttgactacagacataccttcagtataaagacaaaaagaattacattaaactctagatagtaggtcttccacatttgctggcatactgagtgcagcactttcacagcatcatcttttaggatgtgaaatagctcaactggaattccatcacctccactacctttgttcatactgatgcttcctaaggcccacttgacttcacattccaggatgtctggctctaggtgagtgatcacaccatcgtgattatctgggtcatgaagatatttttggaatagttcttctgtgtattctcgccacctcttcttaatatcttcagcttctgttaggtctataccatttctgtcctttattgtgctcatctttgcatgaaatgttcccttggtatcttaattttcttgaagagatctctagtccttcccagtctattgttttcctctatttctttgcattgattactaaggaaggctttcttatctctccttgctgttctttggaactctgccttcaaatgggtatatatctttgcctttagcttctcttcttttctcagctacttgtaaggcctcctcagacaatcattttgcctttttgcatttctttttcttggcgatagtcttgattactgcctcctgcacaatgtcacagatctccatctatagttcttctatggatggaggctcgtactatctccattttctgagaaaggaaactaaggatgagaagtaatttgcacaggggcttccctggcagtccaggggttatgcctttgccttccaatgcaggggggtgtgggttggatcccttgttggggagctaagatcccacatgcctcatggtcagaaaaccaaacataaaacagaagcaatactgtaacgaattcaacaaagacttagaaaaaaaggtccgggaaaagtgtacatcagagcccatagcagaatctgagcctctccgtactatctgtggagtcacatgactgacaggaaccatgtcacagaatataacatacgtgtaagggacagagcggaaagcagcagctctgctgagcagtcttagagcacccaccttgctataaaggcttacctcttgttctgcaatccttaatgcgttgtcttgctgagcatctttgtcagtccgagagctggctggggactgaattcgctggattagcctctgttcacactcctccaggcgcagccggatgttcttcagctctgaaatgtacatcttggccacagtttcctctttgtcctctgtgaatgcacaagcacagaagaccgttaagcaccacaacagagatcggcaaacctgagaaaaacagatttaccctgcgatagggtaccactggttctagcagaagctgatactccatgaatgaaagcaaagccttatatggggaaccttctgcctgttcccaaactccctgcattatatactgagctttaaggtccaaatacataatttccacaagaaaacgggataggtttattagcaatgatgaataaaacacagccttgttttccatcatctgattttgagaattcatctctgtgagttattcgctatctcaagttttcctagcaatgcaagtggtaaaaaggtgttgacgatactttctagtttgtctgaagggtcgagcagcacctttcagggctctcattccacctttcctctccctcttcccaaggcacacaccattctccatggacttcagcaggtgctggaaatgggttttacacgcctccacctcctcttccaagcgaagacggtcagccactgagaagacggccgagtcacgactctcctgcagaaagtcttcgtagtgggcctgcagattcttcataacctggtggtactccccaggtgctgaggagcggagctgcagagaaaataaacagtggacatttcaatggaatggaaatgtaacacaaaatagtgcacaaatcatatttataaacacgttgatttttcacaaattgaatgtgtccatgaaatcaccattcggatcaagaagcaggacattactagcatctcagaagcactctgtgccctctcggatgcaaaccttaatgatggccaattcaccagcattcccctattccgcacatttatccaaaaggttttagtttctaagatcctcaagctcctaaccctgcaacagtat

SEQ ID NO: 58426 - DNA, 1214 bp, Bovine  19866880579441
  misc_feature (1)..(1): n is a, c, g, or t
natttttggtcttccctagtggctcagctggtaaagaatgtgtctacaatgcgggggatctgggttcaatccctgggttgggaagatccctggagaagggaaaggctacccactccagtattctggactggagaattccagggactgtatagtccactgggtctcaaagagtcggataccactgagcaactttcactttcgtaatcttttcaaaatcatatcatttaaaagattcactgtaaatacaaaacacaagttggaagtaaatggatggaaaaaatatatcatgcaaataaaagagtaagaaggctagaggggctgtattaatatcaggtagaccattagacttcaatatgcaaaatgttaatcagagataatgataaacgtgtcatttcatgtgaatccatcctactgaaacagaagggctttgtgcagctgaaaatgacagactcatgctattctaaatattgatgcttatggttccaaagtggttaaaaggtcctcacatttatcttgggagtcaatggaaaagggcatctgtccatttgaaattaaatccattttgtgactcatgataccagtggatggttgcaccagggatgggggtggaggtgggaggaacctctcaaaatgaagttcacatgttgccgaatctgaatcaaaccaactttggtcaattctttgtgactgatgcagaatcctggcaggagttttgcttaaacacacagagcaaggagacccctctccaaagagcagagactctttgaaactttctttctccactagaagggcagcacaagcagcaggcacacatgggtggaggacccaatggcttcgccctccacgcagcccagatctcatccctgaccttgggcatccacgaggttcgtgatgcgattgagatccccatgcaccggctggtcctcagccagctttggctttgtcttgtactaccagtggagcaagacctgcacagtgtccatgaactggcctgaaatcagcagggcctcccccaacttgtgctccctgagacaagcacacatatctcaccgcttggcaaggggatatctcttttatggggcttccctggtgacacagtggtaaagaatccacctgtcaatcaggacacaggagttcaatctccaggtcgggaagatcccctggagtaggaaatgccagcctgctccagtattcatgccgggaaaatcccgtgg

SEQ ID NO: 58427 - DNA, 1099 bp, Bovine  19866880695245
  misc_feature (1)..(1): n is a, c, g, or t
ntttcttagtagagttggtgtttggggttgatcttagcttcaattttatagctaaagaacaattagatgcctgtaggaaggctttcctaattaaagtggtttgggggccagataagtagtataaaaagacaaagcctttaccagttcttctagcattacttttgtgttcagatacgtggtgtttcaggctgccgcacctcttaacttcagttgaatagcacttttaaggaaaagggaaggaaattctcactcattggaccctgtactatatccttagcactaaattgggtgtaatacatttattactgggacttcaaggtgggcattttccttttctttctgaggataagtaaatagaggcttagagaagttaaataacttgctcaaaatccccttgctaataggcagtagagtactggatgcaggcctgactccgaagtccgcactcagctgtacacccaccacacttgtttccttgagcccatacctttagctggacaccattagtactgggccttgggtcaggaatggtgtggtcatgagctaaaagattaatttaaaggaggttaagcataaatgaaaccctgtttttatcttttgggcacttttaaaatatgcttttgaatcaactcctgttcacctttgccattgaatttctgctctcagttagttacagatgagtacagccgaggcctcccctccgccccagtgcctatggacagaaacgccttggtccatgttggacggatcgctctctcagttctcattctctgccagcgttttccgtgcacttcttctacttaccttgctttctctgcacgtccttctagacagaagtctttttgtcagccgaaactgaagttcactactacagatttctaacacagcctcttttttcaccagacctaacaattagtctgtaacaaaagatggggttttggggggtaatgatttggaacttcttcctgtggtaaagctgcgataaccgcccccccatctctgagtcactcctggttgatggcacagtgcgtcatatgctcgttcctcattcgtgtgtgtgcccacacagcgttggtgctggagtgaaaggcacagctgc

SEQ ID NO: 58428 - DNA, 1035 bp, Bovine  19866880699080
  misc_feature (1)..(1): n is a, c, g, or t
ntggcttctcaggcaggcagcactgaggagacttggggtctgttgagctcactagctccgaagaaaagcctgacagatgctatgcaacaggtggtggacgttgtcagggggctccagcctgcatgaaatctcacactgcggatgagtccttagtactgagaaaggatgctcccactggtgtctctggggtgacgctaggacagctgggcctggatgctctccccaggctcctttttccaagagacatacgagctgtcttaagtgaagacgagctcgcagatttgatcaacagggaccattacctcactgtcagacactttacagtagctgaggagtcagaaacctttaacatgtattcccatgttaggtgacacccctcctcccactctccatgctgcgatcttgagaacttgtaaagcgcttggcctcttagattctttgtctcaaggccctccgggccctttcccctgagggcagagaccatcccatcctcaccaggaacttttttggtttccttccacttttgttatgcaatgggctctaaggctatttcccacaggtctgaaatacttccccaggacacagggcaagggtcccagcctgtggctggggggaaggtttggagtcctggatgcgaacgtgttccctgcccaggtgttttccatcttggaaatcctctcaaagcagatgtcaggcacctgaaggggaagagctgtaccacttcctctttcccacctccctctcatctcaacccctgactgataagtttgaagttctactcagttcggttcagtcgctcagtcgtgtccgactctttgtgaccccatggactgcagcacgccaggcctccctgtccatcaccaacttctggagtttactcaaactcatgtccattgagtcggtgatgctagaaccatacaaacctgtgcttctcttgcaactccaaggagcttcctgtccctctagccacccttgggccctctgccagcctgacatgagtcagaatcccattcccagaatctgggccttattgca

SEQ ID NO: 58429 - DNA, 1403 bp, Bovine  19866880700199
  misc_feature (1)..(1): n is a, c, g, or t
nctgagtttccacattttacaaatgggctgaatgctctgtgagagcctttcactggagacattgtgagtctgcctctggttgatggaaaatgaatggggtcacctgcaaaggctcctcagggtatttctctaaaaggaactgaggctgaccgctgacagtggtcatgactggtggccagaccacctggaacgctgcctctccctcaagagaccaccccagaattctggctagggatcccttgatgcccatggaaccgatcttgggactcaatgtattttctctgagtccctgaaaatctgctttattttcaggctctcagtcaagaagctctcacaccctctcccggtgtcagggccagatcacagcctggaaaagagctcgctctggctgggctcttgggagctgtacggctaaggggactggagggctattcagacagacaggaagtaggaattaggagggaaaacaatgctgaatttggagccagaagacatggattcccacgtgggctttgcttctcagcagctgcataggctgggcaagctgctgtagctccccatgctcagcatcctcatccgtgagatggggctctccctcaaaggagtgaagtattaatacctgtggtgatgcccaggtgaaatggggctctccctcaaaggagtgaagtattaatacctggggtgatgcccgggtgaaatggggctctccctcaaaggagtgaagtattaatacctggggtgatgcctgggtgaaatggggctctgcctcaaaggagtgaagtattaatacctgtggtgatgcccaggtgaaatggggctctccctcaaaggagtgaagtattaatacctgtggtgatgcctgggtgaaatggggctgtccctcagagaagtattaatacctgtagtgatgcctggaaagctgtgatatgaggcatgcctgtgggatacaagagtggagggagagggatgacactgcagagaatcaggagggtggggaaagggatggctgagctcccctgaaagggggggtgtcagcctccagcagatggtccctgaggagggatcaggctgagaggcagtgatgcgcacagtgctaacccaatacccctggagacaccttacctaccctggagggacaaaggccctgtttcttagtagaccttggctcttgtggcttgtccggagtgaagctttgtaaacaagccgccctacagatctcaggatctggccccttgagccctgggcctagcttgctgagccatccctcccaggagttttcacccgccttacattcttgtccagatgtttggatggaaatagccttttccagatgtagctggacaaagccagggccatagcagtaggtttggcaaatgttgatctggtctcccttgcaaccttct

SEQ ID NO: 58430 - DNA, 997 bp, Bovine  19866880729745
  misc_feature (1)..(1): n is a, c, g, or t
ncatctcctgcctggtacaacttactcaacctcttttttcaggcttatctcctatccttctcctccaggaaactctcacctcatccaggcacagattcccatctcccctactgtttattcatacttgccctgcaatggattcatctcagcccaggggaagattattctgaattcaaggggctcactgaacatgggcttgatgagagtccagcatggatgaggcactgagcactaggcaatgaacaagatcagtgaggaggaaaagctggaaccagtagtcagcgcatcttctgataatatcccccagtggtgatgttggtatccacaatacattgcgaaaggtccatgagagcagtgagagggcctgacttgtctactgctgcactcctagttgtgcctggtacaaagtagtgtggagcttagcacagaacccagtaatttttttcagtgtataaataaatgaaaaaaataaaagtcacagattttaaaaaattcttaaacagtcttgcactggagtcacaagtgcctgtgctcagactccttaaaagattagaagttcctgaagggcaggcatggtgtacactctttacaaagaatcactttaccaaatggttttacatgggttactggttctgtttctcattacaaccacataaattactatcctcagtttatacttggggaagatttgttccttattttcttcattctcctttctatttcctcctttctctccccttcctttaggatgtatgtatggtttaagcatttcctgtctctaatctagagagacttcagttcagttcagttcagttgctcagttgtgtctgactctttgcgaccccatgaatcacagcacgccaggcctccctgtccatcaccatctcccggagttcactcagactcacattcatcgagtcagtgatgccatccatctcatcctctgttgtccccttctcctcctgccccggatccctcccagcatcagagtcttttc

SEQ ID NO: 58431 - DNA, 828 bp, Bovine  19866880735069
  misc_feature (1)..(1): n is a, c, g, or t
ntgtactttatttaaccttgaaagtctccagaggaagtggaatttggttatgttgacctagttataacacagaccagacatggacttctctatgtcagggtaaaagaaacaaaacttacttatctaaatatagtatttgcattggtttttatagagcttgctctttaatgaatggatattttagtgattgacttgaaaatttgcactgtttagaatagcttttccatagtctatggagtttgacttgatcaatttcgtgatcaaaagagaattcttgattctttttttctatacttgcccccatcttccctttctctgaaattttatctagtggttcaggccaaaatcctaggaagctactgtgactcctcttttccatcccatcctatagccctcatcccacacccaattcactagctgtcctgctgactctcctttttaaagactctaacctcttctctgaagtccacctaccaagtctaaagccctatcatttcttgcttagcctactacagagcccccagctcacctgcctgcttccatttatgtcccactagcaagagtcagaggggaaccttttcaaaatataaatcagatcagatatccagtcatgggcaaatttgaaaggcaactggaaaacatatcctcctatggctacattgcaggaagccagggacagttgcaaaaaaaaaaaaagtgtgatgttctatctctagcaaataatggaaaaagagggaggcaaagctgcatgagcactttatgggaagttataaattgcagagattggcctgatcatcttggctctcctccatccttcattggtattca

SEQ ID NO: 58432 - DNA, 1947 bp, Bovine  19866880767954
  misc_feature (1)..(1): n is a, c, g, or t
ngactctcagacatgcttgtattagagtctagccaaagagaaaagactgttccttctaacaccctcataattagaggacaggcaagaatcactgagctgggatatgatccagagaaattcatttcggccccaccaaacacgagcattctgacctacacaagcagaagacaatagagggagaagaggaaagaaaacataaacggctctacttaccagagttgcagggtgtgccttgggcagataagagatagagccttacggagcagctcagccgtatcgcacacacagtgtaagcttggtgttagcgtccagcatgcgactgtttgttttttgcaaaaaagaaccccaaacaggtcgtcctcttttccctttgtgcatttgtgcttaaactccaaagggttagttaaacttctaagcaaggatgtcagttaatcagaacaatacttcacatgaaacacacgaacggtaacaggggacacatcatgctcaatgtagtggtgctcagcagcttgactctctttctttctttctccccttttttaacctttcaaaatgagaactggatgttctcagcaagcaattttgttaaaactcttcatgtactcccgtatatggtgaagcaataagccattacaaggtgggttacctcacaaacagagtgctgaaccagcacgtttgttttggaaatctgctctcaaataaatcacagccggttctacactgtggcctgtataactccagctcctgctatacaaatttaaggatcaaagtcaaagcatattttgtctaaatatcattttgagcattatctagaccaaatctgattgccacaggagcttaaattgcctcacagaatttggccattgcttcacaacataggaaataagcaggcaaacacacatatatgtcccagagacacatgtatataatatggtaagtttacatatacacacaagtatccaggaagaactcaggacaaccagcaggaatgtaacaacttccatgtggtccaggcaatgaacatggtggtaactggtaaagatgtcacatgatggggtgactatggataaggggaaccagcgtctcagtcagtgcagctaatccaccagtttgttttggaaattgacatttctcatttatttagtagacaggaaaaaaaagtatggggggagcgtggggaaaaggtccacagactttacttcccaatattcagaactccctgctgtcttttggtgacaatgccacagagtaaccattttgccttctgatcagatatgacacaaaattcaggttctccttgactgtggtctgccacaaaatgcaagatgacacaatggtgaagcaggtctaaaggattagccatatgcaccttctagtgatgctgactgaccaacacatcgtggaaccccaataaagaaacacgagacaaatggctgctatggtgaggttaaaaattaagtcacaccggtcatggaaagctagtgatcatgactctcaatcagcaaagctgcagtcatactgttcccaaggtacctttccaaaacctggagagaaaaactcaaagtaccttttgttctgtctgttgggccagctggctctggagttgctgaagctggtttgctgaaccttcacaaagatcatggtaagtcttactgagggcattcaattgctcagatatctgttctttctctttttctgacagcctagaagatgaagcattaaagctcttttagagaaagacctttcccccaattcccctctattgtttcaaaacgacatctccaccttggagagtattcttctttgtcactgtttgtgatgggccatctggtcagtctcccatactcaccgaacactttggcatctagctcatagtttttctgtcttctcagatgactcttgctgatgttaatgctcatgtcaccaattatctaacactctatacct

SEQ ID NO: 58433 - DNA, 899 bp, Bovine  19866880773869
  misc_feature (1)..(1): n is a, c, g, or t
ntgaaaaatatttattacgtggttgggcaaggggcatccttgggcttttcatataaaaatgtgtgtgtgtatgtgtattaaggtggggagggaggcagtgaggctgctggggtggggtgtatctgagtttcattggataagacgaaacgtcaaagtcagcttttaccttggtacagaacggatgtagagtaattgcggcagaaccagtggctgaatggatcactcttttgatattcctgaagttgtggaggcatcatgatgatttaggatacatgcttagaattaagagtgaggttttcagaaagtttggaatatgaaatgtgaaggagctcacatttagtggaagtcaattcaagataatgtcccatatgtgactgtggtacttttggagcaggaaggctccggacaactctgtgaggagcctccaagaagagattggtagaagaaacctctggaccatggtctatagtttgaccaaatcaacagcagtgtgattcttgggctgttcagtatgagaatcgtactggtgtgtggtgctttctgggcagtcaagctctacatcctgtcccagcttccctgagagcagacacgaccagactacacagttagggcctaggaagaaaaactaggtgacttcgagtcagcttagaagtctgacatgtctttgaggttctgtgtccatctggtgatgcagggaccacagactgtatgagcatcctgtatgacagataagaagtaacttctcaagataagtgtcccttatcccttaaggatgaaggtccttaagttcacaggggcctgaaaccctccttggtctctgaaggtcttatcttcagggagctgcaccctgccggtaggctgctcacaaggcctggggacagcgacagccagagaggcag

SEQ ID NO: 58434 - DNA, 896 bp, Bovine  19866880788516
  misc_feature (1)..(1): n is a, c, g, or t
ntcactgctcatctgtttataacgtccctaacaggaaagggaatgcacaattatggtagcctggcttgggtccttactctctcttgattaatatctgccaggaagatgctgtggttgcggtatatgtcctccctgatggggtcgtgccagtattctgcttgcaccaggctgcgggagaaaaaaaaataaaggtgaccaagcggcacactagtcagtatgcctggggctggccctgggcacaggccaccaagagaccgaaggggcagaagaccagagccttctgttcctgctgcctgatccctttttccttagcatttcctatgctccttccttcttgtccttgagacctagcttaaatatcttttcttcaaagaccattctggccaaactaggcacctcctccactgctgtccattactgcatcttgtttctgccacagccttagctggtactaaggggggtctagttccctgatcagggatcgaacccaggctcccttgcattgggaactcagagtcttaaccactggaccatcagggaagtccctgggttatcttattttgaacttccaggatctctctcttactctttaatgattggttttatttgaattcttttctagagtcatggatgatctctttctctctgaagataataatataggctttttttttgtttaaggtttccttcagcttcttgaattgccatctgtttcttccaagtccctttttactttttgttgttttgatctatcttctattttggaagctttcctcagatgtctgatggaggggtgggtggcggtccttggctcactgttcatatttaaacaagagcttccctgatagctcagttggtaaagaatccgcctgcaatgcaggagacccggttcaatt

SEQ ID NO: 58435 - DNA, 1239 bp, Bovine  19866880832406
  misc_feature (1)..(1): n is a, c, g, or t
nctctcactctcatccctgatggccaaagttgtgaaaggtccacatttcaaatcacaggaccagtggtaggaaaacagcttgtaaaggttcaggggagaagtgtatcatgttactctttcacagacaataccagacactggtatctgaacagcaccccagtagtggcagtggcaaagtgtgaaggaaggtggggagggaacacattctccccacagcgaggcttttctacccgggacagctgagacttgggacgagtccctctggcaggagacagcctttgtgcagtgatgttttagtgcagtgacctgacctgacctgactccctgtgggactgattttattcctggtaaaccaaccacctctaacaacaaagtgcctttcaaagcaactcatctcacttcctagaggctcacctcttatggcttgtgtgccagagagctcattggaaagtacccaggactaggctaaggctgaggccacttaccaagcatttctagacacagcgagaaacagccccgttctgcaagcctgtgcttatctcaaccacatccactattcaaaactcagtgacaaacccaagttcagcacagggtaaattctagtttttctggatacccgtgtttcccacgatgatcaatcttagttgcaaatgctacatgctgacatgatgtgtgaagaatttcagtaaacgcaattgaaactgctcagtccttccttctggttgaggatatattcatttgttgcttcccttgctatcaaaatttccagccggatttttgtgaaattcatcaacactctcttgatgcccttccatctgattttactaccttcactgagacgtgaggctcctcaaggtgatgtaatggctacaagcttggggttttgcctgtggtgctgatactgaaaatattaacggcaatactttaaaatggggctggaaaaagttcaacatgcagctaacttaaaggtcttaaagactccttcaccttctccccacccagctgcaacggtgggggtgggagaggattattacacagcattggaattctggggggggcgggggaggtgcagagggagatgctcacataagggttataaataccagcagccaaactgtgagctcctgggctgagaacaactgacagcctgtaggctccccttaaaggcacagagcaaggaagctccctggagtatttccacaaaggaagttcctcttcttcagaggaacgctccatcag

SEQ ID NO: 58436 - DNA, 1058 bp, Bovine  19866880880161
  misc_feature (1)..(1): n is a, c, g, or t
ngacacctattgtaggacaccctaggagaaggcaatggcaccccactccagtactcttgcctggaaaatcccatggacggaggagcctggaaggctgcaatccttggggtcgctgagggtcggacacgactgagcgatttcactttcacttttcactttcatgcattggagaaggaaatggcaacccactccagtgttcttgcctagagaatcccagggataggggagcctggtgggctgctgtctatggggtcgcacagagtcagacacgactgaagcgacttagcagcagcagcagcagtaggacacccagggtaatatcacagagaattgcttgttgtggagataaacctcatacatctggtgtcagaaatgttgcgagtgtggtagtggtgtgagagtcagggagaaacacaggaagaaagctgggtttttccttctcaagctgacatagagtaatatggagaaagtcagatgtattttgaaagtaattatccttctttttctttttctcatcccttagacttatgcacgatgtgaagtgtgatggttaaatttgtcgttttgttaagttgcaaaatcataatggaaccaggggagaaatggatgccataactggacatgggttctctcctttcagaaggagttgagtatattttttgtttgtatgtgagacaattgcattatgttaggcagaggcatttaaaaaattgtatatggcatgaaaaaagtgggagggcgttgcttggcaacccatggttggaatgcagaggacatctgttgttttcctctatcagcattctatctccttcttttggagtatgcttccacccccactgtatgctggcttggtggggctgtcagtcattgttctctgctcttccctagttggagagaggggggatggggtccagtcccgactaggccacctagaagttccttctctggaagaatatctcgctgggagacaagaggacagaaaactcttaaagttgattcattttgacacactgtcctgaagagactatctgtttctgtcacttaccaatccagaactg

SEQ ID NO: 58437 - DNA, 1863 bp, Bovine  19866880933929
  misc_feature (1)..(1): n is a, c, g, or t
naagtccccacagattctccctaaggagtttcagaactggggagcagggaggctggggaacataccaatatatatatatatatatatatatatatatatatatatatatatatacttaccatggtagtaagaaggcagctgcaacgctgatgccagctgccacagccaccacgtatgtgacaatcagattactctccatgagggccaccaagatgagaaatggcactgctgactaggagagtgggtgtaggaagatgagtcagctggggggctcccagcagtaacccccaggccagcccaggccctaccctttcagccccactcaccgagattccaatgtacacagctgtctttttgccaaaccgggttaggaaccactgccagatggggatggtgactgtggctgagaactttggaggggcaaaggggtgaagaagtgggttagagccctggaatccctcttgcccttcccaggactccaaaggtgctgttaaccctgaccaggagcagccagctgccatcacctggattgctccacggcagctgatggctcttcaaggagctaggacaaagtcctgatcttatctgctgccctctgaatacagaactctgagttctggcctccacatctttgctttcgctatgctttctacttgaacatctaaccccaatgctttcttttttccccagtgttactaagatataattgacaagaacattgtactagttactagttcaaggtgtacaatataaagatatttttaaaatatttatttggctgtgccaggtcttagttgcagcacgcaggatctttttttttttttcctccccatagttgcagcatgcaaactcttagttacaggatcttctgtggcggcatgtgggagctagttccctggccaaggactgaacccagaccccctgcgttgggaatgtggagtcttagccactggaccaccagggagtcccaataaagatttgatatatgtacccaaactctttctttcatagtcctacctaagccactgtaggtcagatccaaatgttctgagaagcctccctcatccctcacgatcttggccagtctgggaaatatcctctggctatccaaagaaccatctcactgcctaagccccttcagccacccttggggccccacacgcaccatgattgccaggagcagattctggaattcgttccgaaagcccaaggtgtaggtacaaaacaaggcaaagttcccctccaccagctgggggccaggacggtgtagcaggaagaaagacaaagaaacaggtgctgatggagctgagcctcaaagactctttgcatgctcgggggacctctgctcaccccacccccattccacctgtccctcaggccctgtcacattctaaggcctatcccatcccctattgcactcccccatcaggctgagcatatcagagccccactcaccatgaaagccaaggaggtgaagaggaagccggcaataagcttgatgtatggcccatggctcatgaccagccggaggccccgaaagaagggcatctgcttggtctgctgagtctcgtaggattctgggggccagaggggacagtgagcaggagcagaggcccctcccagagtctgaggcccaggcagagggacaaaaactgccccacgatggggcctgtacccctccctgggacccctcacctctctgttcccgcacgcccaggatcaagatgacagcacagatgacatagatggaggcaatgactcctgccgccagcaggtatgcattttgctataaagcaggtaaagatcacatagagacacagtcagtctgatttcatcccagctcccagcagctctactcaatga

SEQ ID NO: 58438 - DNA, 1684 bp, Bovine  19866880937133
  misc_feature (1)..(1): n is a, c, g, or t
ntcctctccattcagctgatagatggagaagacaaagggtcatgcttggaggtctgtgtgaggaagtgaggcacatcacttccactcacattctgtctgttagttctcagttgcatgcttacaccccaacagccccacggggggttcccaccaagaccagcatcaagcccccaatgtgtgtgtgagggtgtctccagatgacttcagccctcagctgttgaattttcccaattgaggacccagacaccaaggaactgaaacccactgcttcccactctgccctgaacaaaatcctgcaactgtatacattttaatccttaataaattccttttcctatactagtctcatatttctatttatatgacccaaattctaaccagctatggacttgaactgaacataattgtcactcccagtggtaagagcgctgcacccgtgggttctgtatcttttaagaaaacaaaatcctactgacttactacttatacaagtgttagaacacacccacaataaaaccaaagtaaagggtaaattatttaggcgcactaacaagtgagtaattggaggataaagataacctgatgattcctctgaagcacagagcagagttctccctaaagaatgagcaatgtggtgtgtgccgtgggcagggacgtgggcgaagcagcagaatgccatcaatttttctcagaagtggctattttaggaggcccatttatcaatgttcatgatgatataccatcaacagatgaacttatatttataaataattgattgtactatttattgcagttgctacttaccgtttcccaactaatatcttcatatttcaacatttcatccactgtcacaggctgcacagggcacgcccacccagcagccctgttagagcctgctattttggggggcagggggcggggtgaactggtcatctagttagatgtctccccacctgcaagtcctcctttcagaattcaaattgtagaaacattttgcttgatcttttcaaacaagaaaaacatttcccagatgcaggccattcccatgtccttaccccatgcacatctggtttattctggggccctttctttcccatccaatgctcttcacctgagggcacagactaccctgcttttatttctcctccctgggtctccagttttcctgaatgtaaaatgaataagatggacaggtcagcagtttacaaactttatcacagtagactgactacagttctctgtgctagtaggactttgctgttatctgtgctgtgtataatggcttgatctgctatcccaaactccagtccatccctcccccagccccttggcaagcacaagtctgttcgctatgtctgtgaatctgtttctgtttcataaatgagttcatttgtgtcctatttcagattccacatataagtgatatcacatggtatttgtcttttcctgtctgtcttatttcatttagtaaaataatgtctaggtccatccatgttgtggcaaatggcattatttccttcttctttatggctgaatagtattcattacacacacacacacatctgtatatatgccacatcttcacatcttctttatccagtcctcggccagtggaagtttaggttgtttccatgtcttggcctttgtaaacagtgctgctgcaaacataacaggggtgcatgta

SEQ ID NO: 58439 - DNA, 1536 bp, Bovine  19866880962782
  misc_feature (1)..(1): n is a, c, g, or t
ncaaagtgccaatttccatatgtgaaagtgtgctcccctaggctggcctaagggtaggggctgtatgtgggaaagatgcttctctgtggactaattagcatcaccatgtagttaacagtacgttaggtctgattcagcatttcatggctgtaacaattggtatgtcagggagatacctgacatcaaccttttttacagagggtggtattgcatagggtgggactttgcaaactattcagtataatgtgctggaaattctggtccattcttggatcacacttgttgagaagctagacttctggatgtgttaatatagatgtattagtcagggtagctcatacttctgacaaggaagcagtgtacctgagtacttgcctagacagtagatcctctttctctttatttgctgtggcctcatagcactaccgtggtgtgttgggattttctgtttatgatctctcactatatggcaagaccttctgattgatctaggttgtgttcctaacacttaagcaaagtgcctggcacatacagggtatcagtgtttgttgaattgtttaattaaatttacctctaaacctttgtttgatagccacaggagatgggcactgagaaagtgatcgaccgaaaagttgagcttgaaaaggaggatggccatgttctccacaaacgcctaagccaggttgacccggaaatggctgccaagctgcacccacatgataagcgcaaagtggccaggtaagaaagctggggccactgaccccaagccccttgagaggtagagggcagtcagttcttcagggtgcctgggtggcgagacaggtttggtaatagcatctagtggagattgatgtgttctagcacagcaggttactgctaagtcacttcagttgtatccgactctgtgtgaccccatagacggcagcccaccaggctcccccatccctgggattctccaggcaagaacactggagtgggttgccatttccttctccaatgcatgaaagtgaaaagtgaaagtgaagtcgctcagtcgtgtccaactcttagcaccccaggctcctctgttcacgggattttcgaggcaagagtgctggagtgggatgccattgccttctccactctagttagaagacaacattttttatagtaggattaaaaagcaagactcagttcagttcagttcagttcagttgctcagtcatgtctgactctttgtgaccccatggctgcagcacaccaggcctccctgtctatcaccaactcccggagtttactcaaactcatgtccactgagtcagtgatgccatccaaccatctcatcctctgtcgtccccttctcctcccaccttcaatctctcccagaatcagggtcttttccaatgagtcagttcttcatatcatgtggccagagtatcagagcttcagctacagcatcagcccttccaatgaatagtcaggactgatttcatttaggatgaactggatggatatcctgaagtccaagggactctcaagagtcttctccaacacaaa

SEQ ID NO: 58440 - DNA, 1930 bp, Bovine  19866881023831
  misc_feature (1)..(1): n is a, c, g, or t
ncttcctctgagagctgactcaagaattctctcccattgtggtaatgttcttgtttttacatgccataccagtttgcagccttggcgtttgggggagcaccatttggaggtgtcaagtcgggaatgaggaaagtaaaaatattttcagaggttccttgagagaaagcttcctttcactggacataccagttctccctagatgctgtggcgcgagaactgaagcatcctaagcatatattcttcctttttgatgtcactgattcctctgaataacagttacatgtttgtctttctgtgtccaatgagactgtgcatcctgagaactgagacagcatctcatccatcttttagtcctcaaagtttagcacagcgcccagcttgaagtcagtgtttataaatgtatgttaggttgaataatggagagaagctttaaatgcactgcatgccagcagacatgcctggcatgttgagttgggaaacattagtagaaaatggagataggagagagcgagataaaggagtttttgtggacaggatacagggaattttcgttgcctaagaattacttgagaagcagttgttttgcagtcttccttcatgtgagaaagcatttaaaagttgaatgttagttccatctgactagctaatgaccttggataaggcttctaatcactgaccttctttgtggcagggactaaagatacatgcttgtccctctcaaatggaaaaggggggtgtcagggttagattgtgggtgggaaagaaggcattgagaccctgctaagcagcattgtggaaacataaagctgttataataatggtgctgttggcaaacaagaagtctcagcctcttctctggtttgtgtcccacactcagccacaacctcagattgggtggatgcagactttaaatatcggggtcacctgtacctaaaatgtcccttgtggtttctctgagtattgtgcgaacatttctttttggctctttcctacatgaggaaaaaggaggaagtttgtgggagttgtgcttttggttggcattagggcagtgatccctagcctttttggcaccaggtaccaattttgtggaagacaatttttccacataaccaggggtgggggggatggttttaggatgattcaagtacgttacatttgttgtgtgcgttatttctaatcttaggccgctgctgatctgacaggtctgagtcccagaggttggggacccctgcattagggcataaggggctttcattttccccttttatctggtaactatctgaactagtaaagagctgtaagaaaacagccctggcttggaagttctctcagtagtgactgaagcctgagaagaactcggctttcataactcctgcgttgaagaaggggacagtcatttccctgacatggctgggattctggtcagctgatttcctgtctctatagggatgtgattcctcccccttcctttgggaagaaatggatattttttcatttcctgttcgatcgcgtattttctgagtaccgggagacacttgctggctataaatcggttgggtcatggggaaggaagctgcttttgttttcagcagaacagcttccatttgagagatagacatgtacaggaaccccagcttccttgtgcccctgggagagacatgggacctagagggattgttttgaaacccttcctgggctgtgtctgctcgacctgtggtagtagcgccccttcgccccctgaaggcgagaaaagcttggtccctcacggggcctgcgtgctgtgaccccactctggccgtgtcctctggccagcccttttcggtgcctgaacgctgcccgggagcaactgttagtccctggtggaagtgacaccattcttggaatggaacctggcaggatgcccccctgagccctgatggagtgacacagg

SEQ ID NO: 58441 - DNA, 2049 bp, Bovine  19866881042265
  misc_feature (1)..(1): n is a, c, g, or t
ncccttcgcttcttgaggacttttttcttagcgtttggggtaacctggaagtttaattttgtgacacgctaacttttgcgttttttttttttttttcccttgaccttggagaagtccttaaaagttcttacaaaataaaacattgcttgataggttacaaggaatgtaatttttgagttttgtgtgtaacacagctgttcctagttcggcagggtttatatgaccaggtaattggtgtgtttcaggttcctgaaggtcatcagaggaagaacagccttagaagtggaattagtgtgcctgccttgacttgaactcttaactttgaattcttcctttacctctgtgccttcttgctccaggggctttctggtttgtggtattttatagtatcagataaatctcccctctagggtgaagagcagcattttacagtggaaagggtgtaaacgttgaaatcctggttctggtacttataagctctgtgaccttggccagtcacttaaccgatacgtgtgattttcctaagtcctcatgtatcttgtactgtttctgtaaaggttaaaagaattaatatatagaaagcatgctgcttgatgcatagtgggtatgtaattgtagtttctttttattaataagagtcttgtaaaatgtgatttataatgtaaaatatgcataaaagttaccattttaaccattttatgcgtacagttcagtggtgttaagtacagtcacactgctgtgttaccattaccactgtccatctccagaacttctcaaacttatatttcatacccattaaacagtaattcacattctcccctccccagctcctggcagctaccattctgttttctgtctctgttaagtttgactgttctaggtacttcatgtaagtagactcctacaagatctatacttttgcgattggcttatttcacttagtataatgtctttaaagtttatccatattgtagtatgtgtcttaattttattcctttttaaggctgaatagtatttctttgtatgtaccacattttgtttattcattcttccattgatggacacttaggttgctaaaatatgattagtttcagtagcagtattgttcagttgattccttatctagagctctcaaagctgggaggaagaggatgaagtgagggacaagaccattgtgtgtcgacttcatctctctgggttttggttgcaggacctgttttgataggagtctagcaaatgatggcgcccattctgatgggagtccatatagagggtccaggcctggcagaactctagtggggaaaagtgttgcttcttagcccaggcaaggattagacccttctccagggatggactgcttaacagtagctgtagcttatcaaccttgcctttccttctgccctcttctgctgttactgtgaatgggactcttgctgttgtgatgtgtctagactcttagtttgttttacacaggtcagggcctgagggggaattgttgtacagccatacagtaaatagccagttgtgtgccagcctggcttgtaggatttgtaggctatatacacacacgtgtgtgtacatgtgtatatgtgttcatgtatatgcacatgcatacgtacgcacatatcctgtcattggcagttggcacagtatagaagctgtgtgctctcctccagcttcgccccggcccagcccaccaccatggtgtgtggattggtaacagggggatcccaggatgatggaagaggtctccacggggattaaagcactaagaaccttagcaggatggtcttgacagcttagataggctcttgcagtttcttccaaaattctgcagagagtactctgcagctctgacttcgttgtcccatcttcaggcctgagttagacctggaaaagcccacacgcttggcttctgcatcctccacttctgttggacatagaagtggaggttgagaaggagaagcagctactctaaactcctggatccctctgtgtggactctcctgtttgtctgaaggggctaaagggtggtttgtactgattccc

SEQ ID NO: 58442 - DNA, 2095 bp, Bovine  19866881043808
  misc_feature (1)..(1): n is a, c, g, or t
naatgtgaagctatcaaagttagagttgtacagtagcacaccatttctataatacttcccccccataccaggtccaatagataatagtaaaatccagtaaaaacaagtggggaatgatgagtttggagtctctacgatctttgtttttaatatttatttatatgtaaatgtatataaagtgaaagtcactcagtcatgtccgactctttgtgaccccacggactgtagcccgccaggcttctctgtccatgggattctccaggccagaatactggagtggatagccatccccttctccaggggatcttcccaacccagggatcaaacccaggtctcccgcattgcaggtgatccttttaccatttgagccaccagggaatccctggtaaatatataaatgtataaaatttatataattttattttttatggctgcagtgggtctttgttgctacaagttggggctactctctagttgtggggttggcttctcactgcagtgacctcttgctgcagagcacgggctctagggcattcaggctcagtagctgtggctctagggcattcaggctcagtagctgtggctctagggcgttcaggctcagtagctgtggctctagggcgttcaggctcagtagctgtggctctagggcgttcaggctcagtagctgtggtacaactactaagttgtggcttacttgccttgcagcatgtggaatcttcctggaccaaggattgaacccatatccctgcattggcagctggactcttaatcactggaccaccagggcagtcttaatttaatttttaatgaccacatgtaacaaccagcttccatgattcctaaaaagacaataaccagctctcactgagctagtgcaaacttttccagcacagcactgggcctaggtaactcaggcccctggtggcagctcctttggctgccttggggctcctacgcacaggagtcattgtctctctagtctgtgtttccctctagtggacagaagagtcattccaggtgattctctggctccacctgtgctcagagctcagcacccaggtgtggatgtcacttttcatggaaaaagtttcttaaagggagttcagatggtttcacaattatcttcatacacaaggcatgtagcattccacctctatgaagggcagtgcctgcagggcccctgggccacagccatgaccacaacctccagagcatctcaaagtcccatgtcaccccccatgtgaccgctcaggcttgctacatcagctcccccccactcccatcaggtctatttctaaaaaaggcaaacttatcagcacctgactgtattagggtttatgttttcatataattcatagtccgctagtgaaacaccaatgaggaccattcatatgcatagggcacatatgagaaaggcttccctgatagctcagttggtaaagaatctgcctgcaatgcaggagaccctggttcaattcctgtgtcagaagatccactggaaaagggataggctacccattccagtattcttgggcttccctagtggctcagctggtaaagaatctgggttgggttcgatccctgggttgggaagatcccctggagaaggtaaaggctacccactccagtattctggcctagagaatttcatggactgtatagtccatgggatcacaaagagttggacacaactgagtgactttcactttcacgtgagaaaatggagtcagttaggtgcagagctagggctccctctcctgcattatgcttagactcttcttccagaacccatcttcccaaagtgcggatatatctgtgtcactcctccacccacaaacctcctatgattctccactgctttcagcttcagttcaagctccttcaccagacattcaaggccttgattaagactccatgcatattgtttaccttgaatctccaaagaaaaaaaggaaaatggcatttaaaaaattttcttcttggtcaggtactgtgctaaacacttggctaacagtattatttaattctccagtagtgctactagataactgtaaccactttccaggtgagaacactggaaggcagtgcgggc

SEQ ID NO: 58443 - DNA, 1309 bp, Bovine  19866881070957
  misc_feature (1)..(1): n is a, c, g, or t
nttacaggagccagagggtgtttcaaggactcggtcatgatcatttaaaacgtcagtcagatcacatcacttcctgctcaaaaccatccataagcttcccatgacattcagaataaaatgccaactgcttaccgtggcctatacacagggtgacatgtgagactggggcacctctgagagtgaaagaaagcaaccctagaactctcaggaccgccaaggcgttcctgggtgtgaggccatcccaagccctgggttctgcccctttcctgttcacccatgcactagagccttcgtgcccttccgctgacatttcctgcctgtggttgctgcaggacttcgaattggttgttccattttcccagaatcctcttcccccaattgtctcggactcatcatctcactttattcaggtctttgttcatatgttacgtccttagagaagactttcctgaccacctgtctaaaatggccacacatcctcggatcactttgtgccccctgcctcacaccattttactttacaacatctattaagctcatggttgttggttagtcggttgtgtccgtctctttgcgatctcatggactgtagcttgccaggctctttgtccatgaaatttcccaggcaagaatactggagtgagttgccatttccttctccagaggattttcctgacccaggaatcaaatctgccatctcctacattggcaggtggattctttaccactgataggttgagatatttatttatcatctgtgtcgtccaccacaagataaactcattgagggtagacacttgtctctcctgttccctgctgattctccagcacctagtacaatgccaggcgttaggtagatgtgcaataaatatttgagagcagaataaactcatttgagatgcttgactacgatgggaatgtaagctaggataataactggaggcagacgtggaatctgggtttgtttatttttgcttttgttttattttaagatggaagtgaatagggcatggattgagcagcaggaaactatccctctgtggattctatgaaggcgcttccaccttaactgtgaagttcttgggggtagaagtcatttgtgtttttcattatcatgtcccttagtgcctagtaaagtgtctcatgcagagtaaacatttaaaattgttgtgagggacatccccggtggtctgatagctcagactccgcactcccaatgcaaggggcccgtgtttgatccctggtgctagtgataaagaacctgcctgccaatgcaggagacacaagagatgcgggtggatcccggatc

SEQ ID NO: 58444 - DNA, 1038 bp, Bovine  19866881190368
  misc_feature (1)..(1): n is a, c, g, or t
nttattttgcctgcaacttacatcacccttaaatatttttctgtttgtttttaatagttttagtgcacagtgtacagttctctgttagactataagttattgtgggtagaaataaatatcctgttcattttggccttgggcattccgcatgcaggcagcaggatgttgtaggaaaaaacactgaacttagagccagaagacttgatttgagtactggcttcccaactaactaactttgtgactataggcaagtcatttaacttcattgaatttgtttcctatctttaagaatatattaattatctttccattcataagtagttgttgagaggcttattaaactgagagaacatatgtgactgttccttgtaaattctaaattcttacacaaatacttagttgatgatatcatagtaaatattcagtaagtatttggatgagtaagtatttgctttcagttaacactgtttcctgggtagttcttttgcttaatgaggtctctaggcttctgcaaatatgctaaactatcttccatcttactttactgtaaaatgattctgttcctcagaattggcatcttctttatctccagggcatttctcccccgacccccccaccccaggttctgtgtcatattaaaacaacaaataacatttggtctgtttcagcaggtggtacattatggctgacatgcgaaatctggtagaaagattggagagagtggtgggccgcctggaggcagtctcccatgcctctgacacacactgtgggtatggagacagtgctgcaaaaggtaagcagtatacgtgccagtagagtgctttgagtgaaacttggtgtcctggcctgaaatttttctatcttggtatgatctcttctttggagctaacttgctgaaacattaaatttagaaagttcatcgcctgtaagataagggaggaagtgacttctttgcagggaggcctgtggttaagttattttaacacgagaacttcctgcttcctgttctttctttagcaaaatgactctagtataagt

SEQ ID NO: 58445 - DNA, 1027 bp, Bovine  19866881240117
  misc_feature (1)..(1): n is a, c, g, or t
ncccccaccaccactctttctcttcgggacccagaaccttactgctagtctttgagtgatcctttgtaagcagtaaccatgtttaggatcagcctgacccttcagtaaaactgtttccctgatctttgaaagatctatttgaagcctcttagataccatctgttggcagtggtgttaactctagagagtgggactgggacttaggagtatggggcttgcatttttactttatacagtacataacatttggaaaagtttaaaacatatcagttctacatttaaaaaatacaaacccagaaaaatgacttgactttgaatttttatatgtggtagtgcttatagcttcatgcttcttaatattcatttgtccatggccctcagtaagaaatacatatttgtaaccaagatatgcatgtgtgctaagtctctttagtcgtgtccgactctttgccaccctagggactgtagcctgccaggcttctctgtccatggaattctccaggcaaggatactgcagtgggtcgcccatgccctcctctagggatctttccgacccagggatcgaaaccgtgcctcttacatctccttcgttggcaggcaggttctttaccactagcaccacctgggaagaccagttgagatagatgtttcacaaaatagtgtttatgctacttgtattgaaccttaaaaaaaaatttctaattgctgtattgcactcattgttctactatacttcactgaatgaagtgctcattatgtgtcacaaagttgatttaattacctgtgataggtcatggtccaacacctgaaaacagctttaaccttatggagtaaataccttaagaatttgaggcataagcttaggcttttgcttttactcctacctctggtttttgaaaataatttttttttggtgatgagaggtaggagagatttttcagtgcacttcgtaccacacatgtgcagttgcaaacttgacttctttgaaagccctaagtatcttcatttccaactctggatatacaac

SEQ ID NO: 58446 - DNA, 988 bp, Bovine  19866881464662
  misc_feature (1)..(1): n is a, c, g, or t
ntacttaggaagaacccagcaaatgtcagtgaaaaaagaacagtctacagagagaggtgatttactttgctcaaagttgcacaactaagtagacaccagggccaggtcttgcctccagggaggcctggctccaaacatagtctcctgccaagctgtccctctgtgggggcctcaaccatgaaccaggggactgatatttgttgccatgatcatgaggccagtcctcaatggggctgttccatccttgcccagaaggtgactgagagagggcaggagtggagaggcagtgagaatgtgaatactcttgttggcagtccccctggtcaccccaaattaacaggtccccaaaacagggtctctggcttgagggcagcagctgaggtccagggtgggatcctgcttcctagactgcactttgtgctgggaaacaaactcgaatacctatgggggcccaagcagtcatataaatgatagttcacttttcatttgttaggtatttctgtgcaccatttcattttgtcctcccttctgtgtgtagcaagtactgttacatgcccatttcacagctcgggaaattgagacatggaaagattaagaatcttgtctgtagtcagagtgctggttaagtccatggtcaatcagctggcctccgaagacctcacgctccattgctactctccgctcccctctccaaggactctcccagctctgatggctcttacaccactgcccagcatccaccccatcctcagagctgttccacacctccgtgtacacctggcaagcgtctgcttaaatgaagttatcttggccacagagtttcttctttgggttaatcatgagttatgatgaaaacaatatattttataatgctctgtggttagtgaatttatttggtcctcagacctcacctcctcaaccccaggtgtgtgtgcgtgtgctcatttgtatccaactcttacaagcccaggatgtactccaccaggca

SEQ ID NO: 58447 - DNA, 2000 bp, Bovine  19866881482704
  misc_feature (1)..(1): n is a, c, g, or t
nggggattcttgataaacatgtgtaataggattctatggctcagcgggtaaagaacccacctgccaatgcaggtaatgtaagagatgtgagtttaatctctggatcaggaagattctctggagaaggacatggcaacctactccagtattcttgcctggagaatcccatgggcagaggagcctggcaggctacagtccatatggttgcaaagagttggacatgactgaagccgcatagcatccatagcacgaaacataatttttgtttgtttgttttatttatttggctgtgctggatcttagttacaacatgtgggatctagctccctgactagggattgaatccaggccccctgcaatgggaactgagtcttagccactggaccaccagggaagtcccacaataggatttttgctaagagcaggccaaggacttagatattaagggtagggaatcagtaacttcatgaggtattaatggtgatgagatactaagaatggggcaagtcttgctaaactaactcagcaggatgcttgctaaaactgggctaggcaagagcccaagggtgaagaagagtcaaaaagaggactcagagtagcctgtctaaagttttgtcaaggagtctttgtcagaattctgtacctagccaaactgccagctgaatgtgagggcaaaataagaaacaagtagaatgcaaaatgggtaacatcatatactctatgtgaaaaaaatactcatagatacacttccataaaacttctgcaaaatgaaaatcgaatctaacaaagatctatatgacatcggataaaaaagatagaagtataagactagacaaagtgaaaaaggcttgggaaacaaaaattaaagatccataagatcctgatacatggaaagcttccttttgagctacaaagttttgatgctatacggatatatttctatcactaaggatctaatcatgttacttggttctacaactattacttatagaattataatatgtgggcacttgaaatctctgttaattttattgaaaagtcagtgggtgtctagatcctggtcatcaataatcatgttttttaatggcaagcaactttaccaaattttaacaatctatgaaaagtgctttcatttatctgcaaaaacagagaattgaaatttatgagtgttcagatacttctccaagttctcattgttccctgcctaattagggaatgtatatgtatcttattaactttcagtattctttgaagctacatgggaattcagactttgcaagctctcacttcctattatactattaataagcatcagaagctacttattagaataacaatctggaattgacttaaattgaaagaactttgtctcatactaaatggttcctcttaaaaccaaatccaaaggaagtaagaactctgctggtacttctctacatggatactttgaactatttgattaaaaactgcttgggcagggaataaactctgaagagatcaatggaagagacagacaagaggttgagctttgtgggatggactgtatttgcctggaataaagatgatgagcccattcaagatgctataaatgatgttggaaaaggagcagagaagggattttcaggcaatatctctagtagatcagaccagttaattcaagattagagggagatacgtttggaaagatggtttgggtttttttgttttttgaaagcaaaaggatcaaccatatcctgaaaactagggaagaagtgttgaaattttttcaatttgctttaagaaaaattatgctgttgttcttataaaaaatacattttcatgataaagaatttaagcaatgcaaaacacatacacacaaaagaaaaatattttaaatccctcaaaactcatcatcaaaaataaccactattaacatttggctaacttcattctaaatatctttgcatgctttattacagatagaatgatagataaatagggaatggtaaatgatatatcta

SEQ ID NO: 58448 - DNA, 1077 bp, Bovine  19866881492154
  misc_feature (1)..(1): n is a, c, g, or t
ngagggctggtgaggatgctggccccgtctgcagtgttctacaggtacctcactcccagggatgagggcagacatgcagaagggcagagaggtggggaaccagaaaggtccattgggtggcgctggtggctcagctactgcgcaggggcggcctgcttcgtaggtgaggtccgccgggatgtctgagccacgccgtaaggcacgtgggcggccaccgtgcccatctcctgagccccagccacgtggaacatctggtcgtcaaagaagatatgcgggcggatcttctccagaagggggcccttgggtgctcccgcaaggaacagggcctcatccgtctccaggccccagctgcgcagggtcttgagagcccgggcccccgagctggctgcactgcgtgctgtcaccaagtaggtgcgaatcggacactccagtcgcaggcccttggagtagaacttcttctgcagtctccccagtgcctccaggaagccctttaaggggccctacaagaaggtgaaggaacgctatgagcttacccatctcccaaacactttgccccctcaccagctgggctccctacagcactaagatcttgctgtttgtggttggagtgttttgcaggatccctattaatctctcagttctgctctgcctgctcaggctactgcatgcatcagttggattgtaggtacccacggcattctaggtgtccacactgctgtgtcagaaaaaacacacctgggcccctgttactatagcagcccaccaggtatatgggtgtctgtcctacagctctgtaagtgtggcttttgtgctcatcagcagggaggagattaaaaatatttagtaactatggcatgggcaccctttaaacagaatggattctggttgcagactactgggacagacagaccagtgtgtcactgcccagtatcgaccctgctcctggggcgcatgggtggctcagagtgtcgtgctccagtttcgtaggatcagggaaaggatcaggaaaggtgtgcttctaatcttggagacccctcacttgctgggtacctgggaaagcagaggtctcctggggct

SEQ ID NO: 58449 - DNA, 1523 bp, Bovine  19866881501418
  misc_feature (1)..(1): n is a, c, g, or t
ngacaggaaactgtggcagaaagaaagagacttgagagccccagggcaagcgccacgtgtaggacagggaggcagggcaacgacacccacccaggggctgagaggccaggaaacaagcagagacaaggtttcctgggcataaaaggatgggagaaacagaagaaagcaggttgcaaccagaccagactctggggttcctaggaggaggggggcaacttcaggtcacctcaaatactcttccccaagaagctcagccatcagccaagaccaatactgatgccatgctgccttccaagccctgctcatgatacgtaaactagttcttcaaatggggccagcacttcaaagactgtcggaaggaattccagtcagagaatggttaaggttgagttctcttaacgtcttccttcctggactttaagatttgatctggatctctgggtagaacatcagtaactcttctttttagtaacagggagatttggggagttgtcgtgtatggagttgctgaaaataaaagtttaagaaactgcctacttgcaattccctcaggatcctggagccagctagcgtaggacaagagtcactgtccttctcatcttagggccttggatcctcccccagtgctaacttacaacagttaagggtgaaactagagcacaatcatcactttcaacagggaagcagaagtcggggtctgctaataaggtaagtgacatccaggacagagaaaagtgagttcacttcctttcactgcaaaaactgaatctacaccctgtcttcccacaaggacaggaaaacctaaacaagctactcactcattccctaaagatctgggctcccatccagcttattatcgcagcctgtacaaaaagagagagattcaggtcctctcagaggggctacaaatgaaacagaacattgccaccagaaggaaccgctggctcagagcgctgactcactctaagagccccaatttctttccaagcctgcccctatcaccccaaagacaaagggtacaaagactataaaaggcaatttcttatattaaagtacatgggtggaagaaacgagaattcagggttggctggctctctggataagcatctggaatccggccccctacatcagcctggtcagccattccatttggactgaggtgggcccctgctatgtgagaccaaaagaaaagttaattcccaatggtgtttgtttaatgcagctctcgttcaccttcactcgggtcaccgccttcttctgctcacaaacacttaattgtctctgaaaagtaggtcactgccttgtggaacaagccggagggggagctaagacccagactctcactccaacaggcctggagaggcccaagccgtgtctaggagaccaggaccagtcaacagtgcactgtgccaagagcgctccaggtggcaacctggctactgccattcctaggtggtgattcagcaggttggtggagcagaagacgcccaggatgtgagggtgaggctcctgtcacgccaagg

SEQ ID NO: 58450 - DNA, 1087 bp, Bovine  19866881546245
  misc_feature (1)..(1): n is a, c, g, or t
ngatcactgtctgaacaaaaaatacacattagaggatttaatgactgaatggagtcattgacttcagctcagtttgaagacactgcagtgcccagtaaggacaaatagagggcccatatgtgcaacagcgtcacggactcccaccgcctgcctgccatggggcatggaatgctgtggaccagtcagactcaggtctttgcccttcttcccttctctgctcatctcagtctcccaaaatcctggctactccttccctgatgatttattgcctcttgaggcattaatacatctaccccagattattttaagtactccttctgggaagatttcttattttaccaatcccttctatcaccttttaaatatgactaattggtgttctaggtggggcttgctaaatggtttaaataatactaatcatttactaagcacttagtattgctcacaacaaccctaagaagcaggtgctatggtttatacttgttttacaaatatggaagttgggactgggagaagttaataatttgtcgaaggtcacaaagctggaaaatggagagcttgatttggaactgagctctgttggttgtgggaggttacctaaccatactacttcccacaagtttagaggtgattcaacagttacttcttgggcaccaacttgacccctggcactgagtattaattgtttaataacttacctgattaaagaccttaagatcatatttaggtttactcaccaaaagaatggcaatcttaatacaggcgcgtgcatgctcagttgcttcagtcatgtccaactcttttcaaccctatgcgttatagcccaccagactcctctggtctatgggattctccaggcccgaataactgtggcaggttgccatgccctcctccaggggattttcccaacccaaggatggacccctcatctcctgggtcctctgcatcgcaggcctggtggctcagatggtaaagaatctgcctgcaatgcaggagatccagattcaatctcgatcccccgggagaagggactggctacctactccagtattctagcctggaaaatcccatggacagagggagcttg

SEQ ID NO: 58451 - DNA, 1460 bp, Bovine  19866881576791
  misc_feature (1)..(1): n is a, c, g, or t
nttatttaaaaaaagaaaaaaattaaaagaccataactctaacttctcctaagcagagaggcaagagctggcttctgtcagtgagaaactgaataataataataataacaacaaccacaacctagttattatcattgtttttaacttccatgttctctgaaccttatttggcaaaatcctttgttagctgtatttggcagctagaaattcttattttgttttatttatttattatttgcttttgcatgtggctttatggttcattgaaaactgcacagggagaaagctgcaaaatttgagtataaatgcacttggtagcagacagaagcatcctctcctgtcgtctttatccctgtgtttctaagatggctccaccaaggatccctgcttaaccgagaagtgacgttctcagagggagtggagcactcagttttctttgttggctcagtctcctgaggagcagcattaatgtctcttcggttttcttctcattttgtaggatgaaaaggagcagcttatacaatccaagagttccgttgccagtcttgttgggagatcaaaatccgttgttcagctaaaaccacgcagtcctgaccacatgctaaagagcaccatatccgtgaaagccatctgtgactacaggcagattgaggtgaggaggtggggagggtaccctcctgctccaaagggagacaagggacaagggaagccttcagttagggttatgataataaggaaagatcagatgataagagttctgttgttagaacttaaacgtgcttaaatctatcattaaaagcataagcctcaactctacaatcttgacctgctccctgcctcagtaactgacatcattatctacccagttgcctaagcgtggctagaaatggggctttttagcatcctagagagaccatgactcctctcctcttttcctacagctgctaccacgtcagcgtttgtaaagaaacccctcactgtgcttcccaggtggcgcagtggtaaaggactggcctgccagtgcaggagacgtgggttcaatccctgggttcagaagatcccctggagtaggagatggcagcccactccagtattcttgcctggaaaatcccatggacagaggagcctggcagctacaatccatgagatcacaaagagtcagacacaacttgagggcacacatacacacacacacacaaatatccctcaagtattcttctttctatccctgctgcttctacctaaatcagacccacttggattattgcatcagcctcccattcaatgtattctttatcctaccaccagcatgatcttaaaaaaaaaaaaaaaaaatcactcccctgcctaagtcctacaacaattctccatttgttcttcttcattttattttttaagattttttttttcacacatgggccacttttaaagtctttattgaatttgttgcagtatttttt

SEQ ID NO: 58452 - DNA, 746 bp, Bovine  19866881755449
  misc_feature (1)..(1): n is a, c, g, or t
naaatggagctgtctgagcttctccccctccttctcccaatattttcttccggacaaccaaaaataaacacggctccttccttacccatgagctagaggcacattcttagcagtgtaagctgtcacctgagcatgcctgacaatgaaggggttaacatctctaagcaggatacatcttgttcctaggcccagatactccatccacccagaacacgaaggtgggtgagactccccctcaatcctcctccaacctctcactgactaattcactaaatataggctattgcttcaaagtaaaaaagacggggcccagggagatgaggcgacagagggctggtaagtttgggaaacagttaccagagggtcagctgtccagctggctctggaatctgaaaacttccaaatctaacaactgcctttctcagcaagaatcaaaagtatgtgaatcagctgtggaggataaaggttgtagagtccagtttcagaagccagtagcaaaccacttccttagccattgttcccaacaaacagcaaactgcagcaacctcaccttcagaccagctaccagctctaagagaaacgggagggagttagttatctctttggcgtatggagtgaaagcatctctctctcaatctctctctctgtatctctctccaaccacctccccatcttcaattttttcgggttgtaaaaccaaaaccattgaccaccccaacttttctaaattctgacgatgcaatttt

SEQ ID NO: 58453 - DNA, 1437 bp, Bovine  19866881778795
  misc_feature (1)..(1): n is a, c, g, or t
natttgtggggtgggagtgggtatgactacagcaggtcattacttccttggtctgggaggatggtgagggttctcgtgccccaggagagcctgaaccaagccgtagaggaggggcctctggtccttcgaacatacagcagtgggagaagcaggaggcgtgtcaggagcgaaagggggcatccccagggctggtgccagtgcctgtagtaccaggtctgggagtgtcattaatgggaggcgccaggctagcgcctggccactgcatttcctgggccataagaaagagatgcagtgaatgagtcgccctaagcctctgagctgttttataagctgccgcctcctttcccggattggtggagtggctaaggaagggacacagaaatttaagtgttgtctctttcttgcccatgtctgcattgctgtagcttttaggaaggattttcgtgtctgcctccctgctcctcgccccctattccccacccacccgcccagtacctcaaggtgaagtttcatcttacctcttgcaggaagttagtttctaaagttagcacataaagggaaaatctcaaataatcaaaattatccttgaaaaatatctcaaatggtccataaatccaagtgtgtaaacctggttttgtatatactccaggacagagttgggacaccatatgaagtattcagtctgtaattaagggtcaatttaagtgagaggatagctgttcttaaacactagaatcatattcaggattcaagatgctcacagtgtgtttgaggtacactggagcccagacttgctcatgtctcagatgcaagtcctatcacctcgtgttcacctcgtgcataacttcaccttggtgtgaaacctcatcaggtagaattgtgggtaaacctctgcacatgtttaaattccctctctctcttcaggcttctgtagttcaatgcaggtgtgttgagattctctggtatccttcttttgtgcattctgtttttcttatttactttttaagtcgttatttttttttcttctaaacatgttttataaccctctgcagtcttcttttatccaaaatacttatctgtgtgtctgtttattgcattcttaattattttcagtgatcaagattctttaaaggggggttgcaggagagagcaagtgggcagggaaggccttaaacaatcttcatttaattctgtaaccatagcttccactttcctcctctctggtcctctgctaacttacaattcttaccccttgcacataagaccctgactttccttcattttcttctccctttatgtcattcttcagtagaaaacttctgcttatgctaggccagttagaaatgaattcttgttatacctactatacatcactggtttagctctagatggttagttggttcatggattaaccccagattcatagtatcattaaga

SEQ ID NO: 58454 - DNA, 3127 bp, Bovine  19866880430772
  misc_feature (1)..(1): n is a, c, g, or t
nctgtatattgtcaccctgcttatttaacttatatgcagagtacatcatgagaaatgctgggctggatgaagcacaagctggaatcaagattgccgggagaaatatcaataacctcagatgtgcagatgacaccacccttatggcagaaagtgaagaggaactaaaaagcctcttgatgaaagtgaaagaggagagtgaaaaagttggcttaaagttcaacattcagaaaactaagatcatggcatccggtcccatcacttcatggcaaatagatggggaaacagtggaaacagtggctgactttacttttttgggctccaaaatcactgcagatggtgattgcagccatgaaattaaaagatgcttactccttggaaggaaagttatgaccaacctagacggcatattaaaaagcagagacattactttgtcaacaaaggtctgtctagtcaaggctatggtttttccagtagtcatgtatgaatgtgagagttggactataaagaaagatgagcactgaagaattgatgcttttgaactgtgatgttggagaagattcttgagagatccttggactgcaaggagttccaaccagtccatcataaagtcctgggtgttcattggaaggactgatgctgaagctgaaacaccaatacttcggccacctcatgtgaagagttgactcattggaaaagaccttgatgctgggagggattgagggcaggaggagaaggggacaacagaggatgagatggttggatggcatcactgactcaatggacatgagtctgggtaaactccggagttggtgatggacagggaggcctggcatgctgcggttcatggggtcgcaaagagtgaacacgactgagcgactgaactgaattgaactgcatttcctcaaaggaaaaaaagagatagagaaaaaatggtgtaggtttttagtgctaccactagggggcagagactggctgcaaactccaagccaggtccttgcaagaatcaaccaacccgtcagcctctcttttcctgttttctccctctccacgtccctgtcctctgtcctgtcgtgtccccaggtcccagctgcagcacaaaaattcatcatgccatgcctttgccagggcagtttcttctgcatggaatttccatcccttggggtgaaagttgaatttattagaagataaaccaaatatgagagagatgacctctgggggcatttactctgagacagtttctgttcggtgtctcacaactgcctaccagctaggttgtattgcccccatttcacagttgaagaaactgaggcttagagaggatcgtgcccaggatcatggagctagtcagaggctaaagaggaatttgaaactcagtctgtctgaatctagcactcctgacttttctaccacaaagattactttttaagtataagctgagttttccaggggacacacccagcagaagcggagggaaagggattcagaacaaggctctggagtggacagccccacccagattcccagcagcccacccctgctccaagccttcttctggggtgcagagagcggtaggtgcctacaccccagttctctgcccagggggatgagataggcttcaggcagctgttaccaggatcagagccctgtgaccctcctctagagactccaggctcttgtggacggcctggttcatctcgaggaaggccttgagacgcttctggatgtcctggctgacttcgaagagcttcccgtagtgctccaccatggctgccaccggggtttcttccggctcctccccttggttgtagcctacggagacagtgcgtggcaggatgggtgggcacagaatgcccagcccctgcctgccccctgcagtgatgctcacacggtggtggtggggaactgctgctgtcagctggagcctcagagttgagaaggctccatcatccaacacctcctgtcccttcaggagaagcctcagcatttgaaaggctgcaaggattcaggattgagtgattctggatcactgtcgagcgaggcaggagactccccacgccctgccccatcccctggaacccccaggagaaactgctggctgggggagcctgcaggaagaggacaggggtcgttgctgccctgagtgaacaggccccagccttggtgtttgctccttctaggtgggttgaacagggttgcatggctaggaaggccccaacctaggaggttgctggcagcagccctgggcgctgggtccacatcaagacctgtgcttggactggagccctgtgcccctccttggctcggtgctcaaggctctctggtgctgctcaaccttccaatcacacctcccagcaacccctgccgggccccggtgttccagcacactggaactcaccagccccaaacacaccacgcggggctccagcctacgtttgtgctgttccctctgcctgcagcgctggttcccctttgctgaacacctttgagctccatgagtggccccctcctccatgaagccttccctgacctccagggcagagtccttggggctcccacagctccagagcacttagcacagtggctctgaaatcagatagaccaaagtctgagacccagctccaccacttcctggctgggtgaccttgggtgagtcccttaacgtctctgagcctaggtaatacagttcccagaagctcctacgtgtatgcatgctcagtcacccagtcatatccaactgtttgcaaccccatggactgtagcctgccaggctctactgtccctgggattctccaggcaagaatactggattgccatttccttttccaggggatcttcctgacccagggatcaaacctgcgtctcctgcatctcgttctttgacaggcagattctttaccactgagctacctgggaagccctggcacctcgtaaggaggacttataccttagcacagagtaaatatttcataaacaataacagttattttattattgatggtgtaaagataataatatgatgataataatacaaatatgtaactatgacttcccttccatttcctaccaaattcccagcactgatcacagggattctggcacaaaccagatcaaacgagacacagaaacc

SEQ ID NO: 58455 - DNA, 2441 bp, Bovine  19866880639700
  misc_feature (1)..(1): n is a, c, g, or t
natctgagggcgatgtgaagggaagagagcgttgctttgggttaggccagtggatttgtgaaaaatgggagagcagagggcaaggtcatgacaacagcctgcctctctcgggtgctccgattctaaactgatagcatctctcctgggaagagggtccccccccaccccccgccacccacaagagcactggcaggcctggaaaggcacagacacaccccgaagggaatttctccagccttctgctgaagagaaagcttcacttttgtgaatgctgcacaaactagaaatgcagttagggagcagccactgctgattatactgtgcctgacagcccggcccgagacccaggacacctctcacgatggctcagagcagccgagattgagctcggggtccttcagtttggaaacagggatcatgacattcacaaaccatgtaacgtgttagcccactctgacagtgtacttgtcacagtgtactcctccccaggccaaggtgggagaggcagggagggggaacccctgcaccagttcagagatcagggtcagatttacattcctgtgaagaagggacaatcacttagcttgagcccgtgggtccacattccagcccagggcagtacgggaacctgggcccctgcctgcgattaagagcaccctgacactggtcttcccaaaggcagaaaatggacgcaagagtgccctttgtatacagggactgggagcagtctgttacccagccctggcacagtcttggctgtcagcagacactgcagtcttgacactgaagcaccagtagattcgaataaatccctgcagattggaacctttgaaggccttcgattaaggaaggcaattccacacccctgcattctccctttcttcccagaggggaagacagcttggctggcagtggccgtggcccagccagggctccttgagatcctgaggcagcaaggtgagcaggttattaagggccaagtccagatggatgaatgaggaggctggcaggagccagggctcttggctccccggcatctcccacagtggtggtctcccacactaacacctgctcatctccgtctttcccacctaacctctagccagcccataagagggaagggagaaagaagtcaaagacagcctcaaaaggcttgtctgctctgctcggctggagtctggttgcatgtgctggtcagtgcctccacctggctgcatcgctagatcctacttccaaggtgtgttagggatgacgagacagcttcttggtcctccaggaccctcgtctttctcagtgtctgtccaggtggggctggtggcagaaccctgcagggctgccctccagaaggcaggcagtcctggccctgagggaggtaaggggcccgacaacttgggcttcatgctgatggccacaggcccctttctagactttggtattaaagtcttgttcctcaagttcggggtgagaaagcactccatcgtgaatgtttggaagtacactggagatctccaagttggcctcagttcagcatcccacgtgcactccagcagctgactggacttgattttctatagaactggtaagaccttgagcttgagcttttcctccactgcagagaggcactgcctccagggaaaataaaccaaaggacatttttttacccaacaacagaatgtcagcactggcaggaacctcctccagatggagatttggacccagagatgggtagtgacctatgcaatgtctcagaactgggggtagagccagtctggcatccttgcccagagttataaaacattagatcctccatgaaaataaatattaaaaatattatcaccaagttaccagcagtccatagtgagtaggccttattcccagtgcctttgccccaaaggcggcaacgttctctaactatagtctaaatcgcttaaaaaactgaaaagccgtaatgtccattcagaatgcagtcccgttaggtgacaggctccactgcatggcctaaaattaatcaatgtttatcggctgcataaaggatgttgtagtgggatgttttatagagcaggtacacggagggggtggcagcctcggggaacacgtggtggttcagggccgtgtccatctcgtccacgtactccacctgcagggcgatgttcagggcctgggacagggccgtgatctggatgtggtcacactccatagccatgggctccacttcctgcaaaagccacaaggagaaaacaacccagttgaggatgcatgcccagcagaggacaggtgagaggtcctggctttttgcccagttgcagagctcaaaacctctgcaactgtgcaatggtctccacaacaggccttgaggcagatgtcgacacacgcattttctagagaaggaaacacaggctcagtgagaaaggaacagatagaaatcaccagaattaaaaggt

SEQ ID NO: 58456 - DNA, 664 bp, Bovine  19866880801844
  misc_feature (1)..(1): n is a, c, g, or t
natgtgtgactgcacttctggcggggatgaccacctctggagggaggagcctgcccttgagttggagcacagcccaacacacccagcccacacataagaaaagaacaccccctcccggaggaggagtgctgtggcactgagcaccctctcaccctccagagacagctgagggggcggctggagtttgggaagagttggcaaagtgacgatcaggccgggcgaggggcggaggcagttaatagtgaggaggactggggttgggggaaggtaaactgagcacgcaaatcctgttgctaatgaaacagttccctgcctgcccaaccccaaggctccatgtcgaggaaatgggaccccctcccacccccacttccccataacagccacctggagcctgcccctgcaagtgatgatgctaactgcctgttcaaggacaggccagaatacttcatgaggctgggctgctcatggggccacagagtccccttcaggacttcaaaaggatcaattccatctagcccacccaatgccctgcctgctaggctgcacgtctctgtctgacctccttcctcaatggctgcagcccatcaatgcttcctaccagctctgtcctgacctgggtggcagacaccccagctgtcgccctcctcactgttccttcccttat

SEQ ID NO: 58457 - DNA, 1895 bp, Bovine  19866880976938
  misc_feature (1)..(1): n is a, c, g, or t
ntagaaaagagatttgttcatactgttgcatggaggaatagaattgttcatcctcatggctgtgtgatattctattatatgaacataccatatatactcttggtggaaatttgttttcagattttggctgttatgaataatgctgctacagacattcttgtacaagtcttttggtgaatatacacatgcatttctttctttttttttttattttattttattttttttacacatgcatttcttttagttatgttcatagacgtagaactcctggtcacagcatatgcatatgtcccgcttagaagatactgctaaaccatcttcccaagtgcttgcacagtttatactgcttccagcagtgcatgagtggtctcaccctatgttttttaggaaacaaaagtgacaaactttgtagtacagaaatttctagtatatcaataatgaactacctatgtaatagcccatataattatctgttattctgtatctgatttacttatgtcatacaactttttctttccatgtaagagagtttccatgaatttttacacttagtttttaattgtgctagatggcttggctaggagactcttggttattagaaggtcttctttcaagggtgccacctctcgtcgctgtgctttttaatgattccaagggtcctatttttaaaaaatcatccaagttatccagtgtgaaagtgatgcacagatttcttgcctttgtgcatggaaattggaggcatcttcattttcgcatcctaggataagcaggattactgtttcacatattcagaggcgtacataatggattccagctgtatgtctcgcatcatcgctgaggcctcattacttaagtacttggcaaaccctgaactccctgttttggaaaagtactaggtctctgaatctaaggggtttggagattatttcccatctccttttgcttatcttttgctatgagaacaacgatgggaggcatctgtttctttttttcctatttactggagcttctgaaggctgtctgtgacatcagtggaaagcagaatgctttcatgggatctgcaagaaaagcttaaaaataaagagtaaactattttcatcaatgtaaaggtgacccgtataatgtcattgggaagacctagagcttaataacaggatgcaattgtgagagatttgagcagttttcatcttgttaacatagctgtttttgatcccttatttaaatacctacatgtgggacttccctggtggcccagtagctgagcctctgtgctcccaatgcagggggcctgggttcaatccctggtcagggagctaaatcccacatgcctcaactaaagagttcagatgccacaatgaagaccaaagatcccacgtgctgtaagacccatcacagccatataaataaatatgaaaaaataaatataaataaataaaatacctataggtttctatgagaaaatatactataaagtaatgctaaaacaaatgcttgtatgaagattcaaataaaatgcaggttaagttctgtaactgcaatgtacctatattatggcatatagatgtgtggatgttataaatgtatatatatgtttgtgtgtgtatatatttattttcatgaacaattagttcatactgacacttgagacgtagctaagtgaggcacaaggagactgaattttgtccccaaacttatctaattagttcccagtaaaaatttggggttttattgctttactcccaatcttgttgtatagtggtttcttagtagttacattattatttaaagtattgactcaactaagtggtaaaaatcataactcttagaattagggtcacatgaagggaattaagggcttccccagtggctcaatggtaatgaggagtgcaatg

SEQ ID NO: 58458 - DNA, 768 bp, Bovine  19866881108256
  misc_feature (1)..(1): n is a, c, g, or t
ntcgtcagtctcacaatggatcttggtctctgtcagcgtctctaccgtagcctcctttcttgtgaggtcaatgaccttgggcttgcccctcatgccaatcttctgcatgaggaggtcaagtttggcagttttgtcgattttcttagcgtgcttcttgtgaaggatacgggcaggagcttgatgtaccagggtcagtgtggcggaaaaaacaagggtctgtctctttgggttgtactgggaatcactgagcatctctagcagctgtgagagctcagcaaagtggcctttctcaaccatccggtcagcctcatcaatcaccaggcacctacagatccagacagacccgtgatcaccaggttagtagcaggaaagaggagtcaccacagcatactctgccagtgcccacccccctacccctggccaacccaagacaaacaccactttcaccacctccaccagggccctcaactaacctccttcacacatgcttggttttctaaaggccaagtccctagtacctagtagggtacctagtaccaaggcttagtaccccacgatggcactttgtgacagggaggatgcactgtgccaagtcacctcaggcccacttcagaacaaggggtgggggaaaaagggaggtactctcacctgagctgccgaaggttgctcaaatgagggtgcttttctttaactagctcccacagccggcctggagtggcgatcacgatctcaggctggcggttcagcatcctctgctgtttctgcgtg

SEQ ID NO: 58459 - DNA, 1659 bp, Bovine  19866881252625
  misc_feature (1)..(1): n is a, c, g, or t
nactttagaaagccaggcggcacttccttaagtgttagctcctgttgatgcggacgttaatattcgtgcgtgaacctagcaagaattagcagagagtggtggttaggagcatgggctctcaaacctcacttccagcctttgaatgcttcttggctgcttctcagtgggttagcttttggcatgttacttagtgtctttggtttcagtgtctttgtaaattgggagtggtgatgctgctgcctacttcatggggttattctgatgagatgaactaatgctgatggattactcctagcaccgtgtaagtactctgctgctgcctacttcatggggttattctgatgagatgaacttaggctgatggattacctggcaccgtgtaagtactcagtaactggtgtaattatttctccttttaaatccttcttgctttctttttttttcctttaaatctttcacacttttaacagtctttgagggtgccagttcagttgagcaaatctttattcttcctctttttgggagagtccaggtcagtctgtgggaagtatccagatgaacgaaatacagttcccagcccctaagaagtatcaaatccactagaggaggtgagatgcctgcagccataatttaaggcagaagatactagaaagtggcaaaataaagttggacaaagagataacttctggtgtgggaggttaggttggaaagtgctttctaaaagatgcttggcatttagggatggagaggattccggcatgtagaggtagggacggaaggaggagagaacgtgtggtagagggctgttgctgggcagtgagaagagggggtgtgtgctctaagaggaagtgaagggtatttcacgtctcgcaccatcatgagccatgggttaggcactgaattaaatttgcccattctggtccattttagttcactgattcctaaaatgtcgatgtttactcttgctgtctgtctcctgtttgaccacttccatttgccttgattcatggacctaacattccacattcctgtgcaatgttgttctttacagcatcggactttacttccatcaccagtcacatccacaactgggtgttgtttttgctttgtctcagcgtcttcattctttctggagctgtttctccactcttctccagtagcatattgggcacttaccaacctggggagttcatctttcagtgtcatatctttctgccttttcatactgttcatgaattctcaaggcaagaatgcttaagtggtttgccatttcattctccagtggaccacgttctgtcagacctctccaccatgacccatctgtcttgggtggccctacagggcatggctcatagttcactgaattacacaaggctgtgatccatgtgatcagtttggttagttttctgtgattgtggttttcattctttcttccctgtgatggataaggataaaaggcttgtggaagcttcctgatgagagggacaggctatgggaagtctgggtcttgccttgaagggcggggccatgctcaggaaatctttaatacaattttctgttgatgggggggctgtgttctctccactgtggtttgtcctgaggccaaatatggtaggggtaatggagacctccttcaaaaggacttaagccagcatgctg

SEQ ID NO: 58460 - DNA, 792 bp, Bovine  19866881487896
  misc_feature (1)..(1): n is a, c, g, or t
ncttatgttttaaaaacaagtaagtttttgcatgaaaatggttcttgagaagaatttgaagtatttaggcggctagagtattacagattgttttggtaacactgtagtgacctaatgaatgctgtatcaaaaaggtaccgtataaatacaccctactgacttttaaaaatatagagtatatatattattaagtttctggcaacttggaatcagtggagtgcaacagatagtttcattgtactagaagaaagttgtatgattctgctatagctaattttgttgctgttcctgctgttgttatgattattagtattttactatagtgaaatttaccaaatctatttttataaagtatagcaaactggcaggtcataggggaaaatgaggtcaaattttaaagtaagtaataatggtctcaatattttttcagtaagacgtgtagataatcatgttttagcataaacataattaatatctccatgtatttgttgtaagatttacctaatgaaatttcatctctggcttaatttttatatctaattgatgcatttaaagtttaaaattgtcagaagtttggtgttcattattaaaagcagttgttttcaagttaatccatgctttttacaatgtaaattataatcacaaatttatagttacaaatcttaaatttgtgttttctttgtaagtgctggtcaggatatccagggaacaagcgtgattgcgaatcttccatttctgatgcgacagaaccctgctgagacacttcggagagtcttgccaaaagttagagta

SEQ ID NO: 58461 - DNA, 2651 bp, Bovine  19866880159292
  misc_feature (1)..(1): n is a, c, g, or t
nttgcatttctctgataacgagtgatgttaggcatcttttcatgtgtttgttagccatctgtgtgtcttccttggagaaatgtctatttagttttttggcccactttttggattgggtcatttatttttctggaattgagctgtaggagttgcttgtacatttttgagattagttgtttgtcagttgcttcatttgctattattttcccccattatgaaggctgccttttcaccttgcttatagtttcctttgttgtgcagaagcttttaaggttaattaggtcccatttgtttatttttgcttttatttccaatattctgggaggtgcgtcatagaggatcctgctgtgatgtatgttggagagtgttttgcctatgttctcctctaggagttttatagtttctggtcttacatttagatctttaagccattttgagtttatttttgtgtatggtgttagaaagtgttatagtttcattcttttataagtggttgaccagttttcccagcaccacttgttaaagagattgtctttaatcattgtatattcttgcctcctttgtcaaaggtaaggtgtccataggtgcatggatttatctctgggttttctattttgttccattgatctatatttctgtctttgtgccagtaccatactcagacatcaagcttttcaaaactccagctgaatgtgacaaaggtagtagtttccagatttcttgatatttccactacatgtatcaggctgatgaactgaatttctcaatttatagccacatttttttcataatgtaggacgtgtccatttctgtcaacctaaatatcatgttcctactgctatttcaaattaatagcttctttaagttaactatatttttgttgtactactattttgtttgtggctttctctatttcagccttactaaaattaatgaattaatacagaaactaatgaaactataatgcactgaaacttgacaacatccaacatactatctcttgctaaatggtcctttctgtgtttagttttgtccttttttatcctgatttgctgtatccacagtgctagaaccagaagatactcagagctatttgttgaatgaataattgagtgctgtcttcttaaaaagtaaagaaaaaggaatgcttaaaccaggatagaaactgtaacattaaaaaaaactgaaatatttcattcaatgggtaaaaagagaactaatttgctacatacattgaagacttgcatgtctactgtttcttatagactttccaatatccctagcatccagggaaagcaggtacttcattggccaaatgcatttattgacttatctaaaggttacatattcagtaaatagaagtgttcagactcttgactctgagtttattgtcctacctactataaaatgctacactctgaattatttggggtttcacagacatcacggtaataatttgtccagttactcagtattttctctttagaagaattaattgatatgaaagctagcagcttctggattgtgacctgctgggggagagagtaactggagttctgaacactttttaataaaaaatacaaacaagatttagcaagaagggccatgagtcaaaaacatcagtaaaatatttccacaactattttggttcatttattttttcctataagaaatgcaagcctttgtttatttaaagatatgcaactttccatttattaatatcctttttagtcagaccacataatgtaggcagggaatgttagataaaacatctgcagaacagacttgctttccatgactgatgttgttccacagagatatgtcataagcaatatagctgctggaaactcaaatagcagcataaataagatatatccatggaaagttttgaaaaaccttaaaataattctcctgtatttttagtttcctaagcttataatcaaggcatcgtatttatcttactattacagacttgtgcgtcctctaccaaaatggtttgcatggagacagatgctctgcactgagaaaatatcaagaaaataatgaattggaagttacaagtgccttcagccaaaagtccaaagggaattgtcaccttgaaattatatgtagcagaaggagccaaagaaaacaatgaaatggcaaaagtgccagtgttaatccagaaattaatctcaggggtgtttaggccaggttaattgaaccaacaatagtctttctttcattttgaaccaaagcatgtccaaaaggagaggggaggccaaaatatcttcaactagattaggtgaaacaggacagctgaatcagcagcataatcaagaaatatttgaaaaagtgacatgtatttattgggcaagatatataaatgtagctccatcacttgagtttacaaattagaaatgacagcacttacctgggaaaaggaaaccatcaaaaacaaagtactgattgagtgacattaagctacatgcagtttaagcattctgtgcataaataaaattcattcctgccttccagaaacttagattctaagaaatataatagcaatattagaaacaacaataacctctatcattattggagccatttcttgagctactgggtagtgctaactaatatgccaggggctcctttggtggctcagtagtaaa

SEQ ID NO: 58462 - DNA, 2980 bp, Bovine  19866880209333
  misc_feature (1)..(1): n is a, c, g, or t
ncctcctccctccccataccctccctctgggtcgtcccagtgcaccagccccaagcatccagtatcgtgcatcaaacctggactggcgactcgtttcatacatgatattatacatgtttcaatgctattctcccaaatctccccaccctctccgtctcccacagagtccgtaagactgatctatacatcagtgtctcttttgctgtctcgtacacagataagttttgagaggaagtgaaagtattcaatctgttgtgcttagtgggaatactgctcatttgcctttgtgtgcgtgcttgctaagtcgcttcagtcatgtccaactctttatgaccccatggactctagcccaccaggctcctctgtccatgggattctccaggcaagaatactggagtgggtcaccatgccttcagagatgttttatttttgtttctgtagaatcattatggacagtagcaagatcattaaatcatagacagccttggccctcttagatgtctagatgtctagtcttcagaaactgaattgtgtagacagttctaggtcttctcctgtgtacatgagagctgagtggtacctgatctcctcctccttcatattccaaagaggaggcttatggagttgcctctccatttacctcccttctcttggaaatgcctctctctcacttaccatcccattgcacccatctgcctggagacccttcttcttccaattcaaatccagtagtagctcaccttctctgtctgagagcactgcccagcctttccaaggatttatggctccatgtctaatccacacaactcttggtgtgtatttttgcctattttatgtaagtgctccatgcgtctcctagaccactctcttgcgtgcacacctttaactttaattctcttacatacaccttatatatgtctctcaggtacctcaaattcattgggcacagagctaagctcattctagcctttcctgaagtcactttcccttcagcactctgtatcttggtgaatgacactcctgctaaggagagccccactcccttcccgctgttacccaatctgaagtcctccaactctgcaaggagaaatcagagcaggtccctcctttttgaaaatactcatttatgcaacacccatttatgcaataaataaatagccttgagtaaggctcatgtgttgacttactcaaacccctcaagcctttgcacagacatacaccctggctttggcatattaaaccactcaggatttctggaagacagcatttctctcttctcagggattttatatttactgcaccattttggaaaacccctttaccttcacttcctagaaaattcccatcatcacctttatacttcctcctccgctttcaccagctcatctcacaagcctttctaagatccctcaaactgagatgggtgcccctgtagtgggctgcctcgggtctctgggcttactttatgcataacacctgacactgtgatgcaatagacactaagaaccatagccaatgtttatttaggattattttgatcaaggaattgtaagaagtgttttatggagagcaggccatctaaatgtgattgttttattactaatgtaacagacacagttgtcggtttacctgccttatgcgtgaccctccttggagattagccatcgtccctgctgagagagcagtggatcccttgcctgccccgctggcctcagtgcattggagtaggacaaacacttgattcagtctgggtcaaccaaattctcccttattgaaatcttgaatttggactctgtacgatataggaggtcactgaaagctcagctaagagtaatgactacttttcatcctgtgggtgcagaataagcccaagcagaaaggagactggagctctgcagcccacgggtcctggggaggcagatagcggacctctggttctgacttcaacctgatggtttcagcccctcatgaggcctgagtaaacatactgcctaggggtccaggacatttctgtgtgtctgcccctagatttccttcttagctaagctaaatgactgcattctattgcttgaaatccaagtgttcctaattaaggtattgatctttaccacaatactgactatgagccttttaaggacatggagtgtggactgggtaccttcagatagttaaagccagtgtggcttcttatagctggtgttcctgggtgtaccacttgaatcaggctttttgtgaagcttattactccagtttagagttgcattttgtatatgtgataaattttctaatctaacacaatcatttctttttaatagtatacttaggatgttctaactatgattaatgggctgtacctcctagagctgcttagcatctgaaaaaattaaggctaatgtttaatgtgtgcaatccattgttggttttacagtagttaccaggaatctagtattccaaagatggtattaaatatgtgtgtgtgtgtacatgtgtaatctctaaacatccatttatgtgcacacatttgaatttctacttacaaagggtaatagaaacagaattcttaagacctttaattggtactttcatgctccctgtatacttcactagtgggtgatcaagatgattaatattatagaaatgcatatggttatcagagattcaagaagtaagaagaataaagatgtaagcatatgtgtgatctgaacagatgtctgtcctaacacagggccggtcaataattaagaagtacccattcaggcttccctggtggctcagacagtaaagcacctgtctgcaatgtggaagacccaggtttgagccctgggttgggaagatgccctggagaaggaaatagcaatccactccaggactattgcctggagaatcccagggacagaggagcctggtaggctacagtccatggggctgcaaagagtcggacacgactgagcgacttcacttacttactcacttacccatt

SEQ ID NO: 58463 - DNA, 1304 bp, Bovine  19866880486835
  misc_feature (1)..(1): n is a, c, g, or t
nggatcaaacccaggtctcccgcattgcaggcagacgcctcaccatctgagccaccagggaagcccatttaaattataagcagtggtttataacactccagtctaacagaagcaatgggtgacacaatgtgacagcacatgtcaccatcactttgtaatccccctctgcttttcattaaaaacaggtctttgaatccaaataaattagattttaaagaacaaattgaaagtttaatttgattgccaacaatgcagacacattgctctttccctcaggccacctataacatctttttaaatccaagcgacaatgtgaataaatattaaggagtacatgtttgaatttaatttagtggaactattttcactaaatgaaatatttttaaaaacatctatattcattgtgagtatatttcatagtactttgaaaaaaattgtataatttatccagaatattagaaatttagagctagagagattatctcagaggctatctaatccactggtactcaaactacatctacgccttgcattgtttttctagtctaccactgattttgtaaaatataataaatatgaatctaaatataaatataaaatataaaataataaaaagaagagaagtttccatttttaatcattagttgcaacagacataaaattactctgaaaaaccatgtaaaatttggaacaaacactctcaatctgtacttattttaaatgagatagttcattggtcatttgttgtttttagttgttaagtcatgtccaactctttggactccatggactatagcctgccatgctcctatgtccctggggattttccaggcaagaatactggagtggtttgccatttccttctccactctgggtcatcactggttagcaaattatacttggagtgtcacttgtaaagtctctttattttatagatgaatgaagtgagaactataaaaatttctttttttaaaaaactgtataaaaatgatctagattcttcacataatttatttagtcctcagaaaatctttgcctgttaaatatcatccttacatagctgaagatactaatgctcataaaaaagacacatctaataatatctaacacatctaatgacttctaaaacatctaacacatctaataacgaagtctcaccaatggagcggacatgctgcctgagaccttttcccagtggggactccagatgtgctgtgacatggtacttcacagcgctgattaagtctggatgccagtcaaaacgcaatttgaaggacatgtgctcgctgatgaacaaccatcaa

SEQ ID NO: 58464 - DNA, 1905 bp, Bovine  19866880570304
  misc_feature (1)..(1): n is a, c, g, or t
ntttagatgacactgacatctgtatttatataatgataactgtctcatttttaatcataaaggtttaagataaggtactgatattaatggaaaaactgccagaaaaaaaataaaaagatttttttaacaaattaatcatgttctttctgctaaaactgactttattcagacattgctcacaaagacagtagcacctcaacaaaatgaagttctaatagtttaattaagatttaatcttcttattttaatgatcatgactttcaaaataagtgctttcattccttcctaacgcaccaatagtctgttgaggttatattctgtaaagccctactttctatagagcaagcttgaagtttacaatttcccctgtgcatttttatttaaaaagtggggagggtgaaagactgaattatgaaggcatttatattaattcatttaccttctccagggatgaagatggatttgtatagtcatattgcactgaaatgtaactgctttaatatatggtaggtttttcaagaactccttgtaaaaaggaaaaaggttaaagtcactaatttatgagaagaaaatatatataataaattagaatgtatacaattttgggatcataatttttctactattgaatatcaaatctattaaactataacaaaaatgatagtagataaagaggaataatgaaaaaataaaaaatctggaagcagattcagtcattcaacacttcagtgtagacaaaaatctcatcacaggttttaggaaggaaactcatgcagcagagtttaagccaagatcttatcagttaattgcagattcatatgacaataattaattaatgcatttttggtcaactttattatttttgtgatcatcatacatgtcaaacaacatattgaaaaaaaaaaatcaatagtttatacaaagtattgtcactttagccattgtgtagacatctttcagggtgattagttttctgtgacttcctgaaaatagtttgagaacatgtagaagttcaacttgtaggaggaaaaaaaaaaactaatctggtagaaaataagaactatttagtaaaaataatattgaaagagtttgagaaattttataccgatatgaagattttaaagttctagcaaccagtggagaattaacatagttaaatgtagctgtgttagagtcttaagacatcgttatttgtgtaccattgagaaaagaacaagaaaatctgcccaatactactaattgaattaatcaatgctttggaagctttagaaatgtttattcaaagaactcttttgaactgattaatgtgtatatatttttacaatgaataaataaaaatgaaaatattagcaaaacacattggtttaagtattcctgaaacaacttccaaccagaattattaaactctgtgttttaacataatgttattttctgggcaatcaagagtgttgatgatacagcatttattaagagagggctctaccattgtctttgaggttttctccttatccatcaacaccattctgtaacatttgatgcctgggctttcttactctggagaaggaaacggcaacccagtccagtattcatgcctggaaaatcccatggaccgaggagccaggtgggctacaatccatggggtcgcaaatagtcagatacgactgagcgacttctgtgttctgttccttactcttaccagaagtaccaagtggtgtcaaccacgttatgactgccacaaggccaagaatgtttgagagaagaaaagatttatcctgattttagatctgtttaaaatgagaaaaggaaatgcatctcacagttgatgatatactgtatgtatgtgtgtgtgtgtcctcagacatgtctaactctctgtgaccgcatagactgtaccccaccaggttc

SEQ ID NO: 58465 - DNA, 1543 bp, Bovine  19866880591538
  misc_feature (1)..(1): n is a, c, g, or t
ngtcctggagtttacctttagcatcattccttccaaataacacccaggactgatctcctttagaacgggctggttggatctccttgcagtccaagggactctcaagagtcttctccaacaccacagttcaaaagcatcaattcttcagcgctcagctttctatatgcatccaaatactgtataaacatgaattgtcaatgagacagtttagtattctgagagaacaatcataaccacaatccaaatagctgagtatatttttctaagcaaaggaacagtgttgcagctgatttcataattgaagaaaacaggaaaaagactgtgaaaagggaggaaactgccaggagagaagaatgcaagttacaagtgtggcataggagggccaaaagggatacaaataatgatgtgtattcatttattatttgtcattcagcgaagtgctgagctgcatatcaaggctttgactctattagcagatctagtgctggcagggcggtcgaccggtgacagctgtgcagggtactgaaaacagatgggctctgaaagcgcgtgagcttagtttcacatggcggctctagtattcagtggcttcacaactgctagtagtttctttagcatctcttggtcttagtttccaatttgtaaaaggggggaaagccactactgtggtgttatgaggattaactataatgaaagtaaatgtctttcaacacctaccctacaaaacaccctcagtgaaaggcagcaattatcattatgtgacgttagactcagcactgaatctctgtctctctataattttctaatctataaaatggaaactaaagaacaaaaaaaaactcttctatcttacaaaaagtctgtggaggtataaatgagcttgagcactttgttgacattttggacaattccattaaacagagttctttcagaatcctgtccccaggccccagcccccaaaagaaaatcaagctagttataaataaataagctggtcttctttaaataatcattcatttcatccaaactttaaaatatttccaaactgtgactatttctttgctattcttctcatattttttatgtttacagtatccacattttttcatattatttccagttcaaatccaaaaatataaaaaaggaaacatttgggggaagagtcttcctttgtaatagttggctttcttgtaccttttgaaagcctgcatatatttgaatggatcagtgagttacctgcaccccgcgattttcccctccgcctctcacagccattctaaaccacccaggctagagtcagtttccctcgatacagttgcccagttgcttctggtttttgtttgcatttctgttcaattgagtgttccagtttcttccctttagctgctatggccagacttatcttctgaaataaaatgaaaagacattatagtcaagtaagttatatcgcgaggagggcttgtgtccaaatccctttctcctctttaccctggtgaacagagctagaaaacgcagcagcctcatgatccctgccatcctcccc

SEQ ID NO: 58466 - DNA, 1293 bp, Bovine  19866880690907
  misc_feature (1)..(1): n is a, c, g, or t
naaacatataatggggagacctcgagggagaacccttataaatacaagattttcttctttatctctcatttgctttattcatcttcttagatttaagtctgtcattaatgttctgaaagtaaaatttccaaagtgctttgcagggctgatatttctatcactaccccagcaatttaaaattgagtaaacaccatcaggctccattcactcatgcaaggattcatgattctaattgctgttccctaagtattatatattgtttgcacaaaatagcattgcttggccttcagataatcagttcaatgacagctgcaatgaatcttcctcctactattcagtgtcaggtgcatttcacagctttactgtctcccttttgtgaacactaattatctgaatcttctgagcttaatgcttatgctgaagcatctgtattctgtaatactataattcaggaaggcacctggatttcttctaataaggtgtacccctgatttctcttgtgttatcaccttttcccatccaatatcacagtcaaaggaagcaggctacttctcatgtagattttaaacaaattctagtgaagtgacagatgaacacaggcatttatttctcacccatataaaatccaacgtggggagatgtcagaggctcggaggctctccttcatgtaattatgcagaaatacaagatctttcaatcttgcaattatgtcattaaaaaaaagaaaattggccatattgcctggcatgtgggatcttagttccctgaccagagatcaagctcacaccctttgcagtagaagcacagagtcttaaccactgaactaccaaggaagttcctccatcaactttaacatgtgacttccaagattactgcagttttcttcatctcagtcatccaaaagggaaagagcataaagacatacacttgaaaggctttcataggccagaacaataatccagaacatcaaaggaaactattagcaaggtgaaaagacagccttcagaatgggagaaaataatagcaaatgaagcaaccaacaaacaactaatctcaaaaatatacaagcaactcctacagctcaactccagaaaaataaacgacccaatcaaaaaatgggccaaagaactaaatagacatttctccaaagaagacatacagatggctaacaaacacatgaaaagatgctcaacatcactcattatcagagaaatgcaaatcaaaaccactatgaggtaccatttcacaccagtcagaatggctgcgatcccaaaagtctacaaataataaatg

SEQ ID NO: 58467 - DNA, 957 bp, Bovine  19866880748369
  misc_feature (1)..(1): n is a, c, g, or t
ncagcacgccaggcttccctgtcctcaccaattcccagagcttactcaaactcacgtccatcaagtcagcaataccatccaacaatctcatccgccgtccccttctcctcccaccttcaatctttcccagcatcagggtcttttccaatgagtcaattcttcacatcaggtggccaaagtattggagtttcagcttcagcattaatccttccaatgaacacccaggactggtctcctttaggatggactggttggatctccctccagtccaagggactctcaagattcttctccaacaccacagttcaaaagcatcaaaagtttagtggcagagtttagtgacggagaattagcactaggtgatgctgggatgtgcaggagggcaggcaggacagtctttaaacaggtgcccagccacccggggttcagaggccagctttccagacccagcaggaaacagaaacgccagacactaaaggcaaagccacatttctagaagaaatgggtgtttaatctgctgagacatttgagaaacccaattcgaagaacaaagtggggttctgtgaattagcatagcgcacacaagaggtctgttattctgcaggcagaagcccactttcagggcaggagacgccgcggtgacttataccaagttccaggctaaacgtggaccaggggttggggaggtcatcacatgaggctgtgttcaaagcagggggcagtccagtcagacaggagggctccatcgattgccttctaccacatcatagcgctgtcagatgtgaccgaaagcccatctttctgctggctgctctcgatcaatgtgatggatctgcccctcagaggcctgtctgaatcctattattctgcctacacgcatgtgaagctaaattaatgatgatgactcatgggcttccaagcatctgtaaactgttattatcatcatccacaccagca

SEQ ID NO: 58468 - DNA, 2017 bp, Bovine  19866880785276
  misc_feature (1)..(1): n is a, c, g, or t
ncaagtaagtgatgcatgtgactaaaactcaagtcatttgactcaactcaacagtctttccaataggatcctactgcttcgttgactttcttaacataatacctttagaggccatcaactggcttaatagaactttagtcctgacaggacgttcagaggcattcttgtgttttgtgtgtaaagatgatgctttatgttttccatggtacaaagaaagaattcaagagtaaagagacttttcttctttcaaacctgaagaatgcactttctcacttgccccagggtttacctcttcaccggcaacaaagttattgaccccaaatgaagccaataccctctcagaattgaagacaatcatcttcctggtgataagcacctggatttagggctaaaatcctgccttttaccctcctacttaacaatttttaaaataaaatcaggttgtactaacatacaggactgtttggctctccatgctaagctcgcttctgcagctttctctttagtcacgtcagggagtggacaaagcaggaaggtacaaacgcagctcactgttgtgctgacacatctctcataaataatcaagatttaatcacaaaacacatacaatgagggttttaaagagcctattcatgaatttgaatctttgttcaccggattcttttaccaaatggtgcagcaggcagtgaggagactatatttacggctcattaataaagattgctttctgaaaagcatatctttcacataatcatgaagatgagggaatttttaaaggaattataccagtgaaaagtgattgatgtgcgattagcagtgattcctttaactcaactgagattttatatttgaataattcctgtaagtatatcttttgtgcaaatacatttttgattggtaatgaatgttactagttatttcattttcagcctacagactgatctgatatgatcctgtatcctttatatgtggtcttgattgacaatccaaaaattcatgctgggagactgcaaaagaaattgtctagcataccacctgaggggataatgtgaagaaactgcagacaatagatgaaacaggtcactctggcaattatggaatgtgagaaaaatttgcttcttccctgtgtctaagagcagtgagagaaatttattcagctttctacatgatttatcaaaaactggtccaaaaacctcttttaaaactcctgtttaccattttataaagtagagctgttaaaaaaccattatgaatatttccaaagatgtatgagtttctgaagggtattcccaagctcaaaaaatacatatatggttatcgaccttaacaattgacttgtaaggctgccaggctattaatgagcatctttaaaattttcatagtcttctgttattactactactgttgctaccgagtacaggaccattatcagctgcaattattggaggctcaccatggaccaatgtgattcacaaacactgtcttatttaatcctcatcacatatgagatatgtattctatgaacctttcatatgtgagaaatcagatttagataagttaactaacttgagtaaggtattcaagttgacagtgccagagattaaaataaagcatctcaacaattttttgcagggaaaatgcttccacagccagcaagagtcagaaaatgctttccaagagttcataaaatccagaagcatagatttccatgctacaggaataagtaaacttattcttgttggcaaaaatgtgatgattgcaatggttcctattttgattaataaagatatgtttgagacttgttataatgagttaaaattcatggtcccaaactgcaattagatttgcaccaactaatacatatctgtatttaagaatattaataacagttaatttaaatgtattaattaattcatagtctgttttatttattagcggaaggaagcgtagtatagcagtgtggggtaaacagacagactctggggccagatttcctgggtttcaattccagctctta

SEQ ID NO: 58469 - DNA, 1000 bp, Bovine  19866880985217
  misc_feature (1)..(1): n is a, c, g, or t
nattaaagtagtgggtatgtggattttattaattggtaaggtctgaccttatacctgtttacagagaaaatgacatgcatattgtacaaaagcacattttgtatctgtgattacaaaagatcaagaagaagcctatttccaaagaaaattctgtttgttagctaccaagaatttagctgactcacttcattccttttctccttttgggaaaacttgcccagccaaccacaaaatggctctgggagacacaggtcccagcaggacaagagacaagtattctcctcttcacaagaaagccccttccttcaaaggtatttatttgaaatttctctttgctattttcacatcaatcctgaagttattttccagcagagcgtatatacattttaatcagcattatctcaagaggaaatgctatactgtaattaatggctcaagaattgtgataaatacaattgcctgacagtcatagttttgtgttaactgtatgattgctgttcgtgctttgtttattcaaaagtcatgttattatcatctgcagataattagcatttactgccagtattcagagcataagcaaggcagtgccatgctggccagtgattttgtttaacatgctgcattacagccctcactgcaaggaggtcgtgcctactcagtattactctgtgtgatggagattaagatgatgaaaggttaccttttgtgatgccttagaaaaatgtagcacattaaagggaaatcaaaagttgctcaatatattctacaaaacatagcacttggtctgtctttgttcttattcttcccatattttagcttcacacaagagaaataacctctggcttatagtgaatactacataaaaaaaaaaaaaaattgaaccataaaacatcagaaggcagtattgtttaccagtgttgtgttcagccacagaggagcccaaggcagaagaactcaacagtattgatactgtttctgcttaaaatgttgctactttatt

SEQ ID NO: 58470 - DNA, 1538 bp, Bovine  19866881019696
  misc_feature (1)..(1): n is a, c, g, or t
ntctttgtataatattaagactagcccattaggagaaattttgaaatttaccaagaaatgaatcagtagtgtgcttttttgtttttaaaaaaacagagctatcgattaaagaatagtgtcatctttttccccttgtactcaaattcaacacttcttaaatattccccaagaggtaggggcatttctagaatgattatatatctatcttaggtgagttgagtgagatgaaagaaactttgcttaattgaaaaaggatgattggatatgttgagatcaagagcttcctgaaaagacaggattctgtttgaaatgcattagaacaaagaagtttgtagttcagaaagatgtaaataaaacactgctccgaagacatttttgttgcttacttgcagctgttatttacttgagattttggttatttaagtatactttattccagaagatattcaagatcatagttgtggcagatttttaattatatacaaagctatactaagtggaacatttcaccctggggaacaccccagaatggctggagccactttattaagtgagctgctgcagttttgtctggttgctaaatcaaaggttttatttatttacttatgttttattcctttgggcaatagttgctccatagttttcatttttgactaactggatgtacaaacaaataaatctttgaagaaataaaaaaagtttttacatttttatatagttattacccaaatagtattgaatagtatacaggaaactttaacaacaaaaatggcctgtaaattcagtgtgtgtgtacatacctaaatttacctaaatacttgataaggttcagatatatacactacattttagcttaacattataaaaacaaaaacctagacaaaatattgtttcacatttttaaaaatcttaaggtcatatttttctttacttgtgggagtggtcagagccatctgttttggaaattgacttaggaaattggaggggtaaaatctatttcgttctcagtgctacagaaagtatatgttattataatatcacactctaaacaataattatgaaagcaatttctataagcagtcctgtttttcagtctatttgaagaagctacataaattaatgcagttgtctctctcagctattgagtccagctatccattttggacatggcatccattaagttagaacttgaaagaaaaatacaaagaacagtagtaagtcagctgaatcttatttagagtggctgttttaaggaagcaaactgaagatgactgtaactttatatatgtctattattagctgaaattttttcttcagtaagtggttgaggtctgttatatttcagttcaaaacattcttctttcattaacagatttctggcctttgtgcattacattctgtttttgttccttgctatattcaccggggaagaaaataaggaagaatggtccttccttgtatcagagccctgacagggatcctcagaacttgtgaaatcagaagtttttagacatctgttgaagagctactcataaaca

SEQ ID NO: 58471 - DNA, 1415 bp, Bovine  19866881096324
  misc_feature (1)..(1): n is a, c, g, or t
natgaagtcttactaaataatgttggtgaaatattattgacattcaaaaatattaataaataccaactggcctttactaggttgaggttagagaaaataagggttaaatattaatgattttcttccactaatgaattgaaactaatgctcaccaaataacataacatcactaagaactgaaattttagtttcagtgtttaataatttctcagactatgtcaacaaaacagtcaaaacaattgatatttgtgtggctgtcaacaatttggacatttcctcaatagtcaaacccctaaaatgcagtgccattactcactctactgaactttactgttaggacttgtctaatctgatcatgctagcttatgggaatattcagcctcctctcccagaacattgcaagatgcgtggatgaagctgagctcagaggtttggagcttgggctttaatcctagctcatcattttattggctttgtggtcatgagcaagttgcttaatctctttgacttctagtttcctaacttgtaaacagactctttgttcctctttgagaattaaataaaataatataaatgaactgctcagcatggggataatttatcactcaataaatgatatttagaaagcaattttttatattatgatatgcttctcattccatatcactagagacaaacatgacagggtttggtgtcagcatgagaagccaagagtggtgtaaatgactcagtaatgatttgagaacagtcatgttatgtagtcacggtcagtatcagaaggcaaataacaggcatggagaggggtaagggggaagcattttgtaaatatccaagaagattttaatctaaaaatctttatggaggacagtctcatagaaccagaagaagaagtatttattggggaccgtctacatgcaaggccagatgccgtaagagacatacagaaattcattaattacttactttactccttgccagctggagtaagaacagtgaataacagagtcagattctctgctcccatggagtttatattctagtgtaagaaatatacaaataccattcctttcttcaaggcatttactatttatttaaggaaacatgaatttttacactaaaaaagtataaaagtaataacaacaactataacaaaggaaacaaaaatgttactaggaggctatgtggagcagtaaaggaacttacggtgtctaagaaacctaaatttaatccaggttctgataacactttgggacctagggacaataaacatttagctagtctcatattctcatctgtaaataagcataaaataatgacttaatatggttctgattactaaataaaattacatgtgtaaatcctaatatactacatgaatatatatatgccttcattgaggaggaggcttgcctcaa

SEQ ID NO: 58472 - DNA, 1941 bp, Bovine  19866881131199
  misc_feature (1)..(1): n is a, c, g, or t
nggtcagaattgcgcaggactgggatgttttctctcacatgtcagtgttgtattgagcccttccaggcgtgtgcagagctcgtcttcaggagattaactttccaaagccaaaatgcttgaccaacttgaaatctatttgtggaatttattgttattttcaacactgaaccgtgaaaaataaattcaacaaataaatttctaatactcacccatcatgaaatatctctaaacttcttaaagtgtccaagaattagagagaactgtggaatgtatcattatcttagtctacttacatatattcttttgttttctgtatcttggatttctgacctgagaaagaagagttgttgttctgattactgtcagtgtctctggaaaatgtgattttctcaccaggagaagccttgaatgcttttctttgaaacttgttagcaaagagaaatatagtttcctttgacatgacttgaacaaaatccataaagtagtagaacaagaagacactgggtaaaaggaacaactatgtatttttttttgttttctcaggtagaagataaaaaaattaatttgttcctcctgagaatttttagtatttggaaaatgaaatgcaactcttagatggatattgagaatcatctttaaagggaaaattttatagtcattttataaacaagatgtttgcaaagatgaaagtgtatattatatacatatttaattaaaacataatgacatattacatttgtttcagatatacaacataatgattcaatacttgcatatactgtaaaacaatcaccaaaataagtctaattaacacttatcactatacatagttacaaaacattttatcttgtgaaagaactttttaagatcaaatttctcagcaattttcaaatatgcagtacagtattattaaccacagacaccatgatgtacattacatctccatgccatatttattttataactggaaatttgaaacttctgccctccttcatccgtttcactcatcccccacccgctgactcgcaaccaccggtctgtgctctgtgtcgagtttgtttgttgttttttatatgccacatgtaagtgacatcatgtttctctatgttcttgattttaacgaggtacatggttttctcctaccattgaaaattcaaatatctcatcataaatttcagcaagcatttataacttcttgaactacttacaaaggtaaaagactattctagcacacattttctctgcctttaattaacccactaaagaaagaaaatggaacattttaacagtccagtaaagaaaatggaacattaatgtgaacatgagagtaagaatttgtgaacacttaggaaaagactctggataaatgagtttttctctaagggttcacaattcttactgactatcatgttcattggataaatgatccaataacaagcggattatgaatgtacctcagactactgattgactgggaatacactattgtattctcagaatacactactggggacaatgggttccaaaggaaaaataactaacattggttaaatatctacagcttgaaaaatcgcttttacttagaccatctcccctaattgaaagatggtagagagaaggagagaaggaatgcttatgagagtcagggatgtacagacacattgcaagcaccatctaggtaccatctcaggtgtcaccagtgtctcacaatgatcctgagtgtttttggctttgataatctctcagagcctcagagtctttaagtgacttattggctctgattattactggtgtataagaatttgcccccaaatgtaggagtttaaaaaactctctctctcttcagatttgttggtcaggaatttggaagacaatggctagtgtttctcatggtctctgaggtggtagcagccagatggcagtggggcctgaggtcctttg

SEQ ID NO: 58473 - DNA, 1461 bp, Bovine  19866881248547
  misc_feature (1)..(1): n is a, c, g, or t
nctgtgcagtgactcattctctccttgggtcaatgagaggggatgagaatgcaggacacgttttttaaatcccaagatgatcttgtcttgtttttttttcccataaccagtattgattttctactacttatgtaagtcaacacatttatcttgtcagaaaaaggtaacaccagcgaagtaccttttatgaaaaggggattatgtttctcaaaattttttcaataattacttatgcatgtaccagtgatatgattttcttttaggaagattagacttagtgttttgttttttgtttttgtttttgttttctgaagaaatatttagttataagaaaaggtattagttttatttttacttatggtaaagctgtaagtattaattataaaaaaacatgtcctttggcagtgatgatttctgtgtggaaagctattatttatggtttatcattctaactggttttaaaatggtgaaaataataagtttgacatctgttctgctgtttttgtacttagtggttcaggaaagtacaccatccccagggctctgctgggtgtgagcacaggcacttttctcttttgtaaaatgtgagttataaaatctcctttctcacaaggttgttctatgaatttaatgagttgatatacccaaaacacctagctattgcctgatacacagtaaccatacactgaatagtttagacacgtgaagaagctacagaacccaccgtgaggccacatgatattgatgaaaactctgtctttgagtcagacttgtagggattcaaattctggtgctgtcatgtatcagctgtgtgatcttgggaacatcaccttgctgtctgatccttggcttaatcttagtaacttgatcaccccctgtttttctctaagctgtagcttttttcatctctaaattaccaatagtcattcctctttcattggactgatgtgatggttatgggggatattgtgtagaaaatatatgggaaaacatcacatgtaaggtttgtttgacagttgctggggatgcttacataagccagcctctcctttactgccggccagattcacttccatcctgacagatatgactgtagttatttctgatagcttattcatttctcacagtctgttgcacctacaagtctctaaatattagatcatttttgcaacggggtatagattttagaacaagtcagaatcaaaattatgaagccattagttatataatggtgattgtcatcttgttttatataagcagcagaggctttattctaaagtacataaaacataactcctaagtgagtaagtcttagcttacttctcattcaagggcaatcttgggaccctttcagcagctgtgaaaactgactcatttaagacaacttggtagcctacctccagcaagtgtacagtgccatctccctgagcgttgttgtggcagtgaatcaaatgtgaatca

SEQ ID NO: 58474 - DNA, 1308 bp, Bovine  19866881349171
  misc_feature (1)..(1): n is a, c, g, or t
ncaaatcagcttctgcaagagaaacatgtaaattttaaaggataatactgcttttctggaaaataattattttaaagttgcaattttatgtaactgaacgatttatttatttcatattcttccaaaattgagttctatcaagtatcacacatatccatgaagaaaatgagatttattatagcaaagacttttttatttaccctatcatttgagagagaatatctgactgcaaacatgcctatgcaaattaatttgcttttcatgtgttttcctagatactattatctgaaactgagatcagaatcatttctatgcataattttgggccacataattattttgaaaaggttaggtacatttcaaatacaatttttgcaaacaaagtgacactgtcattgtgtgtagaaattttatctttctaggcttgttttaattcatattttacttgggtgattaagtaaaaagattttgtgtttcaaagaacattgtcttgtggttttattttacaaactacatttttaaattaaagcacaacagatggaagcttcgttgcttaaacaagcatctatactctaatgcaaaaactcagaattaaagttttgacaaataacttaggaatcttccaaaaaatcttgattttcttcttagccacaatgtactcacattgacagatttttctttctacaataaaatgaagcaagagattcctaatatctgcatccaacctatctttacttccttctaatgtaagggcaaaaccatatgtctcttcagcttcaaatgattattcaacctatcagctatgtcacagattttaacagatgctggtggtagaatttttgttccagtttctcaatcaattttactataatccatgaaagataggctctgaagtcccaggaagccaggagcatgcagaaacaatgctggtgaggggtgggctctcaagagtcaagaactgcagatccaggaaccacctactccattatgagaacactttccatgtttcagatatgagtgtaaataagcccatacggtctccaaggaacagaaatacaaacgtggcactatctactaacacacagtgaagtaaattgtaacccacccttttactcagtattccagctgaatgagcttcaaagcccaaagtattccagctgaatggttgttcaaagaaaacaaccagaatcttttcttagctgattcagtctaaaatttagactttgccgataatttttctttggctgataatgaaaatgctggcatatttcccagcctgaatagttatctataaataaataaagtccc

SEQ ID NO: 58475 - DNA, 964 bp, Bovine  19866881445043
  misc_feature (1)..(1): n is a, c, g, or t
ncagatgcccttttccttggtccccgcccactaaacacctctattcatcaaagcaaccaaaacatctctagcataatagtgtcactcccagttgagactctcttggtacatggaaaggctgtcacaaatggctaactcctcgaatgattaagaatgtacttctccctttcttttgtaagtctgccataaacaataaaggagagacgtttgctattagaaaaacaccagtttagaagaggcgctatagtgtttcgttatgagaaaaatctgttttgaaagtgtggtttctctttggggaaatttcatttattgaactctaaattgagggcaaaaattgcatgttattgagaagatttactgtgtggatttaatgagataaaatacatgaggtctttggcactgtcctaccacatgaaaaatactcaataaatgacaagaattattatttttgatgttgctgctatattgttgctcataattcttaatgacaatactgcattcagaaattaaattatcctcatggtgacctagaaatgcaaagtccaaacatccaggattcagcagttttcaaataaactctgtgaccaccagttttacagtcaacattgaaatgttcgtcaggtgtatcttgaaatgtttgaaattaaactggaaatctacaaaaatcttaaaaaaaatgcaaggaacttgtcagagagctgcctccaattcaaactatattttcctgacaaagaggatctcagtcattgtcgtctctttttgttttttctttatccttttggtaacttcaaataattgtgtttatctttccaggtagcatttgtggcagcaattcaggcaccctggagagtggtttaaagatgaggaatcccagacacatttactttccatctcctggagtaataggcatgaaaattttacagcatttcttgtcaactttccccctaacctgcaacactttctc

SEQ ID NO: 58476 - DNA, 1018 bp, Bovine  19866881478334
  misc_feature (1)..(1): n is a, c, g, or t
ngttaggtttaaacatatgaattttgggagggatgtatttagactactcagccttctctcataaggtatatagtttgctttgtaccattatacactgatctgctttccaagactgctgagtgaaaattctcaccttgcaaatactcaatatccacatattctgttaatcacagatagagtctctactgaggtattctgggaacatgaagatcaacatttgttttcctagctttacttcaattagtattgaaaacctgaggaaagcatgcttgagtccttaattcttttagaaaaaaaaatgcaccaagccagattcatttgccagaaggcataatatcccttgaacttagcctgatcaaagaatgagtcatctaactagagataatacccagtgtggtgcttcataaacaagatgcattaaggaaaaaaaatagcccaaatgtcatttgctagtataaatcttattgtttctttcatggaagagactgtgcaaattgttttaactggccacgattttatcaagatgctttcagaaaaaaaatgaataaattaaaattttaaaagttaaaacaatagacattatggagctgtttcaaattcctatgatagtaaagctaggactgttgcttcatagaatataaatgaataaatcatttatgatttattcaaggatacctaggaattagttctgggactgacaactgatcttaatttattcttgacaattcactttgtgaatgtcctccttttccttgctttcctgcccctttgtcaggatctaggtaccatcatttgacaggcgttaaaggccacagggctcagctgtctccaggaagcaaatctctgagctggaaagcagaggtgcagcaagcataactctttctttgcagaacaagcacaatctatttccttccagccagcaggaaagcaggaacagatgcttccctcatctccactcaagtgaaagaaacatttgttctttctctatttcctaggatttaccaactcttaaaatccg

SEQ ID NO: 58477 - DNA, 1483 bp, Bovine  19866881492286
  misc_feature (1)..(1): n is a, c, g, or t
nttacttttctgtatttccttatttttcttcaaaacaacttaaatcactattaatcttgaacaaagacatggtttgatttcatgttcttactgtagtacgtttcatctggaatgtagaattgtggtgggcccttcatgcctgtggctaagagacacttgaccagatgttccagggataactcataaattactgcttatacaacatgaaatacactgacatgagattgacatcaaagagtgggtccccactgaaatcatggttgctgatattaaagttgaactctcagattatgtctttgtagaaaaattaaaatcgaggaggatcgtaaactcctgcatttgcagtaaaccagcctgaataaacaagcaatgacagttgcaggtaggaggtatacttcgcgtttgttggaatggatatgtagccaatttatctaggagttagcataaggtctctatgttcttttttatagtcttaagtagatcatttctttatggtattgaattcttcatctaaaatatctgagatcatcctggatataagataccttaattaaagaaaaagaatttatcttataataaaataggctctctgtgaatcacttcttacaaacaaggctgcaagctcttttctttgaaaatattaactcattcttcctgtgaccaaaaaacatcaaaacacagcacttttaaaaaatctagtatcaaaaatttaatcaagttatgttattctatccttttataaagcaacagtattctatatatcgggtagtagtcacacacacacacactcacaaactgggttggatacacagtaagatagaaagcctttactttctttgaagtaaagaaaccagggcttatgctcattggatttgtcacattctctgaatgtccttggacaaagtatctatttctctgagcctcaatatcctcatagaaaatggggatgatggcaatgatctcttttccataggaatttggtgtgggcttaatggataacttgaatttgtcctgtaaatagaaaaacattctaccaaggttatctttccctcaatgagtagaagcaatacttaacaacccagaaaagtcaaggagaatggaatttatataccctgaagatgatatgcagattaattttaactgctaaatgactcgaactgggtgctgttgtgcttttagaaccatccctactctcttcaacttgcactctaggcttcccacggtagtagcaagagtctgtcactagcctgtttaaaaatcccaaaaagtaacctttaagagttgaaaataaatccattcagagttctttatttcaacaacttattcactgtcattttgaaccaaagcagtctgtgagctgttcttgcaggttaaaggaagtagacaatgagcatctgcttgtaaggtgcttacagaattatttagcagacagagcatatgaaaagacaatccattcaccataatgaaagggttgcaaattaag

SEQ ID NO: 58478 - DNA, 653 bp, Bovine  19866881726624
  misc_feature (1)..(1): n is a, c, g, or t
ntgtatatgaaaaatgatcttaattctttggcttttatggtcacttgtttttaattgccatcgtctttttcttttttcttctgccacaccttgcaacttgcaggatcttagttcctctaccagggactgaatctgggcccttggcagtgaaagcacagaatcctaactactggactgccagggaattccctatgttcacttatttttgacactttttaataaaaatatgttcaaattctgtatattttcactacaattacattttgtgttttaatcctttagatcaagagttggcaaactttttcttaaaggactagagagtaaatatttcaggcttataggctatatggtctctgtcacaactcttcaactctaacactgtaacatgaaaacagccatggacaacatgtaaaaaatgagtctggctgaatgccaataaaactctatttacaaaaacaggcaacagacctgcagatcatattttgccaacctctgctttagatcattagatcattactgttagtagaatacaaatttgtgaaaaccttgataataacataattatttaattttgttgagatgaaagccaaaacaatatggaataaatatataataacttatgaattggggtgtaccttgattttattattcat

SEQ ID NO: 58479 - DNA, 719 bp, Bovine  19866882019848
  misc_feature (1)..(1): n is a, c, g, or t
nattctttactgtgtacaataaatctcagctttctatcccatcagtaaactaaagaagctggcagaagataatgtagtattttcatgagagaaaagattcttgttaacctatattcttatgcttctgtaaaactttgtggctttctttggttattgctgctattgaaaggatagtatcttccacttaacgcaagagacttggtggtgtttttgtcttctttatcctgatgaaatctgatgtatgcattgactgaatagtgactataaaagctgacttgccctagtgaggatgagcaaaaataaatggagctgtcgaaagcagtaaagcaaatatctagcatctttaatgtagcttaatttgacactgtggttaaattcaaaattgctttgctctgagcagtctttcttcccgccttctccacctcccttttaccctccattctcaataggaagcatcccagacatagctgggaataaagtgattctaattagatggtacttccccgacctaaatcgtctttggcttttgtatatgaaatgttattgcacagctctctcttcacatcacaaggaaatatgaacaagtccccttccttttcttgttctctgagaatagcgatgtgctaaagacagaagtgctcagtactgtcagcttgctgaatcagattctgtgagagtctgtggccagccacacgcactgccactatttccttcccagt

SEQ ID NO: 58480 - DNA, 1385 bp, Bovine  19866880366024
  misc_feature (1)..(1): n is a, c, g, or t
ncagtaattagaatactgatcacaaatcacaagtgattttcttaatttctggaaagtttaccaaaaaggttttaagagtatttgccaaatgatcaaagatgtttgattacatccattactcttttacttagacaccttacataatcttatatgttctgtaaatgttggaaagcttaacctgattgaactttgatagcatattttcataaaatgcattaatcttattgaagtcctttagtacatttaaaaaaatctttgatgctacagattttcagttcagttcactcactcagtcatgtctgactctttgcgaccccatgaaccacagcacgccaggcctccctgtccatcaccaactcctggagtccacccaaacccctgtccattgagtcggtgatgccatccaaccatctcatcctctgtcatccccttctcctcctgccctcagtctttcccagcatcagggtcttttccaatgagtcagctcttctcatcaggtggccaaagtattggagtttcagcttcagcatcagtccttccaatgaatatttaggactgatttcctttaggatggactggttggatctccttgcagcccaagggactctcaagagtcttctccaacaccacagttcaaaagcatcaattctttggcactcagctttctctagagtccaactctcacatccatacatgactactggaaaaaccatagccttgactagacagacctttgttgacaaagtaatctctctgctttttaacgtgctgtctaggttggtcataactttccttccaaggagcaagcgtcttttaatttcatggctgcagtcaccatgtgcagtgatattggagccccctcccccccaaataaagtcagccactgtttccactgttttcccatctatttgccacgaagtgatgggactagatgccatgctcttagttttctgaatgttttaagccaactttttcactctcctctttcactctcccaaaaggctttttagttcttcttcactttctaccataagggtgtgtcatctgcatatctgaggttattgatatttctcccggcaatcttgattccagcttgtgcttcttctagtccagcatttcatcatgatgtactctgcatataagttaaataagcagggtgacaatatacagtgttgacatactcctttttctgtttggaaccagtctgttgttccatgtccagttctaactgttacttcttgacctgcatacagatttctcaagaggcaggtcaggtggtctggtattctgatctctttcagaattttccacagtttattgtgatccacacagtcaaaggctttggtatagtcaataaagcagaaatagatattttttctgaaact

SEQ ID NO: 58481 - DNA, 1157 bp, Bovine  19866880482615
  misc_feature (1)..(1): n is a, c, g, or t
ntagggagaagtgccagtggtttctgccagggttggggagcaggaggggggtttggaggaggcaggagctttggaggtggtggttttgggggtcatggctttggaggtggtggctatggaggaggtggtcttgggggtgctgggtttaggggtggcaatttggggcttgggggctttggtccttcttgtcccccagggggtatccaagaagtgaccattaaccagagcctcttacaaccacttcacctggaggtggaccctgaaattcagagggttaagatgcaggagcgggagcagatcatggttctgaacaacaagtttgcctcgttcattgacaaggtgagtgccccaggggcaggcagtctctgggctctgacctaatgaccttgtaccctgccgcctctcaacacgttgtttctggtgatgacagtcatttccagtgtgtgtgtcctgggaccttaagaaagcattgacttcatttaggcctcaatttgacttcttgaggggttcatctttatcttttcattttggcaggaaagcagatccaaggaatgaaaataacaatcagacaaaatacatgatgtgatctcgctcatcattttcactttccatccacccatccatccatccattcatccatccacccatctatccatttactcattcatccatatacctcttcacccatctacccattcacccacccattcacccatccatccatccacctgcccacctacataatcatccagcccacaaacatttactaagcatctactgtatgccagacactccaggtgtttcagggtgacaaggacacaggtcctgccctcaaggagccccagatctacagggaggaggattgtgacagtgtgtgggaggtgtgttgatagggacatcgctctctgggccatagcacaaaggagggtgtgatgagctctgggctgataaaggtcttgaaggtggagaaagagccaagcaggttctcagggcagagggagtttccaggcagaagaaccaggaggcctgagagtttgatgcttttaggaaatttcaaatggttacaatttctggagaacatggcacaagagaggaaggaggaggaaagtggagatggagacacagagcagggagagagaagaaaagtgggcacactg

SEQ ID NO: 58482 - DNA, 829 bp, Bovine  19866880677473
  misc_feature (1)..(1): n is a, c, g, or t
nttgtgcaatctcctcgtactggatcctcacggcatcaatgatgctgtccagatccagggagcggttattgtccatggacaggatgacgttggtgtcggtgatgttggtctgcatctgagacagttcctgcaaggcatggaacacaggctgacttcttccactcccctcctgggacctcagtttccctctatgccccccaaccaaggctgtctggggaagccttgagagagaaaagctctctgggaaaagctcttagaatcactgttgtgtgcccagagggaccttcactaaaggtacaggcatccggatctaggctcagagaagaagggagcctgaactcagagctgcccatcatgcctttcctggaccctccatccctccttactctggcttggctgccatcttgagctggacccccagccaggcaggcttgttccttgagatcacgtgagctcccagaggcagcagaaaggactccatgtgtgtagacgttcagactaattttagcatctgggctccactgttaaccagctgggtaactgagcaaggaactcagtctctcagtacccctgttctctcatctatagactggagatacccaagaaccagtacagctcccaggacagcatccagtccagagaaggtgtctccaagttagaccagggttgggaggagtgtgttatccccacctctccagtcttcatctgtgttccctttaagacccacactgccctctcccacagagttccctgatggccccatctactccccagtgctgatgaagctgtctggttggttttaccccatatgtcctgggcattaaccttc

SEQ ID NO: 58483 - DNA, 1813 bp, Bovine  19866880725921
  misc_feature (1)..(1): n is a, c, g, or t
ncatctgctggattcagtgtgggttccctaggaagtactgtgacctcatccatctcctggttgaaggttgtaccttgaaggggttgacatttctggtgtttctacaataaattttctgtgctctccaaactgctgtttgatcacacgagtttactctttttttactttctgcaggcttctgaaattattcataattgaaaagtttacagcttttattagttttttattgcatgagtaatagttgaccctcaaaaaccttgcacacataatcataaaattaaaccttaaagtggatgatctttgaaaagtcagttacatgtttgttcaggaggaatttgttctgctcccatcgtgtggcaggcagtggcctatgcactggggatgtgatgttgaatgaacacatttcggaatctgaaggcactcacaacacaaacggggagggtacagtgggagatgaaatcggagtgtgggcccctatggacccttggcctgagggtggaagcaaggccatattgaggacagaggcagacccactgagcaggagcagtgggggtcgcaagaagtgcacatgctggggaagggaagttcggtcccaacaggctcttgaaggaaagtagaacaaatggggaaacagagtcagagcagctgtggacatggagtcagggaggggccctccagacaggggaatgatctgctcagagtcttgaagatcagaaagtgtgaaagtgtgtgtgagtgacaggggacagccaggtaggagaaactgaactggagagagaagaagctgaggccattaactcagcagagtttatggtcaggggtgtctttaactgatgtcctccagggaggcagagatgcagaaattcaagggtggagcaggttaagccatcaccttatcctctgtggtatttctgagtctgtgtaaaggagtcacgtaaaagatgtgacctgctttctcattctctgaaggaatacagatggaatttggatatgggattcattcaaatagaactgcaactccttttgatgagacatcgtgttcccatgtgtaggcctacattgtcttggaggagtttctccccatctcacctgtcttggaagcaggcctgtggggcaagaactgggaaagggaaatggggcaagaactgggaaagggaaatgggaggggctgcccaaggggagggataaagggagcagacaaatacaatttctacacttaaaagtcaaaagagcacaaagaccaggatgggaagacatggacaaacagcagtgagtagaaacatgcttgaaagtattcagctgagactgcacacgagagagtaaggtgcacaggcttcgaggccaggcatgggaaccagcaagagtgtgatgtgtagagcctcctttttcatctgtagaaagagcctagaagagacgaccaagatggacaggtgggaatgcagcgatttggctcaatattagaagtatcttttaattaatcctgacatgagagaggccacgtggatttagcacattgtaagcagaggttggctaactatttggcaagaggttgagggagggagtgaaggatgggtggggttgtgtgcatagcagcattgcatgtctttgttgccctaagagtttgtgcaatgaagcctgagaaaaaaggaattctactctctattttatagttgggaaacttgaggtcagatgccaaggaaggaccaagtcatggagaggtcaagagctctctaaccaggacggttttctggcatcaccagacctatttcagggtgtggatttgattatccctgggatcagcacatgtgtagga

SEQ ID NO: 58484 - DNA, 1261 bp, Bovine  19866880792892
  misc_feature (1)..(1): n is a, c, g, or t
ntgatagttgttagatctccagatttctcaccagggttaagagttaaatcgtagcttcccaaagatgcccctggaggacagctggcatgaaggcaggaggaagaggctggagactgagaagtttagagaaaaggctaacagaagaggcaggaggtgtccagaatgacatgagagtcagtgggtacctggaccaaagaggtggacctctgagagttaagaattagctggattgaatataagctgggcaaaccaagcgtagggcatggggggagcagtctctgcaatattgtccccagtggggagggagttgactgtgactgggtcccccaagccaacctgctgttccaagaagagctgcacctgtcctggggaaaggcggcctcctctggcccaggccctagctgtgcctgcgggttgctgaccctgctctcccctctgctctccccgcgcagccatcatcagcagcaccagcggcagcggcggctatggcttccggcccagctcggtcagcggaggctacgtggccaacagcggcagctgcatctctggagtgtgcagtgtccgtggcggggagagccggagccggagcagcaccaccgactacaaggatgccttggggaagggctccagcctgagtgccccctccaagaaagccagtcggtagagtccgctgccctcccgccatccctgcgtccccgctctggctcgcacacttgcgctctccccagcccattgtcagccccacccccaccccgcccagcctgctcttgtacctccggtgctggccttggccgctcacttctccagactgtgtcttactgaacctggacaggtgtggacaactaagcttggtgaaattcctccttgcacatgctggagtttgcctccttggctgtggtccctgaaccatgccatgggctcccagccttttgtcctctgcacagcctttgactcagttgctgattactctgtctggctccgtgggtctcagacccaggccctcttctcacactggggcctttgtcccagctcctgcttgtggtaggagagggctctgtgttcagttaaaagagggctgaaggacagacgaccaaacgagaccatccccaccccaccctgtctggctcacgactcattctgagtggaccgagtacaactcagggactcttcttcattctatcctgcacccacaagcagggaagaggaggccccttcatttctcctttccccttaaagaccctcccactgcatcctcaataaa

SEQ ID NO: 58485 - DNA, 889 bp, Bovine  19866880799887
  misc_feature (1)..(1): n is a, c, g, or t
nttatggcggtggtggctttgggggtggcggtttcggtggtggtggctttggggcaggcggttttggagttggtggcattgggggtggctttgggggtggtggttttggcggaggtggttttggtgggggcggttttcctgtctgccctggtggcatacaggaagtcaccatcaaccagagccttctgcaacccctcaatgtggaaattgatcctgagatccaaaaaataaagagtcgagaaagggagcagatcaagtccctcaacaaccagtttgcctccttcatcgacaaggtgagtctatcggcacagtccaccaggacagctgctcctgttccatgtgggattggtcctgcccaggcgtgtttgagtttgagcctcaggtttctgtggttggatggttaaaaggatagtttgtggagttgtcttcaggagatacattagaagtatgtttgcagtgattctggtgactaacttctctcctgggcaaaaaggtctgtggtccacataaaggaaggtcaatttgacctcaccatgaagtgctttttttttttttttaattcaactcctgagctgaatttggcctcatagatgtttaataaagataatagaaatgaggttaattcaaccttctagcatgcaaacagagctctggaaaggccttcctaaccataaaaaggaacttacttgagtataaacagagcacatggtgatattgtagccaaaagtgtacagtaagtcaaggtcaagcatctcttgctgtcggaagaggaggaccgcaccctgaggattttccattcatactgaccagggtggggaactttttgtgcttgtatttccaagtatctgctctagaaaagaatgtaaattattttttacttatcatcaat

SEQ ID NO: 58486 - DNA, 1124 bp, Bovine  19866880827049
  misc_feature (1)..(1): n is a, c, g, or t
ngggacagcatgagaagggaggaaaactggaaagttgatcactgaaacatgaaattcagatgtctccatcttcaaactctgccccctccaggtgcggttcctggagcagcagaacaaggtcctggacaccaagtgggccctgctgcaggagcagggcaccaagactgtgaggcagaacctggagcctttgttagagcagtacatcaacaacctcaggagacagctggatggtatcgttggggagagaggccgcctggactcagagctcaggaatatgcaggacttggtggaggacttcaagaacaagtgagctggggtagaatggagacagggcgggtctctgtaccagatatactttataaccagaccactgcttatgccttgcccaaggactgaaaacagatacatttttcatggacatctaaagtgctgggaaaacatcaggtccatgtttagaaagttctagctgcaagctcagtccctctgcaaaatacttagccttcagccagagtaacaagctcagtgtccttggcatggcctggtgaaaagagcagttgtgtaatccttgctttgggggaccctcctccccaatacactccaagtacatgacatggactttttgatggattcccctcaaagcaggaactgatgatgtaacctaggttgggctaagtactaaacaatttctttagtccttatgaaccagcagctgggctgctaattttttgtttttcaaaggccatgaaagctgaaaaataaagcactagagaaagggactagatgtggaatttgaatgaagctgtatagtttttctacaggaatgttcctgaagcaaccgtattacagcattaatagaatagctatctgctaagcaattacagagaaaacagtatcctaatgggtagggagcttgccccagaggttcttgctcctggtgtccctccctctctgtccatatgatgtgagaggcctcttccagggagaaggtaggctcacagttgactatgtgcagtacaggccctgggtctcatcctctgataagcacttcccattcctttttaccaccaggtatgaagatgaaatcaacaagcgtaccactgccgagaatgagtttgtgatgctga

SEQ ID NO: 58487 - DNA, 516 bp, Bovine  19866880949056
  misc_feature (1)..(1): n is a, c, g, or t
nacaacaaccgtgacctgaacctggacagcattattgacgaggtccgcgcccagtatgaggacattgccctgaagagcaaggctgaggctgaggcactgtaccagaccaaggtgagctggctgaagctaggccggggagggtgacccccttagacaggaggactgggccggatcattctcagagtggagacaatatccagttaagtgtccagcatggcctgtccccatcacattaccaaccccagccaccatgcactcccacaacacactcatcacccctaaccatggctcttttctttgggtccccagttccaggagttgcagctggcagccggccggcatggggacgacctcaaaaacaccaagaatgagatctcggagctcacccggctcatccagagaatccgctcagagattgagaatgtgaagaagcaggtgagatggctggttgcctttgcctggggcagacgggcacaattggtggggggtgggggcggaggtgatgaatgggctgag

SEQ ID NO: 58488 - DNA, 1438 bp, Bovine  19866880963701
  misc_feature (1)..(1): n is a, c, g, or t
nttaaggcctcagactgactgctccttctactcatttgtctgtgggaaggggctaatgatttgcgtccagagtcaagataatcgagcccttgctccatcagaccctcaataaccacaggctggtaattgttccaccgtggtgtggactggcttcttcccctggtcctgccaggtgcacacctctccacggtggcacggggcaagtcacaagtgacaatgaggtagcagaggctcttgccacacccccttgtctcaaagcctcaccatggcaatgtgtttatgtaccataaggccaagagagatcactgaagagaaggcagccaaaaacagggcactcccctggagcccataggggtttctctaatcccaaacacacctttgcagttagcagagtgtgaattggagacactcaaatgttaacctgttgattggagtgatttcaactacaggaccatctcctgcttccctcagggacatagagttggtgcactatatgtcccttccacgtgcccagaacgttcttcaagctcactaggtgtagaacaaaaggaaatcaactgtgctgacaacaggagaaattaaagctgacaccaaaagggactaatcaacagcctcattgcacacagagtagagaggaggagaataggaatgtataggttgttggatccagaaagctaaaccagggaactgcccccgcccttgacacacccctctcaccttccaaatagtttgaggttaattaaggacctataacttagaggatggggcaagaacagcctcacctcaatccttgtctcatgcacaccctgccatgaaccatccaagatcaaggactgaacttcagtgtcttcttaactgaacaaagatgttctccagatcacctgtcagatcagctcagaccaagaccaaacttttatactctttaaacagttggtcaaaatattttggaagttgactctgaaacttagggaagaaaaagaaaggaaattgaatatggagtcttgggaaggtgatagggaaacatggaatgagtctcaaggttggaagtggttccaaccagggtttgactcttctgaagcacgcctgcctggagaaaggccagtctactcaagtatgtccagtggaggttaactcatcatcacaggacagcccctaccaccatcagacaactggacctcagtgaatgtccttcagagtgacttttatcccttccaagcaagaacagccctgactttctactctgcaacagtggtgtggtccatcttcagtgagagtgaccttcacacacacaccttcagtcacctttgattaagtctcttctctgcccctgttcttgcccctgagctcacactagctcttcggtgggtcatttgggctttccaaatgctcagactgaatcaacacccaagttcagtcactcagaagtgtccaactcttt

SEQ ID NO: 58489 - DNA, 1241 bp, Bovine  19866881101967
  misc_feature (1)..(1): n is a, c, g, or t
nagaaagccgtattgagggtttttattaccaacctgcttcccttggtgggcaaaagataggaagttaattgtcttttagggcaaggacagggcacctggtgggatgtgggtgataatgaccaatggctctgggtgcctctcggcaggatgcagatgcagcctacacagtcaaggtggagctccaggccaaagtggactctctggacaaagatatcaagttccttaagtgtctgtatgatgcggtgaggacaccccccctcccctcccccacctctttccagctgagagattccctggctcttccagggagatgctaataagaatgactgaggataaacagaattaagggtgttttgatgggaaggtgcaaaaccctgcactgggaggccatggaagtataggatcctggtccctggaagccatattcacaggaaaaaaatctcactggggctgtgataatgaccttggcagtaggcaggtaaaaatggccccatgaggtcctagatgcctgatactgtgaattgcaagaaatgcctcccatggcctgctacccacatggggtgtatcctgatgtgtgagccttttcctcagctccagcaggcatttcttcctccactttggcccattctgccaggcaccacaggcccagaagtctgatgggcagaggagggaggtgggggaaggaccctgactctgtcctcacctctcaactcaggaggtggcccagatccagactcacaccagtgagacctctgtcatcctgtccatggacaacaaccgttacctggacttggacagcatcattgccgaggtccgagcccagtatgaggacatcgccctgaagagcaaggctgaggctgaggcgctgtaccagagcaaggtgaggactgattgggtctctctcctccaccagccttcctttcctgggaagggacacctccaccaatggatgtgagacatcccttaggagatgtgttgaatgaaagaagggttataatcaatgccatagcgacattctactcaaaaagaattcttggcaaaaatcgttatcaaagataagccataaaactgggtaggcatttccaacagagagggacaggccatcctctgatggaggaacgaagcgaggtgctcttgctgtaaaatagggattaggtcatgtcaccatggggaagaaggagagtaacaaatatggaggagagtagctatgggtgacctgtagtgggacagggagaaagaag

SEQ ID NO: 58490 - DNA, 1177 bp, Bovine  19866881125881
  misc_feature (1)..(1): n is a, c, g, or t
ngacagggacgagcgatagggccctgagggctcttgagccgacagagtctgagcccacgtgtttgaggaagcagaatctagctgatataggagttgggtgggggaggctggaggtgctgagaaaggggcaggtggttctcggagcaaataattgtctccagaattaaggagaatgagctgggctattttggagaaggcaatggcactccactcaagtacaattgcctggaaaatcccatggacagaggagcctggtaggctgcagtccatggggctgcatagagtcggatacgactgaagcaacttagcagcagcagagagctgggctatttggatgacgtcagctctggtcctgccagccctgctcagcagacggactcaggcaaagagcatgttgtctgtgaatcctgcacaagtaccccctttatccccctacatcctcctatagtttcaggcaggcagggcactcagtcccaagcctgacagttagagcacagttcctgggggacttggccatggtcagagccatccatctgggggcaggacagctgtttagcaggtttgcagctggcaaggccgaaagtgagttcatgccagaggagccggggtataaaagccaaggaagactgtcctcccaaacacttggctctgctcccaccctgctgtttggttgccagagaggtgccttccagggctgccccatccccctcatttcctccttgctcaactccgtgggcaagaccatctcctttgagctttgctggtcatctcctttctctagcccaccccaagcctctggcaaggtatgtgggctcaggactctgtgcatccaggccctggtcctgccatgtgaccacgggtaggtctcccaacttcctaatcctctgtttctacatctctaaaacagggggtactaatacctgctccgcctgctccccaaggtggatgggaggcatcttgtaaataataatgatgatggtaatgatcctggcgaacacacagcacgggctctgcaggacactgctctaagcactacatacatattaactcatttaattctcacttcagtcctgtgaggcaggtactgttattatccccattttacagatgaagatactgaagcgcaggaagttaagtaaatatttggaagttgcacagctagtgagtagttgcacca

SEQ ID NO: 58491 - DNA, 1680 bp, Bovine  19866881136274
  misc_feature (1)..(1): n is a, c, g, or t
ntgtctcaagccaagttttctcctcttctggagtctagtcaatgaagcctatcgcagacccacattctttggttcctggaaggcccaaccccccagtctctagcctggtgtgtcctgattttatgctctgctcccaagcagcctttgagtctctatagcctggtcctcggtgacagaagaatccaatgttttccagtatctaaaccatcaaaacagagtcctcaccccaatcccatctggtctgactatctccagattgtgttcaataaaatgctttcataatataagctgttgggaagaactgttttttcaagatctacacccaacctagagattcactgagggtccatctgtccagatgtggttggttcctttgattcatagggggacagaatggccttgaaaggaaggtgaccgctgtgggtggtacagagactccaggaggcacgaggtgtggatgctaaagcctctacgatgaaggggtctctggagggcgtgaaggggaagcttccctgacttgtagcttgtatagattgtagagctgtttgttggaggggggcccattcaaggtgggccgattttgcaaattggcttaagtcaaatttgtaaataaggaatttgttgtcttgaagcctccaaaaggcatagagataccttttatagatgttagtcctgttctaataatgtgggtgcttacagggtcagtagcttatagttccttaatagtgtcagggatgtaggggcccttggattagcaaataatttcaggaatttaatggaggtggccagaatttgcactatgtgtgggatcacggcccatcctctttccataagcttgtcttaactgatcctgaatgagggtgtttaatgaatctcttcgaacaggaattcatgggtgcaatgtcatgcctgtgcttctggtatgcatttaagatcttgcctgcaaagacaatgtgtgatggcagggtggctgaggtaccccatcacacgtggggggagatggattgtgctccttcagagatgaaagcactgtgacaaagaggctgttgcaatgggcactgaacagaacatttatcagccaaatcctcaagagtgaaatatttaccgcttgctgtttgaacagagccaacaatttcagaaatattgggtagggaccttaacaggtatgacaatggcattaggattttggtaacccactgtgaggcatctttattctttccaggtttaaaaataggccaaactgagttgttgaatggagaaacagtgggcataatcaccccttctctaaatatattccctataatgggtttcaattttgaaggccctgttttcgtttacactggagcatattaactatacccaaaagtccatgaagtcctattgttacaagccaattttcaagtgtcaggacttaatttaattttagtgtgttgctcattggatcagagtgtccatgactactgtgagatatattgggggcggggggcaacgagtggtaagatcatgtgaaattgaggcaagtcagtagttctgataattatggtgaggcatacttgtttgctctcactttggtgttcaatgacttcttcaagattacaggggaaccttgtttaaacttagtgagattaccagtgagataattgagctccagtatgggattaaggccatgaagatggccaa

SEQ ID NO: 58492 - DNA, 1721 bp, Bovine  19866881158433
  misc_feature (1)..(1): n is a, c, g, or t
nttggaaggctgtgtgggtgcaggaaggagagccggctcagctcttctgggtttggcaattctatcactgggcagagttgacctgccagggtcaattggggaaggattccctacccccttaaaatcatctccccaaagatatgatgtttttctgctttcagacaagacagggtcccccagcagacaacccagagcatcttcatctgccatcatcctcactggtcacccagagacagcagtgagaggaggaccttaactggccactgagggtcccaaggagaggcccccccagccctacatgcgctgagtgtccagtgggaggaagaggtgtggggcctgcccttggagcggcatacctgaaggggacatggggcaggtttactgcacacagaaaaggcctgcgaaagatggaaaaaagaaaggaaacctaaattctaatcctaataaccagctggacaccctgggagagccccttcctctctccagcccagattccttatctgatctgtgagagtccggtgaaataagtacaaggcccctccagttctgagcagggagccagctctgagtgtacgggtcccaaggtatggcgaggaagagggaccatcaatggtccagagagtcccaagttggaaaggggacatctgcttttcactcaaggatgggctccagtctctccctcacagagggtgaagcccgacctcagggctctctgtgggcttgctgcccacctgcttcttcacatttgcaatctcacagcggatcctctggatgagccggttcagttccgacatctcattcttggtgtgtttcaggtcgtccccgtgccggccagctgccagctgcagctcctggatctggtttccagagacaggaagttggtgatgagacaggacaccccctatatccctcaccaccccaggcaaagaaagtgtcctgagcaaacccttccaccactggagcaacccaggggagatagctctgcggcaggaggtgatagagccatgacctgggttatccttccagctgtttggagctgattctgaccaagaagtccacctgtttctctaagcagaaatctatttgctgggcctatcctcctttctcatctccctgactaatcttttctgggggaggataaagggaaaatgcagtttgcatgtattaagcacttccaaagtaaatagggcttccctggtggctcagttggtaaagaatccacctgcaatgcaggagaccgggtttgatccctgggtaaggaaaatcccttggagaagggaatgactacccaatctcatattcttgcctgaaacattccatggacagaggagcctggagggccacatacagtccatggggtatcaaagagtcggacatgactgagtgactaacactttcactttccaaaatagaagaattctgaacctctccattgatttagcacctctttatagagggatcttttaaaggccaggttctgttctaggtactggggatacacacctgagcagtgtgggtgaggtccctggtcccatgaaatttacatgggacctacaaaatttacatgggacctacaaaattcccctacaatccttccttagtgacgggtgaagggccaaggctaaggaccgcatgcatgtaccctggaggtggtgggattgccggctcaggacttgtagctcagatcctcccctcaccctggccagtccttcagaaaagag

SEQ ID NO: 58493 - DNA, 1581 bp, Bovine  19866881301743
  misc_feature (1)..(1): n is a, c, g, or t
ngctgagctctactctcactcactttgtattctcagcataggctggccaaataaatcactttgcaaggaactgagtggtgctgaatttatcaggctgcagaatgcactatttttcatccaccaatgtctaaacacaagacagtgaagctaaagctaaggaaggacttgccaatgccagaaagggctctaactagaagggaggaacagggaggtctgacaggtggaggtgggcgtgtctgcttcagaatctcagagaatgagtgggactttggatgtggatgattctggggagcgcttctggtttccaattggtctccaattccctgtttaggcttccaacttggagactgccatcgctgatgccgaacagaggggtgacaatgctctgaaggatgccagggccaagctggacgagctggaggccgccctgcaccagtccaaggaggagctggccaggatgatgcgcgagtaccaggaactcatgagcctgaagctggccctggacatggagatcgccacctaccgcaagctgctggagagtgaggagtgcaggtaatgggagacgctctggcaggaaggccccgggggttcgggaaggacccaaggagaaagcccaacacatcctaatccagaaaagatgagttcttggggactgaagaggtggtgatgctagggaaattaatagaattgataatacctacccagacatgagtgcttacttcattccaggtactgtgctacgtggattggctcattcaatcttcacaacttccctgtgtgtacctgggcacactcccattcccgccaaaaagaaaaagaaaaacacattacttgttccatcttccttaactgcccaggtccaagatgagcttgtgagagatgggcggccactccagcatccccagtgatcttgggagaaggaagagatcaatgcctgggtctgacctttgggaggtgtcatgctgtctctcagatgttaaacctcattaggtttaacttggatggttgccttgttaccccaaagactcaagggtgtccccatagcttctcaggctctgtgccagaggagccccggaatttccataggtgtctaccgagttcagaaacccacgttagtctggtaggggcattagctttgaggttaatagattgcaggttgaaatgactgcttgctcttatttctccccttgttaacaggatgtcaggagaatttccctcccctgtcagcatctgtaagtacctgtatgcttggacctaaaactgtacactctgtggacttgaaagggccttagttataccccacgtgtggagatgagcaatctaaggaccagagagggaaaacctttggctgaaatcacacatccagatagtggggcatggccaagcaatcaggcctcctgactcccaacccaggtctccttcccacttatcactttctccctgttcccaggggatggcagctaggaaggctctcaccatgggaatggggaaacaaaggacatggtgcaagacaatgagtatgggtgagaggcccggagagccaggttgcaaggttatgatcagacccgggctgggggactg

SEQ ID NO: 58494 - DNA, 638 bp, Bovine  19866881336324
  misc_feature (1)..(1): n is a, c, g, or t
nctggacaccccctagatttgccccagatctcctggacacacctccaaaccaacagctcagtggtggagtttcttaagaagatatcaagatttggggggaaaactgtataggagtttccagctacttgacctgtggagactattgcgttctgatctctaaatggcaagagatgaatgataaataatcgagttggggaagtttgtctggagtgcggtttctgcaattcttaggtgtgagattttaaacagatgttgctggcaaggcaaactaaacataaatactcccctcccaggcttcagaaggtgcccagcccagcaaatgcatgtatatatagggactgagccagatctcccgccaaaggagtcatagctccttccctccctgttctctgcctccttttattccctttctcttgtctgcgtctctggatgctccaggagccatgagccaccagtttagctcccagtcagcgttcagctccaggagcaggcgggtttacagcactggttcttctgcgggctctggtggtgggagccgggctgtgaggtccgtgtgtcaggcccgagggaggtgtggcagtggtggtggtgggtatgggagccatgcaagggggtttacctccaggagcctgtacaat

SEQ ID NO: 58495 - DNA, 917 bp, Bovine  19866881359186
  misc_feature (1)..(1): n is a, c, g, or t
ntcgtctgcctccagagctgtaactcctgcttccagagctgaatcctcctccataactggaccctctacctccagaaccataacctccaaagccagccctggaggccacgcttgaagaaatgctgctgctcgtcacagctgcagagagacagacagcattatacctcagtgccaactgcctcggcgcctctgccccactccacccccaggacaggaccactcccccgccccccgcacttacacacagtcacgttgctgctgaggtctccagacatcctgccagagagagagaaaagataactctaggcagagcacttaggtactctgcatacgtggttttacaacttccacctataaccacccatgtcagcctcaaaactcagccaccacggcctcacacagcccactttctttggtgctgcggatcacagagatggggacgggccccatgtttccacacagtctggcatcccaagtcatctcaatttcttgctctgataaaactgatcgaaagcaaattcacttctgaactgggaacccattgttttatttaaatccatcttagggagtctgatatgcagaatccaagccacaccagaaattctcaaatgaagactgttctgtgaacattcaaatcagagagaactgcgactctgtacagcctccctgccctgcacccaccccgccctcccctgcttcatctgaattctttcccacatcatcttgcaagctggggagaagaggcccggcctccagacaggtacccagcagcagcccgagcaaagccaaagccactccttctctgtaatactggctctctggtggaccgaggagcttttgccgtctaattgcttcagccagactgaatcaccaggggtactgaggacacgacaagggtcttagaccacagaggaagg

SEQ ID NO: 58496 - DNA, 803 bp, Bovine  19866881403242
  misc_feature (1)..(1): n is a, c, g, or t
ngacgcggaaaagcggctctgttatctaggagccgcaagcccctcttttatcctctagacctggtttgggcgggagagttgtcgagctgtgaatgattaagtgggctgggcatgcctggggggcagctgtgagctcaccgacacacctgcgcagcggtgtggggtgcaaacgctgtcttcctggcaggctctgctcagctagggataaacttgccttgcagccctgatgtcttggcagcgaataggccatgctgccagcaaatctttctttacagccggggcctagggctgtgagtagcccaaagaagggtgctgggaagcaagggggcatttggccaagatcctgaaagatccttccaggaccaggaatgtcatcaaacattgcagcacattgcacactatccatgaacagggggcagagcgagtcccccactggcagtggtctgctctgcttattcctttagggagagcttgcttcagggacttcagcccttggaaagccagctgtggcctgatctctccactctgtgccagaggggaaaatagatttccatcacatactgcaaaactccatttcttagaggaggcacagttacatcagagcctgctgggcagattctcctgcaagatttgggccagaaagtctccccaagaaccaagttccagaaacagagactgtggaacaccctcagcccccggtctatcccactttgctctctggagggacagacccatcccaccacaacgcctcctaattcagccttttctgctgcattgaactttttccttgcccttggcccagg

SEQ ID NO: 58497 - DNA, 1223 bp, Bovine  19866881507976
  misc_feature (1)..(1): n is a, c, g, or t
nccttgcccctgcccctgctttctctgcctcccctccgccctggctccaggagtaggagaaggtagaccagggtaccctctggcctcctggggcccctcacctgcactcctcgccctccagcagcttgcggtaggtggcaatctccacatccagggacagcttggtgttcatcaggtcctggtagtcacgcagcagccgggccaggtcctcgcgggctttttgaagagcctcttccagatcattcagcttgctctgggcgtctttgagggcattctctccccgctgctcagcatctgcaatggagtcttgtacattcttacactaggagagaaggagaaaaggtttctgttgggacaggaagtgcaatctgtcttggcagaggaggagagggagggagcaaggatgtgcagggtgtgagaagccagaatcactggccctggaagtgtgtcaccagagagttaatgcaagttacaagcaacttgctaagacttgctgctgtctctgagcctctgtcttcccaagtcccttttaactggacccttaaccctttccccatcatgacctttgatgctcacaatctaggaccagagtcattaccctattttacagttgcagctgcaaacactgatgtgaatggcttcatagaacttctgttgcttgtggagtcagttctctgccccacattacctcttccagagctaatgtccaaacctggccaaccccctgcagcactccctgcccctgcatcacacagccagctgtgcaaagaggtacaaatgggaggtgacgcctgtgatctttggtaaaccatgacctctagcttcgtaagccactgttccatttcacccatgaaagcaatcaaaaagttaacacaattctttccctgcacttaatccctacttgagaatgagccttaaaagtgaaagcaaaagctgctcagtcctgtcctactctttgtgacccctatggactgtacagtccatagaattctccagcagatcttcccaacccagggattgaacccaggtcttccacattgcaggcagattctttacctgctgagccacaagggaagaccaagaatactggagtgggtagcctatcccttctccaacagatcttcccaacccaggaattgaactggggtctcctgcattgcaggtggattctttacctactgagctatcaggaaagccccaagaatgtctctgatcactctaaa

SEQ ID NO: 58498 - DNA, 1200 bp, Bovine  19866881508397
  misc_feature (1)..(1): n is a, c, g, or t
ncttgacctccttcaggctgtctccatgctttccagcagttatcttgagctcctcatactgcacggaaagaggaggagagttatctaatcagggagggtcaaccaagctgaatgtcatgtctgcatttgtgggagatgggggaccagtgccatacttgactgagggcatttggggtactataaacactctttcttgggaatgatgcccaattttcactagacaaaaccaccaataaccttactgtacacttactggctgggctggaacacagctcattagaaagagctgcggctctccctgcccacccagaacttgccttgctgtggtacactgcctcggcctcggccttgctcctctgggcaatctcctcatactgggcccggacctcagtgataatgctgtccaagtccaggctgcggttgttgtccatggacaggatgacggtggtgtcggtgacactctgttgcatctgggacagctcctgcaacacagggaaggtctggccacgacgtccctgcccacagccacaggcagtgaggagggattcccctcccccggtgtcagggaaatgcagaatctcagactaactatgtactgggtggggtgtaaagtgatatagccaccattcccagtcaggtagtactgagaattacagccggggtgggggggtctgcatttctgagcctcctagtttatgcagcttaataagtgcccccagaaagaagccagttgatggcaaatgccttaaattgtacttcctgttgcagaagtcatgtgtgtgcacttgggcagggaagcggggagtacattatattttgacctctgaaatatattggatataagaagagaagcagggtgagtcttttcctaaggggagctggagtgagggaatttgtcctaatagagcattacttcctgtgacatcagaggagaaagttcttctcctccaagacctataccaaagaagctcccagtggcctagacattgatcagttgaagtcagccacccatgaaccccacccacagccccctttcccagtgggagaggacttcctttgaggggaagggtaggtagcaagggtccatttaagagcagcctacttactgcatcaaagagcatttttgtgaactccacgtcctgtctcagcaagtccaccttggcctgcagctccaccttgttcgtgtaggcatggtccaca

SEQ ID NO: 58499 - DNA, 833 bp, Bovine  19866881810399
  misc_feature (1)..(1): n is a, c, g, or t
ntggagcctgctccagcagcagggcacacatccccatcacaggcacccaataacctcgagcccctttttgagaactacatcaattccctgcggagctacctggatagcattctgggggagagaggccgcctggactcagagctgaggaacatgcaggacctggtggaagactttaagaagaagtgagtggcaggcgcgtgtgggaagatgctggggggaccctgtctcggaatcccagctttcactgcgttccccttgcctactgagagggctgtcacttatcccactttcctatatcttcatagcggacagtttggttcactgggttcctcctcactttctttcctaaaggatagtcctttactaagaaaattagaaggctagagctgaagaagcaccttatcatgagccaggctggggaagatcctggctgtaggatctgaaggatgctgggacaactcacagggtggtgaccaagcatccagtctactggggatggaggggtttcccaggacttactttccgtgttaaacccagtctgcctgaatgaatgggaatggttggtccttctaactaacagggggacagtgagagggtgtgtttatttaagaggggcgggagggggacagaggacagaagagaggtactttcagagtttcagagaacagtgacatttatgactacctcatactgcaaacagtgatttccttttaactcttacagatatgaggatgagatcaacaagcgcacagctgctgagaatgaatttgtgaccctgaagaaggtaagggctgtagtgtgaggtttctagggcttgtaggcacggtttccat

SEQ ID NO: 58500 - DNA, 1814 bp, Bovine  19866880349470
  misc_feature (1)..(1): n is a, c, g, or t
ncttaaacatgcaaaaatgttttctatttcattaaagaaaagagatggtcttctaacagtcaggttcaaggagatacaatgaaccttgagataaggtttaaggttatattggtcaactaagatccttctagtaactgtttcttagactgatgtttaaataaattttattgaagcatagtagattgaaaatgtgttagtttctgctgtacaacaaagtgaatcagttataaatatacatatatccactcttttatagatgcttttcccatatagcagagaaggcaatggcaccccactccagtactcttgcctggaaaatcccatggacggaggaacctggtaggctgcagtccatggggttgctaagagtcggacacgactgagtgacttcactttcaacctttcacttttcccatataggtcattacagggttttgagaagtttcctgtgctatacaatagctccttaataattacctattttatatgtggtaatatgtatatgttattcccactctcccaatttatccctcccccaccttctcccaccctagtaactgtaagtttgttttcccatctgtgactgtattttgtaaataagttcatttgtaccatttttttggattccacatataaatgatattatatatttgtttttctctgtctgacttcactcagtatgacaatctctaggtttccatgttgctgcagatgacattattttgttcttttttagacttatttttaaacaattgcatttaaaaccatttggccaaccttctagatgtacaataaccaaagggacagttagcataggaaattggtgcaaataaagataaatgagatgacaggtttaatgcaggttgagttggtgttcttctaagaatttattgtcatattttcttcgcagtttacctgaagtactgcagagacttcaggagacatgttcttttagatttactcttaaaactgtgtatctgtgtttgcttaattacttgactaaagtactataaataaattttcatgaaataaatgaattgaaatttcttttgaacctattaaaacttagaatggtttatggtagtttacattttttggttttttttgctcaaagtatagttgcttggaaaaatgccataaaattacttttttctgttatgaaaagttgtgatggaggtacattgacttcctaaagacaacctagctgttttcttatggacttctatagtacaatatacttgattgcaatgggattttcttttggtacttaaagacttagttgtaaagtctttgtctgaaattgttgggaaaagatatgattaactatttttacctcacttggaatcagaaagtatagaatttatcatggttgaaatgttagtgatggaaagcattaaaaaaaaataaggtatacttagagcaattttattaaattggtaaaatctaatgactacgtaatatttattttgttttctatacagcatcatttgttattcctgctggtagaactcgtcccagttttaccgcagcagaactggtatgtagcttatttaagatatatttttaaaagagatgccccagttttagtgaatggtggctgaaggctgggcagagatgtaatttgtaaaactttagttgaatgaggaaagatgtcgtaagggatgggaagacaaaaatagcttctataatataggtgttggaaaaagtcaggagtttcagatgtaatattttctcaccaacttttcctatcttccagagcagttgttagcatctgccaagactgtacctacaagattaggaaatttctaaagtta

SEQ ID NO: 58501 - DNA, 2570 bp, Bovine  19866880426671
  misc_feature (1)..(1): n is a, c, g, or t
nttatactgtgataaaacatttaacaatttttggtgttatattcactgtgtatagtaaaagatgttaacttaggttagcaattttatgcagcagatgtgatacatatgaagaacaaaaaattcaatacctcatcctgcatacatattatcaacaaattggaagattattattttcaacagcagcaattctatcattgtggctatccaggttcaactacagttaacatggaaacaggacagataaagttgttatccctggcttaatgtcttgacaactgaaaaagacattttcattaggcttctcatttgacagttttgctcaaataaactctacaagttaaaagaaaaatgtcttttttttttaaatgctttatcatcatagaaacagctgaaagtaacaaaccaaaatcataagcttatgtgtatatgtatatatgaaatcatcagaaaataaaaacaaggtcattgtctatgaaacaagatgcagcatgagctaagactgaacttttagaaagctgcttttgccattgtaaaaaatacattatgaataagtttaactttattagtatcctttgtcctttttgaatgatatagtcaagctatacaaatgatatgaaaaaatgtgtatcatataagcagatttgttcaaatactgaaaaaggccttgggcaatacacatttggaagagtaacaaaatcttttaggatggatttaatggcacgtaattacactgcctccttaaaaggatttataaaattttatacaaattttaaaattcatgaaggcattttgtctctataattttgttaaatcctttaacttaattgggtgcacatacaatttaattcatacaaagcttgaatagaagttttttcctaaatgatctacctttatttatgatgacataaataacacatattcaaatgtttatattagattacactccattcatgtaattttcagaatgcagtacatttaacaagccaatgaaagatcctcttattgcaaaagtgtgcctaaatgggactccatggctatatcctttcattggatactttctcctcagcaaagacagctagtggctaaaatcaaaataatggttgcaaagcactttggctgcaataaatggctccaatcaacactatggaatatcttcggaagttaaaaaatttgaaaaaaataatattgtaacaaactgaagttcttagaataaattacatcacaaaattgccttttctaaatcttagaactttttgctatctctttgccgattatgcaaaaggaactttctggacatttaggatcttttcgaacttacattcaactttgttcatgtgtcaacaaaaaataattaaaaacaaaaattaagacaaaataaaatattcaaatctcatcctactggattacacgtgtcaagagaggagtatgggagaaagaaagcagcaaaatttctagctggatcggcaactatagttaattacagataggaaaagaaaatgaaaaaaaagttagagttgccagttcttacacttggacatattaacagaacaaaagacttccctacaagtttaagacagaggcttgggacttttttttttttttttaaacataaaatttccaatcttgaagacacttatcacaaaaattatgcatttaggatttcacatcatattgatgattgggcatgatcctaacagcaactatttaataaaaattcaaaaaacaaaaatattttgaaataaacaattagcacccctcccccaccctaaaccaaaagaagtccattatggctttgatatcccttgtaaagaattaagtagaagagtattgccacatttaaaaataatttcacactagtaagtatttctattttttccgctgcttttgattctgtgtctttgcagtacttattagagaacctagacatgtacgaataccagcaaggtgaagcagagatccagctgcctctttgagctcctcatcaatttcttgacatgcttgttttcgcatctttttgtctggctgccccttttcagtggtatctgcacaagcctgcgatgcatagccactgtctccaagtggatcatcttcataatcaacgtctgtgtcttcttcactgcgaaatccttcactgccatcacttcctacatggctactctttgggataaattcatacacctcatccacagaagacagagaagacacactagatctggacgcacaacgctgtgctgccatgctacttgcactgtaattgtggtcttcttttgggtcaatgctggtggctaaagaatcactctcatgtaatcgcatagcactggaatgattgaatgcattgctataactcctctttttttgcattgctgttttaagaggcagaggcttctcacctgtggaaaataaagcttccatcagtaaatcaaatacatctgactgcagaaacaggccatttaaaactattatatcactcctgaataagtgctttagactggtgatgtttcgtgggtctttaaattttatgcagaccatcatcctgtaggaatcaatctaaaatatttttaaaccattta

SEQ ID NO: 58502 - DNA, 2612 bp, Bovine  19866880468789
  misc_feature (1)..(1): n is a, c, g, or t
ntttaaagataggtattgcctcaaaccaattacaactgtaggttcccccacttccccctgcattttaggagcttggagtgcacagatgctttccagggtaggaccacctgctgaagcccacaggctgagcaggaccagaggaagacaaaagccagggaagaaatcccatgctaatctggagtcctcaaagcctggatggggtcttgttcaccttgctggagccttcacctcttctgctcagaatggcagaaatgaaatgttttcattcatttccctctaattgtttagaaaagccatctgtattaccaatttaagaaagctacaaacatccagccattttgcatagctacacaccctgaattttaaaacactgaaaaatcagaggaagagaaaaagacataaacccgggatggtcaaagatatgtttgcaaatgaactcagaaatgggagcattaaacactgaattgttcaactttaaaagaatgttaatgtttttgtatttattacataagaccttgttctacatcgaacagagacttgagaattcctgcgttcttttcaaagtcagtcattataataaacttgctttcatcttggaatgaaataaaagtggctttccccttcacaaatgattttaaaccattatgctttcaaatgcattaatgtatttggtaacttcattactgagtatgtcttcttttattggcctcttgtctttagcatttacctggaggaaaccgagatgtcaatgttaactgaaatatgaagtcagtatagatgggcatccaatatgttaaagttttacatcagagaatttgggaatacacttttaagcacttcctgcattagattcagtgaatcacaatagaaaggattgcttgcaagtggtttggtccaacccctcactttagatgaagagtcttaagtggggaaaagtgaaatgacttccccgaaacggcagggcagttcagcagcagaccgggactagaacatgggttactctgttcctggcccagtgctatgtcctacgttagtcaaatcacagcaatcctgttccttaggggtgtgttgatacacccccactacacagtcctctggttcttctgcaaaaaccttgcttctgttagagccaccagcttcttgagggtatgtgctcacagtctttaacttcaaagtgtgagtcactcagtcatgtccgactcttggtgaccccatggactgtagcccactagacgcctctgtccatggaattctctaggcaagaatactggagtggatagccattctcttctccaggggattgtcccaagccagggatcaaacctgggtctcctgcactgcaggcagattctttaccatctgagccaccagggaagtcccctaacttcctgttttcccatgaagcttttagagcctaccagggtgctctttcttcctctcccctgtcttcctcagcactaatggctacattaaaaatagtttctctttttctgcactgttttttgagaattcaccaggtgttttgtatgagcgtttcctctgttcaccattgaactcctagtgtcacagcccctttcttctttccccactgtcgttctccttggccattcttccccttggctgctccgtagtccacatattggtttctcttcacgccatcctgagtttcctctgcctagtagggcctttcctggtaactcccaccacgtcactctaatgctcagattcttctgtccctcctcttgacctgtctacttttctacaaatgtctcagccttgcattcgaggcccctgaaacaaaagcttaaacttcctttgccaggcctatcagccacacttcccctcatataaccaatacaccaaactggcactgtccaaaaatgcagccgccagccacatacgggtattgagcacttgaaatacatccaggccaaacagagatacactgtaagtttcaaatacacaccagatgtcaaagacttggcaaagcaaaataaagcacctcattaataatttttatatcgattgacgttgagatgtatgtggctgaacccccttgactctgtttttctcagctttctcttaggcccacagtcttacccctctcctttctgcatggctgacctttagtgcactcagaaggaatgcacccaaattggatgagtttcctgtcaccttttacccttgtcttcatccaaaatgaaaactggaagaatgcctcctgctgatgcagatgattaatggtcatgaaacccccaagcggaaggaaaaacccctggttcccatctggtgtggacctgcttctccatggcagtcaggttctattttcagctctggtccctgtaaagcccccgtacacccttttccacaccctgcagtatggagtacaactgtgcacgttgtccacttaatccccacctgtatataaattaccctcaataagcttcatagttgcacttcatgaagatgcctgttttgtttttcaatctcaagtttagaagacattatttaatataataattttgccttccaacaaaaattcaacattgaatattcaaaatttcaatattcaatgaatattcaaaattcaaattcaacttgccttccaacaa

SEQ ID NO: 58503 - DNA, 701 bp, Bovine  19866880469579
  misc_feature (1)..(1): n is a, c, g, or t
ngcctactgtagagcactatatttaacatcctgtgataggccctaatggaaaagaatttttaaaacatgtatgtatatatataattgatgcttttgaactgtggtgttggagaagactcttgagagtcccttggactgcaaggagatccagccattcaattctaaaggaaatcagtcctgaatattcactggaaggactgatgctgaagctccaatactttcgccacctgatgtgcagaactgactcatatgaaaagaccctgatgctgggaaatattgaaggcaggaggagaaagggatgacagaggatgagatggttggatggcatcaccgactcaatggacatgaatttgggtaagctctgggagttggtgatggacagggaggcctggcgtgctgtggtccatggggttttaaagagtcggacacaactgaatgactaaactgaactgatgagtaccaaggtccacatttaatttcaaaagtacatatgttcatctgagaaggatagaacaaataacgaagcctcttgcatggtaggcagattctttacctgctgaatcatcagggaagcccgaatataaaacagtatgctatcacagaaagttaagtgattaccaattctacgcatttaggaatcaagttttaaaatttgactatgaaaaagatgataaacgagaccttgcagcttatttcccaag

SEQ ID NO: 58504 - DNA, 1810 bp, Bovine  19866880486430
  misc_feature (1)..(1): n is a, c, g, or t
nctgggagttggtgatggacagggaagcctggcatgctacagtccatggggttgcagagtcagacacaactgagtgactgaactgagctgaaccagatagtacctagaaacctatccaggtcagcagtgtcttctgagaggcagaaatacagggctcaagatctggcgattggcagaaaggaaggtcagaggctttccttctggatggactttggggagaccaggcagggtacaggataagaaatcaaggccaaaataagtaccagtgcagggggagcatagtttcaggtactaaggtgcaccataggcaaccatcctgacgtatgttcatatgttttctaatgtctggtgtgcctgtattttaattctgcaagtagtattgtgcatatatgtcattaatttcttaggcatttctcttttttattttttttaatttaaatttatttcttttaattagaggctaattactttacaatattgtactggttttgccatgcatcaacatgaaggcatttctcttaacaccatgattctaagatccacacacactgctccgtgtacctttacacacttgctcctacctgccgaccccttaggtaagtgtgcacatttcaccattccctcaagaaaatctttgtgaaggtttccttaagtatcagtgttgagaacttctctgggatgtatacaggagtagaaccgcagggttattgggacaattgtccacgttgctaagagcttctggcttcatgggtagaatcacagaagcatcaaacaggaaaaggatcgcctccaaagggagtacattgagatggttattaacaaatcatgggccacatgaacaaacatttaaatacaggatacagacacgtttatgcttcggaactgctgcccttggaaaatgaatcaggaaggaatacatgacgtcactaaaataaaaatgtgtctgtggaggaaacagttcgggattcataggcccaccttccccatatcacttcatgccaatacttctgttgtgaaaagcttggtgcacctgtctcaccccatctctccctccatcctctgacccccgggcctcttttctggggccagccacatccataaagctacctgatgttcactcggtgtcttttttatggacggcactctgttttcactctcatcactagcctttcctgctctgcagcatcaacatcaactctacaaaatttcatcttgcaccagggctgttgcacagtcactgggagcagccagtgatgatctacagcttctctcacttctctccaacccttgctccttacccctcatccctccatcagtcaaacactcaggtgtcctccctgggtcagctctgagccaaactgctctcctgggagccacacgtgctcccttttggaggagaaggctgcctgctaagaggcttcagcttctgagctgcatttgcatgaataaacagctctgaaggggttcagttgaagcttttatgtaaacactctccaaaatatgttctgcactgcattatccccagcaataaagattctggaatcagaatttggctgtcagttttattgatgttgcatggggtacagtagaatacagctttctcctctggaaatttattgacttggcagtgcagagagcaataaaactgtgtttttaatcagtaagccaagcagacatgattccagaagaaatataggaagcaaacatgccatcataagaagatttctccctgtcctgtccctgttcttctcagatgttctgtcaaataagtttgggtactgaaggatatgcttgggggggctgtcttcag

SEQ ID NO: 58505 - DNA, 743 bp, Bovine  19866880487210
  misc_feature (1)..(1): n is a, c, g, or t
nagaaaagtgttaagcggggagtgtgagagagagagagagtgtgtgtgtgtgtgtgtgtgtgtgtcttggtagaccaggaggcctttctcagcaatttaagcaatggttgtgaatacttcacaaagctgtaaagactattgtcttaaatactacagtagcttaacaaccttttgtgaagaccatagcatttaattaagaaactttgaggctttctggtttacatatatatatattataggttttttttggtttgaaatgttatatagctttgatttaaacagtttgcttcaatatgttaatgatgtcagaatatttattttctgaaaaacaaagtattttgatgttatacctgccattttttcttaaatcacacaattttttttgcttctgactgccagtgccaatgtcaaaattgttgtacatttcttattaagtgcttaattttaaagtattatgttgccattaaatagtgtataaaaatgtgtaattgccaattcattgtaactattatttatttttaagtgaaagtgtaagaaggtttctgatttaagaaatttgagttattaaattgtgtccttatccttttttctaatgtagcataaaaatccccctgagtttgagttataactgccagtaagtagatgacaagtccacgtgaaccacttcttagttgccagtctttgctcatattaaaaacaacttaacaaacgtttagtttttatatctaatctctgattattaa

SEQ ID NO: 58506 - DNA, 1028 bp, Bovine  19866880510066
  misc_feature (1)..(1): n is a, c, g, or t
nattcttgccccagtagtagatataatggtcgtctgagttaaattgacccattccgtccttttagttcctgactactaaaatgtcaatgttcactcttgccatctcctgtttgactacttcctttttatcttgaaattggaacagagagtacaaaacagatatgtatccgaatcacttggaaaactttgtcaaaatacacatgctgtggaaattctggaagacgcttggggaggggaaatagccatctgtatttcatccccaggttaatgagatcctctctcagggctgtttcagtagatttaggtgtaattacttctgaattagttttaataaaaactttccaaatttggaattactgaacaaccagaatatgtcattcagcagtgttccttgtgtgaatgtatatcttgtgttcacatttggtgtttatgtatttgtttattacatagctgctccattttcagagggctttctaatcgtgggttcacgttggatcagtaagtgacttcattttaagtgaggagtgaagtacaagaaaggcagaggagggtggtgactgatgtctgaacagtttcattgttaggctgtcccttgaatagtgtcatctctgtgtgtattccatgaaaacaaatgttcattattggctcttaaatagtgctattcttctatgtagaaaaagttaatattgatacaagggcaaaaggaatgtatttttggtagttttgtgcttttttccttctatttatttgtaatagctttatcttgtatttttattttattttatttttaaactttacaaatgtattagttttgccaaatatcaaaatgaatccgccacaggtatacatgtgttccccatcctgaaccctcctccctcctccctccccataccatccctctgggtcgtcccagtgcactagccccaagcatccagtatcatgcattgaacctggactgggaactcatttcatacatgatattgtacatgtttcaatgccattctcccaaatcttcccaccctctccct

SEQ ID NO: 58507 - DNA, 6456 bp, Bovine  19866880583992
  misc_feature (1)..(1): n is a, c, g, or t
nttcacgtggccagggttatctgtaacaccccacatcttcacctgacatcacaccttagataaggtgtgtgtgatgggaggagaaagaacaggtcaggactcggtggctgactcaacaacacaagacaaactggcctgaaagttctgaaagttgcgccttaacaaggctgtgtaggatcatcccaaggtgtcatttttttatagcactgtaaaagcctcgtcatcagcaatctggtccatctatctgggaggaagctgacttttcccaccccacagatagcttctcctccatgcacagggcacatgagtatcccttccacaaggcatgtaccccttccacaacatgtgcagctacaggcctgtagactgttctggacagatcagcagcccaaagcctgcctgctccacaaaaccagtgattacttcctcagtgacagtcggggttgtttttcagtaagcttcatttttgtagttagcctgcaagtatgaattcagcactagactcccagaggctctcaggggtacttactcttctcagacaatgacctgcacccgagaaaggaaagagtggatgccacctttcatgctcagactgtgaggagtgtatctattgtctctactagagttgggttctctgaagaggaccggaagagtgtgcatgtgtgtgtgtgtatgtttctgtatgcacacatgcccgaatgcaggtgtgtatctatttttgagagaataaacatattgttgtttttgttgtcatttagtcgctaagttttgtctgactctttgtgactccatggactgtagcccgccaggctcctctgtccatgggatttcccaggcaaggatactgaagtgggttgccatttcctactccagcggatcttcccaacccagggatcgaatttgtgtcccctgtttggcaggtggattctgcaccactgagccacctcggaagcccataaacatgttaataactatattatcaattattatcaactatgttattaactattaataactatgttactctatgttatattcccattgggcaccaataacttaatactctcattgaatctttacaaccctgtgaggaaaatgttaatagaacctctgatgaataaatctgttacaagctagtcttgggaatgacataagactttctgatacattttctctttggagatgtttgaagatttttacagcaaggtcaatttttttcccacttaaccacttttataggactacactgcctgtaattcaggttaagttatacatgataaccaagtttaataagaaaaacaataatgtatttcaggatttcaacatttttaatgagtggtactttattcgtgaacagttctaagtcaagtgattttattaaatgaaaatgctcacttaagtaactgttagatcatgaagaataaatcttgagccaaaataataataatattcatgacaaatgtgtattcagtgtgctttgataacttgctctaaacatttccttaaggacacaagttgttaagtgcctcagttgctatactgatactccaaaaagtaaagagacttgctcgaggtcacacaagctcagtctctggctgccctttgtctgcctctggctggacagagaaagccatgagtgaaatacaggtgtctctgctctccatgtgggcacaagttgggggctgggatcctttccattcaggttggaaatccccaggaaacagtcatcataaaccaatcgtaggccaaaagcaaaagaggatacatctttcaaaagaagatgctattccagagctcacactggtgacatcactgactgatccttacttcctttctggacctgagagcatttcaaaacaaagggttttctaaggatgaagattctaaaatgtacctggaaaagagccccggacagtcctggggtggtcatcaggcaaacatcactcatcccatccttagaaatgatgacacctttgcctgcatttgggttctgtcgtcctggcaatgtcatctctgaacagttcctcttccagacacccccaaagaagatggccgaagggtggagtcaggagttttgatcaagatatagcctagcctgaagtgcaaggtggttaggatgtatctggggaaaaggtaaagattttcactgccctgaaaaaaatgcttaaatttgttggttttatatccatttttactcctataaggttcgaagaagcaggcatagcccctggcatggccctacccacagaggaggcaatcaagccacagttgtgattagatggaatgaagtgacatgactttaaggatatcataacattttttttcctcaattgttttcgcaggtgaggaaacagacccagaaaggttaagctacttgcccaaagcagcttaaccccctagcccagtcccagagcttctgagcatcatctgctgcaggaagattccactgacctgcagtatacacaggggtctcccaacctcgccttgcccgggccaggctgcataggagacaccgcccactctgtgtctccctccttggcacgagatgaaatcaggtggtcccattcttcctgttccactctgccaagtttatctgaacacatttcctctccacaaagccaactcgccaattatctgctccaattaaggcgtgtgagatgtggttaattcagtcactccagtagggtgaccagggtgaacagggggctggccatgctggctgcaagtcccccgatgcccctggccgtgctgcttcccctggcattcttcctacccccagatggcctctgtggtttcttcccctccccgctccttcctttctgagtccctggagttccagaactgtgccttgccctggctcctcccctatcaatggacagttctgtcctaattttgtgtcctctgataaactaacatgtatagagttgtcagtggtaaatggcatggtaatacttaaagaattaccataaaaaacagtaatacttagagtctctcacaaataagtaactctctaatgacattgcacatgaggcatcttccgtatttatgtccaaagccagccttgtgaccaatgaatgtaaaaatcatgcctgttttgctttggcatacaaaccccaaacactcagctctctaaggccagtccttcctgcctcttagcatgaaaacaaagaaggcagacaaaggctgaacgtgtattagtctgatcagttaggacaatggacacaaggtcaagttcaataccttcctcccttttatgaaataaatactatgaccctgagatgaaatgtataaaataatataacctacgtatacacgtgcagtgctgggctcagtcactcagtcatgtacaatgctttgtgactccatggactgtagcccatcaggctcctctgtctatggtattttctctgcaagaatactggagtgggttaccatttcctcctccagggaatctcctccagggttcttctggggatcgaaccctcatctcttgcattggcagacggattctgcaccactgagctacctgggaagcccctatctacataagcccctaccttctcaaaaataaaaccaacatattgccttgactggaaagattcaaaggagaaataagacagagataatttctaataaagtaatacatatttcaatatggaaatgcttgggcccaactatcttagaagataagatgaaggagtcaaatgtaattattcatacattcaccataaatgggacaactataaatgtagatcaattcaataattgtatcatgttgcatacagctagtgctgtaaacaaatcctagtaaacttccaaaaaccaaagtaccagattactttgcttcatgtggcagctgcattcttggaaaaattaagtgtctctgaaaccatgcaaatatacattttatttatgtgtaaaatgtagttaagtttgaggcacaggtagttataaatactatcgttgttgtcattttaaagctacatgagcatctgagacaggacatcccttggctcttatccaccattttattgtattacaagtagtgtgatttattgtgacaacaaaaaaaatacaaccacctccccaaaagtcccaaatgctcctggggtagtactgtgcccttcactcaatagcaagtcattctattagcaattacaattagcttctactaacagacttgagagacaatatttttctctcaggtaaaacaaatctggaagcagcagtcttgggctgattttttccaagtctcctatcttttcttttccaacattcctagtactgatatccatccttaagttcatggtcacagaatggctgctggaaccccagctactgtatctatgatttagttaagataaagaaagaaggggaaaagtcaggaagagcaaaaccatgtagtaaatgaataagtctcctttagaaatatttctagaagtctctcccaacaactacctttatatctcattagctacccctgtcctcaaagaggcctacaaatgtaattaggcactttgctgtctctaataataatcagttccatagtgaagaagccggagtgaatggacattgggtaggcagccagtcgtctctaccatattacttcacccactgataatgttcagagatcctgccaaaaccccaaaagcagatgtaagacacaggtgctaagaagggcatgcagtcttttgggttgcttagctcaggacctcaagcttatgtgggcttcaatatttgtatgctattccctgcacaggagcaatgtgacacttcatcacagtgatcgattctgactagatcctggcactgaacaaatctgggtcagcagacggatctgagaaggggttcaaaactcaaaatctgcctgagtgtctactgtgagaattcaagatgacaatggttgagcttctcacatctggcattagccattcaaatgcacgtgtgtgcttccagatgttgggccagcccctctaaattttcctaggggagttttgttcaggctcacaaacatgcactgcatctactcatttttcctgctgtgtgacagggatgcaagataaaaccaacaaaattgcttccctgaaaagcttatactctgggtgtggagggagaaggcagggaaggaaggttagggggagcagagagggttgaagtggtccgtgctgtggaaaggcatgtcctgggtattgtgtgtccgcagcagccagcaccatgccattcctagtgggtgctcaataaatagttgtcggtacttcccaggtggtccagtggctaagactccacgctcccaatgcagggtaccctggttcgatccctggtcagggaactagatcccacttgctacagttaaaaagatcctgctccagggcagccaaataaataataaaagaaaataaatagttagctgtattttttatttcaaattcttctccgtgatacttggagaggaatctgttctcttcggagacttcctgggctgaggagttattcatcacagctgaattgctttgttttcccttccacttcattcagtcagctatgtcctagaaaaagttcccaaaatatagcttaaattttcaaacttgcagaaagccttcttggttgaaaccatgccaaagcttttcgaactgggaaatatcagtgatatgcaaagataataaaaataatctcgtgcttggaaatttctaattcttccatagcctcagaatccctccagagggcaatttggcaacagttttcaaagttttagtaaaacattcatatcttttgactcagcaattctaagaacttaaaccaagaaagtaatgaaggatatagaggaagatccaaaaataaggatgtttattagagtttggtctattgttgtgaaagatgatagatgtggttgcttccaatgttttctaaccaataatagatcaatgaataaatatagtgcatttcatacaacacagtatagccacttgaaatgattcatttaacaattgtgtattgattacctgttgtgtgccagtcactattgtagatagaaggacataagtgaatagaacagacgatgtggatctcaacattctggtaatgtgccatgattgtgtttattaacatgaaaatagattgctaaatttaaaaggcaatatagcacatggaactctactcagtattatgtgtcagcctggatgcaaggggagtgtggggggagaatggatacatgtatatatatggctgagtcccttcactgttcacagaaactgtcacaacattattaacccaatagaaaataaaaagtttaaggtttggaaaaaaaaatttttttaaagcgggttagaatgtaagtattcttattatgaagaaaaataatagttaacactcatatagtttttattatgtgccaaaattatgctattatgtgccaaacatcaaacatttaatttacataagaacccagtagatccaata

SEQ ID NO: 58508 - DNA, 1457 bp, Bovine  19866880594363
  misc_feature (1)..(1): n is a, c, g, or t
nttcatcccatagccaatgagaaactaagaaatgtttgaattaatgtaatgtgcgtaagacaagccattccagtaggaatatacagatggactaggaagagggctaaaattgggggaaggatgccaagaagaaaactaatgtaactgtcccattagaaagaatgaaaatctgaactcaagcagtagcagtggggttgggagaaagggagtgccagagtggaaccattccttcactagggacacagtccctcttcagtcagtccactctctgaatctgactcatatcctaagaattatctaccctcaattatttctttctattgttcatgactctattcttcctctgctcctaaatttcttctgagtaacgtaaccttggttccatttctcaactgggctgcctgattagccaaggacttcagcatgtcctcccaaagctgataatcttcaacagtgtgagcctttcaatcccatttgtgttctactgcagacaaacagcttgatagcaatttggttagcaactaaaggagataaatagctaagaaaatgtcaagaaagtttttttagattgagcaagcatagattatgtctctaaatttgttttccaaagaaaagaatgctctgtaaacagcttcattaaatccttgcatcactgtgtaaaatctgcatattaaaaaaaaatctaaatggcttttcattcccttcttaaggaactcctacgccaattcagagttctcagataacaaataaatataagattgaggctgttttgacttcgtttcctttagtttgctctccttaaaaaaaaagaaaacaaaaaaccactaggggcgatttctaaatgtttttcaatacccagaatcatagaaaatctcttaagtttacactgagtcacaatattcttcttacagttattctgccatctttgctgagagtgaactgagtggctgggattatgactatggtttctgcttacccaagacactccagtgtgctcctgaaccagatgctttcaatccctgtgaagacattatgggctacaacttccttagagtcctgatttggctgattaatatcctagccatcacgggaaatgtgactgtcctctttgttctcctgaccagtcgttacaaactgacagtcccccgctttctcatgtgcaacctctcctttgcagacttctgcatggggctctacctgctgctcattgcctcagtcgatgcccagaccaaaggccagtattacaaccatgccatagactggcagacagggagtgggtgcagcgcggctggctttttcactgtgtttgcaagtgaactctctgtctacaccctcacagtcatcacactagaaagatggcacaccatcacctatgctattcaactggaccaaaagctgcgactgaaacatgccattccagtcatgctcggaggatggctcttttctactctcattgg

SEQ ID NO: 58509 - DNA, 2034 bp, Bovine  19866880634830
  misc_feature (1)..(1): n is a, c, g, or t
nataattccaaacatcttaagtcatctctgtgttggtgtcgattgtcttttctcatttaagtagagattttcctggttattggtatgacaactgattttcaattatatcctggacattttggtcattattagactctggatcttatttaaatcttctgtcttagcaggtctcctctgacacagggccagtggaggaaggtgaaagtgcccacttgctgtagcaggtagaagtgaagggtcctgttttctggctcagtctctgctgacagcctaggggaggaggatctcctagtgactgctggatagagtgggtgttcaggctccccatttggcttccactgacatcatgctggttgacacagggaggggaatcttgtaactccttcttaggtggcctctaccgacacttcagagggaggtttcactgtcacctagcaggaatgaaagtcttggttttctttgacaccaccttagtggttggtggggatgactcattatagttgggtagggggacaagtccaagcaacccacgtggcctccagtgacatcatggggagggctgcacctcagtgcagctgggcaagagtggaagtctaaactctactctgcctttgctgacaggggtgaattggggtcagtttttttctttggtgtttgaagtagagctgctgctgctgctgctgctcagtcactttagtcatgtctgactctgtgcgactcccatatacggcagcccacgaggctcccccatccctgggattctccaggcaagaacactagagtgggttgccatttctttctccaatgcatgaaagtgaaaagtgaaagtgaagtcactcagtttagcgatcacttggactgcagcctaccaggctcctccatccatgggattttccaggccatcccagtggggtgccattgccttctccgtgaagtagagcagtttttgtctaataagagttttctgtcttgctgcccatttttctggcccttggctgtataaaaagactttttattcttttttgtctgtgacctttgatgtctctgaattgccagcttcagcagtacccagctctgttatagacaaggtaaaaagaaaacaagggaatttattgctgtgcattctttggggtgtgaggttcctaactggtctgtgctcttctctccatcttttatgtgtaatatccagagtttttttaaactgtacttttttaaagctgtacttggtagtactcttgggctaccctggtggctcagctggtaaagaatccacctgcatgcaggagacctgggttcaatccctgggttgggaagatcccctggaggagggcatggcaacccactccagtattctcgcctggagaatcccaatggacagaggagcctcgaaggctacagtccatggggtcacaaagagtcagacacaactgagcgactaagcacagcatagcacagtagaaagaacaggcaggagtgtgtctaattcatgttgtccctgcctctcctgatatttgaagcacctatgataacatagaatatttaagatcctaccattacaccttataaaatgagaccaattatgaaagaggataagtacagttattgtgggaacaaagctggttggttctttccaggtcatagccttaagttcaatgtattagtttttacttctgtcttctctaagtagaaatttaggttggaaaattcactggagacagacattattcttgctaacatttcatgttcatatttgattatacatattgtgattaaagtaatgaaaatgaaatcatttgttaacttggaaattactgaattcttatcaagaccctgatgaatgttgaaaagtagccacagagaaaattgtgtttggagacatccttcacactttccatgagttaattatagtcactaattttcatacgtacacaatgtgtacatctcttcaatattaatgtgttagccgctcagtcttatgtgaccccatggactataatgcaccaggctcctctgtccatggaattctccaggcaa

SEQ ID NO: 58510 - DNA, 1410 bp, Bovine  19866880679946
  misc_feature (1)..(1): n is a, c, g, or t
ntttattattaaatatacctagcatatttgtttgtactcatcccatgcacatcagtataattacctaatttttaaatctttaaagagataatggtggctatcagagtgatgaaggacctgggaaaagcccttcattttattggtaaggagaccaagattaaaggaggtaagtgccttgcccaggcccctcagcactgacctagtggcaacacgaggtcttcatatgcatcgtccaggggactttcttctactccaccatctctcagggtttttcaaggtgtggtccttggaccacttccatcagaatcactagagtgttcattacaatgcagattccttggcttcacttcagaccctgaatcaaactctctagagacagagcccaggaatgtgcattgtaagcaagttctctggatgattcctacaaaataatcaccttcattacatcacatgagaactttccaactattgttgccttggtttcctttactacgttccccttatcaaaataactccagctgctactagaagcactaatttaaagacgttaacaattctgccatggtttctgaataaacttacgtcactaagagatcaaacaggtttccttttccactcccctggtccctcgctctttctttttttgccctactgggcattcatctaggtttttctccctgctgatttgtcttcggactgaatacctatctgctgctacttacatttgtgccctgggacgactcctgagggcatcaacatgcttgttggcaaaaccctgcatggagctgtctttagtactgaaggctgtgcagagagtgtgaatggacttggatgggcttagcagcattgaggcagaggaaggagcaacagtagcaccactgctccagcagcaatcagtagacaggaaaaaagacgggggttttaggaggacagtggggccaaccacagcagtgaggacaccaaaatatcttaaggagagcagataagactcagtggctggctctagaatttctgaactccagacactcaggaatagcaatctggtgggaagggaaggaaggggatttatcacaagaaatgttttcacagggagcacattctttttacttagattgtgtgttaatttttggtagttttgggggatgctgaagattgctgctgctgctaagtcgcttcagtcatgtccgactctgtgtgaccccatagacagcaggccaccaggtttctccaatgcatgaaagtgaaaagtgaaagtgaagtcactcagtcatgtctgactcttagcgaccccatggactgcagcctaccaggctcccccgtctctgggattctccaggcaagaacacaggagtgggttgccatttccttctccaatgcatgaaagggaaagtaaagtaagtcgctcagtca

SEQ ID NO: 58511 - DNA, 1839 bp, Bovine  19866880807590
  misc_feature (1)..(1): n is a, c, g, or t
naacatttggactctgtcagcttggtcgtgtcacctggtccaggttactgaatttcttcggatcaagtttcttcggctattgaagggaaatacctgcctcacaccattgttaagtggataaaataaggttagaagtgggtgtgcatagtttatacagcatgttacaagtcccaggagcaagtcctttctggaactgtaagacatctcactgattcttacctgctcgtcatggaggaggtgcgctctcccagcaggtaagccaggctctgctgcatacacagaaaagcaaggcagcatctccacttctgttctccatactctcaatactcacttccctcctgaaatgcctggtccactccccgcctctcttccagtccctgggccaaatccttcaatcagtgtagatgcttgataaattcctgttaaccttcatctctgccttgcagatgctttctcctgagttatcttaacccaggctcctttatcactcgtacgttgtcctattctggttctgctctcgctgagtggtcactcttttctcaactttttgtaatgcgtaactttgatctcaattcaagaacactcagattgttcttctggatataagtaagagcctgaaggagtctctttagatgtttccctcaaatggcatgagattaaatggcattaaatcaaaatggtatttgattaaccataggagcaaagtggtctggttgagatagtattaaaatgggctgcctggggaagatggtatagagtgaaataggagcatgctgttagtgaatcttcccttctcctacctgcctggttttcaattgtattttcaccatccatttctccactctacccaagacagcttcttttctatcctcccaacaagcctatatgtccactctaaaactatgtgttaactgcttacttggtaccaagcccgattctttatacaggttatcttgattaattttcacaatgaccctgtgaaataggaattattatttcaattttatagacaaaggacctgaaatagaggatctaaatagtatgcttagggtcttgtagccaggtagtagaagagtggagatttgaccctgggtgcatctgatcccaaggttcactatcttaaccacgaaattacacactttttgataaagaccaagaattagtcatggcacatttctttattgatagaagttagaattttcgacctgaatctagctattgggaactctgcgatcacacacatacacacacatttcattcatgaacttacaaggcaccgaatcttaaatcttaaactcttggctttccttttttcttttctagatcactcacctatctccctatcaaagtaatcccatctcaagctttcagaggacttaatgaggtcataaaaatgtaagtaagatactgcatatcaaaagacattcataattgaaatacaattttttctcagagaacacatagttgaaaagtggtaatttttctaggagagaaactgtgtttaggaaaccctagtatttttatctttaaaatacaaataatatccagggacctttgaagaaaagggatgattttcaagagtcattaaaattcagataattaaccttgtctcaacaaactgaatgcattttgataggtgatgataaactactccaataaaaaaaaaaaaagattccaatcataaaaaactccctctgctagagcgggctgttccctcatgtcacatttttagataacacccgcatagagaaaatgtgttgaaagtttattgtgcatcagaagactatcctttgtatctaaataataagtatataacaaatacagtatttgtatctatat

SEQ ID NO: 58512 - DNA, 2001 bp, Bovine  19866880978352
  misc_feature (1)..(1): n is a, c, g, or t
natggggtctcgaagagtcagacacaattgagcgacttcactttcatttttcacttgcatgcattggagaaggaaatggcaacccactccagtgttcttgcctggagaatcccagggacgggggagcctggtgggctgccatctatggagtcacacagagtgggacacgactgaagtgacttagcagcagcagcagcagtcctgccttcattcacactgtttctgccgcctggcacatcccacccttctctgctggttagattctacccttggttaaggtctgtcttgggcgctgggtactctatggaatgtgtcttcattgccatgtgcatgtgctttctctctgggcggcagcatggtgggaaagtgacaatgtagactcaggagccagactgcctgggtgcatttcacatgtacagagtgatgatgatactaactactgcacagatttttgagattcagtaagaaaatgtttatgtaatattaatacagcatctttcacaagattagagctcaataagtacttttaattcccagctgcttgctgtgaagggttcaggttaccccagccatgcctcatgacaactctgcctccttgctggggatggggtagggtggactctgtactttggaatggattcttgtattgtttgtccaacccttacgttgacaaagtgcctgtgacttgtctccaactctttactccgcagattatacataggacaactgagagagagggtggaccattcccacttggcacctttccgttgagctcaggtattccttatagactgtgtctgatagccttttaaagaaatgataaggaaatgataaagaataaccttccattaaacatttcaactctagggagccactctgcagagttctcatttgctcattgattctaaaaagtgtggtcagttgcaactctcccgctggaaagtacaatttgagtgactcttctttaagacagcctttgcaaagcacccgagaagcttgaggagtttatgaattacaatgtgaaccaagagtttcaagaagattccctgggtgatggattttccaaatcatttgtacaacaactaaattaaaaatgtaaagtctcagagaaaaatggtcaacacatctaagcccttactcaagacccatttctaaagacacaaagcaaaataacccaatctctacccccaaactcgaattcttctagcaataatataacatgacaggaataactctggtaaataaaactacatgttgaatcttccccagggaaggtgtgcattttctgtaatgatttctcaaaaatatttcttagaagcagagaacattatgttgtcagggcagtcacattgcagctatgcttcgggagcctctttcattacaagattctgtttccagacacttttttatttttttggtgagcctgttaaagctggatgcaactgataaactacatgcttttaattaatttgatggaatgggtttgaattgcctgaaattattggcatgtgtaccttcccttttcactagctcctcagatctggtagacacgtttgtgtggttgcctggttcacaaaggccccttctctggaagcatctcagtgctgcttgcagcagcgtggaagcatctcattgtctgtgctccagtctcagcagtgggatggggcaccctcagattctccctctaggaatttgaaacttgtgataggtctttggagctgattcattacaaaggtggaatctagagaaaagttccctgacctcttgctgctaaaatgccaaattctccctggatcttgctcacatctttctagctccttattcttctgttaagttaatctcttatgattaaatctgtcagaattgatttctgatgcctgcaaataagaaaagccttcatcagagccacacccactgtttccaggggaaagtcatccactctccattgatgatccatgacacagacagggcacatgcctggggtccatagagagcagaagg

SEQ ID NO: 58513 - DNA, 2339 bp, Bovine  19866880988970
  misc_feature (1)..(1): n is a, c, g, or t
ngagagattgctggaagaaaaaagccgtgggctcaggatagcatggtgggatccctaccaggaaggaggaggaatcaaaggcactcttggagccagctctgcagcagagaacggatgatccatgcaggcgcagagaacaggcgatccatacagggactgagacaaattataatcaaacataaaggcagaggctttctaccttgaatttaaagataccgaaaattaaagaaaatcctgtgcatgactttacttctgctaaactagtcaatagaaaggtcagttaaaggaaacaccaaatggtggagaaataagtgtaaaacaaatatactcctgcatttaaaatggtttaagccttttggaaagcaacatggtaattctcatctcagttcagttgctcagttgtgtccgactcttcctctgtcatccccttctcctcctgccctcaatctttcccagcatcagggtcttttcaaatgagtcagctctttacatcaggtggccaaagtacaggaatttcagcttcagcattagtcattccaatgaacattcaggactgatttcctttaggatggactggttggatttggatctccttgcggtccaagggactctcaagactcttctccaacaccacagttcaaaagcatcaattcttcggcactcagctttctttatagtccaactctcacatccatacatgactactggaaaaaccatagccttgactagacggacctttgacaaagtgatgtctctgctttttaatatgctgtctaggttggtcataactttccttctaaggagtaagcgtcttttaatttcatggttgcaatcaccatctgaagtgatttcggagcccagaaaaataaagtgagccactgttttttcccatgaagtgatgggaccagatgccatgatcttcgttttctgaatgttgagctttaagccaactttttcactctcttctttcactttcatcaagaggctctttagttcttcactttctgccataagggtggtgtcatctgcatatcgatctaggcatatgtatatgttcctcaatccagtgatcctagaattgaggattttccaaggaaataattgaatggactaaaaatgccatgagaatggagatgttcaatatggtcaattctacattacacatttgaaataacctgaatattcagcaatattgcagtgatttaaagaaatgatgattcatttaagcaatgttactgtgcagtcacaaaatactttgagagacataggaaagttaatgtgttaaaaagtcagattacaaagtcatgtttgaactgtaaatccagtaatgtattcctgttcctttgaggagaaaagcaattgttattttctgtcccaatcctacacctgtaagtctgctcaatacatatctattttacatatggtaatttaagtttccacgttactctttccatacatctcaccctctccccgcctctccccatgtccataagtctattctctgtctgtttctccattatttccctgtaaataaattcttcagtaccattgttctagattccctatatatgcgttagaatatgatatttatctttctctttctgaccgacttcactcagtataatatgttctaggttcatccacctcattagaactgactcaaatgcgttccttttatggctgagtaatattccattgtgtatatgtaccacaacttctttatccattcatctgtcaatggacatctaggttgcttccatgtcctagctattgtaagtagtgccacaatgaataatgggatacatgtgtctctttcaattttggtttcctcagggtatgtgcctaggagtgggattgctgtgtcatatggtggttttattcctagtttttaaaggaatctccaactcttgcctctttatcaagcttagagtgccacctccaagcctcctcactttatattagcagctagctctgctcctgactttcatcttcccccaggccctgctgtgactggttgttccagtatcagaccatctcaggtattaacccccacatcaatggtcctttaatgcgtttaagtttttactttaaaagattatatcaaagtaatgttcctgctaaaattattcaaatggctttaaacaactaatattaaaatataaaatacttcctcatatccctcccccatccacaggcctttgcacttgcttcctttctaaataattgctgtgtgttttgttttatattttctgtgtgctttaattatctattgttgtgtaacagattaccacaaaccaagcagcataaaacaacacgtatttgtaattgcacacttgctg

SEQ ID NO: 58514 - DNA, 848 bp, Bovine  19866881023816
  misc_feature (1)..(1): n is a, c, g, or t
nagagcattctggcaatatctaaccaaatatatttgccctttaacccagtaattccacttatagagatttatttaatagataaaactgcccacatatgaaatgttttatgtacatggtcattcaatagcaaacaactgagaaatagctcaaataagagatgagttaaagaaattttaataattccacaatggaatattgtggaatttataacacagttataaaaatatccagacaaagatttctaagatatattgttaatctcttaaaagacaagttgcaaaatatagtgttgtctatgctacccctttaggctctactggaataaagatactaaatatataaagaaattaatgtaactggttacttatttgcactgaaggcagtgacagggagctactggtaggaagagcagatggagaaggactgggtaccagagtccttatggtataccttttatagtatttaggtattttaacaatgtgtatgcgatatctattcaaaaaacaaaagcgagagagagagagatatactgtgctacacacctagtaattacccactgtaatacgagtatctaagggacaaagtcagctaaactgttaaatgaaaatggaacatatttaaatagtttcacattccactataaatagtatcctatttataacacagaacactcctaactatagtaaaatgtttcattttgccattaatcttccctataatatctttattattttaatctttatattaatcatgtacattctctctgcctctgaaatagtatgtccagaactttcattcagcatgtttatcagtgaccttcatttaaccctttttcactgccatctta

SEQ ID NO: 58515 - DNA, 845 bp, Bovine  19866881107746
  misc_feature (1)..(1): n is a, c, g, or t
nttccagtcttgggccccatgtgcacagttcaaaactgatggccatttccaaactattctttgaaggcgattcctctttggataaaggcctgggagacccgagggtaatgactggccttcctgtttgtctgcatgccacatcatgttcagaaagcataactcagtgtgacagatagcagcagcaggcagacagatggggtggctctctgtgcatctctaagagagccgcaccctaggaagcgctctctcagtgcgcctgccagcccatcaccatgcccgcccaggacaggatgtgagcagaggggtgagagaagagggccacctcctccacacaaagcagctcggagcaaaacagaggttttcttcaccctccaggccctgatctctgtgttttaagtgcatctgaaggcagatcagagtccaggtttttgacgcagctctaatgggaagaagctttctgcaaacgcttccctctctgctagcgaagtgcatctatctcctacactctccataaaaaagtagtcttgaaaattaataattcaggtgaagatgcaatcaaatcaatgtgccctcaccctgtgctgtgttttcagttttaaaagaggcctggggaaggtgatgcttaacctaaaataatacattgatatctagaccttgagtatccacatcatagggagaagagggatccaggcaaccttgcctttcactaccaaagccgcacgttagtgggctcattccatcctaatgtcagctctgccttctagttcagtgaagggattctttgccataaaagtcaggtgccgaacatttggaataaatcagtgttctcaaccgttttcccaaat

SEQ ID NO: 58516 - DNA, 915 bp, Bovine  19866881296363
  misc_feature (1)..(1): n is a, c, g, or t
nttgcagtgcttgtccttttctgtagggtttggtttggattttttcacactgctcagagagaattccatccaaaggtcctcaagtgcctggaaaaggacaaggaaagagcatctctgaatcaagtgcctggaaaaggacaaggaaagagcatctctgaatggtggcattgttaaatgccaagaacctgcctctccagtggattatctgagacactgaaacacttttcaaaggctttgctaagtattcattgtggtaaaagacaaattctatattaaactcacactggggccagaagtggccttgggttaaactgaactggatgatattcatcgccttctttttattgccttttccctcatagtaaatgctccatcccttccccctaaaatcccttggagtcttccccctctcttcctcttagctttatatgattgagtgccaggaaaggctatatatcggtaacttagatcttgttccttcccagggacattggtcccgctgcaggcttttcaaacagagcggctcattcttccttaccctcgcagatttataacagcttctctgcttcctgtggtcttacaatctacctccacgctgcagtcagtggagaacatgtgaactggccttatttaccagccaaccttagctttgccaagacttcccctgctgtctatcctccagccaaacattggaactactctcatttccacaaacctaccacgttccttctgcaccccgagctttggcttacagtgccctaccgctggaacatccttccttgcccccttcctttgtcccttattcattccacagatctaagtttagatgtcctactccaggaagcctcccctgactcctcccattcaggttagttgctcctcataaataatttttagtacgtaggcccattatat

SEQ ID NO: 58517 - DNA, 2031 bp, Bovine  19866881379923
  misc_feature (1)..(1): n is a, c, g, or t
naggagcctagcgagctacagtccatggaatggcaaagaatcagacatgactgagtgactacccctttcacctctcaggtgagtcacacggatatttacgtttgcgatgccctgatctaggggctaacctagcacagttcagcaaggtggtccatagccacatgttcctattaaaacttaaattactgggacttccctggtgatccagtggatggaaatccaccttccagtgcaagggacatgggttcaatccctggttggggaactgggatcccccatgccacaattagagaaaagcctatgaggtgcaaagaggagcctgcgtgctgcaactaagatctgatgcaatcaaaaataaaataaaaaataaacttaaatgacttaaataaaatccaaaattcagttcctcagctgagctagccacgtctcaagtactcaacagccccacgtgctagtggattccctaccagacagcaaacatgcagaacattttcattctcctggaaagctccagtgcacagcacctttagtagtgaacccaatacactagggtagaaaaaaactgatactccattttactttagtccagctcctgagtcttacttcttttacaagaggaagcaatcagattcagccaagctctgctgtctggtaagcaaaactgatcctttcctaaaatgagcacatctaagagtaccaatctaaaaagtttccaaaggcaatctccttcataactacaagaagcatcaattgcaaggtaaaccattagagaaataggatccagctttcccactggtttttacagctttgaaaagagctttaaaaagattacctttatctgagcaaaagctactaaactgacaccatttcttggtggttctcaaactctggtgtgcacgcaaatcactgggagaggtttgttacaacacagattcccaggtctgaccaccagtttcagattcagtaaatccagggtagatgcaccccattcccaacactgatgctgctgatcccagggctacgctttgaaccactgacccaggataccacaaacaatggaaagatggttagatttgacacttgtttccacacggacattgtgtcaggcaagaatgcagaagcctgtgcagagaaagcagactgaaatcaaatgggtcaggactgtgtgccctcagcctcttttccagaaagatacacaccaagtaagaaatggtctctggttcttaagtcaacagtgtagtcaaaatgaggccctgattaactctccctcacatctcaaagaggcagcctccaactattacctattaacttcataaatctctgaaaaccagcttctaaccccttccccgccccaaaactgttaaaccagaaattttaaaagcctacaatgattgcctaattgcccaaaccactaatgtcttaacctccactttaactggcctttccatacactttatgttttagcaacctgtctgcctcagaaattgtcatctgcttcagcctccatggttcatcttttatctaacgaaactctcagtctcttttaatggaagctcctcagactgattttgctctttctcaggggcaaaaaagattatgacagaagttataaagggagaaatgggccccttcctggcacacagactgagatctgcattaaataagaacaagaagattctgcaagtgtcattggttgagggatcatgcttgctgctctcttgatatttaggcctccttctatagcttaaaaggacatcatttttctttgtatcctaaataaggaaaaagggagacaaaactgaaattcaacatcagcccacaaacaaagctaacaaaaaggtaaaatacccccttccataggcacagggctgaaggtagcatgcatactgcttgctgggtcactcacttgagtctgactcttgtaaccccattgactgcagctcaccaggctcctctgtccatgggattctccaggaaagaatactggagtgggtagccattcccttctccaggggaatcttcctgatgcaa

SEQ ID NO: 58518 - DNA, 901 bp, Bovine  19866881401391
  misc_feature (1)..(1): n is a, c, g, or t
nccttcctcccttcctgaccttaaaagaaggagtttttgtcattgttgttttgaagatcatcatttactttctggaaaaggagattctactttttaatttgtaagtctaagtggactctacctgatttttcacttagagcaccaagatcacatttgaccttctgccacagctcaggtcagaagaactgtattaaaaattctctccacccaacaaagaatgttaatttaatgctaagtaatgaatatttaaggaccctaatagatgtgcaaatgaacaattatgctgcagaaccctgctgttcctaccatcaccctttgcattgccacaaaaactcaacttgggcttcagtcagctttttgttattattttcagtactgaatcttgagatgcgtctgaaggctggagggctggtgaataaatgactccagcagtgaggtgccggcacatgctggcaacctggaaagcctgaggggtgattaattggaccctatgctgaaattactttgaggtgtaaatattcattaagttcatccgaataagactctgagttctttatgggcaggatgccataaaacagatctgaaaggaccagcagtaattaactcagttaccgtccctgggaccatggagcagcaccaagttcagcctgcctccatatttgctctgagcagattgaagtcattccagaatgtgccacaccaggtgagtcaggatggtagaattttttttatatgatgcacacacagatttgctctcgtatatatctatagcgagtctcaagcatgtgatattatgagcaacacatcaagtgaagttaaaaagagcaataccaattcattttaacagtcaacttttgcattctttgcctttacagtaaaataatgaaaagcagtaaatctg

SEQ ID NO: 58519 - DNA, 818 bp, Bovine  19866881408877
  misc_feature (1)..(1): n is a, c, g, or t
ntgcttagatgctcagtctgtcctactctttgcgaccccttgggctgtagcccaccaggctcctctgtccatggggattctccagggaagaatactggagtggtttgccatgccctcctccaggggatcttcccaacccaggcctcccactttgcaggtggattctttaccttctgagctactggggaagctcttgccaatagtagcaccactggaataacagtatctcaaaaggcttccatgtgattgtgaggacttaaatgtgtatgtttaggcacaggttttatttttcacaaaacaatgcatttcaccttggtgcatatccgttatatgaaattttttaaagcgtgtctcagtttctccaaagtaaaaaagagtctaagcttccccatgctcccttgaatgccaagatcaccgaaaaccaagtttaatgactactgaatctatttccaaagatgcaagattctgcttttagaacttcattagaatattcttgaggcagaaccacactacacagaaaagcagcaccgcccttttccaagaaaagggtcccatcagttaaaagactgatgccataaatatgacaaagggaaaggtcactattttgcttaattcaacatgttctgagcatcttctgggtgctctgccccactccaggtgacccaagaaaaagagaaaaggacacagccctagcactccagctttcaaaatcattttcagacaacgtctttccaaagcactgaatccattcgtaaccacctatctctggtgaagtagtttacacgcatgactctatttacacttcagatttaattgtg

SEQ ID NO: 58520 - DNA, 1854 bp, Bovine  19866881465915
  misc_feature (1)..(1): n is a, c, g, or t
ntgacttagcagcttagcagcagcttctttaagacatgttcctcagaccgcagcataaatatcacctggaaaatgttagaaatgcatgctctcagcccccagccccaatctactacatcagaaactccgagggtatagtccagcagtctgcatttgaacaacctccctgagagattctgatagatgctaaagtttgagcatcaaggtattgctcgccagtgctcagtcactcagtcatgtccaattcttgcgacctcgtggactgcagtccaccagaatccactgtccatggaattttccaggcaagaatactggagtgggttgcgcatttcctattccaagggatcttcccagcccaggaatcaaacaccatatcttttgcatctcctacattggcaggcaggttctaaaactagcacacctgggaaatcccagttgctctccatggaggatatgatcttctggaaagcaagaagaatatttagaacttctatgtgccataaacttctcttctccatctcctccaacatccactccagcacacacacacatacatagacaatatctatttattaaaaaaaaaaaggcagttgtgatcagattaaaacctcaaagtctgagacatatggaaaaattaacatgattaagaaaagttttttgttttatttttctggtgttgtcttcaaaaaggagtagaggaaggaatctatggagaaggactgattgaagatgcaaggaatgatggtataaaatatcagtgtgagtgggaggaaggcactggcatcagattaaaggggaaggggtaattcttaaaatacagggatacttctgagtctgagagaagacagatggataaaggtgtaatttaacactgaggcaaaggaaagaaaaagtgaatgggttcatgctgaaatcctcttttcttaatgatgaatgaagtggtaaacagtaattatgagacagaaaatgacacaaataacaagttattgggagttcataaaaagagaattaaaattatgagataaaggataagaaggatgcagtcttgcactaagtcatccacagggtttgattctgtgcagtgaggggtggttctctcagttctgggggttggacaggtgagaaccacagagcaccttagaattcatcactggtccatcagtagatgctagtttatgtttcagtcatttcaggccttggtagtcctgcctttggagaaggcaatggcaccccactccagtactcttgcctggaaaatcccgtggacggaggagcctggtaggctgcagtccatggggtcgtgaagagtcacacacgactgagtgacttccctttcacttttcactttcatacattggagaaggaaatggcaacccaccgcagtgttctcgcctggagaatcccagggacaggggagcctgatgggctgccgtctctggggtcgcacagagtcggacatgatgaagcaacttagcagcagcagcagcagtcctgccttataagacttccatctgaagtccactattcggtttaaaaaaaaaaaaaggaacgtagataataattgcttatcattaataagcccactacttgcaaattttgaaaatggcatcattctgttgttcagatctttctagcccaacagtattttattaaaaacttaagaatttaaaatctaaaatataatacaaaaaaaaaaaatgcctcccatgtgttcactcattttaactggagaaaaaaaaatctaaaagaattaattaaaaatttttccttttccttttcttattagttccagacaagtagaaggagagaaagaaaaaaaaaatctcaccttgcctatggttatataaagatatt

SEQ ID NO: 58521 - DNA, 774 bp, Bovine  19866881469617
  misc_feature (1)..(1): n is a, c, g, or t
ntttattacatgaatatcccaggtatcccaggagcgttagtggtaaagaacatccctgccaacaaaggagacgtaagagatgtgagtttgatccccgggttgggaagatactctagagaaggaagaggcaacccactccagtattcttgcttggagaatcccatggacagaggagcctggcagggtccaaagagtcggacacgactgaaatgacttagcatgcacgcacacgaatattatctgttcaacaatatgaaaaattaatagatgggactgaattaaaatgagacataattctttctagtgattagttattgagaagcatggcttaaaagaagcatattttactattctaaatttggagtgaaatcttttagaaagttcttatttaacaatcaaaattaaaagatctgtgttgtctgctttgaaaggagttatgttatcatgagaaagcgtctctagatatgtgcatttctctttcttgactatttatcaaagaagactttctggattgaacctactcccatcaccagatagatttcagcctctcacaaagaagttatgtgcttttatagaattttttctataaagactcatcttttatacatttgtattcattctgtaaggtccttaaaattcaaaacaagtatgattatattttgcagcatccaattcagctacttttctgcagaccaagctcaggaaagtagggtgaagacccaagagggccaaaagggggtggtgataagagcctaaaaatgaggtcacatggat

SEQ ID NO: 58522 - DNA, 1057 bp, Bovine  19866881554459
  misc_feature (1)..(1): n is a, c, g, or t
ncttctccaggggatctttcccaacccagggattgaacccgggtctcctgaattgcaggcagacactttatcctctgagccaccagggaagactctaagctcctttctaaatattccaccacctcaaggactccatacccttccttccaaggtaagagctacttggcaggactccacaatgtcaattttaatttccaactttgtgttgtgatgtttcagaatttatacagctcccagggagaagcagttgtcaccatggcaacctgcaggacactgcagtgacagaaattggtgcctgcccagacctagtaattgctgcagtcttttcctcttggattcctagctatggatgcttgaatacaaatactgagtgggctccagccagcgagggtaatagtgtacagcaataaactatctgttagctgatgcttacatttcagacaaattgaggaggttgtcaaaggcattagcttctatcttttccagggaatcactctgagagatttcactaggggagagagagaaaaaaaaaaaaaaggaaaaagaagcatgaaataaatgattgtttctgcatgataataagttgtatgcatgacccaacaatgggtgggggtgtgtgtccttttaaaaaagaatagggatgccttaagttgtcctcacatcataacgtgctcacacctccctctaggagcccgaatgggcacctacaacccagatgcagttgaaatgcaagtttcagtatttcccgttaatgtgaccattttgcttatttatctgtggactcagagttacagattgttggaagtagacatgtcctctggggaaatccagttggattcccttgttttatagctttgggcattaaaattctgagaggagaggcaaatagtgcttataagaagattcgggatcaggatcaaaatgtctgggttcccaactccatcactctagtgaggttttaatttgggttaggattcctggtttcttgactctttacccctctcccaaatcctcttctgaggcagctgcagagtggataactcctgaatgaagtgtc

SEQ ID NO: 58523 - DNA, 1992 bp, Bovine  19866880401275
  misc_feature (1)..(1): n is a, c, g, or t
naataagatatagacagagggtaatcagaaaagccttcccaagataaaaaagaaaagacttcatagaggtaataatattctatttgaatataggaggttcaaggtagaggatagtgtgtaagtagaaaaggtggaagattaatttgaagatcagcattagtttataaagtagcttagattatactaatagtaccaaatttattgtctagaaattatggcaataaaaaacccttgagatatttataatgagaaatttagcacaactgcacataaggttactgaaagtattcatttatttccttcaataccttaaaatatggaacattaatatgcattttttattttgtttcattttgtctttttctaagtgtaaatcttaagcatccttttttcattaaacataaatatttgtgagttttacacaagtgattttatgcatgtgcatttggctgactctgtctcaaaccaaaacacttgataggaatattgacacttttttccaataatgtttaattttcccttgcatctgagcaatttcagaattggttttgtgtttgtttgctcagataggcagaacaaatacactaatcagttttgaatgtgaattgtgaatgtgtttagctaatactacaggatttttcataatattatttctaaaataaccagttagctggcctcagatcaatggcttattcattaacttaattagcttatgtaggaagtacaaaagatggaaaagtgggtggccactgtaggggaaagctttttactgggaaataaaattaactttgttttaaaaaaaggagtttatgaggccatttatttcaccactgggaaaccagttgtccccagactagaattgttaccttggagggaagacagggaatcaaaacaagataaacatgaatttgtagaactcttactatgtgccaggaattgacctggggggttgtgatacagtacaatacaataaatgaaatgtaaaacatttcttttagttttcactgccactttgggaaataggattattttcccattttacatattagaaatggtaaagctgcttggacaagtagtagggtttgaaagttaaagaaaccaggtgtcagaattcatttcagagatgtcttcagtcacttaaaccagtggcttttctaattccttcctagaagctctcctgtgtgccctagagacctgaggagtctaaaacctttacctttcttctgtcattcctccatcctgctgaaatgttcagaactcctggaataagtggaaaaatcactaaaacacaatatacttctgttatcatttttatatttcaataattcacacaagtctggctactcccacctgatctgttttctacttcactaatttccccctttccttgtgaccatgtttgacaaatataacatcagggttgttttactgaattgttattttcatttctagaatatcccattgacttgaattctatcaatgttagtttctcctgtaattttccatgtttgcctctgtttcctgagtatgcaaacaagttattatattatctctggtaaaacttccaatgtctaaatcctctttggatttatctctattttctttctttcttttttttttttcttgttagtcatttggatcttcttttagtttgccacataattttaaattgaatacagcatattgcatttgaaatttggttaaggttccagaagatactatcttcttccatggaggattaatttttcttctgccatgcagtaagaacataagtagttcatttcttttagccaaagaccttatgcatttcaaagtgaaagtgaagttgctcagtcgtgtccaactctttgtgaccccatggacggtagcctaccaggctcctcagtccatgaaattttccaggcaagagtactggagtgggttgccatttctctctccaggggattttcccaacccggggactgaacccccgtctcctgcattgcaggcaga

SEQ ID NO: 58524 - DNA, 2456 bp, Bovine  19866880527159
  misc_feature (1)..(1): n is a, c, g, or t
nttaagtaaatttgagtatcagctatcaaagaaggtttagacagaggggtaaaacatgggaaaaggagaggttttaaacaatgccttcgtgttatgatctctttgtgggacagagttttagatttttaataagttgaaaagtagaagtactgcaagtaatcttcactattacattcagcaagaagtcccctgaaagacacggtttccctaaatattttatgcaccactgaagtctgggacagataagtaattgtgaccagctcaaaggtagaggcaatggtgggaatcttcctcagaaagacagggaaggcaggagtgaccaaatctgcaaactgaaaaagaagagtaaagggaaagtgaggtacttatcaagaaaatacatggagcaggggggtgtgatgggagatacactgcacatttgtttgccctgcacatttccccttggcaaaagaaggggcagggaccatgaagtgtagaggaaacggtttccagtaattgctgctatggagcgcttatgtgccaggcaccgtgctgcatactttaaatatgtattctcatttttgtttacaatcatcaaatgagagaaaatttccttgtttgacagatgaaacagcaagagaggttaagtagctacccatgtggtggacaatggtcatattaaaaagctgtctgagactctaaagcccttggtcttcaccactaggtaaatctccctttttatttaataataaaatatcatgcttactaaagataagtgattgagtataagaagttagcattggcacatttgcaaaacattgaaagaaactgaaacacttaaaacaaccaaaccctgcaagtcagatttcaggtcttgattcaaaggaaaatgacacccatttcatcaagtataaaacagtgtccccagtgcagcccagcctcttccccatttctaactacaactagatctctttatgccacttttggttcaaggttttctgttttttttttttttactcacgttctgcatattttcccccctgctgttccattttccttcttttgttcttgggctactaccttgaaccctatcataattgtgacctcctgggctagaccccatctctgaccctgctccagtgggtttcagcagaggatactacctgggctccctcctagtcttcatcctgattctctgagggttccagggcctggagccagtcatccaaaggggtggaatccattggccctaagggattgtccattccgcacctaggaaggcagcagagtcagagaaatgtgcacttcagtcaggctctcccttttcagccagtgaaagtgaaacctctgcaaagtggggagagataaggcttagtccaccactcaaggaaggaacaaggaatagtgcacacacccctcagcctgcagaggctggctgggagggtcccaggaatgtagggctcttctccacttcctgatctgggcatcccaggagcgacggctgtacctcctgttcttgtttggtgtttgagggtgaagtcctggctgtcgctgtgccctggcaatgacaaatgtgtcagactaaggtcaaggccaaggggcacagcttattgcttattatggtgaattttccaggcaagagtactggagtggttgccattgccttctccattatggtaaattaggagactcattagggattttctgagaatgaggtaagatcaatgtccttaattcaaagaaaatgtttaaattagattaaacatcaaacttcccaactgtctaatattctttcttctgggtaagctaaattagatattccaagtccctcattagtcaagatagatacagaagaaagtatttgacatctctttaaaacatattctactttttcattcattaatttgtatatatgcttgtaagcttacatgtaattaggcaggtatgttgtaattaacagtcagatggaggcatgggccttcccaggtggcactagtagtaaagaacccttctgccaatgcaggagatgtaagaaatgcaggttcaatccctgggtcaggaagatcccctggaggagggcatggcaacccactccaatattcatgtttggagaatcccacggacagagggaatcccctggggctggggtccatagcgtcctagttacccatgacccggtattcatggccaatcttgtttcatctatattcaccaccactcccacgggattatttaaaaagcaaatccccagctgaagtaacttatcatacacgcacatggaggcatgaggtgaaaatggaagaaaaaaaatttactagcaaacacgaatagagctttgagaagtcttataggccaagtataacttgttccttttgaaaaaaaaatcttggaaatgtatttgggggactagattacaggataatttagtaatgttgcaactttgtgggagcattcagattttagtatctttccatcac

SEQ ID NO: 58525 - DNA, 961 bp, Bovine  19866880722290
  misc_feature (1)..(1): n is a, c, g, or t
nactgagcgactgagctgaactgatggttgttagtcctcagtcgtgtctgactctctgagactccatggactgcagcatatcaagcttccctgtacttcactatctctcagagtttcctcaaattcatgtctattgagtcaatgatgctatctaaccacctcatcctctaccacccccttctccttttgccttcaattttccccagcaacagggtcttttccaatgagttgtcactttgcatcataaaagggaaaattaattgaagatagatactcattacaacaatagaggatgatatggttagatagcatcactgactcaacagtcagtgatgaacatgaatttgagcaaactctgggagatactgaaggacagggaagcctggtgtgctatgaagtccatggtatcagaaagagttggatgtgacttagtgaatgaacaacaacttattacttaatattgtttttgtatattaattggctcttagtcctaaattaaggaagattgtttcttatagctgttttgtctaagtcattttagaaattaccacctcactataacaaacaatcttatgctttccataacacagtaaggaacaaatgcaaacaaccactgaagatttaatcttaacaagatattcagggaactcatggggattcttcctttaattggaaattgaatgacaaactctaaacgtcttatttctgcaaaagctctgttatcctaatctactggtgagagatgaaattttctgttagaaatgctagtttcagtttaaatatttgaacatactattttttgtggcggtgggggggggaagggggatctgatagacaactgacaataagctatttaagacaagttaaaaaatctgttttattgaaattatatcttagattaaccaaaccaaagaatgagtcagactagtaggaatgaaactctgctaagtaatgcaacacc

SEQ ID NO: 58526 - DNA, 1318 bp, Bovine  19866880803248
  misc_feature (1)..(1): n is a, c, g, or t
naatttaccttctaccttttatggagaggatttccaggttggtaggagattttatttttaattatatttccttaggaattttcatagaaccatcttcctctgttatctgtatcttctcatggcattctgtatgtgtgtgtccaaatttccctcttataaggccatgagtcatttaaaattagggatctaatggccacattttaactttattatgtatctacagactttacttctaaatgaagtcacattcacacatcctaggcattcagacttcaatatattttaaagagagaagggaacactgttcaagccataataagaatatacctgggttaacatcattgcataatggcatagtagcggtgtttctggtatttggaggaaaatcttttcatctggacaaagcacagggttggataatatgagagaaatgggtaagtgttctgagtattcttttgtttctctagatccattctcagctcttctctgtgcccttgaagctgagttccatacaaggcattatctggaaatcacatgacttctgtcttccagtgaggttcaaacaacaggagttacagtgttgagaaactggattagttattactgttcttcctgcatgtcagtgcttcacttttattactaaagcttacaaatgctgtctagtggtcagtcatcttctacaggtacacacaattcttgcttaattctaatagactctctgcatatctcttcattccagagtgataaaatgtctccaaataggggagcataatacttacttgaatgagcttgtaaagtgttgcaagagatttttgatgggaagttatacctaagcacagtgggctgcacgctccccaacgtgcatgaaaaaagactatgcaggccaattaagcgattggctcctaacctttccccactcatgtaagcaataatgctttgtaagtgttacaaaaacaggtgctatagacatgttctaaaccatgtatgacagtccgatttctattgtaaattacacatgagggtttctatttaaatgagataattccacccatatttacttatttgcagttttcatgcttcatggttatacaactgcactaacaatttcaagtggtttataaacagattcttccctagaagacaagtgatatcttaatctctttactctgctctaggaaaaaacttccctacatgtcttagacaactccttctttttcatttcttcccttaatttaaaaaatagtaaaaaacatttttattaaaaattctttttgtatgactttctgaacttgtcattctcacattcaccaaacaaatg

SEQ ID NO: 58527 - DNA, 703 bp, Bovine  19866881081074
  misc_feature (1)..(1): n is a, c, g, or t
ncctgaggctttaatatacaactctattctattttaaaccatatattttagaaatttgtctcctccattctttccttattgactatcatatttcagtagactttctgtcttgttctaaatacaatatttataattctgtcaccccatcaggatattatttggattttccttgctttgttgccagattttcatttgtgtagatggtaaaaaacacttcttacttttttgtagttatccttaagttctttataaacaggacctctggccatgactgaatgaaacagtgctttaaatgaacaccagtgatttctgaagacgaagatgaatgatcatttagtgattttattctttatcaatctgcataacatttggcattattgattcttccttctgctttgaaatctcctccttcctccagtaattttaaactcttggccttgtacctacttttctacctgcttttctctttcttttttaaattctgcttttggatattttctcaagtttagccatatctcttctttatttagaaatactttttgttctgttctgagaagtaaaatttattgtttttctgaggatctattttaaaaacaattctgtaagtcctttgtgctctgatgttgtatagaggttctgcaatctgacaaccccttgtgcataggtattaggattttctctcaaagaaacactggcagcgagg

SEQ ID NO: 58528 - DNA, 1278 bp, Bovine  19866881091394
  misc_feature (1)..(1): n is a, c, g, or t
ncctttgatttttaaaacttggggaacatttatattattaaaaataaaagttgtggtaaggcttgatgagacataaggtgattttgtgaagtagctattgctgccatttagcagtttgttagacgataattctcaaaatgaaactgaacaaaattctggtttggaattcattactcagtccttaaggatgttttattgggaaaaatacggtattgtgctgtccaaatagaactttataatgagctctttttattttacattggttttatagttactaaaagcactgattttttgggggtttcaaaaattattatccctgctgcaacattataaatagaaagtgcattagtctgtcagagagctaactttgctaaattggttaattttgatctagtaagcacagcttgaatgtagaagtaattataacttgtatatatattatacaaaaaataaacccaataacttataataaggaaatgtatatattatagtgcatgaacataaatttatcctaacatagaaattaataatcctatatatacaatatttaacccattttttccccatgaactatgaacatggcaaatatatttctaaatcaatactttcctaagcaaaatataaaaggtttaagtcaaccttcgggagattattgaaacatttttgaaattaggattgtctcagctaatctctggcactattgttaaagaacttgcctgccaataaaggagacaagagatacagcttcaatccctgggtggagaagagcaacccactccagtattcttgcctggagaatcccatggacagaggagcctggtgggctatagtccatagtgttacaaagagttggacatgactgagcaactcagtgtgcatgtacacatctcacaaggttattctgaatatttgtagtaatggttatgaaagagatcacagagtctggaagactgtaagtgattgatgatgatagtattaatgatacaattgatatttattgagcaattatgtgtcaggaacagtaaaaacgttttatacactttggtcaaaatttccttgaaataactctacatggtaagtattattttagttttcatgttataggtgaggaaattgaggcttaaaaacttgcatgactaaatttaaagttatactaactagaaaaaaagtgaagctagcatccaaagtcatgcctgaagcaatcaaataaaattgataggtcgccatacccataaaacacatctctctaaacttcatattctaattttagacaggaca

SEQ ID NO: 58529 - DNA, 1657 bp, Bovine  19866881430555
  misc_feature (1)..(1): n is a, c, g, or t
ntctatattttttaaatagtttataagagacatcatgtgaaaattgtatgttccatatttgaattagtactaggcagggaaatgagacttggcaacagtgagtaagggaagagtagaactggaaccagggggtaacatgaaatcataagccatagtatttttcagcatacatgtaaagtgtattgaacattccacaagattaaggagatctttaaatcacctataattttagtgattcatggatccatctggattaaagttgggtctcttcacacataaagttatttgaactgtgttataacagtccaaaccagccaacctctctttgtattgtgcttgtgatttatttgcacaattttcaaagtttggaatattttgagtctctctgaattattcaccatctgcttgtctcctttgagtgcagaagtcaccatttgctcaggagccaatttgcttgtatgatactccaaggtttactgtgcatctgcactattgcatattagagttcagaaaaatatgtctctgaagcttagtttatatattcaaccaaatgcaattatttggaaaatacagaatgatctctgtactaaaattgatctgctctaatctagagagagttaatatattcagtgatcaattccatgcaaggcgtgtaaattttacatagactaacactaacagattgcaaggaatctaatgagtgagtttctgtgtcttctaggacctatacaaatatgcaaccataataaattagaagagctggaaaaaagaaaaaaaaggtacacacactcttcatatggtaattacccaagtggagattatattaaaataggtgttttactcaatttctaaaataaattcacacattttttaccttaagaatggtaacatacctggaatattgcctgaatataaaatcattgtacaggtgttttcactacagtgagggatgttgagagagaatattcaattcaataattcaggaagtttcaaaaggtattacagtaacctagagttggcagttatgcataattttcatatgcagttgcataaaacttcctaattctaggcatcaactcaaattccaagagcttataatttgatttttattgaaaccagcaccttggtaataatatatggtacagcaatatatctgagtaacatttatacgtgagatatcaacatgattaaaaatattaacaagaagtctgaatttccttctcctgaaaggcatagaataaaagtacattatttaacttgttggtctactcttttccaaatgttcacaaaataatgcaaatataatcctccaaagagaaacaaagtgctgttttcaatatcaataaaagagatgcagtaattgaacattaaatgttgctgctagaatttatgtctaggttgagcggttaagcaaattgcgatctgttataaaagatagctgtgattgctatctatatgagccatattgccccatttgcacaatgttgaaaattcagtagtactggacttttcagtgtctactttgtgtaactgtcagggtgaggggccaggatcttagacggtgcattttaagatgttgctaattctggacaccaaatcctccaaaaatttcagttttactatttttatcatttgtggtattgaatgctcttacttg

SEQ ID NO: 58530 - DNA, 1499 bp, Bovine  19866881470706
  misc_feature (1)..(1): n is a, c, g, or t
ncatagaggatttttagggtgatagaacttcctctgtgtgattcctcttatagtagataaatatccttatatacttatcaaaccctatagaaatatgcaacatcaagaatgagccctaatataaaatgtgtcaatgtaggttcattaattatagcaagtgtatcactctgtgcgggatgttgattgtaggagagactatgcatccgtagggagaggaagtatagtaggcatatataggtatctctgtactttttctaaaatttttctatgaacataaaactgctataaaaatactctgtttttaaaaatatgtatgtcccttgcattatttggtatgactgtattatatttttcttatgttttctaaattgcatgctttttaaaaaacattttcatatttttaactatctttttctgtgtgtttaaaaatagcatgtgttacttttaaagattagaaaatatttaactttgttgtagctgtttttttattgtattttactttattccctgatatcttcatggatgtatacctcaaatatgtaagaaaatacttttacttgtggctttataagcgtcagtaattcctcagtccttaaaactatcttccatgccagttcgtgaaattttcacaaagagtatcttacatctgtgatatgaatttgttgtgaggaggttgtttcaaaattggaatagagggaagtcaaggaatttttagtttttcttttacctcactctccagaactacccccaacagataccacaagcaaagaactttattttagttccaaatttaagaatagtggctatatatgaaggcatttgacaaggacaaagagatttaaattggagtatattttgaaataggtgaagtcatctatatagtaaggcatgctgctgtagggtaaaatgcataatgtcaattttcagattctttttcagtatcttaggattttgagctatagatttgaaatatacaattattgtcagaaagtcctaagctcatagaaaaaataaaaaagacatttgatgggtgtttttccagtcttttcatttccaaggcagataattatatgaaattgtgacaatcactgtagtgctttaggatgaattgcctgagcagaactataatagtttgagcagcatgttgctgtcatcgagtacttggcactgctttcaggttaaaactcttctcattaatatactagaattatgaaagcaaagctggactgtaaagaaagtaaatttattttatttgctattcttatgtcacatagatagaagcataataattaagaatgtgggatttgtatcccatttgcctatgttcaaactgtgacttcttcattttctttttctttatttttttattttttattttggctgtgctaggacttcattgtggggcacaggtttgtcttgcttcttcactttctagtctggaatcatatactattccttctctgaaattcaatttctcatacatatattcagttcagtcg

SEQ ID NO: 58531 - DNA, 1471 bp, Bovine  19866881559623
  misc_feature (1)..(1): n is a, c, g, or t
nactcagtgtccctataataaatcactcagaagacaagggcaccctgtaatggaggagcagccattatgattgtagtccagctctgtccatggtacatagctctctataagaccatgggagcctggtgatcttgtgtgctctgcttcctctctgcctgtgagacctcctctacatcctcacaaaaacaatccagtattttataactacactatgtggcactaataatctatgtgcccctgttcctctgaaataaatcacgattaaacaactagtaaacaaataaaacctttctaaagtaattattttaaaatgtatttcaaaagaaaaagttagaaacatttagtattttcttgaggaatcagtttttttttttccttatattttctccaataagaaattttcaatcacagaaaaacatacctttgggaagagcaatagtatgtaaaataaaatatagatacagcttgaggtaatctctcagaagccctgtaacaattttaagaaactcttcaggcaaaaatagaaaacctcaatatcactagcttatttggaaagaagacaaaagggtttcaaaatgtaacagctacaattcttcagaagcacccatctggaaaaactcttaatattcatgctaatataattctgtttttaagcacatatgtgtgtgtgtatgtgtgtgtatagcttaaaaagctgctttgataatgcagcatgagtaataagaggttatttttaattttaaaagttcaaatttgattcagaatttatataattttgatatttccaagtaaaaatgaaattattcattctcccacttttaatgactttttacataaatgaaaaagcaaggtatatttttagttttcagtttcacctcagacagaaaggagtgatcattaattttccagaaatgttcaaatttaaataataatagctattttaataataataataaagattgtgccttaagctgcaaattaatttgctgagtgtagaagttgcactgcttcagtgaattaaacaaatctcttttcaattttatgcttttctcaaactttctgggataacgggttaggatctttcaagccctcccttgataatccaagtgtagttcatgaaccataagcaccagtatcatctataagatttgatttgaaagttcagactctgaggacctcccagaactagagtctggattctaactagaacgttagtcgatcaatttttaagttttagaacccttgctgcagacctaaaattctcacagtttgctgtacattagaatcacctgggaggatattaaactgctgatgcctggattctatccccaggttattccaaagtggtaccaagttttaaaacttattactgatgctttttaagaatgcctagatggccattagggcctccattttgtaaagttaggcacagagacctgaacctttcatagacagagctagtatttaaatc

SEQ ID NO: 58532 - DNA, 1494 bp, Bovine  19866881694150
  misc_feature (1)..(1): n is a, c, g, or t
nttttgcagtaaaatcccagtattgaatatattcattttataagtcatcataaagacaatacacactttattaaattaatcatttaaataattctacctaatactataatattaggtatatttgcaccgaatccaaatatcagttgaaatccatttcatattaagtatgcctgggatgattttatcctaagctggatttaacaaaatcattagtgtgtgaataacacagaaatgtcaaaaagtattaaagtccctttccaatttttgatattggcaaaatagagtgagataagaaaagtgcttatatattacttaataaagtttaactttgagcaaatcaaataccggatcagactgaacttttaacccatactaactgctaccaacttttgccaaaaaaattagtggttcattattgcctgttagccattatttcaaagctaagagtttcctgtaattttgaatgtactgcttttgctaaatgtgttgaaggcccttaaaaactggaatatgccacatatgatcataaaagaaatgagaatgtaataacctctaatgacaaggaaaactcattacgcctacagttttgcattgcctttttattcagtttttataatttcttctattgctttgggtttttttttaatatgcaattttattctttattcattctcatgccattcatttcttttgtttagtttcttcccttttgacccattgtgttaaactattcttgcagaagataatttgtcatcgctgccataatgaatccaattttccttaacccagacctggccacggcttgctatactgcaaaggaaactccctgaaaggctaataaggggcactatatgagaagtgtgactggattattatagttttaattagatcagtcacaattcttgttgaatactgttcagagaagtattctttagtaaagcaaattgtgttcttaaaaaaaaatccttattcaagaatatagtcctataactgctaaatataaaagcagagaagttcaaagcgtgcaattgagttggatttttctactcttttttttaaaaattgccagtgctaaatgtgttgcatcttttcccagttatgcactataatatcggattaaatttatagaatttacctattctttcatttagattatgcatatatatgtaaataagaatgagaaaaatgcatacctgtattattgaaaaccatcacataattttggtacaggatttaataatttagtgatcacttcataaaattattttaggaaatccttccaacacaattcagagtgatagtaatataaacataaatttatactcacagtactagagtagaaacaatgtaaaatttggagctaaaatattaagagtggttggttaataaatatatacttaaaacttagttgaaaaagacagaggcatttgggcttaatacctatttttttttttctgatgttattttttttctgatgttagttttatttattta

SEQ ID NO: 58533 - DNA, 1808 bp, Bovine  19866880349662
  misc_feature (1)..(1): n is a, c, g, or t
ncagcagctgctcccctttcagccttaggagtggaatcacatcactcctgtccccagcttttcactgagcagcactttgttcttccagttcagcccaaagtctggccaagtcgatgttaaattttaataagagtttctttcttctctccaaatgccagtcaagcacatttataatacatttgggtggggtagcttattcttttccagaaatctcatctagattgcttgtgatgttacaaatactgtttaaaatcattgctattgttcagtaagcagctccctgcccctccttgggaaggtaccatcatgccgaaaatcaaaacaaatacaagtctgatttgataaggaaagatgcggttcttatgctcatgttctgcctggctctgaagagggctgttttcttctaatttttcccagaaagctaatcagggcagcttacatagatccagatactaaccagtgacagaaaagtcatacagtccaaatgtgttaccgctggtgacacacctcactccgttgtgtgagtgacaatcatccaaatagccggagagcatccgaatggaagttttgaagtgggaagctcgatacttgaaataagtagagggggagatatccaaaacacttctaaatgcaatgatacaatttgatgggcactcaaaccacatgcttaactcccttatcactttaaagaggaaagtactacattaaaaaagaaaagaaaaaaaaagaggacagtactacagtctttgtgctgttctctgttagggccacagggagatgggaaactgacgggagcatttagctggatcttccgaagcacttagttcacttggtttcagctaagtgataatgccagtattacgatgagatggtttggatggcatcgccgactctatggacatgagtttgagcaagctctgggagttggtgaaggacaagggaagcctggcgtgctgcagtccatggggttgcaaagaatcggacacgactgaccaactgaactgaatatgggccagatcctgactctggagttttaaccccaatgtgcccactagatttcacgaaatatgtggacacttggaaccaggcaggttaaaagagcaaacgaccagaatccctaaagccggttaattgttctattgtagaccatttaaattagctttcatcaaaatgtcaggtttggggatttttctttaagttcagggagactgaataaatctcacttcgctcttggctccattttaacctagagtgagaggactctgtcatctcccaccatcatttcatccatcactttcacaaaaactcaacatgctgaggaaacagacctgtctcccagacccaggacagagagataaggcttatctcctggtcccaggtaggacttcctggaggtgatcccaaaagaccacctttccctttgtctttaaaaatctctgaagacaatcccaagccctcccatagtggttaaccacaattctcataatttatccattctttatatgagggctttatccttctattgcaaaaaaaaaacaacccaaaaactagattcagcgtgcgggtaaagcatttatctcagttttcggcatgtagtcagcactcaatatatgacaccttttactggtattttttcttgggtagttatgcccttgacctacagtttcggcatagagaaaaacagcctctagctgatgatacaaaaagcctttttgtttttaaagactgttcccaagattaaacctatataagtactgtctcgaccaaaagagttgctgggtcccgtgagcccagattaggaagtgtga

SEQ ID NO: 58534 - DNA, 1376 bp, Bovine  19866880369425
  misc_feature (1)..(1): n is a, c, g, or t
naaagatttaacctctgagtttgggtaaggaagtaacagaggagggccccttagagtaaatacccactccctactcccaagcgccctttacgtatgagaggcatggtcattctcactggtgggcttttacggcatcaccagggagtcagagacaccactcttttggacaacccagagtagggccactccagtatttcttgcctggaaaattccatggacagaggagcctgtcatgctacagtccatggggccacaaacagtcggaacaactcagcgactaagcacacacacagagagcagggacagctttgaacgtgggacttccacggtaacagacgagcccgcgctcagaagggccgacacttggtttaatcccctgctttgccctcttgaaattcttgagtattttttaaataagggcccacattttcatttggcattggatctcacaaagtagatggccctgccctgaggggttttttgtggtcttcaagatagattcagaatagtactgcttaatttacttggataaattcactcccccccaaactggtcacagtgactcatctgacggaaaccttcaacactgggctctgaatccgcctgtacttattattccacaggtactggaaaaacaaacacttgtcacccaaacggctgagcacaggtatcctcatgtacaccctggcgtcagcagtctgtgaagagatccacttgtatggattctggccttttggatttgaccccaacacaagggaagatcttccgtaccattactatgacaaaaaaggaaccaaatttaccaccaagtggcaggagtcccaccagctgccggctgagtttcagctgttgtaccgaatgcatggggaagggctcaccaagctgaccctgtcacactgtgcctgagaactccaagcaggaagtgccaaacggctggtttaaaagtgccccgactcacaccgagtagcccgtcagaatagacccctagagagtctctcataaggactgtctgccccttaagagcaaaggggtcttttctcccctctgccctgctcttttaagggtcttagcaagacagatgggcttttgaagcctcatgatctaaacttgattgataaagtgactgttgcattgggaactctgctgctaacgaaatggttggaagtattttcaagtttgtattttaataataaactgcctcctttttttttttttttttttctagtgaggattagagctatagtgtctacagctttgctcagatagaggcctcgcaatcagaggcctctgggcagaggttagggcaggatttcagttttgcctgggtgggatcagactcttcaaaataaaacagaaaaaaaggttgcaaatatcat

SEQ ID NO: 58535 - DNA, 1005 bp, Bovine  19866880866943
  misc_feature (1)..(1): n is a, c, g, or t
nggaaagctgtaatgatgaaaagctgatggaaagctgatgaaagccgtaaagtcataaagtctgttgtgttgcaaaatcaaatcaactcattgttctgtgaaatggagatgccaacggggccacgaacagctggggtatggtgctctgggccccccgtctacgagcacccttctggactcagtagagaagggagtccacgtcggctcccccactgacacagtctagtcaaggtcgtggtgtgcaaggacgtggacgtttgctcgtctctcgcccaccatccatccagcgtttggggtgatgcagggctcctgcctggcacattccctgagggtttaatgacagctccggtaggttttatgtccctgtgctgggtctttgaactcaaggcacatgggctccaggcacagagggatggatggatggatggtgtctgtacatcgacctctagccttcatcccgaagacggtctccccaaggccacccgactaattcactctgttccttgatttccgctcctcccctgcccactgacagaacctaaaacaagagacagccttcctttgcccaactgttataaattcccgtctgagcggatctcaggctgattgccttggctccgccatctgtctgtaaatggggctcctcacatgtgacggatggccctagctctggagttacctttgacctgataggaagcatcaccgctaactatttaacaagattgtttcggagctaactcctctggatggcattctccctgggttgaccatttctcatcaataaaaactgtctatgggaagaagtcactcccacctcacgttgaatgatggagaatggagcatggcctggagctcagagagccccttgcctcctgaataaccatcacaaaggttgtcagaggttagtctctggtcttcccgtcaagcctgcatttagcaaaattagggtatggattttcctttattcctctggcatcacaaatgtaatgtcggattttttttcct

SEQ ID NO: 58536 - DNA, 1286 bp, Bovine  19866881066253
  misc_feature (1)..(1): n is a, c, g, or t
ncaaaagctctgaaagtctgtctatacctgctgtattcaatagctaccctccgttttggcgtgaatccactacaataggacttttgcctccagcaatccaaaggtattcttctcatcaagtttgctgatgacttccaggctgctaaagtcatggagcaattctcagtcctcatttagtttgccacagagctgaagtgtatgccctttgctcagcgtatgcccctctcctctgtggcacgttttcctcccttgggtctttgacgcttcactattccggcctccttcttactctgtgcactacacttcctcagaacctttgctggcctcctcattcctccagcccccagatgttcacatgacccagcccttggaccccttatttttcctgtcttctctctccctccatcatcttattcaggtttctgattttaaatgtcatctatatctatagatgctgatttctatatgctgatttctatttctagctgggttcccattcctgaaatttagactcatatgttcaataggcatctcagcaccttcacttgtcatttttaaaactgaactcctgatcttcgtctccaaacttgctcctcttgtaggcttccccatctcagcatccacatggcaattgcatcttcccggggtccaaaccagcctgggtcagagacacagttgaacaagcatcccttctccaggttacctggatggacctggggaaccggcatgtgctgtgaccttgaactatgtaatggagatagttcagggcagctaatttaggtgcctcagagggaatagggcgtttagcacatgaacaaatgaaatccaaactaagagcagaatccagctcccaggccaggcagttcccagtctgggatctactcatgataattctgactggaatttcaaaaagatcagaaaaataaaggcggatcctgatatttcttgtgtccttcattgagagttctgaggccaggagccacagcttattcatctagcatgatgtccagcatacactgggtgctcaggaaacctgtatcaaatgaaaaacaattattaacaactgtgtctttgccagggagctagagaaagtgggagatttgagagctcatttaaaagggagtattgggatgcagaagtcttgtctctgtgaagctggtttgggtagggggtggttacacatctgaaggcatttttaaaagcctatttagccagagcctgtttgtgtgctggggtgtgaaactctatgaatgtattatcagcagggccttaagatgggttgtgtg

SEQ ID NO: 58537 - DNA, 1343 bp, Bovine  19866881081081
  misc_feature (1)..(1): n is a, c, g, or t
ncttttaaaagagctttgtcaaaatcctttggggagctcttggtggctcagacggtaaagaatctgcctgcaatgcaggagacccaggttcgatccctgggtcagcaagatcgcctggagaggggaatggcaacccactccagtattcttgcctggagaatcccacacacagaggagcctggtgggccacagtccatgggtcacaaagagtcagacacgactgagcgactaacacactttgaggagctgagaactttttcgggcacgagcagccttgtttctttacatggccttgcaagaaacctttctctgctccagtctccaacgtttttttcatgtgtttggcctcactgcgcgttgggcacaccaacgggtacttctttccaccttagaaacaccctcccttcccctccacttggcctcagtctaatcatcccacggggcctgttccaacctcacttcctccttcacgaacccggtgacacctggtcaccctgaactctagctctccttgttctccctgctgatacttcttctattaggatataatgctaattattttatgatgggtgtaactgttcagttcaatattatgttaaagatatattctgaccaagtcccccagctagggaataaaataggtggggaggggctataaagacaattaagtctgtatcactggcaggcttgagggcagggaaaaggatttagtctcaccacaatctctctcagtcgcccccttccattctttagcttggatgatttatgctttctcaattttaggtaaaaatctatggagcctaaggaggcatagctttcccttccatccagatggaaattctagaacctcccttttctgttaaagataaaaggaaaaattatcatcaggtagagtatcttcactgaccgcagtgcaacacagctgggaattaacaacaaaacattaactaaaaaaacgatctatacttgtgttaaaataagataaagactagtcttaaaaatcctccaagcaaacaaagccatgggagtgaaactaaatttagcttattttttattaacataagtgaaacttaacttacattatttcctgcaaatatctatgataagtataatagaaatttaagtcatcgtccaaaagatggtataagataatcacttttaatcaatcctctgccatttggaaatcccactacaacaacgaatcattgtaaaagtcaaaccgcttcctctttcacactttataagccatcctgggatgagccccctgtgttttctgtcaatggttgaatttggaaaccagttcaagaactatttttatatgtacaatagactcttactaaaca

SEQ ID NO: 58538 - DNA, 816 bp, Bovine  19866881167072
  misc_feature (1)..(1): n is a, c, g, or t
ncctttgcacttgtaataaaaatgcaataaagtaattggttaaaatcgagacacccctgataaagaatatttgctttttaaaataactggctaaaataggaacatatctgataaatgagtttatgggggtggggggcggaaggccaggccttgctaattagttgagattctgtttcctacatggattccttctttacctctttggagagaaatggagccgtgaaacaaggaaaatggtctgcagcactgaccaaaaccatgtgtgctcctcagttaatagagaggtgtttacacgctgttaacacttgtttaaaattcccaagcttcacagtactagaaaacgcaggctttgacggcatatttaatcacaaaactgtggttctcaccagatcgccaatatactttgaccttctttgctataaagcagaagacatggagacgcaggaagggagacgttctgtatcctctggtctcttaattcgttgccatctgtacttgagttgaaaatccatgaatgtcttgatcttatttcccttgagagtttgctctatattaggtccctatttaaaagctccaatttttaattaaaaatttattttttaacaattaaatatataaaggatgacacttggtataattgtgagcagaccagaatacattacacatagcaatagtaataggaatgacaaggaggagggcaccataaaaaaggcatgtattgatttcacacctttacgtggccccctgatagcaattaatgagtctgggaggcagtcatgttgcctctggacactgcgtaccctggaggtccccatt

SEQ ID NO: 58539 - DNA, 1489 bp, Bovine  19866881168416
  misc_feature (1)..(1): n is a, c, g, or t
ncctccctgcattcggtctagatgtttaaggagtgtttgaggacctaagaagctccctgtgaaacacatgtctggtgtggccagcagtgcatggaatgcaaccgtctgtttccaatggaaaagacagtaatttgtacccactcaagacattttttatcaacatctaaaaatgtaggtcaagaggacacagattttcccccatgggacgttttactatgtaaaagttacagagagggcttacaggtctgtgcatgatgaatatttgaaccatattttttgaataaatacaattttataaaaagagatcatatgagtgtagtgtaaaatgcccaaaggaataagaccttatgagagctgtctgggaatgatacatgttggaaaaaactctccttgaccaggaggtagaggggtctgccatggagtccagaggacactggttacagcttcaggctctggagtcagcagactggccctggaacgctgactctgtgacctaggagaagttgtcagcttctgtgcttctagctttctagctccttatctacaggactgaaaataaagaccgccccccgcccccgacccagaatctgagaaaaaattaaacaaggcaggtaaaggccttggcagagctcctggcttgtattgaacagttaataaatatgagctaaaacagccctgggtacatttttagtgtctttctgtgaccctataaatatcctactgtacaatgtatagaaaaagacgtatttggtgaggcattttcctacagaaaacggcaaagaagctctttggttctcttacagcgttacaggttttcctgggacatatgatatggactcattcctcttggatttaaaaattgatgtattgcttatgcttagcacacctctgtgaaccttctgaagaaagtcctgctagaataattcccatattgcatatggatcactgaaggtcacatgatgtaaaggaaccaaattagctagaaaataaataggcatgcaggaatcctatgccaggcctaaaggcaaaaatggattgctcagtaattaccagagtgaaaaatcttgggaatgcttcatcaaagagcaactgaggttacagaatctgatatttttcaggcctgggattatagccacttagtaaaataaaaatcaggtacttttacagaatatcacttttcagatttcattggaaatctgacctctacaggagttcaggaggatgaatactatatatatatatatatatatatatatatatatatatatatctatctcaagacttctttgacttaaagtttcctaggggagttattattttggatacaagtatttccccgctttttcggtggcacagtgtgaagaattcgctgccaatgcaggaaacgtgagagatgcagtttcagtccttgggtcgggaagatcccctggattaggaaatggccacccactccagtgttcttgcctggaaaatcccatggacggaggtg

SEQ ID NO: 58540 - DNA, 1108 bp, Bovine  19866881355592
  misc_feature (1)..(1): n is a, c, g, or t
ncagttaaggcagtttcaacatgagatttgaaaaacttgattttcagagctttttttggatttaaaaaatgcagacaagaaataatgaatccattttcatcaacaaagacctactgtgtcgtgcaggaactctgctcgatgtcacgtggcaacctggatgggaggggagttcgtggagaatgaacatgtgtacatatatacggctgagtccctttgatgctcacctgaaaccatcacaacatggctaaccagctatactgcagtacaaaataaaaagcttaaagaaaaaagaaataacgaggttgtgttttctataaataagagattgttttcacagagcttctagacagaaaatgctctaccatgtccatttgaagttcctacaagcttgaatattaaatctatctcttaaattcatctacatgtaaaatcactttcacaatattttaaaataattgagaagattctcaaattcaaccagaaagatcacttatttcaacctgatgcctaattcagctgatccgtactatagcatcctagccagatggtcactcagcctttgccgagtactcatgtggataaacgattcacttttcatgcagtaacctgctgtactctcaagcaaccttaattattagaatcaaagtcaactcccctgacacttttaccctttggtcccaactctgccctggggatcagcaaaaactactctcccccaactctgccgcatgacagctaggcaaatatttgaagtggcaatcataccattcacctcttctccagcctaaacatttgctcgaactcttccccataaagcatggtttcctcttccctcacaccctgagagcccacggtaatctttaacttgtcaatatctgtattaaaatgaggtaggtagagcgagacaagcctctagcccagagtacagggaaactgctaccttctttgtaagctatataccacatttctattagttcagcccaaaattacattagctgcttatggagcataatatgtttatatcattttgcacttagagtaaactaacacctctatttttgcacatgcattgttgtggcaatccaggaatctcttttgatttctattt

SEQ ID NO: 58541 - DNA, 1692 bp, Bovine  19866880379023
  misc_feature (1)..(1): n is a, c, g, or t
ntatgagtttatctttttgaagaatttgctagtggtcttataatattcgatactaaaaaaagaaacagcttctgtttattttagccagatcttcattcataagagctgtacttcctgacagctgtgcttttctctcaagagttttcaagctgttctccctttatagctagatggtgcaaaaaggggagtggctccccaagtcacaagccagtcagcagtagagcagggagagaatcctaaactccagccaccaaagtcacgctcctcttgtcgttgttgttcagtcaacaaaaacatcacatccgactctctgcgaccccttagactgcagcactccagtcttctccaggagtttgctcaaactcatgtccactaagttggtgatgccacccaatcaccttgttagttagaataggaaaaagggagtccaaaatgtcgatggctaaaagacaaaggaaggaaaagcccacagaaaatggaacaaaagaaaatccaccgactggagtgagaacctcaggtgaaacaaacagccctcctggctagcccagtttacatacggcaggctcagggggaggagagaaagcctataaaagaggagccaatgttgaactgcttttgggtcagttcaccctcatgtcttgaggatgtattttcctttgcttgccaaataaacctgagctgtaacagagctgtaacactggtccaccatttcaaatttttgctgcggcaagacagaactgaggaaattacacaggcccccgacaatcttatcctctgttgcccccttctcctcttgacatcttttcttaatttgatataatccaaaaggtgtacatatttcatgggatattaatacaagtatatattagggagcagcaaggcaacatgacatcttctcttccttcccatcattaagttggaaagttaaaaaaattaagcattattatccgtaataggtgtcctgcttagttctttaaaaaaaaaaaaaaaagtcttgtagttcacagtatacgcaatttttactcccttagtaaaatttaagttctatttttttttcattatcacagatgagcttgtttagttttctattgaaatttttcattgttcagttcagtcactcagtcgtgtccaactctttgcgaccccatgaattgcagcacaccaggcctccgtgtccatcaccatctcccagagttcactcaaactcatgtccatcaagtcggtgatgccatccagctatctcatcctctgtcatctgcttctctttctgcccccaatccctcccagcatcagagtgttttccaatgagtcaactcttcacatgaggtggccaaagtactggagtttcagcttcagcatcattccttccaaagaaatcccagggctgatctccttcagaatggactggttggatctccttgcagtccaagggactctcaagagtcttctccaacaccacagttcaaaagcatcaattcttcagcgctcagctttctttacagtccaactgttacatccatacattactactggaaaaaccatagccttgactaggtggacctttgttggcaaagtaatgtctctgcttttgaatatgctatctaggttggtcataactttccttccaaggagtaagcgtcttttaatttcatggctgcagtcaccatctgcagtgattttggagcccccaaa

SEQ ID NO: 58542 - DNA, 3947 bp, Bovine  19866880399825
  misc_feature (1)..(1): n is a, c, g, or t
ntgctctttctgaaatgggcctttaagatgctgtttccaggaggtgggggacatgtttctcttcgtcttattaatgttagcagtactaataatatttatgaggctcttctcagattataaatcacctttatgtagggaaatgtgtggctgcttaattcactttgctcagtgctcaacacagtagctgacatgaggaggaacttaatacatgctctcagggatgctgctgctgctgctgctaagtcacttcagttgtgtccgattctgtgtgaccccacagatggcagcccaccaggctcccccgtccctgggattctccaggcaagaacactggagtgggttgccatttccttctccactgcatggaagtgaaaagtgaaagtgagttgctcagttgtatctgactcttagcgaccccatggactgcagcctaccaggctcctccatccatgggattttccaggcaagagtactggagtggggtaccattgccttctccactcagggatgctactgagtactaagtcagttccgtcacgtgttcactgtttgcaaccccgtggattgtagcccaccaggctcctctgtccatgaggattctccaggcacgaatactgcagtgggttgccatgccctcctccaggggatcttcctggccagggattgaacgcatgtctcttatgtctcctgcgttggcaggcatgtccttaaccactagcaccacccgggaagccaacaaccattattttatcatcaatacctgtttttccatgtgctggctgtgggcagagctcttatttgtttttcttttaaaaaaatacttggctgcacagagcctcacttgcagcacgtggatctttattggaccatgcaaactcttagttgtggcatgtaggatctagttcccagaccgggatagaagcaaggccccctgcattggaagcacagaggcttagaaactggaccaccagggaagttcccaaaggcctttatgatataattttatgcctaaattcatggggcagaaggtatgaagagtgacctcctcactttattttttcatcctggtaagaacttttgtccatctcttatttatgggaatctattctgcttttagcttccttggtggctcagacggtaaagcgtctgcctgcaattctgcttttaagatacacatctggcaattgccccaaagactgactacatgtttaacttaatcctcgtggactgcacttccagctactatagcttcttcctcccagggaaggtgctaaacaaccggtcgatcctttacaagtaactgctttcacctctgggatgaatgatttcattttccttggtctttccataaacactgttttccagtacttcatggttcacttgtgaaccctgtcaaatgctctaatgcctcgaggcctaaacggaggcacatttgggcaaggctcttacaatggcactggtgttatctcttgcgcctcttgggaaaggcactgttcacctgttttgtaatgataaagtagttccactccttttacaataaagttacttggaatctttcatagtaataatggctaccagttagtacatggttgtgctgtgtgctgtgctaagtcacttcaatcatgtctgactctttgtgaccccatggactgtagcccgccaggctcctatgggactctccaggcaagaatactggagtgggttgccatgccttcctccagggatcttcccgaccagggactgaatcagcatctcttatgtctcctgcattggcaggcgggttctttaccactagtgccatctggaaagcccctagtaagtacttactgtatgccaaaaatggtatagagaactttacacttaagatcttgtttaatctgtacactggctctctgacgtctgcattattaatgtgtctagtttagagctgaggaactaagtcttacagaggtcaagcaaattgcccgagctcacataactgaacagtggcaaaggagcagaaccacgcctgaccagcttccaggtccccgctcttagcctttttgctcttctacctttaaggctattacagcatcacttttgtataagagggtgtacaaaacaaagcccccaatttctatcaaagcatccccccaaatattgtccctttatagccagatcatgaatatctgcccagtttttgaaggatgatatttaacaagtcctctgaaaaataaaaggaatagggcttccctggtggctcattggtaaaggatccgcctgccaatacaggaggcaggggttccatccctggtccaggaagatcccacagtggagcaactaaggccatgagccacgaccactgaccctgtgctccagagcccgggaactgcaactacggaagcccgctcgccctagaatcacgctctgcacaagcgaagccactgcggtcagaagcctgcgcactgcagctggacagtagccccgcgtgcgcaactagaggaaagcctgcacagccacagagacccaccacagagaaaaataaagtaattaaaataaataaaaagaataaaagaggctgtgccatacattttcctccctgttcataaatgtgcaaaggtctggagctattggttaagactgtaggtgttttacagccaggccgttaataaaactccctataaagctgctgctgctaagtcgcttcagtcatgtccgactctgtgcgaccccatagacggcctcccgtcaggctccccggtccctgggattctccaggcaagaacactggagtgggttgccattttaaggctagtggtccatatacatgaggttttaattaaggaacacaagaattctatgccataacaatgtgaaacacccatggagagagtctgaaaaatttccccgctacgaaaactcacacatttaaaaagatttaccagtggaattgctctcataagtaagagacaatttaaagacgattgcttcctatcatttggaaagcaaagcaagacaaaataaaaacaaaccaacctactttcaaaacaaggagacaaaatgaaaaagtcatacacaaaaacaacttgtgaaacaaaataaaaatcaagaaacattagcgaagacattttcaggaattactgacattgtgtctctagtggttcaaaagaactttgatctatcattaaaaaagggaatgcttaagaaaattgacaacggcaattcccatgtgtaaacatttatggcaaagagctattagcagtttgctctgttgtatggaacaagaggctggatgaaggctgctgctgccctccacttacatcagaggttccagagacttgggtttaatgaagatggcaatgggatacagctgggccacttgtaaccgcttgatagcatttcctgatacgtcaagtatacagtgtttgccctgggagaaggaaaagaaaaatacggtgttaatccagggagaatgattataatcaaagcaaaagaaaaaaaaagtaagtatgctttagagggaggtaaaagatactacatttcttcaaattttgaaaagaattgttgcaaagcataaataaaagttggtatagagggtcatcgccgaatgtttgcagtaatatgtttcttattcctttactaagtgtcagccaacagagtagacattttactaaagttatctcagctaactttatttatttccttaaataaatacctgatgttttgcacaaggaagccatctagccatatataatgtgactgagtccattctcatgaaaccctcataaaccatctctgaagacaatcgtcgaaaagaaattcccaactagtcaaagaaggaattccccacctatgacatgtgaattgtcaaccgcattttacagaagagaaggctaaggcttaagaatactaacttgcccagtgctcatgtcagcagtacatacagtagaaactcacgcaggtctcag

SEQ ID NO: 58543 - DNA, 1923 bp, Bovine  19866880426335
  misc_feature (1)..(1): n is a, c, g, or t
ntttgaggccaaaacatctcagaagtaactccgatgtacatacttattgccaggctgaccaggagcaaattacttaatctctctgacttggaaataatgccaactgtaattacaagactatggttaggataaaaatgacacaggtcaaagagctgcacaaaatggggcccagaaaatgcccgtgctaagttgatttttagttgtgtctgactctgtgcgacccaatggactgtagcccaccaggctcctctgtgggaggaagtattctccagggaagaatactggaatggattgccatgcccttctccagggggtcttcctgacccagggaacaaacccgtgtctcttatgtctcctgcactggcaggcaggttctttaccactagtgccacctgggaagcccagaaaatgcccagtctcttcatattaaattgagaattcatttgaccagattattcatgcttttttatgtactcagggtttacagggacttgtaagctaattaggacaacacagtatgtggaataacactttcatagagtttctctgttaccaatatttggtaatgatggtgatgatgaagaaaaagaagtatgagaaggagctggaggaggaggagaaagagaaaagcacccagtatgctcagttcattctaattaaactgctcattagaaggagaatgccccaggaagtctaattcagaatgttgtttggttctaaatcaagagcatcgaatagggagacaattaaattctgtttccaaaacatacctcaaggataagatcaagtttggattttgcttctcacctggctcagagttaccaaggtcacactgacagtctaaggacacagcttctggctagagaaagccctggtgaactatcatgggaaagcaagaaacaaaccacctggaatctacgtgtattagtaaagccggcctgtgttttagagaactgaattcttcatggcatggaagaatatagtttcttctcaaatgaaatgcagactcatcagtgttcactccgaagtgctaaaagctttcataattatgctctttttcaaatctttgcagcacagttgttccccagcttggagccacaaagcagtgattgtagatgacgtaggagggtatctatctggcaacagcctgtgcttgttttaatttctccacctgctattgaaaagggggagaggaccaggatttagaagccaattattcactttgaaacatgattattaagatgaattgtgctcaagcgcacacttgaaatctggctgtatgctttttaagtgtgttgtcttaatattattgtggtctgattaaagatgaacaccacccaaggaaagtccttctgtgaatcgttatcatatcatggtgagttatcacttccttccaggctgacctccctttgataagaactaaggaactatatcttggttttccttcttcagactctttgagtttcatatcccaccaaagttgtacatgactagcccatacctgtgagcttttatacgcactctcctttaatccttccagaagcccaatgtacatatgtgaaaactgaggctccgggcagccacagaatgtgcccaaagtcacacaactggaaagcagaggtggcagaagaggagccccagtctaacttcccagcggggtgtgttgattttcgcggtggacacagagcgactgtcaagaccaaaaatacctgagcaacaaagggaaaacagcaacttttcggtcataggcccagctataatgatttaacattcaccgtgggctacatcatatgccaaagcagtaactacaagctgaacaatcctgagacggagctgaaagcctcagtagcttttgcagtcattttccccttgctctcctctcctctggagagagaagacaccactcacaactgacccaaccat

SEQ ID NO: 58544 - DNA, 1890 bp, Bovine  19866880429297
  misc_feature (1)..(1): n is a, c, g, or t
ntacttttgagacaaaatttggtagagctttgctctggtgctttgtaatagatagacacagctatagctaccctctacatgcctgcatctttcccttctgctaccagtttacaacttctttttctccccctttattcacattccacagaatccaattggccttgacttttttgagcactaccatgcaagccatggttgcagagttggggggtccaaccctggtccaagcagtttggctagggaggagagtaagttgggttggactcatgtggggcaaatgggcaagggcgattacaggcagggttgttattgttcagttgctaagttgtgtccgattctttgaaaccccataaactgcagcacaccaggcttccctgtccttcactgtctcccagaatttgctcaactcatgtccactgagtcagtgatgccatctaaccatctcatctctgccaccattcccctcctgccctcagtctttcccagcatcagggtcttttccagtgagtcagctcttcacatcaggtgaccaaagtattggagcttcagcttcagcattggtccttacaatgaatattcagggttgaccgccttttggattgactgatttggtctccttgcagcccaaggaactctcaagagccttctcctgcaccacagttcgaaaccatcaattcttcagcactcagccttcgttatggtccagctctcatgtgcctaggtgactactggaaggtggttttccttaaaataaggttgagtgaagcacctccctctaatatactagcattgtggatgagcaattaaaactgcccccagaaagcagaacaaatagcaagtgctaatggtgtccagagaaaagaaagatcaccacaggctggggtgtactaattatatgctataagagcctgcaattataaacccatagatatgcaaataaatgctgatggctcagcactgcagagtacaaagccatttatccacggcccctgataagtggacagcaagataaatgatttgtttataaattctcttagagattatgctaatgtctctaactgcgtttcccccccttctggggacatcagcagaatgaagagagcctgtaggtaccttggattgcatttccgtattcattaccttctgacctaggaggtttgcagtgggatgaagaggccctttcagttgtgtctggctgattcatactgcccagagtcatttccccggggcacttctttcctgcatatattggaagtgacgataacatctgttcctgccacccagatcccagtgtcagctcataaattggcatttcttgtctgtctggcagagaggtcatagagaatataactgcagggaaatagcaggaatgctgactgctggcattaagccttgtggagctcagagctgtgaagcctttgaagggccccagcttctgaggtgagtctcacaggaagtgagggcaggcgttgccgtagccagacttgcacatacacgagcccgtccctctgagagctgatgagctgtgcgtaccaagtacttaaagctgtcagtttctgagaacactggagtttctgtccttctgtattacctgtaattaatgatgatctgaaaatctgaaacctagtcaggcaattcagaataacttagggcttcttgaaagagttggaagtctttttctcattgagtcttttctctcaatggagaatggttaaaaaaaaaaagctatataaatatagctttttttttaaaccattctctatccattcattcaaagagccattctgtatgttcagatggtaactttcatagaaggatattagtggatgttttactgtggcttatgtagcatataacacgaactatcagacagaaatcttcaaatgtgaa

SEQ ID NO: 58545 - DNA, 3182 bp, Bovine  19866880450993
  misc_feature (1)..(1): n is a, c, g, or t
ntcgtgtccgactctgtgcgaccccataagatggcagcctaccaggctcccctgtccctgggattctccaggcaagaacactggagtgggttgccatttccttctccaatgcatgaaagtgaaaagtgaaagtgaagtcactcagtcgtgtctgactcttcgtgaccccatggactgcagcctaccaggctcctcagcccatgggattttccaggcaagagtactggagtggggtgccattgccttctccacacacagcatacggaatcttattccctgaccagagatggaaaccacagcccctgtattggaagcttggagtcttaaccactggaccaccaggaaagtccctataacttgaatttagattctgaaaacatcaggatctattttcaagacattatttggtgggatgtggacctcagattttgagggagaaattagatgattgaaggtcaatgcccaaggtggtgtgatgatagtggattctctccctaggtcatgacaggaagaccctgtttgtatcccagttcttccacgtactagttgagagaccttggacaaattattttctatctctgagtctgtttttcataatttctaatacgaggtcgctggtgtcccatttccctgacttcacgtgatgatttactggaaggacatatgcagagttcctggcatgtggcatgtattcccttccttttttttttttttttgtctgccccaggtcttcactgatgctcgcaggcttttgtctagttgtcacagtcggggctacttctagttgtggcgcgcaggctgctcattgcagtggcttctctcgttgcagagcacaggctctagagcttgggctcagtagttgtggcacacaggcttagttgccccacagccagtgggatcttccagaccagggattgaacctgtgtcccctgagttggcaggtggattcccaacccctggaccaccagggaagtcctcctttcctcttttaaaggtaagagatgagcatgagacctgtgggaactgccaataatattcattctcttaggctccccttctcaatctagggtatgcaatccttcatcaagaaagcatcttctgagaggaggaaacatttttctcaaatcagttgtgcatataaccaaattttgcaattttttttttttaacaagaggctctttaggcaacaaaccacactgtaaagttcagctcaacctcagcgtgcattctggctagctactctgggcagacttttaaatcacattggctggaatgaatagtgcttcactcagcatcattacaatgatcatcctggtgctgttaatattctttgggctgcccaaagatgcttggtggctgagggacaagtcaagagtttaatttacctttctgagtatctgcaggttttgttttcaacagagaatttcaggttacataactgtcttggcttctgcttcagaaagtgaaccttgattctctaaattaactttcaatacagatcttcaggagcagagcctgttgtacctggaagcaatttgcccccaaatcatttggaaggaaacaagatgcctcttgacttctctagatacttggcagaagcagcaggagtaagaacattctaatcataactaggtagttgttaaaagtagagagacagtctaaaaaccaggctaagctttcttttttcaaactctttataactttaccctaattctgtccatactccactggactggtttgttccctcctaccaatcactgttgtgggtaggcattttgccaaggattttaaagaagggtgttaaacaaagggaaatgtaatatgataaaaatgaggctcctgggaacacgtagaagcaaatgacagagaaatataaagtaaatacgctgttctgtctaacacatgtgaaatcagttttgaattaacacctaaccccagtccacaaggtgcttttaatttactcaagagaaagacacatttcagtgtggcatgcagagtgttaaaatgaacaatttttaggaacacagaggaggaatattggaaggagggggcattcagagactaattaacaataatatacaactcataacgtgggcctatttgcagatatggatgatataatcaaagcttgaaactggtactaggatgttcatatagttagtataattcagggcttaatcttgtgtctacatttttacttcaaatcctgtgtgttttcccaatagtgacaggaaacagggccatggaacagtagtgacaaggccatgcagagtggtttcatatcaatatactacagaaatggaactaaaatgtaaagggcttgcaggagaaattcatttttattgaagtatatgaatttctgtgttgcaagatgaaaaagttctagaaatctgttgcatgacaatgtttatacttacagaaccatacatttacaaatggctaagatgatagattaatgtgttttcaccacaaaaaactctaaaatgtaatattatattaataatgttataataacataaatatgccaataactgtcatctataacaagtataactgatacatatggaccactaactgtatgccaggaactgtgttaaatgtgtaacatggaccatctcacttattttaatatctctttttgactaatgaaaagcccaaaacctagattgggtaacatgcctaaggtcccacacaactagaacatgagcacactgactgtaaaaccatggcttcatcagtcaccttccacaccaagtctcctttactgaactgcaatcaaagtatgcaattcaaaatcagatactcttttttcttgccttgtgcacacatggagaactaggtaaaggaggtgacgactcactgaaggtcaaattgaagtcactgataaactgtttttaacgggacttcctggtggcacagtgaataaaaacctgcctgccaatgcaggggacatgagctcaatccttgatctgggaagattccacatgccatggagcagctaagcccatgcaccacaactactgagcccaagtgctgcaattactgaagcccatgtgtcgcaagcttgtgctctgcagcgagaagccaccacaattagaaggctgcacaccacaacgaagagtagcccctgctcgctgcaacaagagaaagcctgggagaacagaaacccagcacagccataa

SEQ ID NO: 58546 - DNA, 1890 bp, Bovine  19866880466112
  misc_feature (1)..(1): n is a, c, g, or t
natcctctatcatccccttctcctcccaccctcaatctttcccaacatcagggtctttccaatgaatcagttcttcacatcaagtggccaaagtattggagtttcagtttcagcatcagtccttccaatgaatgttgaggattgatttcctttaggattgactggttttatctccttgcagtccaagggactctcaagagtcgtctccaacaccacagttcaaaagtatcaattcttcagcactcagctttctttatggtccaactcttacatccatacatgactactggagaaaccatagctttaactagacagacctttgttggtaaagtaatgtctctgctttttaatatgctgtctgctgctaaatcacttcagtcgtgtccaactctgtatgaccccatagacagcagcccaaccaggcttccccgtccctgggattctcaaggcaagaacactggagtgggttgcccatttccttctccaatgcatgaaagtgaagagtgaagtgaagtcgctcagtcgtgtctgactcttagcaaccccatggactgtagcccatgaggctcctccgtccatgggattttccaggcaggagtactggagtggggtgccatagctttctccaaatatgctatctaggttggtcataacttttcttccaaggaacaagcgtcttttaatttcatggctgtagtcaccatctgcagtgattttggagcccccccaaaaaaaaagcctatcactgtttccactgtttccccatctatttgccatgaagtgatgggaccagatgccatgatcttagttttctgaatgttgagttttaagccaactttttcactctcctctttcactttcatcaagaggctctttagttcttcttcgctttctgccataagggtggtgtcatctgcataattaaatcctgtaaaaagaacctcaggattaatagatgaattgatcaagatgcatgggaagcagatttcaatgttgatatccagagagtttaggaactcagattaatattttcagttgtttttgctaattgctaatgacaggtatatatattatagcatccgaagaaggcagtcgtgtggagacagcctggattaaaattctaagcaggggaagtgaattattctttccctcaatataaaaggttctggaaattaatcattttatttcagaatgaaatctgtatggcgacagggcaggcctgggcagctaacttaacatagttttagctgctgtgtaggtggaattaaaaaaaaaaagcttcctgaaactcttgtttataccaaatcctggtgccaaacaggtgtcctagactcccagaggtgctgagtcataaacattcatgaggcattttctgtgtcagtattttcagctatcagattaaagtggtaatggatctagagactgaaaggctgcttaggatttccagaattctaaaagcagacggtctctgggtcaggattaagttctttgagtgcagagcaaccataaaatcactctctgttaagtgagaatgactatgactaatgaaaatgcatatatgggaaccaattttttcttgataacagagggtattaatgttgacttccacattcaacataagaaacaaatttcacatattcaccgaaaagtgacacctttcaagttgaattccttctaaagcacagggcttgatttgtatcctgccctgttgtcatgggtagaaccacaggtcaccatgtgattcagtcagagttcatatggaaaacagaagctgtcctgtgatgtttaaaaggaaagaaatgtaatacggggaattaaatatatgaatagtatcactgaagaaccggaagagtaggaattaggaggctgttgctggattgaagtcaagaa

SEQ ID NO: 58547 - DNA, 1373 bp, Bovine  19866880506070
  misc_feature (1)..(1): n is a, c, g, or t
ncttcattccattattctctcttatgcctaccttctttcctctggcccacagcaacaggtaatattccttcatcttccctctgatgcacaaaacggtggcattatcctaggcccaggaggaagtaaattggcaaagagaacccttgctttgcagaataactgagggtaagaaagccattgggaaactgagaaacccaaataacattggcagtgccactctaggaagctgagacagctgtggggctaggaactgggtggcattttggacctagagatctgtaggctcttggctgtgggacaaagagttcattgcctagtcaatgacaatatacaaacacatctgcagaatatattctttggcaccagcaaatgttggcaatatttagccaacctctatttttctagtccccattcacttctccttctaatctattctttccccttgtttttcctcactgaaaatgatttcaaacaagacattaattttgaagaaaaatgggtagaagtgagagtaatagatgtacagatgttttcagaatttaaaataagggaaattgatctaaaatgttgtctactctgttgctgtcacaacccagcccaagtgccatcatttaaaagcaagtattgaaacattttccagacccaacagaaacataagcaccttatctcttactaatagtgaaacagtaaaccaaactcacacctcctcttcatctttctgcctcacattttaccccctctctcagacacacacatacacaaatatcctagatacgaaatattttaagactttctccatgactgttacgtttaaaactttgagcatatgatctacctgtcaaattatggttggtagggggtaaaagtgaaaacagaccttagatgttaggaaactttagcgttaaggcttatagcacatggagaaaggcaagaatggaagaaagagcttggtgataatttctgtttcacttcaaatctttttgcctctttaatatggcagagaattctttgccactaattgcatggtcttgaggccagaaaattaactgcttcattaaaaaaaaataattcaggctctaaacatgatcatacaaaatatagattatgaaaataatcataaatagctttttgaggtgcctcgtttgagacatacaaaacctcatcctttatccagttaattagaagctacttatattaatggtcttttcccgattcgacttttgtcttatttgtcacgcctttcctaatgccatgtcttctgacttcctgtatctgaatgataaaagcagaggtcgtcattatccagaagggtgacctgtgtagcatcctgccttctttccaggatttcccagcaggtcaaaatgtatgatgag

SEQ ID NO: 58548 - DNA, 610 bp, Bovine  19866880520567
  misc_feature (1)..(1): n is a, c, g, or t
nagggaggttttaaaatccttcacatattattttaaactaagggaaaaaaaaagaaacaaaaagcatggtaatggtagttaagaagatcatattaatatcacgtaaatgaaaatacagtataacatatcttaaaacgtatagcaaaagattaataatgaaaacaataggaaaaaagtattgatccctaggtcaggaagatcccctggagaatggaatggcaacccactctagtattcttgcctgggaaatcccatggacagaggagtccatggggtcacaaagaatcagacacgactgagccactaacattttcattttcacatcacacaagctcactgaatacttggctttccctattcatttttccaaaccctagccatgcagtacacttaatcaaagttctggtgggttggtcggcttgtctctatgccttccactgcaaacacttcattaatattttcattgtgagtgtgtgtataatacacacttgcacatttccccaagacaacccattagaaagcagaatgtggaatgcaagattagggttttggattattggattttttcttaccctctccaatgtaatttcttcaaactcatattcaattt

SEQ ID NO: 58549 - DNA, 1335 bp, Bovine  19866880572792
  misc_feature (1)..(1): n is a, c, g, or t
ngggactgtgatgaatttagcacaaaggcagtgccagccagcagaaaaggactgcattatttcagtctaggttaatgccagttttctaagaaggtactcgggaggaaagccagagatctttgtttattgtcattcttttgatgtagtgcttagaactgcctggcttaataaatgtttttgaaataaaatatttattgtgtgaatggataattattttctgcacatacttgcttcttgaaaacaaaaacaaggaaggagaacactttaaaattattgggcactgagatgggccaagtatctcactaaatgctcacagtaaccaagacgacttcatacgcccattttaccgtcaggtaaagcaagggtttaaacttagaggccgtccaaaccctaaagtcttttcatgaagttgctttgctattgatgataaattggaaagatttatagtcacggtatttatcatagcaacacacttcctctgaaaacttttaaaaatactatacatacaaaatgaatctatatacaaaacagaaatggtctcacagacatagaaaacaagcttgtggttactaaaggggagggtgaagggggataaatcaggagtttaggagtatgggatattaacagatatcataaaatagacaagcaacaagatttactgtatagcacaggaaattatattcaatattttgtaataacttataatgtaatataatcagaaaaaataactgaatcactttgctgcatatctgaaactaacaaaatattgtaaatcaactataccttaacaaaaaaactgaaaaaaatgctatacaagtaagtatttacctgaacaaatattcatagctaggtaaacagcattttctatgtgaattataaaactttagaatgtcaaaaactggactccatctaatacaatgcattttttttacatctgaagttttcacaggaaaaataattttgattttcaagaagtcatcgataataaattctgttaaaaatcataagccagatttaaacagcaaagaaaagaaacaatgactacgtcttaacctcaaggggcaaatgagaggtgtgatatcactccttagtttccaaaaggatttagcaaatagaactaattgttttactctcctataatgttataatgtacagaacagtggggactatagcagaaaaattgtagtttgttttttcatgaataaataatttctttaaggccttaggagagagcttttctacagatgtcattatgaagaccgaccaaacatcagcttgggagaaagaacctcctaacccataagtgatatgtatttcatttatccagaaataatg

SEQ ID NO: 58550 - DNA, 1045 bp, Bovine  19866880575650
  misc_feature (1)..(1): n is a, c, g, or t
nactttccttctaaggaataagcgtcttttaatttcatggctgcagtcaccatctgtagtgattttggagcccagaaaaataaaagtctgacactgtttccactgtttccccatctatttcccatgaaatgatgggaccggatgccatgatcttcattttctgaatgttgaactttaagccaactttttcactctccactttcactttcatcaagaggcttttgagttcctcttcactttctgccataagggtggtgtcatctgcatatctgaggttattgatatttctcccggcaatcttgattccagcttgtgtttcttccagtccagcgtttctcgtgatgtactctgcatataagttaaataaacagggtgacaatatacagccttgacgaattccttttcctatttggaaccagtctgttgttccatgtccagttctaactgttgcttcctgacctgcatacaaatttctcaagaggcagatcaggtggtctggtattcccatctcttgaagaattttccacagtttattgtgatccacacagtcaaaggctttggtatagtcaataaagcagaaatagatggatgactaggagatagctaattaagaagatttctaatcagagtgagaaggatgtgatatgcagagatcaggggataagggggttgatcatggttctctggtggagtggaattttatccatttatcactcaataaactaagtatgcatgatggaaaaaatactaacttcagagtttaggaataccggagaattattattcatttttcatgaacttcttcaatgcaatgaaggttgaagtggtaaatgtcatgctttatagttagacagtcctgattcattcaagctgacctttacaagttgcttatcttctctgaactgaacttggtccctcatctataaaatggagataaatgtacttatcatacagctggttgcattattctgaaaatttaaagtgcgacatatcttgcttcccacctgccacaaagtagacaccagagtaattggtaattcacatc

SEQ ID NO: 58551 - DNA, 2010 bp, Bovine  19866880736030
  misc_feature (1)..(1): n is a, c, g, or t
ncctggctgaaaatctgtagactgggggaccacttcttgtcatttcagtacaatcagcgttcccattgtcaaagcactttccccagacacaaagcactttcaccatgcatcgattctagggaccaatgttattatttctctccatttccacatcagggaaagaggattcagaatggctaaatgatttgtctatagctccacagctcctcactctgacgtgggactcaaaagcagctcccttgaccccagatcagtgttctttctcctcacggcacaatctctcttcaaaaccttgacaatgatctcagtgtatacagccttctttgtacacattgcttggtgtgcacagcacactcagaagcacacagaaccacagtgagtgagtgaaagtcgctcagtcgtgttcaattctttgtggccccatggactatacagtccatggaattctccaggccagaatactgaagtgggtagccattcccttctccagaggctcttcccaacccagggatcgaacccaggtctcctgcattgcaggagccaccagctgagccaccagggaagcccaagattaccagagcaggtagcctatcccttctccaggggatcttcccaacccagggatcgaacccaggtctcctgcattgcaggtggattctttaccagctgagctagcagggaagcccacacaaaactataaggaactaatatttacatggagcttttgagtcagtcacaggtgtagctaacgtaatcttataacaactctagccttattatgttcacttgaagtatgaataaactgaggcacagagatgatattattgactttttaactctgtttaagaaatcccctaagctatgggttttatttgtttaatctctaggcaggtggtgggaaaaggaacgagataataaccttgttatggctcaacaaagaaaactcccaagtatttctgcttccagaagtagattaatccatttaaatattattgccaggaccacagagtaagcatggcaacaaatcagaattatagtcttcttagagatttcaattcatagtacataacagcaatgtctgaagttcaaatatcatattcttttttatgtaaaacatttgcaaagatagtttaacaatgaaaataccattcattttttacagttggaaaggaaaaggaattcttttcagcttgtgaaaatttatataaactgtggctataaattggctagtataaaggttcagtattggaatttcattgtttaacactacaaggaagaaataaacaggcttgagaaactcacacgttattacaatatggaaagaaaactgacagaattattagcaatggaatatggaggataatattttgcacctacagcttccactggacatgtaaagacaagctataccttcctagaagacaaaagaacaaaaacccctaaataaaaattcaatgcatagatttctaagtcatgtaagatttatttgcaagtaagtcatgctaaaaatagcatagtacatttagagaggagaaatagcatccctggggaagagagccgaagggtagatctctgctctcgattgatcttcatcaagaagggacttatataacagacaactaccttgctaatcagggatgcaatatccatttctattttcctgaattattctcccacacagactgcagactcttctaagacaatttgttttattaatggcttactatgtgtcaggttctgtaccaggaaatgaaatctcaaagatgagtgagaataatagatctcaaaatgctcactgcccaaagcagatacagctgtcttccatatcctcggaagatttgttccaggacaacctgtcaacagcaaaatctgctaagctcaagtcccttgtataaaatggcatagtacattgaatacagtcggccctccgcatcagcgggttttgcatccatgcattcaaccaactgggcttcccttgtggttcagcggtaagagaatccacctgccaat

SEQ ID NO: 58552 - DNA, 2368 bp, Bovine  19866880845481
  misc_feature (1)..(1): n is a, c, g, or t
ncgaccccatggactgtagcccgccaggcttctctgtccacgggattcttcaggcaagaacactggagtgggtagccattctcttctcacaggatcttcccgatccagggatttaaccccaaacatcctgcattggaggtggattctttaccttctgagccaccacagacgccctcttaacagaatactccttggaaaatagtttacatgggaaaagacagtttaaagagaaataagacagaaatccattttccaacaagaagtatggtaagaataataaccagtaattttgggagtatgcattataaccaggcactgcattttcttcttcttaattgtttggttggtttttgtttgtttgtttttttcaggcactatgttttcttgatgtatttaatcgtgcaagataaacattaacatatccatttttacagataaagcacccatgatgctataaatcagtgacaaagctagggtgtaagcataaggctcttgggtccctaaacctatgctctttctctaatttctactaaaggccatagtgagtaaacctgctcacatgcccatctgcccctagagttgaatgtgaaacactacttgggatggaaggatatgtttaagagcgtgggctctggaaccaggttgcctggagtcgattccaaccctgtcacttagcagctggtatcctactcagatgtgttaacctctctgaatctcaggtttttttttcatctgaaatatgttgttcgtgataatacctacctcatagaaatattttgaagattaaataaagattaaatgagcctgagcactaaaactaactgcctggcatatgagaagtgctcaataatagctattattatcaaaacatgatttctggtgttgatactcagtgaacctagagaagttataccgaccttgtcagtgaggaaacagctcagatactgctcctccgtgctgcctgcctgttaatgatttttggccaatcaatgggactgtttctgatttctgcccttctccccgttttcagggcttctttgctctagaggtagcacggtaggatagaaagacagttttaacatcagaagacctgggtttggggtcaggctggaatcgtacttggaaaccgtgtgacctgcgcaagtcattctctctctctcttccttacggactcctcatctgcacagcgggcagcttgaactcccgaacctctagggcctcttaacagcttccatttctaggagcactggacagagtcacttaacttctctgatggctcatttacactgtagcactgctgaactctccttgttgctgaggggctctgcagagcccttctctcagggagagcaaagtgtttggtgtgctgtgatgggctgtgcagatatgagtgctggtctttacagaactgttatgagaattgaacctgagtactatgccttgtcgtgtaggcatcggagactcacgggctttcctccacattttgccatggttgcctacccccactgggttgggtggatccaccttaacaaggtgtgggggaactcgaatggaggatgggggtgctgtacggatggtgggaaagcatcttattggttcgtgctggtacatcccaaacaccaattactgtcgctgcttttaaggctgatatatttatcaggatgagttacaaggaaatatatgtacccagggagagaggatgctgcgtggtcaccccctgtgatgtaaaatatgagagtctaggaggggctgttttataattcatcaggtttcgctagtgagttctgccggagtcttcgttataaaggcaagtgtgagctggacggcagacaggagaacctggcaccaacgagacggagaagctgcctttggtgccttctgcctcctccctgctttgttccaataattttgtgctcggtaagttccccggctttgcagctaatcgttgttgaataagcttggcaaatgaatctgtagtttgaaataggcacttgctgtcagaagtgtgtgtcagtgtttgggcttctgacaaattccacagttctatttaatgagcaaaatagcttaaaagatgaaacaaaagccgacaaatcaattattcaccttgatccttggaaggctgctttctttggttgctaaagtttctcaggtttcattctgtcagtttcatgtgttgggtgagctttgaaaagaacaagtctctttgtcacgaaattgttttgcctagctgccaaaaggaggtatgtacagggcggtttgtccatccctaccccccagcttaccctccccagcagtcggtgattcttaaaacacagtttgcctggtaaccagctccgatagagctgaacctatgcaaggcaagattcaa

SEQ ID NO: 58553 - DNA, 3594 bp, Bovine  19866880856322
  misc_feature (1)..(1): n is a, c, g, or t
ngaatcctttaggactatcttgtccgtttcttctttccaggtaggggagctgaagcttagtcagcctctagataagaaagcagttcaatatcttaaaagctgtcatagctactaaggctgagcagctagtaaattccttaattcttttaatctctataatagctcatgaggacagatggcttaaatagcccaagaaatcatccgataagccattatgatcaaaaggacataaaggaatttttttaaaattctcatggcatctcagggatttcttatgtatacaactttcctttcctttctagtttactgttgttaattgctattgttcatgtatcacagttaaattatgtatgtatatgtgtgtgtgtatgtgtgcatgtgtgttaaaagtataaacaattattgttaatttaaaaaataaccaccaatttggaaatattgctagttcaatacatagattaactatattatgattttcctctttctcatcctaaattcttcctggagccccctttatggatccatccatctttccatcatcaatcagttcatccttagtctattgccacataccgatttctccaagtatgatacatgaaatctgttttagttaatctggttggtatgttctaatttttaccaaaatattaggaaacaaaacgtcatgtgactctagaatctgtgcttcttagccacgtctttctcttcagctctttctcatatacgtatacatccactaaaggataccaccacctcctgcaactggaaatctccaggatgtttcctcaatgcatccgttttctagccttctcctagttgctttcgttttctcctcagcctccatctaacacatagaattataaaatatgaccaaaaagatgattcctggaaattgagtctacagattcactagaaggttctctccagatactttaatgattaacaatgctgaatccctctgtcttgtccatacaccagtttggacctagagaaatgtaatgacgacaaagggagataccatttcctactcttagaaaactctcttgacctcattctctatcctgggaatacaatatcccaaaatcatttcaaagggattaaaaatctttacaaagataattatatgtcatgcctactcccactgtatcatccctcttcccatctccatagcaactctcattccataattaaatatatcaatccttgtatccatctatataatccacctatataatgattttatatgattttgcggatcccttggcatctggtaacataaacgcattcactccttagtactgaaagagactaagtatatccttgtgctggagacattttgacaacccagaaacatctctaagatccttattcatctttagaaacatccagctcgaatacatggaaatgaagagtcttaatcccattcttcagtatacaaataatgcagagtgcgcacaaatcattgttagataaccctcccatttgctaagaaatttcaggatgttaggtaactgtctccacagagatgaaaagaagaatataaaccaagacagatttaaaatacttactaacttaactccatcaaaaggaaaacaaatcaaaacagatttaaaatacctcttaactcagtattctgggttcccatctagttcacccccacatctttttgactatccccttatttaagccagtcctcaaatataaaaatacagctttgttctcctttccctgactctgcagccaatgctttattgaccacgtttaagccacatcactcttctgaacattgattctcttgcttgttaattaagatggttagagagattatttttaagactctttccagctgagctcctataaaagttagtttactgtgtcttctaattaaaacttgtcgtctaagaataataattacaagcagttaatttctaaatgttctcttattccacatattttaaaacatggatattctgctttcatccacttgtgggaagggaaaagatctgtatctatggaaatttctctttctgtgtttaataggatttgaaccctccaataatagttttaagtgtaattcaagtggaagcacttattgcttgtggctgcttccaagatgaacaacttattatacatggtctctttgtttatagactcattgtagcctaaatcttgtccacttaataaattaaattgtaattactaagcctacaaacagatttattgaggttgaaagaaagtaatatgaaaaaaaatcaatttcaggaaatcaagtgcacagaaaactgaaatagaacggtttaaattctcagaatcgcaagtaatagcaacttcagcatggaacaaaaacaagcctaggaaatacaaaatatacatctttaatgtgctgtttaggttcctaatccaaataagattcctggtagactcattgactaagtctgtagaaggcaaaagtatccaaattgtgctttggtgcaaaataatcttctcttattccctcttcgcgtttcctcatatcatgtttccactgctaaggataatttgctttcttaataaagaactgctgatgcattacaaaaattaaggaataacaaaacaaaaattcattcatccagtttttatccagctaatgtttattaaatgcttctgatgagtgacacgctgccctgaatgctagagctagaatgatgagcaaaacagacatggccctttccctaatgtacctacagaggccaagtaaaatcacactagtgattatattactattacattagcttatggagcctggtaggctgcagtccatggggtctctaagagtcggacacgactgagcgacttccctttcacttttcactttcatgcattggagaaggaaatggcaacccactccagtgttcttgcctggagagtcccagggacgggggagcctggtgggctgccgtctctggggttgcacagagtcggacacgactgaagtgacttagcattagcattagacaagctaataaggtggtcactttagaaaaagagaagaacttggatctagactcttggagtctagaaactcaagtatgtccttagagtacagtatgtgtgtgcatactcagtcactcaattgtatctgactctttgtgaccctgtggactgtagccctccaggctcctcctatccatgggattctcaggcaagaataccggagtaagttgccatgccctcctcccagtatcttcccgacccagggatcgaacccacctctcttatgtcccctgcgttggcagacaatttcttgacaactagcaccacctgggaaggcctagagtacactaagccagatcaaacccagaccaacaaaaaactagagagagggttaagaaggaagcatctcccccaaacaatattttctttactctcaaggataagtaggtatgaatttgtccaagtcccatatttaaccagtcccatattggtgggcatttgatcattttaatcttttgatatcacaaacaatgtagcagtggcatatcttctacttctttgtctcagtggcttagcagtgggaaagcattttgacagtcacaagacgagtaacccctcaag

SEQ ID NO: 58554 - DNA, 798 bp, Bovine  19866880858102
  misc_feature (1)..(1): n is a, c, g, or t
ntgtttgacaagtttttgattgcagtgctccaagttgacatcaataattcttctcactctcaaatagtaggtgcacataaaggtttattgagtgaataaaggaaacacttgcaaacagcttaaattatctatgagaagagagaagagttggaactgtactattactagagaaaatgtagagtctaatagtctgtattaacttgaatctcctctgagggtacagaaagctagccattcaaattgctttctttacaaatgaaaaaaggtaagagccttgtcatagcttagtgaaagtgaagtcgctcagtcgtgtccgactctttgcgaccctgtggactgtagccccccaggctcctccgtccatgggattctccaggcaggaatactggagtgggttgccatttccttgtccaggagatcttcccaacccagggatcgaacccaggtctcccacattgcaggcagatgcttttaacctctgagccaccagaggaggaaaaaatggatatttctttttccaggatagaaatatgaggaattacagaggactatttcttagttcattcagcacccgctctatgtcatgctctctcaggcaccttaagactcaatgtaagtctcagtgaactctggaactcagcacaggtaaagagggagagcaatcaatacgttaagaaagcataaagtacggccgtttctagcataaaagtctggcccgagaaaagtggggcttcagagataatttcagaggaggggactttgagctgagctttgcaaagatgaggcattgctagctaa

SEQ ID NO: 58555 - DNA, 2058 bp, Bovine  19866880865638
  misc_feature (1)..(1): n is a, c, g, or t
ntgtgaataattgtcattgtggagattattgtgaaactcagtatggtggtagtccctgtgtttttgccggaatgggatcagaaatgtgagcagatttgcatttggcatgcctgttggtgatgtgggagaaggaggggaaaaaacagactggatcgttatggaaagagctatacaacccacccgcaggacagacgaatgcagagagcaggactgttgtatttgtgtaacttgggactgttttctctagtttcctgttcccgttaataattacctgaagctgcgttttggtccgcatctgggtacactccagatcctggctccgggcagggtgagcgctaactcctggtcagctagctgtaggcagtcatttcctcctcagaaggaaagaagggagacctgtaccatcgcggactcctttctgccgtgttgtttgcctctgtccaaatctcatggaaaccacagcttgatgtacttttttttttttttttttgcagtagcagatttaactgtggtgtcatatggcgtattatgtatggaaaggaatagcaagacatttttctgaatgtttcaagtgtgtctggcttgttgacatttgctttatttcactggcaaggagctactgtcttctggacccataacggtttgtctgtccaaagcatttactttatgcataattgcactttctctttagatgtggaatctgtagatctgaaaagaaatgtcctctttatcctcaaggaaagcaactcgttttagcattgccttgataaaaagtacgcatcctccccctcagcatgctttttgttttttcctgataaatattttggtcaccagtaccactgtacttcaaataaagttgtttctccattcctagcacactttctgattgcaccaaaacccaaaacttggcaaatttggaatatggaatgtaccttttttttcaggaacacattttccaggcatacttcttttgtccataaatagcttttccatattttccatttctctgaataagttctgctcaaagagcagaggagtgatgtattgtggttggcacttaggggtgtgtaacctgagactcggtttctaatttacaaacggctgccccacaaggggtctgtaaaatgtttttttgtcttatgttcagttcaaaacctccggagtacagcagtaatgatcaagataggaaattcagcaaattattgcaggtataaaccaatatctgtatttgatggtttgatcagcacactatgctttgtaaagatcaggacacatagctgaatgttcctaaaagtgttaatgtatcttaatgccaagaacatggctgtaaagtacctttgcaatatattgtacattgaattttactgtactgtatttttaaaaatctcctaccagagcccctggtttattttgcagcagtatctgggttttgattcagtgtggttttatggagaaataagcaaatgaactaatttccataaactgagtttcttctcatttggtggtgattttttcatctccacccaccaggaatcagctcctttaatagcaacaaaagaaaatttagcttgagttattctcaattaaatttacaggaagacaaatatggactataataagaaccttctgagagagcacatacacaccaaaaaacttgtctcttaaaaaagggttaaaagccaaagaggtatgaacattttgcctgcatgacacatgatttctgagaaaggttgtagggggtagaaagggggagaggtttacaggagctgttctgagacctggcttcagcagctagcaaatggaaagggcaggggctttgtgtcactgtggtcgccacctcactctccttatctgtaaaatggggtcagggaggtcaggaagatgatgccagaaaggtgatgttgtgtacatgttaccaacagtacactctttgatacaaaggggacccagtgagaggtagtcattatggttagatgtcaaattttgtaaaatatatgttcatttttgatggttgattttgaaagaaatatgcacattaaaaaggaagattataaaaat

SEQ ID NO: 58556 - DNA, 3017 bp, Bovine  19866880897754
  misc_feature (1)..(1): n is a, c, g, or t
ntgtatccactttctgcaataaatcatagccatgaagatgagagtctgacaagccctcctagttgggagtcttcaggacccccgacactcactccatagattggaaaccacattcacatacactttctcatttgtgcctcaatccattcccagaaagaatgtacaacggatacagtacttagcatcccctttttacaggtgaggggcataccaggcgaggccccctccaactaacacaggatacgtggcttagaggcagcaactggggctggagtgctgttctctcggtcctaagtcctagttcagtggtctccaccttgcccctgaccccaccccagtctgggaggtggtgaaggtggtggcaagggggcaaggatgagaatcatgatgacaagtattattcatgcccaccttagggggcctggccctttgtgttcatcgtcctacatttgacatcataataacctgaatggtaaatattagtatctctgtttaatagatgggagaggaggttcaggaagttcagaaacctgtcccaggtcacaagtaaacacgtggtagaaactgaacctagaataaggcctgactccaaaatgcacatccctggttatttcatcacagtgcccaggactcggccataccaggaaattctaatcttcccttcagagctgaccacctcttctcccccagatccctgaagttcccttacggctcagctcccgtcccttgtattccttatcttaaggtccccaaacctctagtttggctccaggttcttctggatgtaaagtgtgaggactggaggtagaaaagccatcaggaaagctggcaggtggtggccaagaaggcaggctctagggtcagactacttgggtttgcaactttttaactgtgatcttaaacaaggtacttaacgtctctgcatttcaagctttcttaattataaaatggcatagtaataacaccagccaccttgaagagctgtggtgaggattacatgaaataatacatgtgaagtattataacacagcctgacagtagcaagtgctcaataaatgctagctaatactactatgataattattctgaaaaatgcactgggatttgaattccagtttctgagtcccaactgtgccacttagaagctgtcttatggactgtgtacaaagatatctaaaacttctctgtatcctcaagacccagtatagtgctgggtacaaggcagaccttcagaaagatctatggaaatactttggatgatctttgaaagcccctggtgactcagactggtaaagagtctggcctgcaaagcaggagacctgggtttgagccccaggctgggaagatcccctggagaaaggaatggcaacccactccagtattcttgcctgaagaattccatggacagaggagcctgatgggctacagtccatgggatggcagagtccaacagaactgagggactaacactttcactttgaaagctccacttctttgaagtctcagtgtcccggtctgtaaggggagggcagccgaaaccaatcccaaaggtcctcagcaggtgatccattcattctcctgagctccattctagtctcaaatcgtcttttcaagaaaacacttatttacttggctgcgctgggtcttagttgcaacatgcgggatctttggttgcggcatgggagctcttagttgcggcatgtgggatctagttccctgaccagggattgaacttgggcctgcattgggagcatggaatcttagccactggaccaccagggaagttcccccaagtattcctgaggggagatttcccacccttgggatcagcaacacgctttctccatgagttctattatcttggacaaactgcctctgtaggatcacattgattcagactcgccaggtccctaaaaataagcagctgacacatttcagcagctcctggctcctttggatattaatggatcatcacatctggggaagaggctacagtgccctgtcacctattttaaaaagcgataagctgcttttaatttgctttatgtgctaattcatcacagcaacttttataaaatgctattaagactcacactttccacccagggtgcttttaacaagtccattagacaagtggaattagacatgaataatgcaacgggctctcccatccctcccgcccctcctgcatttcaacatgtggcggccccttgcccaccggggaagcctagggagggagggctgaagcagatgcttgtcctcctggctggccaaccttggttgtgcagacctaggtaccagaccgaaattgtgcttagtaagtgtcccacaatgtgctaaagacattctgttcatcgtctccctcaatttgctgggtttgagccaacataccagttacacaccaagctttggagaaaggaaagatctggtgttaagttccaactctgtcattgctagttgtgaattttaggtctgtggcttaacctcttagatgacactcttaaccagagacgaccattctctcattgatcaaatgcagataacgatggcacgaactcacaagaccgttatggagatactgctatggcatggtgcctgtaaagttcccaagacctgcacagaatgaatccccttcgttattatttctgttaacaatcctgccatgtcagcgttttggatctcataaaagaaatgagagtcaaagagccgaaatgaaaaaaagctagtaagtggcagaatcaggatttaaacaagacagatgtgtctgaatcaaaagcctgtgctctgactgcagaattcagcttggagctcctgatcaggaatgcagtacttagatctcatccccgaagatttcatgatcagtggacggtcgccttgacgctggcactgtggaccagacatcaggagagaggcgcatgcagtttactgagcacacacttggttctcacgctgccctgcagtgtgtgtcttagccttgtgctgcagacgaggaaacacaagctccgtataaattaagc

SEQ ID NO: 58557 - DNA, 1521 bp, Bovine  19866880922141
  misc_feature (1)..(1): n is a, c, g, or t
ntcatgtctaactctttgtgatcccatagactgtagcctgccaggctcctctgtccatgggattctccaggcaaggatactggagtgggttgccgtgccctccgccaggggatcttcccccactcagggatcgaacccaggtctctcacatctcctgcattgccaatgcaggaggattcttaaccattagcgccagcgggtgcctataaagaaaaaaaagctagctgttgactatgttttaagattacgggcgccatctagtgtccttacattgtctaaacactttgcaagctgaagacggaggattcccaagctccattgcaggaatttatcctgcgcttcctcctccccgccaggaactaagtagttaagatgctgaaggaaatcatctcctcaggctgcattccatacacatattgtgagtgatcttctctaatttctcctttatattttctatctctccaggatttattatagaaaggcttatccaataatcgaaccatcttcttgaggttttttgtggtggagaatttagggcattcagcatgcaatcatgttaactagtgcagtagcctcctcaggcattctttctgcagagggaaagacagaaatgcctctgttattgtttgtttcagtgctttgttatgaaaaaatatatatgtggagcagagcacacagaagcaatactctataaagaggctctttcctatctcaccaagcaattttagtttgttcaatcctcaggagtctaaaagcgatcaacctagctgaccccaccaactccaaagctcactcttgatggacgtgaagtgtttaactcactgttccaagatccgtggttgggaataaaagtgaattgtggcagctgttgtcctgaaagtagaataggttgttgtgagttttcaaactgaaattgcatggtggatttaggaagagtgaaaaaagagtcacagctcacctgggcattgcgttaatgcttaggtttccttcctgtcttcatgtttagagccgtgcagaagggaagggctttgtttgctaaatccttactgtcaagggactcaagtggaattcaagcacgatatacactcttcaccatgcaagggtactgataatgtcacctttgtatttatcaagtaacaactcaattccttccagtattacacctgaaatccagccctccccctgcctctcacaaaaaaaataataaaactaaaataaagtctcacattatttgtgtggtgccctgaagtggtcctcttagaagcttcccagccccttcccgtccagtgaccctgccctatgggccgtgtccttcccctccagctctgtccccagccccaaggaggatccacattttcatcattggcagtccctgagggcttccgtttaagggactgtttcccagtgcatctgccttccaaagaggttctgaggtccggggtggggtgcaaaggttgggacaggcaccatctctcaactctgagctgcacccacctttttccaaaagcacaacagcttaaa

SEQ ID NO: 58558 - DNA, 1006 bp, Bovine  19866880989565
  misc_feature (1)..(1): n is a, c, g, or t
ncagtgaccattcctgggaacttactcagagtctttgttccataaccgtcgtcacctaatccggggatgtcctgcatggaagtccccagagagagcaatgagagagggagaacagccacggaagaggaaggaagaagtcagtggagttgaaacggatactaccatgacagaccgtgttgctggagcagtctggatccctcgctctcttcttaggaaacaaatctcaccccaaactccctgggctgagacttgaggattcgcattgcaactcgaaaggtttaagcagaaggttgtcatgaaaaagataaagagtcaacaagagccgtttttaacccactgtcaatattgccacagcaacgtaccgctgagaccaaggatccattccaagattcacggctgatgcttagattgaatataagaataagctcagttatcccaagataagcttcactgtgagggaaagagtgaacaaatgctagtaaccgatagaggggaatttgatcactcccagttagctagcactccaaaacaatacatgtggcaatggaatctaaggtttctgtccagaaaagaagttgtctcaagcccttggagagttgcatgatagaaaaggtgaaccagacacagtcttggtcacagataaaaaaatgctgtttggaagccaagtcccccgcttcctcaggtccctttccaatgcattctgtaggaaaaagagctccgtccaggggagggatccagactgcaggcaaacactggtcacagtagtaagccctgacctgcctgcctgccgtgtttgtttgcctaggcgtgtggcgtggggcagcctacgtcatgcgtgttgcccgtgaaggatttttttttttctcttgtgttgcaggtgacattctcttcgagaatctaccttacgttcaggatcactggtttcctgctcactctgctccttgttcttgtagaatgggaattttcgtgaaaagatgaagctctttttacgcttgtcattgaatga

SEQ ID NO: 58559 - DNA, 2408 bp, Bovine  19866880990480
  misc_feature (1)..(1): n is a, c, g, or t
naatcctgagggaagaaggtctgatctcttattcatctctgtagctaggcatctgctacagactggtatattgcaggtatattcatgtgaaatcatgtttgttgaatgaaagaactgatgctctgatgaattgttgcgtaaaagatttaaacaacagagcaggaggcagacctcaacatttgtcatatatagtccttgaaggaaaaactgtcaaagaaagtacaaagtttgagttactagtttaaaatgtggatttaggaccacagaaggaagtaaatacttcaaatccagaacataaaactgtgagcagagggctcagagtggctaaagaacgcagaggagagatggaagcaattgtgaggatggggtgctgatgacagccatgaggaactggaaggggggtcccacagatgctgactataatgtcgtgaagacgtgttctcttgcctgagtcctgtgtcatctacctagaatgctcttccttgtttattccatctgcaagctgtagatcagatcccattagtgagtcattaaaccaaattaatgagttgtgacttccattttttaaagaatgagagaaacagaatggaaaatagcaaagtttactgtacataaaacataaacttcaataataaaatcttttttcagctttctgtgtgtatgtatttactgggtcgtgataaaaatgtacttcttattttgagtaaaaatggtttgaaggcctctgaattaacttatataaaatcttcaagaattaattcagatatccttgtataaggtagcagtaaaggctcttggcctttctagagctaactttccacagcactctgcattatgactgtcttcccctcatctcttttccatactagatgcaagttccttgaggacagggcatgacttctaggtcctcagtgtccattataggttctggcacagaatatacactcaaaacacgcttgaggaacacataaataaataagttactgacttttaaacctaaattcacaacagaaagcttattcccttgaactcttcaaattgctatcttttattaacaaatgaacaaggaccaggttctcttttatattctctcctgtgacctccttcttactctccattggtggacttacctgcttttctttctccccctctccgttctcccagtgtcctaagtgctcttgcttctcttttatccaaagaaaggatttctccttagccatttgcactctggagtgaatttaaccccctctactctgacctttcatgggtagtttttagatataaaggcacatcctattagtagcaggaaaagccttgttctgctagtgggatgtatttagagctggtagaaagataccaaggggactgcatattatagcggtagagagacctcagcctgcacatatatagagccccaaagtacacgcaacaaaccccataccaggagcccaggtggcatctagggctgaagaattgataatgtactttggagcattttgaaaaatattttattcaaatttttaatgttttatttacttttaaggttctacaactacatatgtttcacaatgcaggaaatacacaatacacatagcccattcaaccaagcagatccaaatcattggcatagaacatgtacagcattatcattagtgacaatcaactccatttgcatgacacgaccaaagcacttcaagtgccttacaaaaaaagattagaagaaggaaaataattacaactagattggaaaatagagagggttggctcaagtttacaacactgcctggatagatgtgctagttccctgccaggcaaatacatcgccatcaccagagggactatttctaggaagggaaggaggccaatttctgcatgagcccgagaagatgcatcgtcttgcacacagccagcatagggctaatgttgagagagagagtgtgtgtgtgagagagaaagagagtgtatggtgtttagggaagaggaggtaactccaaggggaaggtggttttgtggtacaagcaaatattctactaagtcagctaaattgtttattacagaacaaagaagcagcttgctttctggcttaggttttggcttcatggaaaaatatgaatagtactaaagaaatcccatatgaaagccctatagtacagtttatcctgtgtaaaaaccccaaagaagtattctttttgaatttctcctctcagctaatctgtttcgtaatccaagagtcggccactgtgctgacagaagcacattgggattcacagccaaagcgcactgaacagctgatgcgcataagctgggcccaaggcagctagagtgatagatggctctggaaggcaggagatccaactctgctgccaagcggctgtggggccccttcctcctgcggaaggaatttcccc

SEQ ID NO: 58560 - DNA, 1786 bp, Bovine  19866881119066
  misc_feature (1)..(1): n is a, c, g, or t
nactttgttatatattactgatattattattattattagccattactggtggatcagatggtaaagaatctgccttcagtgcgggagaccttggttaaacccctgggtctggaagatcccctagaggagggcatggcaacctactccagtattcttgcctggagaatcccatggacagaggagcctggggggctatggtccacggggcctcaaagagtcggacacgagtgagcaactaagcatgtcacaacctttagccataataatctgattttgaactgggttcttcgtgtttgattatgctgtttcagtaacttagctcagttctgggcacgttcgtggtgctctttaaaatttatttaactgactgtttgctattgcaattgtgtcaattctcattaaaaatgttttgactgaataagggtatgaagctgacaacaaagtctctctccttgatgaatatttaattccagtttagatttgccaatcaaaattcataaagacggttggaaactgactttttatctttataactagtcatgtatattatattttcccaattttaactttagtctgtgcagctgaaccatcacagcagttattatcactgtcatagttgttttacttcagactctcaaattaataagtgctaaggaagaatttaattagctgaaacctaaattgtcattattaatttactagttacattacaataccttgtaaaacatttatgctgcagtaaacggagcacctactttccaatgatcacgtggcatagctaatttactatacaactatatttaattactaatcttagtaaagctaatagtacttacccaaattacattacttacaacaaaatgcttcaatcattacgtcaaatgttataaaaatctcatcaaagaaataacagaagttcaggcatgtttaagtacctctgaaacattcttagaatagaatttcttaacaggtaaatggaactattgtaaattaatcagagttttaggaaggtccagtggggaaagcctgaaggtttagacatctagactatccgatgggtagacagtttctgtttgggatgatgaaaagttctagaaatggatgtaaacttaagtggttaaaatggtaaattttatgttatgtgtattttatcacaatagacacacagactatcaaaattagactacattcaagcttgatagtctgtgtgtctattgtagtcctcatccactacacaatgtattccttgaacactgcgtaggctatgctcactgccacatcccagcttcctggcatattgtaagacacatatttaatgaataaatttatgggttgttaattttttttgccaagtacttgaagttaatgttcaatttctttaaagtaaagaaaatagttctactgcagaaagggatgctattggctcagtcagtgaagaaactatataaattagaaataggtgggatatggaaaaagaggcaatacacattctagaacattaaatgttaattagaaataaaagtaagctgactccagtatttgagtgttctcatatccattgaacaggccctaagagcacagaaacacatggaaatatctatatcactgagcaactaatagcaatgacggatattgagtcctttccaaaagcagagctggtgctttgggaagacagaagttcattatactaattaaaggctcttgccctacctcctcagagaatgttctcttgggtagatatcaaggcagacacccttgggtagatgattttcaaattaatgactca

SEQ ID NO: 58561 - DNA, 928 bp, Bovine  19866881127974
  misc_feature (1)..(1): n is a, c, g, or t
nctccccttttatacttaagttgtatgcacctcactatgatacgtgggtttcctaggtggtgtagtggtaaaagaatctgcctgccaatgcaggagatgtaagagacacaggtttgattcctgggtcagcaagatcctctggagaaggaaatggcaacctgctccagtattcttgtctggaaaattcgatggacagaggagctggcaggctacagtccttggggtcaaaaacagttggatgtgactgagcgcgcgcacacacacacacacacactatgatacaggacagttttttctgtttttgagtaactccatagatgagaagattgtttattttgaactgacatctacttccataatgtctacccactggtgctaaatttatcgtctgtattgtactgttagacacatggtaaacctcttaaaaggtctaggcgaactgaattggttcttgaggttttcttcttgacttacagtttcccattcttttcttattcttcccatgatgctgtcctacaaaatcttcctttttttcttctttacttacatgtctatccctgtttgctctattccctctgttcctaggacccgcagaggaagatagaaaaaggaatgaatggaggatattgagtaacttatgaaaaagagttagtgatgataccaattctcttcctcctaattcttctgtgagaaaaggaggttcatatcaagttcagattccaaacagatgtgttttccaggggggcttaaaaatacaccagcacaaaatatatatttctgctctttaaccccagcctgcaaacattacaatgtttaccaaaacctacattagcaaactactgtccacattaatgctataatttactgatttaggctgcctaggaaaatcccaggacggagaagtcggtaggctgcagtccaggggtcg

SEQ ID NO: 58562 - DNA, 1982 bp, Bovine  19866881143152
  misc_feature (1)..(1): n is a, c, g, or t
naaaagtttaatgtgtgtgtgtgtgtttagacaggtagtgagaggacggggaggataggagcttttggaaatgagaggtatgaggataaagacaagatcattccatttttatatactcagttacatcttcactcagcaaattcatcaagtctgtcttctcctcctcccggcctgctgcagtcatccatgctctatgtctcttcaacccagaagagctgaacagccatggccttgctctagggtgggaagactagctgtcttcccagacttggcttctagtgagccatgctggtcatttaatgtggttgctgactcagagcttagcactggtgatgatgacccaccagagggagtgggctgatgagaaccaagaaaaggggtcagaaatcagaagccagaagatgaagttgatccatgtgactatcttggagctcagagtggtcttggtaagaggaatctgtgaggtgaaactctgagtggaaataagggagcagactttatgagtcactggtcattcccttggtaggtagtctcttctggcatgacaagcatggggttaggtgagagttgaaaatggttggaaagaaatgaatcgaatcaagtacaaaagatagtggacttgtagtaaagactggggaacagggagagatggggctaaagaagtcatctatttcttcaccaagaggctgtaatagttatcctctgattgcagtagcatttattcagggaaatcaccttctttgattttcttgtttaatgtctcctaatcattatgttgtgcaatattgaatggccagaccggcaaactcgggatgttcttagggaactagcaaagcatgaaatttttttagagatgtggatggacctagaacctgtcatacagagcgaagtcagagagaaaaaaaaacaagtatcatatattaacacatgtatgtggaacatagaaaacttgtacagaggaacctattttatgccaggaatagagataaagaatggacatgtgtacatggggtaggggtaacagagagtacagtgaattgggagattaggattgacatgtatatatttggacatgagtttgagcaaactctgggagatagtgaaggacagggaatcctggtgtgctgcagtccatggggttgcatatagtcagatgtgacttatcggctgcacaacatctgcttggtaatatttaagtgaaaagagagatacaattgtagaaatatatggtgtatcatgatgatgataaggactgaaggccaagaaaaatacaagcagggaagagagagaaggagtgttggggagctgaaattaccattttagttaccatgacccaggtaggaaagacctcatcataaagctgatggtaaatctatgagttagatgttatttctgccttatagatgaagcacctgggctcagagaggtgaagtgacttggctgaggtctcatagggagttaatgactaagtaggtatttggacccagatctgggcgaccttgaatgtaggctgtttctgcaatgctcctctggttgtagattttcatttgtaaaacatagggctgggctcagtcaggacacatataacccctttgttctgactctgacatgcctggtgccagtgacctttcccaaaggtgatagaacacacaactgctgtcaatactagcgaaaatgtctcatgttatattatccaccttctcgctcacattggagtcattatttctggttagagatttgctctgaaagttagatctttaacacatagacacaatactgaaaagtgaaaatgacagagccttcctgttgctgcatgatgctgttaaagtgtagcagtgtggggacctccctgttggtccagtggtcagcactctcctcttccaatacagggggcacaggtttgatccctggtccaagaactaagatcccacatgcctcatggtgaagccaaaaggaaaaaaaagtaaaaaattgtagcagtg

SEQ ID NO: 58563 - DNA, 1213 bp, Bovine  19866881180148
  misc_feature (1)..(1): n is a, c, g, or t
nctttctttttagtttgcttgtaaaacctgggagtgaagaacaaaactgaggttatcaaattgctttcaggaacagctggaaacaccattcagggctgtattctgtttaatgcttagtgccctttcacagggaactaagagaaagatgagtcttggcatatgttattttctgcatgaaagcttaccaagatccctggtgtatttcagttgcaggagtgataggcaatagcattttatcgtctctgccataccgtttggcatttgattatattcagtttagtgcttcatgacatactgcctttgaaaatcttccctctgatgaactctcaaaacatttaatctttttattcaattttagcacattttattccatttaccaagttttattcaatgaacaggttttatcttgtagaaaatcctacttcttctaccagactgtaaactccttgaagtagggaagtatatcttacttacttctatgtttcctggacctcatccagaatgtcttgcacacgaaggtagtcatttgttacatgaatgaatggaataaatgagaagtatctgtttaatatattgtcttctaattgtcttagattatatattttctctcctgagattggaaatttcaggaaagcaaagcctaagctatcacatatatttgtgtacctaatacctgctaataaactctgaagaatggcccttcattaaattatttaaccttttgttttgaaagtaagtttagatgaaattatctgaacaggatttattaccaaaactagtggttaaccttaaactatgaacaatggtttaaagattttgcttttgtctttagcctcatttatgataataagtgattgttacttaaagccacatcacttccacttaccacttccaattatttgataagtacttataatggaccaggcatccttctagctggtaaactttttaaaagagtcaaattccttgcctccatagaacttgcattctaatgtgggtggtgggagaggaaataagtgaaaacgatgttgttgttgttcggctgtccagttgtgtctgactctatgcaaccccatgcactgcagcacaccaggcctccctgtccctcaccgactcccagagtttgcccaggttcatgttcatgcatctgtgatgccatccagccatctcatcctctgatgccctcgatctttcccagcatcagggacttttc

SEQ ID NO: 58564 - DNA, 809 bp, Bovine  19866881180819
  misc_feature (1)..(1): n is a, c, g, or t
nttggttttgtattttagctatactctggggaagttcttgaataggtcctgccccaggctcaggctgctatagcctgttctcaaaataaatgtcaccttgcttagatttatcttctctaaagtctaactgtgtctcccaccactgaggtaaggtcataaagctgagctctctggtagggaatactgttggcaggttgttataaaccttaataccgcaaagcttaggcatgcgtctcctgtaaagtaacccatgactgtgtttcaactcccagaaaataaaagaacaataaaaaaaaaaaaaaagtggcaggtaaagagaatgcttactgacaggtctacgaatttaagtctctactgtctagaaacttctctgatttggaggctagcaagttttttgtacatgcggaaagagctttgcagtgttaaccattggcctcagatgtcagaaaaaaaaatttactgtgagaaatatggtttacagacatttggggggtcattaatctaacttttctttagatgcaagcatcaaagtctcaggattgaggattacctggtaaacatacctcaaaggcctgatttagataaatgggcacaaaatgcctttagctgaaattcagctgctgactccagccttctccatttttctttatagctccaggctgacttatctcccttctttcaccccacaaaccatctgtcaccggagtattaccaagtgctcccttctagatccttaccctgagcttcgcatcatctaaactggccgatatatttccttctggaaaccacttgttatactggaccctcag

SEQ ID NO: 58565 - DNA, 654 bp, Bovine  19866881200666
  misc_feature (1)..(1): n is a, c, g, or t
nctctggagcctgggtaggtttgtttagtatccagtataacaatattcttctctgaggcacagcctaggcagatttatgctcactgtaaaagattcaggttccctaggcttgggatcctctcctgtaatgcaacccactacatgtgcccgcatctcatggcctcccttgttttatcctgtggaaactagaactcagggaaccagtgaaaatgatgatactctggctacaaagattagtatgaatctataaagttgctaggacttccctggtggtgcagtggtaaacagtcttcctgcaaatgaaggcaatgtgggtttggtccttgagttgggaagatcccctgaagaaggaaaaggcaacccactccagcattcttgcctggaaaattccatggacagaggagcccagcaggctacagtccatgggtgtctcaaaagagttggacatgacttagcaactaaacaacaataaagtttcttttccaggaatctcagatcttctgccagtatccatgacagcacagcagggtaacttgcaagtttgcaagtaagaaagaaatctcagacttttcacagtcttgacattcattcccttgcttaaacctgctttacctgctttcagtggcatcccatgcatttaggataaaactgcta

SEQ ID NO: 58566 - DNA, 1842 bp, Bovine  19866881314468
  misc_feature (1)..(1): n is a, c, g, or t
nccctatgtaacaactatgccctgcattcctttggtaatcccctttgaccagtgcctaaaatacaattttgcctattgtaggtgttggtgaaggtatggcttttctcttgtttccaggggaattagcaagtgtttatcgtgtcttcctatgtagaacaaacatgtttcaggagtatttttaatcctgtcacaggttgattcatctttttaaataattttgcttgttcatttttggctgtgttgggtcttcgctgctgggcaggcttttctctggttgccgtgagtaggggctagttgcggtgctggggcttctcattgtggtgacttcttgtgtgtggagcgcagccccgagagcgcacgagctttagaagttgctgcacgtgggctcagtgggggtgacttccgggctcagaagtggtgacttccgggctccgtagcacaggctcatcaactgtggcaaagcggcttagttgttccacgtgatgtgggatcttctcagaccagtgatcaaacctgtgtctccatcagggaaacccggttgactcattttgaaatagtttgtttaaaaaaatttaacttatgtgtaaaaaagagttccttcaggttgtaataggtagatccagaccttctattttatgtgttatggaacatattattatgtgctatctcaagaatatatatatatatatatatatataatttttataattagtaaagccagggagtagctttttaagctagaacttttgtgaaattactaaggacttagtatagtactaaatactacattagaactttttattactgtttgtgaaagtgttaaatatttaatgtggtagtaaatactgtattgctatatgctaataatattatgaaagttccaagcttgagcataaaggaagaatagatttttggaaatgcagttacttgtgttttgagatttaaatcacagatacctcacttttaagaaatgtttttgggggagctcagggggaggtgcagggtgaatgcctagaacacatatttaagccttcagaatcacagagtatagatcttattcagtgtaagccttatgactgaagttcgaattatcccctcaggttttccttgagcagaatgtgaaaatactatcaatatttgcaagagtaaatgagtttaatagtgcacactttaccttctaaggaaaaatgactatagactctttgcccttctacctgtcatggcttttttgaatcgagatgccaggccgtctcccatcaagcactctttcttagcaatatatcatctgacagtgaaactgtgtgcagcattcaagtttgaaaatcattggtaaatttgggggataaatggaggtaggtaaattggggcgggggcagtttactgcggagttaaaattaggaacatcatggaaaaccggtcgcaggctcagattttttcacaaacgtcctcctaggcaccagaccttcctgctgccatcctcttaaagccaaaggacctcagggaaatcactttgctctttggacctgtgcctcctagtctgtaaatatatagatgctcagttagataacctcttagtccttcccagatttaaaagtttccttccaggcctgaaggacagagcatattatattacatctaaatactttctcttcagtcattctagggaaaaaaaaaaaaacctataaaagaaaacctgtgcaagcctctgaaacacttttcccctgacccagttagtgggctgtttcagttccttttcatctgctagagactgaatgactttgcttgggttcagggtcattaagctaaactaaaaagactgcttttaagaatgctaatttacag

SEQ ID NO: 58567 - DNA, 1828 bp, Bovine  19866881329470
  misc_feature (1)..(1): n is a, c, g, or t
ngagcctagtggtcctcgtccatgtggtggcaaagggttggatatgactcagcacgcacatgctaaaataaggctggggcatgttttcctcaggggaagtctctcctacttgttcactctataattcttttagccggtgttctgacttctgatacaattttgtattattgactaagagccccatgtgggtgactctcattttgacaaataaccttcagattttatttttttaatttttggaccacgtggcatgtaggatcttagtttcccaaccaggaattgaacctgagccccctgcattggaagcacagagtcttcaccacaggacttccagggaagttccaacctttagttatttaaagagagggaccctggctcaagccattactattgtatgctgagcaggatctggctctatttccaacctcagctggtgttcttcatctaagacaaactggtttcctttttttactgggaccccatgctccttctccatccgtgttctcatttaggtttgtgaggttagaaaaaccttatttttttgactcagcctggaatcttctcatggagtacctttttagactcttttccatcccaactcctacagaaaaccccaaatccatcaatacatacaaggtgcgtaatatggcatttctttgttaatactacttacagtatatcattttctacacattttattatttgctcatcaactcatactattcttctttgctaccagactgaagaccccatggaacaaaagataacatccatattccttcctcccactgcctggcccaatgctgaatgtggtagccatcaacaaacacaaattaaatactagttgaaattcaacaggagatctggaaagtcattacagaaagcttgctttgacagtcttttctttcaagtacagaacttttggagaattgttattctccaaaggcacaggtatgtcttactgatgtggcagatttactttccaaataattctaacatttcagatcattacctgagtctgccatcctctgccgcagcacctcccggtataatcttcgtaataaatatgccagggtcatctccgatgtggggattatctgtccctccagcaatactgaatcccaggccagaatttccctgtagaaacaataagtagacattaaatgatgtggctctcatctaaacccagttctccttgtactctgcgttatcatcttacgactcaaatggaaatcaggtgataacagccttgtatgcaaagccataaactgcaccatcagcagacaaaggaaggtcagggaaaacactcaggcttgtccctgcattgcaagaattcaagtgctttatgcttctgcttattcaaagggccttacattttttgcttctaagaaacgcagcctttattagaaactaaaatggtcatgatgaaataaaagttgacactgtgcaatatgagaaaatgcaaaagataattatggtccattataaaaattgtacacacataaaaaaaagaacggacggaaacaggttatgtgaaaaacatttgatttgacggagtagtgaaatttgggtgtttccattctgctatttctggtactgttgctctaatattgtttatccatcaaataagtgtattttcctatttgttaataggaactttgacttcaggaggcaacggccccttctagagtcatagcaaatgtgagacactttgcagtaaagtagctcttaatttgctatagatacagacaaggaatacattattgttgcagcatgtaaatttgaacaccttatattctaatatagctttcatacttactcctgtaga

SEQ ID NO: 58568 - DNA, 1110 bp, Bovine  19866881407795
  misc_feature (1)..(1): n is a, c, g, or t
nttacaaggtcttaggattaaatgagatgagggcatgtcatagtgtttgagtgaactgctcaataaagaggcactggcaacaacaatttgcagtggtcgtctttccagcccactctgtccctcctccatcttcaccatttctctgatcctttgcctccgtctccctccctaccctgcttgcagctgtgccttggacttttccaaggtggccatccattctgggacctcggaacagctgctactgtccattttgctgcttgcttcccctgccaggtgacaggggagaacggcagggctgcatttagcatggacaaacacctgtcctctctgtcactacagccagacggacactggcgctgagtcatgctgctgctcacgaccgatgagctctcagaagctctgagagagagacctgagaggacaatctgtccatccctctctccaggtcaggctactcttcaatctgccaggaggcaaaaatagacacaggaagattctatcattcacggagaactgaagaatcttcaacatcaggacatttcttcttgtgcctaagctcaatttcagattctgcatttaaattcacttcttatatttatctttcataggtaaaaataaacttgatatctaggtcactgcaaatatatacatatatatagtataatatacagcatacaatatgcagtatcctgtgtatccatacagagtactgcttactaattaagagactgagctctatgattagccacccagtctaatcccagccacctactggtgatgtggttttgttctaaaaattaataagagtgatgttctcactagatccttgtataagcacagttctcagttcatagaaagaattcaacagatgttaactattgttgttgtttagacatataaatacatagtgagaagccagggggcttcttaaagatttgttttgcaacctaaatggctccagtttgattgtggcttttaatcagtttcttctataaccttatttttcattttctatttatttactttcctaaattccgaaccatctacataatgctcgttgactccagtcagcacaggaaaaaatgtatatcttagaactaatagatttcc

SEQ ID NO: 58569 - DNA, 963 bp, Bovine  19866881476258
  misc_feature (1)..(1): n is a, c, g, or t
ncttgtatatcctgagattacttggccagatggtgatggtgtgtgattggcatctcttctgggtgacagagaagacttggctcaatagagaggggatctgtagttgtaggtaatgcacaaagttggcactgctcataagtaaccactgattgattatatctttttgtaattgttaccttcttactctatcataaaaaaaggaccatcagcttagagaaacagaatgaacactgaactgggcattcaaagataagggttctaaatttgattctgtaacttacaagttgtgggacttacagatagccaacaaattttgttagactttgtgtttcttgcccaccaaatggagaaagattagactctatattcatttatggcccttccaactctgatagtctataattctatgagccaaaaaaccatctcagcatcattgtaatagctttattttccaaaaattgaagaccagagtatttacataacaataattttgatttataagggactcagcagagtttctactaagagaattttatccaaggcctttttgtttagacttcctttctctacatcaatggaaaaacaaaatttctcagcttactcaggtacacatatcctgaaacagtaaaagaggttaaaaaaaaaaaatccaggtacgtcattatagcatacttctaatcaaaattctttttataaaccctattatatttctccagcaaaagtgaatataaatcagcaagattgaaaatacttctcacaacagatagagtaagatattatgaacatctggaacaaaagactgccaatttgatataattatatagatagttggaaggttcccatttcacagaactgttttcctatcagcccaagtcacaccattaaagattaattctcttgatttactattttaggaaaataaaaacaggccacaaaggtaagccactatagtgccttaggaga

SEQ ID NO: 58570 - DNA, 1537 bp, Bovine  19866881519154
  misc_feature (1)..(1): n is a, c, g, or t
nagaagaatgcataaccgttcatttatttttaccactgttttagaatgtgtgtgtatctgtgtgtgtgtgtgtgtatatatatatatagagagagagagagagaatacacacacacacccttcaaatcaacttgggaataatttttaattctccaaaagagtatttttaaaggcttattcactttagggaaacatgttgctgaattggaaaggggatcttttttttttttttcccacagtggaaggaacttaaaatttaagatacacctgaacttaaattatagttcttctacttattattatttatattcagatacccatgtctcccaacaaacccgcagatattgtctctctctttcatgaaactaaatagaaagatcagtgtaagagaaataacctgggttcagatcccagccctactatcttgcacctgtgtggacttgaatatgttgcccgatttgccttgtcttcagttttcttttaatgtatatcaaaaggagatttagggcgtaataatatacattgtatgggctgtttttaggattaaatgagttactacatattcagagaaggcaatggcaccccactccagtactcttgcctggaaaatcccatggatggaggagcctggaagtctgaagtccatggggttgctgagggttggacatgactgagcgacttcactttcactttttactttcatgcattggagaaggaaatggcagcccacttcagtgttcttgcctggagaatcccagggacaggggagcttggtgggcttccatctatgggatcgcacagagtcggacacgactgaagcaacttagtagtagtagtacatagcaagagcaaagccagctgcttttcccagtaagtgacatttaaaaatatatattattaaacataagtcatccagttgtgaaatgatgtcgtagttatcagagctgagatggcacatttgtggacactgtgcctcatctctttatcttgtcctggaagcccctgatgtgctgtaatatgataatggccaagtcttgctcctggaggatccttagagttacttttccagacaacctagagagaagttacaacttcagtgttatcaatggctttcccagggcttaatttcagaggtgttagattgaagaacagggaatcatttttatctacttagtatctggcctccccaagataaaatgaaagcatggaatttggtatcacataccagtgaaaagtgaagcaactttgcaattccatctctgtaaaagaaagattgggacttgctctttgatgaagatagaaggtctaagaacaagtgcccttactgagctcagcatcatctgatagtgtttcaaacaatgccaagtcttaatgggagctgaatttaacaaaatatcacagtcagcttttatcaaggccactataaaggagatatctcagaaatgatccaaaaagtgtgtgtgtgtgtgagagagagagagatggatgaaatgatgagtacctgctgaataagcaatgagataatatatgcagcagt

SEQ ID NO: 58571 - DNA, 675 bp, Bovine  19866881643649
  misc_feature (1)..(1): n is a, c, g, or t
ntgagtccccctgcctccgagtaattttaataaacaaaaacaagcccacaggctgtcatgtaatatagttcatcgtctggcctattcagtctagtctcttgtcccccaaattctcttcctctttttggatacatccatcctattgaatactgctgcagtagtgctcagtacaagaactgatgttataaacaaaggaaaattggaagtaaagctagtttaaggaaatgttttggaattagggataaatttgcatgtatattgccatttgttacagtgaggaattcagacgtctgccctgatattagcatatttttgatatgcaaatttgtcataattggagaagccattttcataggtactaagtaagagcgatgtaaatcttgactgggccgccctatggacgtgattctccgcttgtttctgcagggagccccgcaaggtggtcctgcataaaggctccactggcctgggcttcaacatcgtgggcggagaagacggagaaggtttttttgtctccttcattctggctggtggaccagcagacctgagcggggagctccagagaggagaccagatcctatctgtgagtattgctccttaatctttattccctccatgtctgacaccatctgagagaaagtcccttccagttataactccaaaagcaccttcatt

SEQ ID NO: 58572 - DNA, 1245 bp, Bovine  19866881671888
  misc_feature (1)..(1): n is a, c, g, or t
nattagacattcaccttgatgctgggatggttccagaaccctgccctcctcactccagcccagtcagtgagccctagtgcattgtatgaacaagactgtagatgcctcagtagaaggctaagcgtaggcacactcaggctgactgaatcaggatctttttaagttccaaagaaaatcaccgctaaacaactgattgaagacatattgatggttacgagagaggaaaaaaaaaacaggaagaacaaatccactgtagaaacataaaactttgattcttagtgcctcagcttcattctacccttcattttacaaatatgaaatggaaacagagaaaggaagtggaatgccccagagctcataatcgttcagtatcaaaacagaagataggataacaacagcaacaagaataacaataagaaaatattaagcacttattgaagacgatatgttccagtggttgtgataaacacttaagatacatcagtgtatttacttctcaaggtatcctaaggaaaaccttatcattatcattaaaaataatgataataataaggctcaaagtggctaaaccacttgcccaaggtcagaaattctaagaggtaccacagtgtgaaagttgctcagtcgtgtccaactctgtgacaccatggactatccagtccatgggattctccaggctagaatactggagtgggtagcctttcccttctccaggggatcctcccaacccagggactgaacccaggtttcccacattgcaggcggattctttaccagctgagccaccagggaagcccaagaatactgaagtgggtagcctatcccttctccagcaaatcttcccgacccaggaaatgaactggggtctcctgcattccaggtggattctttaccagctaagctaccagggaagccccatatcccgggtgtccaatccaggcctttccaaccccagaacacaagctggctcctgattccttctcctgagattttccaggtaagacttaaaaaaaaaaaaaaaaaaatgcagttattttctgccctgaaaatggctagtttctctttcccagtctgaagagaaatttctccccatactgactcagattcaattccccaattctctgagggtttctaggtccctatatcactttcaaaaccccacttaaaaatgggacaatgctatttcccagctaacctatttcctaaggagttagctaggggaataacgcacataaggaaagggat

SEQ ID NO: 58573 - DNA, 1232 bp, Bovine  19866881672800
  misc_feature (1)..(1): n is a, c, g, or t
ntaagccccctcctccctgcattagaaccttctgtctctcagcagactctggctatttgaacagaacttgcatgcatcacatatctgatctgaaatcagtgtagatccaggcatttctggaacccatttaagtcagccacaagaatttcacattcctaaatctctctctggtacacagtatcaaccatcaactgctcacatgaggcagatatattatgaagaggccagtggtgaatcaaacacgtggagtgtggttcaggggcggcactgaggcacaggaagagaaaaattcactaattcttgttccccgagaacacagacagcaacagacaagaaaacagaatagccttaaggagatgcctccaagcagtgggtgctaagaaaaggcagacgttgcagttctagggagggagaggggaggggcctctgctgtcctcttttcatagccctggccatgattccccactggtctctcaagagaaatgggtctgacaaaagccgcatggttctcaccacagctccttagccagtttccagaggttttcagcatagcaggcaactgctccccaaagtcagctctgctcccctcttcctggccgagtctatggtgtatcaactctgcccgtctgcacacactcctgacgctcttgcgttggagccaaatcctctgaggagtgaagcaggtggggcctcctgctcaggctagtggcagagctagtttgagatgctttgcaacacaaaagggccaatttaagagacgggattactttccccattccacccttttaaaagcagttacaaatcattttccagatgttgactgtttcactcacctctctctctctcttttttctcttctcatctaaaaaatgccttagtgctggaaaggtggtggacgtctgcccagggagtctgccgagggagcccggaagacttcttaaaccccagtcccatcccacagtccagcttggccgctggtatttgaaattccgatactgaagtgctagtcggtatcttcttttaaaatgcagaagtgagtaaacaaagttattcacactgtagagttaattcttcagctggcagactggaatctgccggctcccccaggccaggaagtgcctgcttacatcagcctttaggcaggaagagtattcaaaaagggatggtttagggatgcagaacttctaagtttatctttttgtgggcaactccaagtcgagaaactaggtccc

SEQ ID NO: 58574 - DNA, 1698 bp, Bovine  19866881824940
  misc_feature (1)..(1): n is a, c, g, or t
nctaaaagaaaacatttttgtcaggacatgaaaattaccaatggttctgttttcacctgggacaaatgaagcataatttgctttgatgcaaaaatcaattatacatgaattctttcttcacaatgctttatttttataacaatgaattctatcaagaaaaaaataagactatgggaatctaagtgatactgctacttaggatggctcagatgtgaaagttttcctttcactcttcctatagctcttttaaccagatgataaaaagagctttggtgacatcagaaataaaagggatcaactgtgccagggtaatcatagtggattcatcagatcacctgcagagggagtgtcaaccaagcagtatgcttgaaagctcttaaaaagaaagcctgtgaacagaaccagagatatgggagaacaagggaaaaagcagagggcaaaagtgtcaaagaacaggagaaggagaagacagatactagtggtactattaaaaaagagattattattattgctcaagccagcaatcttatgagtgcaaatcacttcagtcatgtcctgctctttacgaccctatgaactgcagcttaccgggctcctctgtccatgggattctccaggcaaggataatggagtgggtggccatgccctccctccacggtgtctccccagaccagggatctaacccatgtctcttacatctaacctgcactggcaggtgggttcttgaccactagcaccacctaggaaggattggaaaaaagctattggaggattaatatggcctgtaacccaggaaagactgctattcctatccacttccatccttcaaatgaggaaccaacaggaatgagaatttttaagatgccctctggttgctcagatagtaaagaatctgccttcaatccagaagaccttggtttgatccctgggtcaggaagatcctctggagaatggaatggcaacccactccaatattcttgcctagagaattccattaacggaccattgagtcaaaagaatcagacacgactgagtagctaacacacactcacacaaccttaataaagacctgcaatatacacatttgcaatctgtatttccttattgattaaaatttttcatatcttcattttaagggtacgttaagcagtccaatgtagctgatattcccagatgttttaggctgaagcaaaggtaaatcaaagcaaataacccacaaacattatcctcactccagtgagggacggagctggcagtgagttcacacaattcttattgtgcaaaataagagtctgtatgatttatgttgtagcatcagctgcaatattctgggtcagcccaatttatgaagcacaatacatgttctatacccagaattactgctgactcaaaatgctcagtaaagaagtagctttaagagctggttttattttgtttagactcctacagtgaactcatttccagaactctatgacactttctcagttacagcttcacattttcaccttttaatatgcatattatagataaagaataaattagggctggcatgcataaagagggaggaaccactaacaaattaagtgattggggtctcaattatgtctctcacgcgggatacacatctctcggcttaaacaagaacctgaacctcccttaggctgctcacacctgaaagcagggactgaaaatgcctgg

SEQ ID NO: 58575 - DNA, 1175 bp, Bovine  19866882170707
  misc_feature (1)..(1): n is a, c, g, or t
ntgtatatgtcaatcccaatctttcaatttatccctccttccccccaactaaatatttgaaattctgtaggcaatggaaagcaatcaaagactattaaccagaggaataaggcaatctggtgtattttcaataataccattctggccaaaaaaaaaagttggaagatagattttagagggccaaagtagaaacaagaagactagttacaattttttttcccccccagaatctatgtgattgacaggaaaagccacactgggataagtgggtataaaggaaaagtttgaatctaaaaaaaagtatgtgacggattggatgtgtggctgagagaggaaaggaaccccccccagttttgggtagtggaatgatttactttgataaaatacataattgtgaagtacatagttgtccatggagggaggacaaggataatttggcattcagcttcgagtacattccagatttccaagggggcaggctgagttgaccttgaatttagatttatagaacactagagctagaaaagaattgtaaaatgagggaattcagcttaaactgagataaggaaaaaatgccttacttaaatggaaagtggcgggattagaatttacctctggtttatgactcactgttttccccaccataccatggtccttcttgtgcttctcaacttttcactgaagtgttcatccgtattacaaagccaaatcaaattagactgtgaaaatataaaattatcaattatatatatgctgatccatatcaattccttagattggagtagaggaaaataggaatcaaatccaacatttgaaaatgtgtttttaatgtatagtacttaattttcggttctgcaggggtaccagatcaatctgtagcttttcaaggggagtctatcatgcatttccttttcagacattgtaggcagtgaggacttgaatgattaggaaacattttatgaggctgaagaacacgagcttgcctggaatgaggctggttggagttgggcatttgggaggcagaaagtaacatgaaagaaaatgcaaaggctggaatgagcttgttatattttcaggccactgaggatgtttggagaggagtttgagagcataagaggcagaattagaggcccttcaatgatgcgcattgattctaaagtgacagctgtgtagca

SEQ ID NO: 58576 - DNA, 2510 bp, Bovine  19866880716523
  misc_feature (1)..(1): n is a, c, g, or t
nctggcatattgagtgcagcactttcacagcatcatctttcaaaatttgaaatagctcaactggaattctgtcacctccactagctttgactgaaggacttcactttcacttttcactttcacacaatggagaaggcaaaggcaacccactccagtgttcttgcctggagaatcccagggacggcagaagcctggtgggctgccgtctatggggtcgcacagagtcggacacgactgaatcgacttagcagcagcagcagcactagctttgttcgttgtgatgcttcctaaggcccacttgacttcacattccaggatatatggctctaggtgagtgatcacaccatcgtcattatctgggtcgtcaagatcttttttgcacagtcttctgtgtattcttgccacctcttcttaatatcttctgcttctgttagttccataccatttctgtcctttattgagcccatctttgcatgaaatgttcccttagtatctctaattttcttgaagagatctctagtctttcccattctattgttttcctctatttctttgcattgatcactgaggaaggctttcttatctctccttgctattctttggaactctccattcaaatgcttatatctttccttttctcctttgctttttgcttctcttcttttcacagctatttgtaaggactcctcaaacagccattttgcttttttgcatttctttttcttggggatggtcttgattcctctttcctgaacagtgtcacaaacctccatccgtagttcatcaggcgctctatctatcagatcatagtcccttaaatctctttctcactcccactgtatagtcctaagggatttgatttaggtcatacctgaatggtctcgcaaagagtcggacacaactgagcgactgaactgaactgtactgaactgaatggtctagtggttttctccactttcttcaatttcagtctgaatttggcaataaggagttcatgatccgagccacagtcagctcccagtcttgtttttgctgactgtgtagagcttctccatctttggctgcaaagaatataatcaatctgattttggtgtcgaccatctggctttaagaacatattttggagagatggagctgggctcagattggtggctctgctgtttaatttctgtgaggatttgataccatcctatgagcacactttgggctggcatgaacttaagccaacattggggtttgcagcctttgaagctgctctggttggcatctcttcttcaaaatatagttgttcctagatgtccatgaggattggttccatgacacccctcacctaccaaaagacatggatgctcaagtcccttagataaaatgtctgagtacatctgccctgagtaatcttgggttcaattaaccacaggtggaaattcgtggatgcaaaccccaggatacccagggtggactgtatttctgatctgacctttggatgttctgggttggatgaatggttggtcatttacttcagaatcaatcaacaagtctgctttagcaataaggattaaataacaatctgcctccctttttcttgtgaagatgagctcttcctccttggctctggtgcatgctaattcaagaactttacatggtcatgctgacctcagaaggaaaagatctagttagttagcaaatcaaggaagtcatcgaaagttttctaagtgtggccctgactccagtccttgtatctagagaggtgcttcaggaatgttaaaggagactttcccagactatcagttatcatagactttatggctttaaaacagctctagaaactgtatgcaaatttgaaaaaagaaaaacatgctaatatttagtccaaatttctaaggatttaaaaacactggtcaaatgaacctatccttctaaagagtttcccaccatgtgaattaaagtgacttatagctgtttcacagtttcagtgaagtttatatagtaagtataaaggaagagagattacttgctgcgtggtgtagccaaagagagacagagagagagagagagaaattacagacagcaaaatttaagttgattttttcttcccaaactccagagagttttttcttcccaagctcggaggacttttgtgtctccagggatttaaaattgaacagtcacagagacataaaccttgacagaatgctgtgccaccctgaacaacttgggctgcagggccaactaatatgaataaaattgaggtgacatgtcataagcatctgaaatgaaataatacatttcatttcaaaatgaccggttagtcaaatgtgaactttgagcactttcttttgcttagctatctgtgacactgttctgcgctggctgtcttcccagaagctgcctgaaaaactggttcagaagtagttcccctccccctcatcagccaaccggtacttagtgggttcctgtgggacaggcacacagcaccacacgtggggctccattaagaatggtgatggctg

SEQ ID NO: 58577 - DNA, 960 bp, Bovine  19866880839935
  misc_feature (1)..(1): n is a, c, g, or t
ntgagtgctttcctggcttcttgccttctgtgaatacttaacaatatatatttttcaaagccaactgttctcacattgaggccagtttttcttttgctaataatttcttgacctcaatccaaaacagattgaaaactaagaaagatatattctatccacagttttatatcaccaatagtccattcaatttccactaagagcaatcatttatatatctttaaatattaatgttgacactaaagaacagaagacaatacagcattgagagcccaaattgagtcagaattcctgtggaggaacaagcaaggtggggtttcttcagactggtcagtttggttttataatgctagttgttggaggtgacatgccctacaaggaaatgaacaaatccagagggaatggtgtctgtcaccaatctgtgtgtttggatatacggttaagcaagcgcatggcacattttctgtaattgtcattggtgccatgttaggttgaaaatggacccccctagaagctagagagaaacctggagagaaatgacctcctgcttctcctctttgtttcttgtcgcagtgacatcactgcaccttactcagaatcccaggattagcctctgtatttcctagtgctgtgtcccagagctcaccccaacttggttcttagattaacacagcaggtggctgggggagggcattattaccacattgaactattgaagagattaagtgaatcttgcaagtaatgcagttagtaagtgcaggaggccctgcctctctgcctctgttccctccagttcgtgctgaacgccgtcccacgcaaagcttcagaagaagcccttcagaagatgttataaagattaattaaaaggtagagtctccattttaaaataattaaatataaagccttatccatagaatcagaataaattgttgttatttgttatttgtcatcaggacaaatgtt

SEQ ID NO: 58578 - DNA, 701 bp, Bovine  19866881237459
  misc_feature (1)..(1): n is a, c, g, or t
ncgtggtatgatattaacttaaataccaatctttaagccaactataaataagataaactgtgctctctggtctcaagttttaatagtatcttttctttaaacttaatgcttttatgaagcatacaagagtgactgcatataatctgtgatcatgtaatgaaagaccctattgtgataagcatacgccaaaaaaaaaaacccaaaaacaaaaaaacaaaaaaaagaacaccctcaaaaactagagttaaggttgttggaggaattataaaaagtgtttgtgatgaagatcaatgcagtgaagccaagtcagaatcagaggcaaagacattttcctggataaagaaagcaaatcactgtcagcagcagcttgatttatataacaaaccagtcaaggggtgaggaagagagaggtctaaaatgtgaacactgaaaacaaaaactgactttactcacatcagcatatgactacactgaattatgcttcaacatgatgtggtatgatggaattcagcttccctcatggcagcttgtgtttattctggctgttctgatcacatcttagcatccagatgccattcctctttggtgcttaatgtgtttatgttcacattatcagcaggcattgggttgcaaagatcatattggaagtgatttcattccattttcaaagaggaaagaattatccctttgaatgctacttg

SEQ ID NO: 58579 - DNA, 704 bp, Bovine  19866881476474
  misc_feature (1)..(1): n is a, c, g, or t
ngggtaggaggtgcttttgctggcagataagaccgtgcaatttaggaacttgaggtcccagctgcacccgaatctgcccgtatgttcccattccagttctcaggacctcgttcttttccagttgatgactcaactttaacaaagagaccctgcaaggataggggattcaatctgtgttgtcattcagacaggattagactttggctttgcttttcagaaatcttgaccttgcaagaaaataagggtttcacgcctcgcttttattcttttctttctttttttctcctagaagtcatagaagttttcaggtgctaaatgagctgggaatttaagtccctgagctcatcattgtcttcctttaagttttctagtacaattagcaatgaccaaccaaccaatcaatccaccccattaaaatgctctaaggttgcaaatacttggccactcggagtcctgtcttttgtaggaactttatcacagatatctaaggctaaaatctgagtaactcttttgccatttcactagagccctcttcaccaatggcaacagattcattaatgcctttaaatctaatcagatcagagaaccaattccagaaaactcagaacctattcagagaacccgtccttaagctctgttccttaggagctattcttggaacctcaggcagttgtgtaaggtcattgcctccatgtctgatggtg

SEQ ID NO: 58580 - DNA, 1921 bp, Bovine  19866880443175
  misc_feature (1)..(1): n is a, c, g, or t
naattcttcaactccacggcatttcttagttgatatattgagctcaacagttaaaaaacaatacatttcaagcagaaaaaaaattaatcacacacaaaggaaaacaaaacgtcaggcagaactcaagctttccagatccaccttaaatgtcataaaacaacagaggaatatctacagaattccaaaatcaacaagtttaagccaagaatgtgattaaaggtgagattaccaaatgcatattcttggctaacagacttgagattgtttttaagttattacaagacattgaatatagtttcctatctgatacagccgcacctgttgtttatcgattttatatatagtagtatctgactcctaatttatgctctggccccttccccctttggtaaccataactttgttttctatgtcaacacatcatttcttaattctatagtagaaagaaaactcaagagaatatatttagatgatatgagagtatatctagatgttttgtttttgttgttgagtctctaagtcatgtccaactctttgcaaccccatgaactgcagcacaccaggctctcctgtccttcactatctcctggagtttgctcaaatacatgtccattgagtcgacgatgccatccaaccatctcatcctctgtcatccccttctcctcctgccttcaatctttcccagcagcagggtctctttcaatgagtcagctcttcgcatcaggtggccaaagtattggagcttcagaatcagcccttccaatgaatattcagggttcatttccttcaggattgactggttggatcttatagtccaagggagtcttatgagtcttctccagcaccacagtatcaattctttggtgatcatctagattaaatcatctaattgaattttaggtcactaaaccctcttgtaaactgataggtataaactccagaaataatatctgtccagaacaggacacaggaattccaggaaaaatcatcttctcttgctccttcttggatattccttcttgtcttagaagagctggtctcaaatttgatgtcagctctctggtgtatctcagtaagcactagcaacctggaggttaatgaccattaaataatggatgtacttcaaatgatgtactttataaataacttggggaaaattcaaggttacctctgtgaaagcatcactcttgcttgaattcccataggttttcttaaagtgttattcttgggtgtcatccacaccctggggcttgctctgtgccccctgaggctagctctgtgccccctgaggctgacctgaattttatacatcagtgaattctgtgggggggggggctacaagcaatagccacaaattcctccccttcctatatctgtgctctactacagcacagctttgtggttcttcctatcaagaagtagaatctatctctccacctagtcctcctctttcagcccccggagtctgagtcagcttgtgatttactttgacctttaggatggagcaaaagcaaaactgtggggagttctgatcctggacctgatgatccctaagcttctgctctttcttagaaccctgacagcaccatatgaggaagcctggactcccttccctgagaatcagagaccaaatggagacagaagtccagcctagagccagcaccaactgccagacatgagggagaggccccctgggactcacctgccccaggtgaactgccagatgatgccaccgccggagccaaatgggcagtgacagcgaaagagccacccaggtgagcccattccaaaatgctgaccaacaacaaaatcttaaattccaagaaaattccccagtggtccagtgggttaagactccatgcttccactgcagggggcctgggattgatccctggtcagggtactaatatcccacatgcca

SEQ ID NO: 58581 - DNA, 1935 bp, Bovine  19866880736536
  misc_feature (1)..(1): n is a, c, g, or t
ntctcatttttcttatctggggtgattagttagttatttttagtgcttaaaatatcaaaatctattccatgaaataccagctccatgatgctaatagatattccacatataaacggatacgttatcaaacatggctcatcatttctaagaagaaattattttacattttatgattcctaaagggatctttctagtgactattctaaatctccaaggaagtaccagaatattcagtttttcaatacatctctgacacacgggaagcattttccacagaaaaccctagtgttgtacaaacacgcctggtgcaatgatggtgtaagacagaatacacattccaaaatgctacctactattattattactactgttattattgctaatataactattattcagttattaattattacttagcagcaacaataataatgcaagaggcccaaatctgaagaaatccaagttacagttcaaaattccgagttttccaaacaaaattttgcatgttggattttccttggtgcatctcctctgaattctactggttatagaatagacaacttgaacacagacaaatccctcttccccttgctaattagcaagttggattgttgagatgggactgctccatcaccgcagagatgatgccatggcttttaattaaccatacagggacttgaattgattcaaaaagaaagaaaagttctgaacatgcccactcacctgggttaaggaccaaagaagtcaaagaattaacagctgggggcatgtgtttcctactgagctccttacatgacaacaaatttatacatacaatccatggggttgcaatgagtcagacacgactgagctccatcaccaccaccatgactttgaatatttataactgtctgtgttttcataacgtggggctaataagagcatagtcagagaaagcggtacactcacataattctgaagtgccagctttttgtccagtgccttcctggattatgctattaattccttggaaagtgtgaatcacagtagtttctaggtgatgagtgattttccattattcatgaatgcattcttgtatataaacaacagcctctgtgttgccagcatctgttttattcactggacagaggcccccaccccctgcactctggctctagccctccagcccccctaggtctccaggatgaatggaaaaccagaaagaacccaggccttgggggtctttattgcctctgggttcttatctagactcttccccgtgtgggagtctgggcaagattcaccatcattcctcttctctttcctaagatgagctagatgccttctgagtccaagactgcatgactccatggcttcgggttaagggaaaaatgaaacccttgggttggagggagaaaacgggaatattactctgtcactggccctagctatcttttataactactcagcagacatttactgagcacttagttactaggccgtgggttggacactggagaaatagagctcatgatcaaattgcagagaaaaacacgcgcccataaaataatgcggtgtgtggtattcagtcctgatgcggacatgctaccaaagagattacaaaaggcagggtggttgcagcaggcctcacagaagtcactgctctgaagcagagttctgaaggttgaatgtgtgtttggcagttgagtagggatgggaactctgagtagagagaacagcacgtggaaaagtgctgtgagactcaatatagaaaaggaaatacacacacacacatatagtaactatatatagtaaatcaatctacaggcaatccagaaagccaactcaagggcctcccaggtaactcagtggtaaagaatccgcctgcaatgcagaagatacgggttcagtccctgggttgggggaagatcccctgcagaaggaaatggcaaccgg

SEQ ID NO: 58582 - DNA, 2680 bp, Bovine  19866880787924
  misc_feature (1)..(1): n is a, c, g, or t
ntcaaagatcctgcatgcagcaactaagacccagtacagccaaataaataagtaaataagtattttaaaaataaagtaaaagctctggcagagggctggcacccagtgagcatgtgataaatattggttgagtctaaatccatttatacatctctgcagcctcagctggcattttacttactccctatgccatgacttctggggttcttggcgaaagacagccttcccttggcctgaacatgaagaatgtgagccagcaggacgaagggaataactgcaggatggagagtcaaacgcagggcgagcaggttgacccagatggcaaggagagggaacaggaaggccacggccgcgggagcctggggaggccaaggtgcgtgtcttggatggtgcaggcgggatgctggcccctgtctcactgcttttccgagtcctggcagggactacaaataccttctctgcctcaagtcaagcaataaccccgagagtatgtagcttcttcctcttgaaaaattcacaatttcataaagggtacactttacagaccttacatccaagtttatttttcttctgggcagacacatcaatcttcctaagccctcgtttgcaaataatgagccaaagtcattctctcatccctctgttttccatcttgcaaagaaaggtgatgctgcaaattcatacttaaatttcatgctcagacggtttcccagctggaatgaaggcaccttaaggatcatctgtcttagccctgcatcacagagaggagtctggggccaggagatgttcagttaacttgcttaaaatcacagtcagggggttggaaggaaaggatgaaccatcagaaagaacagctggagccaaatcccagatgggaaaaagatcctggagttccaggcaagcagcactggagaggagagtggcgaccttgtcattttcctgggtcaccaactatagttgaaaatttcagtgctttgtcccttaaattgtccctaagattctttatgtaatctcattaagcaaataaaggttagacacttaaactgtcaaagggtcattagtcatgttctggagactccgagcaggtgaagtgaatccaaagtatgagataagaagatctataactttgccatccattgcattaaatgtgtcatttatcaccatccactgatgcacagtgaccatcctaaaaccagtccatgttacactcatccttttaagaatacatttttgttgctgttggcttgggacagactgacatgatggatgaaagaggtcatgaaagaaaagaactttgaaccaagcaagtgacatggcaaaactgcatctcattccccacttctgtcttctcaagggctctggcccagggatggttcagccaatactgacgctgcccacgaggaaagacaggtctggagaactgaagggaccgtgggaacttctatctcttgacaacagtgctttccacaactccacgttgttaaatcagcaacccagaggagaactttttctaacagaaaagcagctgctcaaaggctttgagaaaattgaaagtagagtaattgatttggcaacagcaacagagtaactgtatcagtcaaggctcgattagagaaatagaccctgtgtgtgaaatagaccctgtgagtgtgcgtgtgtgtaggagggaagggggatttagggggtgactcagactgagttattggattacacaactgtaggaggtggtcatgcaagtttgaagggtgtaggacaggccatgagaagggaagagcagaacatacaagaaaccaacagacctgtgatccaaaggcaggagcttctctctctgcataaaagcataaaagatgttccaactgattaactgaggcccactcaaagaattcccctaatttaaagtcaagaagtatgaacttttaccatatctggaaaattcatttacagaagcaactaggttaatgttgttattgagtgactgatgacttgtccaacctagccaagtgaacaagaagctttcctcaaattcatggatacctagtaaccagatttccagccgagtggaaaaatcaggaagagaagaaacaatcctgggtgagaaaatgcttgaagtccatgatgacattttcaaattgtatttataacgaaagaagagtttcaagagatgtcaaggttccagatacattattggctacaagcagctatattgctggatcagtttgctagtgtttgttaaggattttgcgtttatattcatgagaaacagtagccactactttttttcttataatgtctttcttaggtttcattattaagattatgctgtcgaaagttggatggtggttactgttaggtggggatagagactctcagaagatacaagaggacttgtctgccctctggtagtttttctgttgacctgtgtgctgcttacatggaggtgttcaacatgcaaatacttatcgatctgtatactgatgaagtatgtacttttccatctataggtccaactgtccagacccttcaggaaacagacactcagaaggaatacaagggacttccatggtggtgcagtgggtaagacttcaccttctaatacaaggatacaggttcaatccctagtcacagccagaaaaccaaaatacgtgaaacagaaacactattttaacaaattcaatgaaga

SEQ ID NO: 58583 - DNA, 678 bp, Bovine  19866881375177
  misc_feature (1)..(1): n is a, c, g, or t
nattactacatgttggacatatgccagcacttcaatacacgatcacatttaatcatcaataaatcctaacaataggtgcatgcgtgctcagtcatgtctgactctttatgactaaatgaactgtagcccgccaggcccctctgtccatgggattctccagtctagaatactggagaggattgtcatttctttctgcaggggatcttcctaacccagggatcgaacatgagtctcttgcattggcaggaggattcttcaccactgggccacctgggaagcccaacaataggtactcagtataattttatagatgcaaaaatagagagttaagtagttttaataactttaaaattttaaacccagttccctctctcctcacatccgatggttgttaacacctctgaaggatgcctgtaaagcccttgacttttcccattagttcttattttcacaagaacttgattttattagtttcaggtaaatagagcatcacagccatcaggggcaaaggaagagtcaatcaaattaaacacctccaaggagcttgcaaagagttataataagcaaatagatatcaacagtagtaattagcacacttgtggctgaaggaaagtcaatggtgatgatttgtgaatttcaccatgaggataaaacattttctttcccttgcctgacttg

SEQ ID NO: 58584 - DNA, 1088 bp, Bovine  19866881477565
  misc_feature (1)..(1): n is a, c, g, or t
nttatgttatgatgtatctgctttcttccttgtgttctaaagaaaaatgtaccggatacatgtttatgtgtggccgagtccctttgctgtccacctgaaatgaccataatgttgttaatctactgtactccaaatataatttttttttttaaagaacaatgtaatgcaaagaacagcatttaaattccatggtggggatggagacaaagagagacgtcaggaatgaagtgtgtttgagctgagtcttgaaggctgatagaactgagaaccagagggtaggaagcacaggggaagggttctgagctgaccttgaccttggcagtgggtcagggagggatgagtcagcagagagcagatgaaaagaggaagaaagagagcgcgcgggaatggaaatgtagtttgccggagctcagaatcctctcctttcgatttgattccccgaggaatacagatccccacgggggatggtggtggagaagtggcccaattaggactggattcaaagaaatcgccggtggccctttgtgtagctcattagtgaaagagggactggaggcagcggcagcgtgaggagggtcccggcaaagaccccgcagcaggaggagacggagagcagaggagagaccactgggagaaaatcatcagaactcagtgttccccaactgggcaacttgagcgcttgttatctgcctctcctgagtcgggagatgggctggagcgtgtgaataacagatgaagtgctgtgtagatgatgttgattagaatgaacagtttaacaatgtgcttaaatgaaaatttcagggctggagacccaattaggagtctcattagaggctcagcacaaggggcgccggctttgttctctggatgatttttagggagtgatgcagaacattttaatgatgatgtcacagtggggcgtgatttctggagggtccggcagggcagcgatccggagacaggcagcttctgcagcagcaacaaggatctgagggcatagtgtgattcagcattcctcctgcacctgtttctggcaaaaataatcataattaattttagggtcgttttggatccccctcaaaaagaac

SEQ ID NO: 58585 - DNA, 1280 bp, Bovine  19866880611852
  misc_feature (1)..(1): n is a, c, g, or t
ngggtgatttcctttaggattgactggtttgatctccttgcagtccaagggaccctcaagagtcttctccatcaccacagctagaaagcatcaattcttcggcactcagccttctttatggtccaactctcacatctgtacgtgactactggaaaaatcatagctctgactatgttggcaaagtgatgtttctgctttttaataagctgtctaggtttgtcatagctttttgtagatttacatatgatcaaagcctgataaacagttcggtttatcctaatttactaacccagttctttgagcttcagaagatcccgtcagtgattttgcaggtcatcaaagattcacctgcagcacaattagatgggcaaagtttaagtgtggagggtgctaaacatgcagattcccgggttcagcccttggccaactacaagaaaacctctggtgtacatattttaaaaaatacttatctatttggctgcatttaggccttggttgtgaaaccagacttttctcttgttgcctgctggctccagactgcacggctcagtagttgcagcgccctggattagatgcctcacgacatgtgggatctttgttccccaaccaaggatctaacccatgtcccctgcactgcaaggcagattctcaaccactgggccaccagggaagtccccggggtgcatatttatttttaccaagttccctggaaaactccagaacacactacagtctgggagtctcagttccaggttcggggcctgccactggctcgctggacaaccttggaggaaccacaaaacttctgtttactttgcctacatcataactgcatcatctcccaaatcctccccagttctggcatgatacgattggaaccaaatttaaagaaagtttaccttcttcgcagagctgtaaatatcttctcggttactacagtctaccacaaaggtatgagcctttgcacccagtctcttgcattcggtggctgtttcctcaagtccatgctgcaaaaagcaacgaagggcaagaagaacaagataaatgacatgagcggattatacacgcagctgaaaacagctgagggtattcagattttctggtctaggactggacaagaatttaactgatgtatttgtgacagggatataggcacacttcactctcggtactacaactagtttctctttatttggaactgaattgaaagcaagcttttaaaagaagacaaaagtcttaaaatactgaacgtgcattcatgaatttcacatactctttta

SEQ ID NO: 58586 - DNA, 1004 bp, Bovine  19866880651326
  misc_feature (1)..(1): n is a, c, g, or t
naatttaatggaaactagtctagtctttgggaaccacaagagctttttagggcaaatctgcttctgcaagctggaggaagtgtgggtgtactgaagtcccggtcacaccttgtgatgtcagtcacccccagctcaaagttgattggctgtgaagagctgaaacagtgtttaaattcctgcaccatcagagaagtgttcagaacctcaacccaagagaggcttcattgttacagatttcctcttcaagaacttcagcctgattgttgagcctttgggggaaaagtctttgttaattgaagagggtaagatattttcattcctaaattctaaaaaataacttctgctgtgttgtttggaaaatattaatatatgtacacgtttgagaagcgttatgccatacagagaaagatggggagaactgtgccttgggtaaaaatgatttcatttgtacctttgctgtttatgccagtaaacagcggtattaaaatgacacgttgtcaatagagacaggtgattttctcagtaacactttaattagatttctgcatggtacttctgaaagggagtttatttatcaagaggcagatggaaggtcattttgaagtttggctttaattagcaaaacaaatgaagcttttacatttaggttttatgggtataggtatgttcatggcccacaagacataaaagaatctaaactagactggtagaactttcaaaatatggtcttttaaattcaaaatcatatgatggtattcatccaataatattcttatgaattgagtagctgaaaggagatgctaagaccactgaaataaaccaagggtgtgttacttacactacttttctggtgtttagctggatattcatgtaagcgtgatgtcttacacactatctgagttcaataaatgttcttctgttgtttagctgtgtattcatgttaagatgatgtcttacacaccatcagagttcaataaatgtagactataactatcttttaaaaa

SEQ ID NO: 58587 - DNA, 1366 bp, Bovine  19866880833884
  misc_feature (1)..(1): n is a, c, g, or t
nccagaagcaatttagaatgactggtaaaacgaaaaatacccaaagctcgcagcaacaaaaaaggatacagttctttctggccagcttcctgcttctgccctttctgctcgtctgcatcgtagagtctctcctgaagctttttattcctaagaagaagaaaatcagtcaccggagagattgtccttattaccggagctggacacggtattggcaggcagactgcctacgaatttgccaaacttaagtgcaagctggtcctgtgggatataaataaggtaatagtgcttcctgtgttttactttctagttcctttgatctgtggtgcattttgctggcaacagccccttacagcatttctgttaagtaggtaggaaatagaagggggaaaacatactcaatgtgttgatgttcacatgataaacgaacctagaggatgtaagatttccaggtactgcttatcactaatttgacattgtaaatttatcttcagttcagttcagctgctcagacatgtccaactctttaaacctgatttcactaatccctctggcttttattttttgactgctgggcagcatgtgggatcttccccaaccagggatcaaacttgtgccccaaatagggatcaaacctgtgccctctacatcgggagggtggggtcttaattattggaccaccagggaagtccctgatccctctatcttaccctgtaggaaaagtcatagttttagctggtgtattaaaaaagaggtttgcacctattaagagaaaaatcttacggttactaagtacgtttaaaagatacccaacagaaagcaacgttactctgtcatagtaatttccaagagaaattttgaaatcaccttttagttaaaaacaatgaaaaaaaaaaaaaccaactttcaatgtaattcccagaaaaggtgtacccgaaggaagggagatggacttagactcttaccttttattatttgaccagtgttggatggacaaaggggtttgggagagccacacgatgccaagaaacaccatcccttacacaatatccaatgctataaatgaattcagggggccgagagctaacctggcttccctggtgactcagaggaaaagaatccacctgaaatgcagtagccgcaggagacgtgggctcaatacctgagtggggaatatcccttggaggagggcatggcaatccaccccaatattcttgcctagagaattccatggacagaggagcctggcaggctacagtttatagggtcaaaaagggtctgacaaaactgaagcaacttaacacacgtgcacaagagctacccagtgagtgactgagatgccatcaacaaataccgttcactgtctgtt

SEQ ID NO: 58588 - DNA, 792 bp, Bovine  19866880852574
  misc_feature (1)..(1): n is a, c, g, or t
ngtgacatttcttgcacaacggaaaaagaccatataagtagatagtctaaagtagtttattttacaaagcaaaaagtgcaacctgcttctcagtagcaggattctcaaaaacttagtataaattttatactcagcaatatatctcaggaaattaattataccaaatttatgagtcactatttgaataatataattgattttaaagtattaattgcttattagctcctgtcttttattatttagtttttctttttttactaaactaataatgtaggattgtatctgattacagtaagttttccttcctttaaacatagtgaaaatttgtatgattatgaaaattttaaagagttaaatctcttgctatttattttaattcaaatctagtatatttttatatatattcagaattcaaactattcatcttcatcttaaccttcaattaaattccacaatgcaaacctcttggcacagaaccacagttcatgtttattcaactgagcttgtgtgttgagaaaagtgtggaagttcgggagttttctggtgagaatccacattctgacatcactttggccatgacagtgattggctgtgggaaggcaaaaaagagtttatagcccacaagagcaagtgaatgagtgagtgagagagcagagagagtattcaatctgtgtcactcactcctgggagcctgccttctcactccagcactgcaaaaggtaaggtttaatataacaacttcattatcttataaatcaggcactctgcatttcacatctcctgggcttggtt

SEQ ID NO: 58589 - DNA, 1487 bp, Bovine  19866881042937
  misc_feature (1)..(1): n is a, c, g, or t
ntgcctgcccatttttattttaatgctggtgaccctgaagtcagaattggattaaaaaagaaagactagttgtatagcatccagagaagccaatttccaaggaactttctgccgtccctaaatatgtaatgaagtgaatataatggtacttggcaggactcttcagagaatgtgctgaaggttgtataggcagctgaaagtgaggtgggcacctcccaaggagcatgctcaaggaacagtagaaagaccagtgaacaactatctaaagaatgtaagttttcaggactccctggtggtccagtggctaagactcagtgctcccaatgcagggaacccaggttcaatccctggtcagggaactagagccctcaaatcatatcaaattcatggatgtttcactgtgaactgccaagaggtggggggcataaatgaggataagagagtctattttcacacagagctgattaaaagaccaaagttcataggcggaagctataaattccctacgttctgttccggttctgaattatactccctggtggtttcataggtcttgactgaggtctgtcctagtagaaccttataatcttatgtcagagtggattctgggaaaattttggcaaaggatgttactggacgttgttttgggatctccatattcctgcataaaagcagacagagcaactagataaccaaactgaaaaccatagactacatatacaataaaagtaatttttttagttctatttctgcaagaggggccaccgaaatgagaagcctgtgcctggaaactagaaagtagcccctactggctattactaggaagaaaacccacacgcaccaatgaccacccagcaccgccaaaaataaaaataaaaaaaattaaaaattaatttttaattaaattattgtatcttaatgcatatatgtggaatctctaaagatggtgcagacaaacctatttgcaggcagcagtggagatgcagacaaagagaacagccttatggacacggggtctgggatggggtggggagaggatgggatgaatggagagagtagcatagaaacataaacaccaccatatgtgaaatacatagccagagggagtttgctgtaagactcaggggactcaaaccggggctctgtgacaacctagaggggtgggttggggtaggaggtgggaagaaggttcaagagggaggggatatatgcatgattcatagggacgtatggctgactcatgttgatgtatggcagaaaccagcccaatattgtaaagcaattatccttcaattataaataaatgtttaaaaacttgaaataaattttttaaaaactgaaaatgctttgtatcttaaaacaactctggtagctgggggctgcagtcatctggggactcaactgaaacagaatattcaaggtcgctctcatattgttgctgcctgggagctggaactgctattctgggcacttcagttcccctttgc

SEQ ID NO: 58590 - DNA, 797 bp, Bovine  19866881063897
  misc_feature (1)..(1): n is a, c, g, or t
nacaagcacattattattattttcagccctctcttcaaaaatgccatgcaccgtatgtatttacttttacgaagtaaaaatgataattcctggtaaaagtatgctgtggcagatgggaaaaagatgctttggtcagattcagggactaactataagctaccatggaaacataaaagaacaagagagcacaacactctgacttaaaggaactgactgaccagatgacaaggatgtaccttgtttcaacagtgttaccacaggttggcctgattttctgcagggattcaggggacattttaatatagctggtttatcctattcatctctcttgactacacttgggtgaggagatctgtatcacagggaggtaccccttcatttagatagagaaaaagcaaagtcttagagaatgactgagtaataaccaaactgccagatcacaaatttgttgcaaacatggaaaaccttctcctactgaattgatagagacctctgtttgttaatttttcaattcattagataagaatttgtgaatttccatgtctgcctgctaccactattctaaatactttataacaagttataccactattgaatggactacttaaacggagggtgggtgactccatctaagattcctctgcctgttctgacaacattacctacaacattactaaaacaattaacaacggggtacatattactttgtctactcagcatcttttttctaagaatcatcctgtacatccctctccgcagtcacacgattactgtcccattcctgcactgtgaccctg

SEQ ID NO: 58591 - DNA, 1836 bp, Bovine  19866881128217
  misc_feature (1)..(1): n is a, c, g, or t
ncactgaaaattcaactctcactgaaattcagccagaaagaccacttgctaaagcagtctgtttttaatataataaagtttcttcccaaggtttcttataaagcagagctatacacgcacagagaataaactcatttgggcccgggggagaatgatataacgaaagcacacgccacggaagatcgagttcaggtgttttgactaattcactgacaaagtggacaattttatcagctgttgacatttaagtcagtgatgcagccatgaactgccattttatgtagattcaatactgtcatatagctgttttatatccaataacatagagtcctttaatttacagggaaatgaattcataaacaacaaagaccattacaaaattcctgataatctgtggtttgctcaagattttcttaacctttgacctgtgtaattcactagaataagaatggctcaagaatgcaaaggaaagacaaattcatgaagcgaactaaaaaacttgtgagaaaaacaaaacattcttaaaatttgtaaacaaacaaaaaataactaaccactaaaaataagagtttctgtttatactgggttactacctgtgaagagggttctgaaaactagagggtgtggtgctgattttaaatagacaacaaaccagcattgtgctatttttattactgtacagtttgggttcagggcaccaattatgcaccatctgacccaggacttctgagacactaaaagcagtcaggacgccgaaaactatgcttcagcacagtggcttggcataacatcctgccatatgttgagctaacccatttctaactcatacaatgataggaaatgatcattttaaagtatttctagcaccgtaataattatggggaatgtgtgtagccgcagaaatatgagcatggttgatacaagcattgtgggttttcagaattgccttccattctttggtttgcccataaatataacagtgctcatttgaaatttcgttgtctttcttaaactaaatgataatacattcaaattttggaccacttcctcaacttttctaaaatatcatatagagatattcctatctagaaaattttacagatatatacatgcggtccaattcaaatgtccacactgaaaagatattaggaaaggttatatttttccttattgatagacccaaacttcatagatctttaagcggatctttaatattcaaaattgctacagactgtatgcagataggtctatctcaagcaatgcagaatttgtaaataagagagttgttttaaaatagaattcataacacaacattgtaaatcaactatactccaacaaaattttttttaaaaaagaaaaactaaattaattaaataagtaaaatagaatccaataaatatatcttgcaatctaacagtctgagctagtactgatgatctactgttccactttacaaagtttgatttccaagatgtttctccttgcatgtctatttatatgcttccatagctcttaattactcattttcttaagtctattaagtatctagtacccagattatcacccccaaaatcattaagcttcgttggctttgacattcatgttatattcagatggaatctttgtttatatacaatcatttccaaaataccaatatgcatgaaatatattgattgccaggttgtcaacctattgcagtttatctgcttggctatagaaatggaagtataaataagggtttttttgctattgctacgtcacttcagtcgtgtccaactctgtgcaaccccatagacggcagcccaccaggctcccccatccctgagattctccagg

SEQ ID NO: 58592 - DNA, 1347 bp, Bovine  19866881258289
  misc_feature (1)..(1): n is a, c, g, or t
natttgctgtaagggaaatagtaattattaaaatataatctatataataaaatgaaatcttagaatgatcctaaggaggaaaactcttagagaaatgagttgaattttccatgactcttctcaaacagagaagaggcaaagagaaggaaggactaaaatttccccaaagtgagcatgaggtaaaaggttttccagtcacagtgaaaatagaacttgctgacaaggtcatgatcacatcagacaatgcacaactgggaaaaagaaatttacaaaaccattctttatttttaactatacaacttgggaagtttccaaactatgtctgggaagtccctgcttgcccttgaccattatattgctccttttctatcttctatctcttattcctctaccaacacatatgccaacctaaagctagtgaggagtccacctacatgaggtagctagaatagccttaaacccacagaagcagagtagactggtggttgctgggggttggggggaagagggtaaacagagtgttgatttttgatgggtgcaatgtttcagttatgcaagatgagagatgggtataaaacattgctcctctagttatcaacattgtatcatacacttaatttgttaaaaggctagatctcatgttagaaattcttacatttttaaaggtagtaagaaagcactcagttgtatttaattctagatgtactttgctcctttaatttataatatattaatataattgattcaggtggctcagggacttatcattggtaagacattctttattaaatggactagaacatctgtgctcctaatataaggcaaaaatcctatgcctttttgacctttgaggtctggcattatttctagagaagtctaatttggtacttgtattgaaatccatttaacaaacatcctcatactttagtatagtgaagtaaatcttccctgataacaaaaaggttttatttacaatacaattgatgattctgagtacatcactcacagtggaaaatggaccattcacctgaagaaggatcctatcattttaagctagtaagtagaacaagatggacttgaacccgtttcccaagaatgacattgatttttgcagtaagatatctgtagggtcatttctctacatcatcagaagacacgactccttcctgacattatatctttggatttctctggactggtggcattcatacagatgagtattcaaagttgaacaaaatatacttgaatgtctttgaagcagctttaaagaaatgaaacacacacccaatagaccattcagccctaaacgactctggaataattacataaactccataacccaaataa

SEQ ID NO: 58593 - DNA, 771 bp, Bovine  19866881258583
  misc_feature (1)..(1): n is a, c, g, or t
naataataatgtgcttgtacttgctatttttaaccacctctccccaaaaaacccactcagtacaaacaactgctagaccaactccgtctgggaagagcagatttagaaagaagggagacattatagacagtaccacatatgagaaagaaaatataacgtctcagcccgatacactgcgggatgttgactcactttgcaacaatagtccttcatgaatgtagaaaggaagctagtcttttacgcaatgagttcagttcaaacaaatctctcctaaccctgcgttgctacaggaatagatgtcgccaatgttaatatctgtattggacactctgtgtaattatttttccaaaggtcagaccaaacaatttctcaattagagaaaactctctgtacacatagtcctctcctgtgcaagcaataggaatagttggacaaatgaaaaaaagcaagaaatattgatgacattttaagaataaacacgtagttcctccctaaaaaagaagatatttgcaaacagcacaacctgctcaactggcagaccaacaggctagattcaaacatcccatccatctctcctgagggaactttgagttttcctgaagaaaatttccagttctaaataaatgttccaaacatctctataattacttgttacttttaaagtattatctggctgaaaattcattttacctaaagcatattttactgaccagtagtaacaaatttggtccaagaattttaggtaggaaaagttatataaacatgtctccc

SEQ ID NO: 58594 - DNA, 1431 bp, Bovine  19866881329505
  misc_feature (1)..(1): n is a, c, g, or t
nggaatggcatggcataggccagtctgactggaaaagagatgcccccagcagctgtggccacagttagagggtcctgccaaacggcatccagctagtgagggagagggcagagggggaaacccaactcctgggcccccagatctcctgtcctgcctcctattgactgaatgcaggggagcccagtggtgcggtctgtaagggtcagctgtgaggtgcagagaatgagaattgatctgagaataaagtgagattggcctgcccatcctattgtggagagagtgagcagcagcccacagcaggtggatgagaagccccaggtggcctctgctgggggcatcagactcactggtgtggatagtgttgcgggaggtggtgggaagtgaagttgaagggcacattggaagtcccaagcatcaggatcagagacgcctgatcttaatctgatattcagtagtaagccaattctgtttcacataagccaatgttaatttatttcttttataagccagagaactggggaggaaccctggaagaatgaaaagggaaggaaggcaggatggctgtctgtgtgtctactgagatggtgtgagcgagtgtgccgggtcctttgcacacttcatttggcttgttctgtcttccagtgacctatgggatgatgagctctagtgtgtactactacacccggatcatgtcacaactcttcctggacaccccagtgtccaaaatggagaaaactaactttaaaactctttcttcaatggaagacttctggaaggtatttgcaaatgacctctttatcattgaaaattgttcatttggcttcataaattcaattcagtagtgtctacagatcttgctgtgcacttaacactgggtgagatgctgtaagttatggtgagttgttagcactcctgttgagaaccttgcatgtaccttatctcataccttaccttatttaacccccattgtaactgaataaggtaagtacaaaaatcatgtcccagattgtaaatgaagaaactgacatgcagagtgcttacatgtggctaagaagtaagaagaatggacttctctctggtgtgacagagacttcctcatcctaggttgtcattcattcagtcattcatgatgcactaaatatctgttgagtatctcctaggatataaggcccatgagggcagaatttgattgttttgtctgttttacttctgtttttgtctcttttgttgatggtggcttgtaccccagaatagggattcatgtgcttagtacaaggcaggcatattctttcaaagatctctaatgtaaaattcaacccagcccctccccaaattgtcacaaattccaacattaacattagaggataagctataagcgatatcataggaaaaatattaaactgatatcgaagttatatccagaatctaaga

SEQ ID NO: 58595 - DNA, 1425 bp, Bovine  19866881395308
  misc_feature (1)..(1): n is a, c, g, or t
ncttgatcctaaatttccagatactctgatggaccccacttgagtcagatgcctacaatcgggtaggccagtggtaagagctaggttgcataaacatgattcttggggtgcatcccgataaatttagggtggagggaggacagttcctagtgaagaaggaaaccttatgcattgacactcaaaaagctgcatcttaccgataaacagtgtatttcttttgtagcttttcatgaacgtactatgtgtttgccatcctcggtaaccttgtgaaagaaaaaagcccttggtgatctgaagagtccacttttcatacatcaattactcagttaactggctgccatttgtctcgtcgcagggtcctgacccactctgagctcgcacctttgcgagcatctctcgtgcccatggaacactgcataacgcgcttctttgaagagtgtgaccccaacaaggataagcacatcaccctgcaggagtggggccactgctttgaaattaaagaaggtaaattgatcatcagcccagggagaggggtgctctcttcccccagacaagccctaagccctgcagttcccagagaggtcctgcttgctgtgtgttagactggaacccagaagccacaggctgggcagtgtccccggtagaaccgctgccactgcaaggtcatttcttaatctgtttccaaaaggctgtgccagtgtgctcagtcactcagtcacgtctgactctttgtgaacccctggactgtagcctgccaggctcctccatccatgggattttctaggcaagagtactggagtgggttgccattcccttccccaggagatctttcggacccaaggattgaacccaggtctcctgcatctcctgcactggcaggtggatttttttaaccactgagccacctgttctaaagggtagcatgggtgaatatttaagagataaaggcactgaggtctcagaaattggttaaacctaagaaagtgatgtgaactccaacagctgagtcaaatctcagaaggctacccttctgagcaaggaaggaaggattttatatccttccttaatttgaatattgggcctaactttaaaaattgtatgtgaaactgaaactccaatactttgggcacctgatgtgaagagctaactcattggaaaataccttgatgctgagaaagattgagggtgaagggggtgacagaggatgagatagttggatggcatcaccaactcaatggacatgagtttgagcaaactccaggagatagtgaaggacaggaaagcctggtgtgcggcagttcatggggtcacagaggtggacacaacttggtgaccgaacaaaaacagtgtgattgttgaacaacaacactgaacaacaacagtgtgttgtcaatcaaacagcaagctgattctaaaaatcagaga

SEQ ID NO: 58596 - DNA, 939 bp, Bovine  19866881477977
  misc_feature (1)..(1): n is a, c, g, or t
nagttctgtcttcctcctccctgactttcccttatgttcaatgccgttgccacaggcacttctggggtgaaatgaagataccttccgttcacggtcagttccatattcagtgaagagtgaagttgctgccagctctcccagtgtagaaaccgcttcctgggacaccctcaccattgctgttgttgttattgtttagttgccaagttgtgtccagctcttcggacttcaaggtcttgcagcctgccagctcctctgtccatgggatttcccaggcaagcatactgtggtgggttgccatttccttctccaggggctcttccccacccagagatcaaaccaacatctcctgcactggcaggcactggcaggtggattctttaccactgagccacccttaccatacaggcactgtgccaactcacctggcatggtgaggttggaaggatacagccagttcaagaaatgaacctctcacattgcaattggcaccagaagcacgtgggttgttaatgagaaacaggtttgaaatctatggagacaagacttagcctgcaaaattgattccaacaacagacatgcaaaaaagcagtgaaggaatcagttctcatctacaccttgtcaaagcagaagttcacctctgtcaatagtatactcagtgatgcagtatatacacagttataaagactcagacattattttttcttttttatgagaatggcatactaaatttcaactgcaacttggccggaagtttagctttttgttttaagtgagaaattacaaacccctgatttgatttttatataaagcatagcttgttttataatgtgaatgtgtttaatagataggaaaagttaagataagtatctacatttaaaataaataaaaatgttaacagtttacttctttgcaaaagcagttaggatgagaataaaataa

SEQ ID NO: 58597 - DNA, 1103 bp, Bovine  19866881717667
  misc_feature (1)..(1): n is a, c, g, or t
natgttatggacatttaggaataaaaagttgcctgattgcaaaatgctttattacttacagttctatgtgaaaatttactcaggaaattgtttcttcttgtcatcgaaagactaaagttggtataacattctccactgaagactgtgattttaggataacaaaggcccacatattttatggttatatttaaataaaacatccagtagggaaaaatccctaggaacagaaagcaccttaggtggctaccagggctggagtgaggggatgaggaatgattgctaggggaatggagtttctttttagggtgatgaaaatattctaaaattagttagtagtgatggttgtacaaatctgtgactatactaaaaactgtacactttcaaggaattttatgctatgtgaattatagctcaatgaaaatgtgttaaaaagtcttctccctccccaaaacatagactttcaaagttagtattttcccttttacagttggtctttaggaggagcctagcaggctacagtccatggggtcccaaagagttggacacggctgagcaactaacactttctctttctttacttttcacatttaaattaggttagcagtacttgaaatgggattaaactctcccttttcacttgacccctcagctgtttctcattctttgaatatagtctttgatggcaagttttcataccctggggatgaatgtgatactgaaaatgactaaaactcagtgcaaccaaaaacaattaatgaggtgtaagtataaaatgacactttcttgtgtgctcataaaatatctctgaatgtcacttccaaaaattatttcagaaatagttggaacaggtcagcatatttggattcaacataaaatcatcaatggtgaccttctggaaatgacacatttactttcacttatattttgattattgaaaaaataatgttagtattttatggttctacctcttggtcatgatagatgtaacagcccagggttataatgagacaaatgtgccaagtgaaaactgtaaagatgccctccaactccaggcctactgggttcaagaagtaaatttctttctttctttttttttttctttt

SEQ ID NO: 58598 - DNA, 974 bp, Bovine  19866881849774
  misc_feature (1)..(1): n is a, c, g, or t
nacttagcagcagcagacacacttgaggttcactagtgttacgttccccacaaatcacatattttctggcaggcagtaaaagtagaggcacaccccccttatccagtctggtttgctcttaattcaagtgcagccctcccacagcatcagcagaaagcctggggtattcaccaaggcttttcctacttactgggcaattaactgaaatttttgactccccagactcatgcaactgccaaaagctctgctcaggttcccagcttcttagttgcttgcacccatactgcttcttttttttttgcttttttgctttagactttttatattggagtataattaacaatgttatgatagtttcaggtagacagcaaagcgatttagtcatacgtacacacatatatccattctacccaaactccgctcccatccaggcggccacatgacactgagcagtcccctgtacaacacggtagacccttgggggttatccattttaaatgtaacagtttatacattagactcaactgctttttattccagagggaaaggtacattgccgatgagtataatgctcgatagtggcttgaggccccttctcatttagaagcaaatctcttagtaatgaataacgcactgcctcgtgttgttctaccttgttgctgttgtttcttacaagcttcaacaatctggaaggaagttccagtgctcgggtaaccttctggttgtattttcaaatgatgcgttcatcgttataagtcttttgatgtttgaaatgactgacatcgtgtctcttgttacagagatttaacttctacccaccccaaggagcaccattttcccctcagatcccatttcccacaactgtacaactgcccctggtaagcatgggtttggggaaatctcaagttacgaaaagtggttattagtcggatgacggttgtaacactttgcagatttggacacagacctaaaag

SEQ ID NO: 58599 - DNA, 920 bp, Bovine  19866880355031
  misc_feature (1)..(1): n is a, c, g, or t
ncagtttccttatttcaatggtacacctgcttctctaaaatgatatagctcatgtgtcttttccttgtctttgtttaggtaattactagagtttacaaatattctttaaaatataattgctgtagatttgccaaagaaattccacaagctttattcaacagcttttgcatcatgttatatgcaggatactgagttaattttaaatcattattacctactctcactgtaacaaaatgggaaatattgcaaattatgtaaatattttttttcttgaatttacaataactttttttttcacttcagactctcagtcgccaattttttttattagtgtttcctcacagaagaatggaagcaaccacagcccacattagattatagaaacacaaccttggcattgctactcagcccactggcctcagtgcctgtgtcaagccacccatttacctgtgccatcagtgacattttttattgttgttcttatcctggaaacttgtatattcttgctccttttcatgccttgttgttgttgttcagtcactcaatcgtgtccaactctttgagacccggaggacttcacccagtctcccagagtttgctcaaactcatgtccatggagtcagtgatgccatccaaccatctcattctctgtctcccctttctcctcttgtcttcaatcttgcccagcatcagggtcttttccaatgaattggctcttcgcatcaggtgaccaaagtattgaagcttcagcttcagcatcagtccttccaatgatattcagggttaatttcctttagaattgactggttcgatctccttgctgtccaagggacgttaaggaatcttctgtagcactacagtttgaaagcatcgattcttcgctgctcagtattgtttatggtacaacggtcacatccata

SEQ ID NO: 58600 - DNA, 994 bp, Bovine  19866880406852
  misc_feature (1)..(1): n is a, c, g, or t
nccggaaacgctagggaaaatggattcttcctcacaaccctcagaaggaactgactatgctggcaccctaagatcagacttctagcttctagaactgagacaataaatatccattattcaagccactcagtttgcggtcctttgttacagaaccctagaaaaccaatataccagctaatagtactttgtggcaaaaacaaagtgatattgcaaactaacgagactgatatttaattatgtctcataaaccgtctcagaagaagattctgaggattacatgcaaactttgtatgtaaatacggatataaatgcttccctggtagcacagctggtcaagaatctgccagcaaagcaggagacactggttcgattcctgggttggaaagatcagctggagaagagataggctacacacttgagtattcctgggcttccctggtggctcagctggtaaagaacctgcctgcaatgtgggagacctgggttcgattcttgagttgggaagatcccctggagaagggagaggctaccctctccagtattctggcccggctcgcaaagagtcggacatgactgagtgactttcactttcatggatataaatacatctttatttgtagaggacaaaaggaagatatctgacatatatatataaaaaaaaaacaacattttcactgaaatgttacttttatgattttatcctgatagactatagggcagttctgtctcaaatatgttctaaatagaaagtatagctcccagtcagaaatcttcctttttgtattgttgtgaacatttttcagaccactaactcttccaacttctcaaaatagtttaaccggtgagaaagagactggggaatttgagtttctttttgctaataagacttatgagtcataatcatagctctctgttcaaaaggtgttagccaaatctgcctacagcagaaatcaatggattcatggggaggaaaaagcacagagcaagaaaacaa

SEQ ID NO: 58601 - DNA, 1206 bp, Bovine  19866880503426
  misc_feature (1)..(1): n is a, c, g, or t
ntttttcattattactgtggttcaaatcagatcatatcaaaggagaaatagcttacacttctctttttgaagctagacttcagttcatggtctgatgagatttccactgcagtagtggttgggagaatgccctacgtaaatcatgatgccttcagtaaaaatatccaggtagggtgttgtgccttttggctgtaatctcctcacagagctttctttcttatctcttttttatttctcccccacatctgtaataaaaaagaattccgggtaagaactcgaaagtcttaaatgaaaccttgtgtggagtgaatattcgcgagacattaataataaatttggagatgggcgagcagagattctttgctgcttgcttttgtacctccgcccctggtctgtgaaccgcggagttgactctgacacttttagggaacaaagtgtccccagctctacctctcccccctcgcttcagacctcatctgagaactcctgaaatgaagctgtcactcagggctgcttggggacctgtcaccacaacattgagccttttcattttgatgggtcagcctgcaatccccttgaaagagatgtccctgccactgtggcttctctttccacaggaattctgaatcctaatgaaactccaaatcgctcaataaaggcaggggcacgaggaagtaatccaatgcagatctgagtgaaatttgtattttatcttttttttttttctctcccagaccattattctaatcgtttaggtggttcacaaagcgttggtttcgcagttcaggcacaagaggaatgaggtgtcttttgtccggatggcatgctcagattaggtagcagctctctgaaaatgaaaggccgtggctcaaatttccttgggtaaatatccatccacctagcgtagttggcacctacagtgctacatatacattcctaatgtgcaaagcgctaatcgagaagagagaaattgtcatattttattcccatatttttttaattttttgtgtggctgtgaaactgtctttcaaaaaaatctcatgtgcaccttggaccataaaatgaaggaaatagcattgttactctctactttatgatcagaaagcaggcatgtcgcagctataccctctggagagtgtcgtccaaattattgtttacattctgttgtttcaacactcttcatgtgtttgagatacttatgttgag

SEQ ID NO: 58602 - DNA, 1997 bp, Bovine  19866880506535
  misc_feature (1)..(1): n is a, c, g, or t
ntaattaaatacgtttgctcagcctggataactatgatagctcctgttcagatcaaaggtataaaaacagaacccaggggactgaaagttagtataggaattacttttccaaccctctaatttggcctaaaaggatgcagagagcacatggcgatacatccatggatgtatgtgaaagagggagggatagaattgtccagggtcaggtgtctttctccacacaagactgcttgctccccagtcttggaaccccaggaagcccaaacccagaggccacagagcaaaatttaagcttatataaaacagcttacaatgggagggggagtggtagcaaagatgagaaagtgtagttcttgtattcatctacctgacaaattcatgaaataagtaagatcctaaataaattatgcttgacaacaagcttttaaagtatccaaatttgtatcaataatatcaatactaatgattctactctgatgaggtacataaaaatatctttttatctcttttatacttttagacatggaaattgtttcatttcccacagaggtgatacttgtagttttctgaggtataaaagattttgtttagtaaaagtttttgaaatgaatataataatattttatataagctgaggattactttacagataataattgaaaaacaagtcatctccccaaatttaaaaattcttctttaaaatacagttcccttcaaatgtagttttccacaaggtaatccacagtctttgcatgtttgtatatcactcatctcaatgtcctccataaaagactacatactttgagtattaattctagatcaaaacactaatttttagcattaacatcatgaacaagaaatagtagcactctatgttttatagataaataatttttatttagagttagatcagtttacataaattcatatctgatgaaaggaaaaacataaataatcaaaacactctacagcattcttaagagaggcttaagatcaatgtttaataaatacgatgtgtgacttccataatgagatagcagcctgctcagtttcctatgctacagaattctccgtggaacatctttttatttaccccatacacaaaacaccaaagttagaagctgacatggcctcacataaaattagctctgctacacatcccaaattatgtacgtggagtgactaattacttcccctgcttgtttggctggtatcattagagtacatctcattttactgtttttgcatgtgcttttacatgtttctccaatttgatattatctgttacaaacagtcagctacttacaggctgcttccaaagaattttataacaagcccaggcgggtgcttaatgagcctattacaagggcttcaggaagaagaggcttttgtgagttcctttctgccccctttcgagtttagaaggtgggagaaagtggttgagagggtttcaatgagcctttgcgggtcgatccacctgtgaatagaactggtatgttgcaattagaaagggcgagtggctgtggaactgagagctctccagggaacatctttgggggactgacttggtggccacctaaggttaggggttggggccatctcagagtctgggcagatggattctcaccttcgcatcagcataaattcaagcaagtaactctttgcccaactctaatgctattgctgctctaatttttgaaaaacagaatttagccctcacaatatattttgatgtagataattagagtcagagtgatagtgaaaattcccaggaaatgagatcagaccaaccaacaatccactcctatctatgctgtttaccagctctgcaaccttgagcaagttgcttcctaagcttatttgtgccccagttttcccagctgtaaaatgagtgtgataatcacccctccttagttgttttgaggattaaatgttgcacgtaaattgcttgttttgcaaagatttcttatgagctgtgactggggatccctggggat

SEQ ID NO: 58603 - DNA, 828 bp, Bovine  19866880506983
  misc_feature (1)..(1): n is a, c, g, or t
nagcaaagggaggaaagaggagaagtaggaaggattagagaatgacttcttttttctcttgtggaagtatcagttttctctgacccaaaggagagtgctttgtcattgttttctttataacattgatgaatttctttttgagtgggtattgggctttatttaaacacgacaggaacagagatttatgggcggtcccctcagaggctgtctgaaaggccccacaatgcttcagggcacagctgtgatttcagcgttcacttctggtaaagaaccaacagtttcatacattccaccccttcatcctgattagagagctctccttgaaaaatgaagtatacttgatgaaattcaaagcaaaggcagaagagaggataggaggtaggtttttgtggagtttttgttgttttgttttgttttcaacttacacattcttagaaaaaactgtggtattcaacctgtccttgtgttttttatagagaaaggcaatattgtggatgacaaattgtattctaaatgccattatacttctctgtacaatctgatagttctaaaattatctcgctctctctctgtatatacacataaaataaatgtttcttagtgaaagcaaaagagtgaaggtaaggacctggacacaaactaattactatgaactgtaccataatttacaaaaccgtttgatttcagattgcctatgttttcaatttttcacaattttgcatagcatagaaattatattttgcacataatattttttcttctattcccttagtcagtgttccaaaaggtatcctaacttggtatgaacatttttaagaacatttggtt

SEQ ID NO: 58604 - DNA, 1870 bp, Bovine  19866880511696
  misc_feature (1)..(1): n is a, c, g, or t
nataaaaatgatcccactggggagtgttacagcacgtcttagatatctcatactaccagtgggtgaccttcagtgaccaacaagtttcaaggaaggtgcaattaagactatgtggccctttctattattcttagaaatatatcagcgtaccagtgaaagaataaaaagattaaggataaccttgaactttcatgtctgaattgaccagttgatgattatcaaaatccatctccccaattatcattaaaaaatcattggcaaactttggaagtccaacgggttttgactgcaaacatgcaactgtcttgcaatctgactcataaccgatgaacggcagtgctccactgtgacccactgggtcggactgtttccagtggttcccagaggggctgagacaggcaccagatattgaagggtgtgaaggacttaaaggagcaaagaaaggccaagagttacatgtgtctaaggggaagggacaagctgaacagtatggagaagtctcgaaacaacaaaagagcaataatggaggctgggacccaggacaggggcataacaacagggaagaagctcaagggatgtggttgaagccaacagaaagagactaaagtgctggacttttattccttaagctaaagtaatgagttttcatttaaacttctctatttcaatgctatcacataatatatttgttatattttattttattgtttactgttttggtgtatttggagggagatgagcactgaggagacgtgtgtggtaaagactcagagcatatcaataactttacttagcaggcaacagcaacaaacaggaattggaaaaacaggatctgttgagccttcgtgttatttaccacttactggaatgttggctgaaaaacagtaaaataaatatttcattttacccagcatcatttaaaaagtaaataagacacagagctcttctaagacaatttctgtggcggtatggggtagctataatgggcttcaagccgcataaagtttaagctaatattcttgggcttacgagtttacacctccctctcccctgaaacagttccctatatgattcccataggtaaaatcatctcagtgggtttcgcaaagcagtgtaaataagtgcaggtttgcattaaagctccgactacatattaaaggcaaatcaacagcccttactaatagagatgttcaaaaaagataaaacacctcaaagcccaggcgctgggtttgtgctgctatttcatgtcaaggcaattatagtgatagtattagggaagatgagggcgggagtggtgttgtcatccagggggaagggaacgcgagcctttaagtaatcatgtagagcatgcagaacatcttagagctgggggaggaacaaagctccacgctgtcggagtattgatccactccagaaggtgcagggagccgcccggccgtgattgccttccccgctgggtttagagaggtctgaaagaatacagtattgatctggccccgttcctgagaagtaacttagaagataagccctgactggagcgccaccaaccttgagaacaaacctgttgcaaaacgcccctctttgccatgagtccgacgtcagcgctaatgctgtgggggtgaggatgagagtgcacttaaacccagtctgagaggagtcgcccacgtgccttcttccccacctggctctccccaggggtctccaaagaccgaaactgtcagaacagtattaggagtggaaggaggggaggacagagctgaagtcccatttgcgaaggaagaaagattggcgtttctgaagctttgtgtcagtttttaaagtctgagtgtttgctccaatcttagtcaaccttcatttagtgcaactttta

SEQ ID NO: 58605 - DNA, 1768 bp, Bovine  19866880516836
  misc_feature (1)..(1): n is a, c, g, or t
ntgaccttttctcccctaatatctctgtatcttttaaaaattaattttattggactatactcttgcctggagaatcccatggatggaggagcctggtgcgctgcagtccatggggtcactgggcgtcagacacgactgggtgacttcactttcacttttcactttcatgcactggagaaggaaatggcaacccactccagtgttcttgcctggagaatcccagggacgggggagcctggtgggctgccgtctctggggtcgcacagagtcggacacgactgaagtgacttagcagcagcagcagaattgcttgacaatgttgtgttaatttctgctgaacagtaaaactaatcagacatacacatacatggtcccctcctttttggatttccttcccattcaggtcactaccttgcattaagtagagttccctgtgctgtatagtaagttctcattagtttctattttttacatggtatcagctctgtatcttaagtatcagtaccttttaaaactttactggtgagaaaggtgaaacataggtgggttaagtgatttgcttaggatcacattgccaacaaggagcaaagaaaggacttgaacaatgggtgccagactatcatttctacttttcttccattaaagtagatagcttctcatgcataatctcccccagtagcaagaatacacatacagggttcaattcaacagaccctcagtgaatcgtgatgtgacaaatattgttctagatcatagggagagcacacaaaactaggaaaatagagttgcctcttaccctcatgatgtttgctattttgggggaagcttggcagaccaaagaggttaatttccatggaagaagctgcaaggctgcagtggtctttccatggtaagaacaatagtttctacataaaacaaggaagtatgacaatctaattcaattagtccaaaaaaattaaagctgcaaggctacaatggtctttcagtactaaaaccaatagttccttcataaaacaaagaagtattacaaatctaaatcaattagtccaaaaatttcagaccattagctgcaaaaacctgaggcagttgtactctcaagagaacaatttggcagtgagataccacccaccatgaaccaagataattatccaaatcctcagactgggaaaaaaaatactagtgggcgccaaaacttatgaagcaactctcatcaagggcatctgagcttttgcatgcctatattctaccccagggatttctattgcaaacatcaaggcgtggaagaaattttcagtcatcatcagtcagttcagttgcacagtcgtgtctgactctcagtcatcatgccaaccagcaaacccaggaactggggccacaacactgtagagagctagactctttcttccttcttcactttgtcttctcaactcactcatctcgagcagcaggtcagcattcacaggccacaggagatcatgatattggcctctaaagaatgctctgccttcattattttggactctgattcatcagcaattagaaatcttacattctccaaaatttaacagaaaccagaactgtggaaattgtaaatgattataaacagttataaaaatgtaaattttcatatatttcccatatttataatcaagattgttataaaaccaagcttttctaatgtgtctcagacatctgaatagcataactcttaataaacattataccactctccctgactttcaaggcagaagagctgtgagatgaaaaa

SEQ ID NO: 58606 - DNA, 1600 bp, Bovine  19866880532332
  misc_feature (1)..(1): n is a, c, g, or t
ntccaatgagtattcagtgttgatttctttagggattgacttttgatctcccttgctgtccaagggactctcaagagtcttctcccagcatcacatttggagagcatgagttcttcagtgctcaggcattttcatggtccaactgtaacatctgtacatgattactggaaaagccgtagctttcactatgtggacctttgtcggcaaagtgaagatgggtaaagaggcaatttgtaaatgaagaaatacagttagcaagtgtgcagtagtgaacaatctcactgatattcagacaatgcaatattatttttgttaataatatagaaaaagacttaaaacattattaaatcttagtgtttaatgtgtatgtaaaagatgtgctttggcttgaggtacaacaagcatatcctcatacataaataggacaatatttccagaggccaatttgaccacatatatccaatatctcatgcatatatgccttgaccctcctacctaccctactagaagatttcaaactaagatctaatcatacaagatggaaaacactgcacaagatattcattgcaatattattcgtaagagaaaatacttccatagaacatttaatcaaacatggtgcatgcacaaaatagagaacctacaacaatgatacataaacttttttactgacatggaaagcagtctacttaatatcttgggtgaaatggcaaactagaaaacaaaatgcatagcatgattctacttatataaaaaacatatacacacatgcacatatatgcttacagaaatgtttgaaaggatgttcaccaaagtgctaacgatggttagcattttaatcattttcatttgtgcaatgaatattattttgccaaaaatatactttcagaggaaaaaaagcaaaaaacaaaaaaacatactcttggtattgatcctgagagaagccatgtttcctggatgacttgaggcttcaccttggccttgggaaactaaaacattatagctctcttgatttttaatagctaaagtaaacactgtgggagattttggtcatcaaatgacatcaatactaccagcatcatcactatctattcaggtctccaaattgaaagtcagcttcaagaaaagccatcgtgaagaaatatcctcttctccgagatcagaagaacctgagtggactgagaaaggccaagctggaagcagctagaggcaggagttggctctttactgaaacaaatattccttattgaaccctgagggagtgatgggttctaggaaaaccagtaatagccatctccaagttgaagggaaatgatagcagagaggataccctgaaataaacactttgtgtctcccagaataggtggaaatcaatttatctgaggaacaaatgggactgattaacaaacagaatgactggactcctaaggggttttagagttaattgggaggaggttaaggagttctatgggtctaacttcgggattgcaatatccagagtcacatttgaaaccatacttggcactaagaatctgttctgggttttcatctgcaaaacctaataatggaagttcttttatattcctaaataaaaccagag

SEQ ID NO: 58607 - DNA, 1487 bp, Bovine  19866880586998
  misc_feature (1)..(1): n is a, c, g, or t
ncaaagtccagaattccagacagccaccccatgaactccaagatggtattgcatcttgacagcaagatcccctaggaaggcttcatctcctcctgccctgtgcgcccaggtagggagaactctgcacttctgtttcttcactcacaaaataaacatacccatcttctgcccggtgtacccccatgaggcagaagaaaagagaaagtgctgagaagtgttttgaagctggaggcagaagatgccatggaagtaaacagtaattttattaattgcctcgaaatagaaaatgtggagtttaaatcaatgctactttcttcggagtaaacactaaatataacagccaaagcgatatggttaaaattaacttgcagttgctttgcaagctggggagagacaattacaaatggggagatattgccaaatctcatttaccgctttctttcttctgaatactgtctctacgttcaggtcttcatgagacttctcaatggcacaggaatcccattgcattcgcttattcttgatctttgtcaatgggaaaaaattaaattcccctgcaacacaggataccacgataaatacccaccagggccgctgcagcaaccccaaactctggggccaacctcctccccgctcctgcccttcacgtgtgtgtgtgtgtgtgtgtgtatgtgtacagggtgtgtgtgtgtgtctgcatgtgagtctcttactctccagctactgtgtgcaaaatggctctttctgactgctcacaggatgccaaacagcactgaatgggttaattggcattttaaaaaggtaattgtaaagtgtaaccggcagggttatcgccagaattgggaggtggaaatgtaggtctcccacccactggagactctcacatcttgaagagcaagctgaagacaaaagcagggctaccactgcttcttgattttccctttcagcggcaactgttcgcccccaatgctctctttttgaatgtgctgtatcaagccagtagttactgaagagtacagtgtggtctgtcctgactacagaattaccttgggatttgattgtagcataaatatgcagtaaatcattatgtgtatgggtttttttaatcgtgcataatgtatatacacaagacgtgtttggaaaagaactaagaaataactggaatcaaaaggaaactgatatattttaagacacttctatgacttttagtgtggaatgtaaaattttaaatgggtttttatacaggttactggaaagcccacataaatgccatttacctcagctcatgattactgcaaaatagagatatagccaccacggtgagcagctgccactggtgcccaacggatcgtcttggtttaattttcaaaaggaagagtttcatggcagttagcacgcctgtcattacacgtgagtgaaagagaaacagggaaaggcaatgattaacaggaggtttctaaatggtatggtgagtgacagggggaaat

SEQ ID NO: 58608 - DNA, 1987 bp, Bovine  19866880644762
  misc_feature (1)..(1): n is a, c, g, or t
naaaaaaaaccaccctggctagaaatggtctcagcatttattaaattaatccaagcagtggacttaggaagcttaataaaattagagacagaccccctgaaaagtctgaattaaatgcttagctctctcatatgccagctgtgtggctttggacatgctaccctcaggtattctcctccataaagtgggaaaaatgattcctctacctctccgggtggttctgaggatttcacaaacagatgcttgaacaatctaagcacttggtaaatatttcttctcttactgcattaagtaaaatttgcttcttcctgttcattataaagcatctttctcactataacggtaaaatgtggttttgatatttgctcttcaaatgaagtgttagtcgtgtcccactcttcacaaccctgtgcactgtggcccactaggctcctccatccatgggattctccaggcaagaatactggagtgggtttccatttcctcctccaggggatcttcccaatccaggaattgaacctgggtctcctgcattgcaggcagattctttactatctgagtcaccaagggagctcttcaaatgggactaccataaaaaatgtaaaattctccctagtcattagggagttttccttcctatgaattttcagaattgtagtatttttgtttaaaaaaaaaaaaagaacatgactattttacagtggcaaattttagtagaggaaaactaattttaaaataatatcctgacatgacatacatgtatatcttgtcacatattgtgtgtatatatatatatatatatatatatgaactcagattatgtgagtggcatcatctctgaaaagtttcaaaggattcttagacctggagcccttagatcaccatcaagagtcaactgtgcctcccaattaaagcacgagatcctaggagagctgcccaagataaccagtcgtagggggctgacaacgtaccccaggcctcagtccaaatgcagcctgttggggtgatgctaccaatgttcccccaagattttattacagaagaaaaactctaaagagttctatcactcctgggatcatctgaatctcagccttcaactgcaacttttccaatttggccatcaatcattctctgccccaaagattgtacatattctgattatcatatgagcattcacatgtgtgtgtgtgtgtgtgtgtgtgtgtgtgcgcgcacgcgtgcgcgtgtgtgtgtatggatgtgtgagtgaataatgttgtcattaaatagactagaagccttgggagcttgaagcaatatctttctccactaaactgctttattactgccgtcccctccctcctgggcatgcagtcagctgagaccaggccaaattggcagtcgttttcagagagcctggcaagcccctgatccctgggagttcccagacagtgcttctctctcaaccagcccctccaagggtcatgagtggccctggctcccgaatgtagtttgcctgggctaggtcaagagtcgagaccagggtgcatccctatcttaaagtcatattgtgaaaacagtctctgcaccccatggtattctcgtagtaacagctctctttctgactgctctcctaattctccgactctggagcctagcgtgccagatttctcccaagtggctgcaaggaaggggccctttggtgaccaaagtgttaaattgataacatagttgttctaaaaaaaaataatttggggagatgtgttgactgttgataagcagacctgaaataataatagcagagactgcttatcacgggcaggcaatagtcctatgacaatgttccagctgatgaaaaaaatgagaacaaaaattaatagtgacagtactggtaaaaacaagccataaattcgatactaagtcataaaatacagactaacccaagtaaacacagtgctactgttattagtattaagtattgttaaaaagtgtcataacatttttttaa

SEQ ID NO: 58609 - DNA, 1478 bp, Bovine  19866880726479
  misc_feature (1)..(1): n is a, c, g, or t
nctcttatgtgtttgagatacttatgttgagtgccgtacactattcaccactgtcctctctttgggtggaaaagtaattgagaaaacttccaaaaggaaggcattcatgtgctttcccactaaacttcatttcttagtatatttgtacatatatgctagaataattgtgtaaattcacatgaaaaggcaatctccccaaaagttcaccaaagaattttttaccccatcttatatttatttagaggatgctttgtgttctctaaataagagacctgtgttctcaggtcctttagaaagatagtgaaaaaaaagatggatggacatacacatacatacatatgtagataaatagatatactgtatagctatagataaagatataataaagctggcttttttgatctgtaacaagctgaaccccagttaacgcttgttttattatttaaccttcataaaaagctaacaaacaatatctaaaatatgtcactatgtccttgcaacccaactctacaatcatattcatgttgcttaaagcctaagagcctccaatccacatcgtctgcttctactccaacacatcaccctaaatatgtcaactgcatgtactttaactgtccaaagaacatctgttagaactccaggtgcttcagggtccagacgttagttgcaatttttttcccagttgatagatgcaacagaccattgcatataaaacaattcttccaacccagccttgttgtttttctatatattaaaaagaatatttggaaaaaaacattaatattaaattgcaatttctatagttgtttccatgatacattttattctatatgcgtgtactaccagaaaacagtgaattacctttaaagataaattttgatctaccatataaaggagggagaaagagaaagaaaattgtgggggcagggagagagagagaaaatcatgaatcacagctccttttcttgtccattctttgtataatatacagaaatattacaataaacgccggggtgctctcagttttaaatctccattttggattagattgatttagaccatagattttggctggcttgtgtccttataactaattttttcctactttctactttgtctcccctgtgaatgctaaatgctcccattttttatatttttttcacatatacaaaatgcattcccttttgtactcattcaggttaaatcacatattaaccacagccacccacatacgcacacactgaggcttggggaaaactttaaactgtggagcgttctaaactgtctggaacaagaaatactgttctttctcaaactacagaagccactaagtttgcctaaagctattttattgttttgtggcatttttaaaatacgaagtataaggacccagtggaaaagtttgtattagattttatttgttctgtttgttgggttcaaagacagacttagaaggtccccacccctcgaagactcaa

SEQ ID NO: 58610 - DNA, 836 bp, Bovine  19866880771946
  misc_feature (1)..(1): n is a, c, g, or t
ntacaacttttatgtgtcatttctacactcaattatattgtgagtcagaagtgaaaaatggtttctctattttgtggaagtattaaatttagcctttaaaaattagcacagtgtctatgcatgatgtaaaaataatcatctagagaagtgaatattattctcctcagttcaaaggataaattaaaacaggcaggtgattcacttatttttacttcatagcaaggtaatatattgatttcctccttctttccttttaaattcaaagaaaaatctcaaataaaacctaattacatcactcggattctaaacgctcatggaaattacagagctatcactattaagtacactttacaccacttttgatatctgttctgcccagacatagttcttatgctactctgattttggggtgaaaaaaactgaatggaagttgcactcagtcttgtctgattctttgcgaccccaaggactacacagtccatggaattctccaggccagaatactggagtgggtagcctttcccttctccagggatcttcccaacccagggatcaaatccaggtctcctgcattgcgggcagattctttaccagctgagccaccagagaagcccaagaatactggagtgggtagcctatcccttctctgggggatcttcccaacccaggaattgaaccagggtccccacattgcaggctgattctttaccaactgggctattggggtagttgagctctaaatggcggttattgtggatttttctaagtagcttatgctaagttagctgagagttttaaatgtgaaatggaaattaggctgtttattttacgttttt

SEQ ID NO: 58611 - DNA, 1120 bp, Bovine  19866880881595
  misc_feature (1)..(1): n is a, c, g, or t
nggtggttatcatcagcccattttctactccctgtgcacaaatcatttcatgcattctacaaaccaagccccgatgttgggcttcaaaagcaatttcagcagcaaaataaggtgcttttcttcaattttcaagccatttgtacgaggttagtgttgtttacccacctggtacactgatatttacatacccctttaaagaaaattggtaggtatgatttatggagtactgtaagagcacaattttccatgtagtgcacctaatctgaaagggcacttgcaaaggtcactctggccatacaaataccaagtcttctctttggaataagttaggagattcatttttcttggaaaatgtcagcagtaccctactccagaggttagtttatgcagataaatgcgtaagcctttaatctttgagcaaaaatactctacacaaatgtaaaagcagtccatctatcactgttaagacctgtaatttgtttttatttaaatctcaagccagggcgcagtgggcaacaggacgggcaacacggtatctcccatgtaagccgagatcaaggcgcagaaacgcgtttctagtcaacccaggtgggtggcacacggcgagcctgcgacagcggagaccgctgttctctgttctgcgcttgctgctccagcagctggaggcttcctgcccagcccgggagcgtgggaatgtgtccagtaagtttcctctcccagagctccagcgaaaattcaggtgaaggaaatgttgtctttttctttctttttcaacgtttcacttcagccccaggagagaaaaccaagtcacgtccttcaggaacttcttttccccaaagaactgctgtgttttgagaaaatctctcacttttcccataagtaatcattcccggtcctgagattttttttcattttgcatctgacaagagaagtgatgagagtcagttgtgggtaatacactttagcatgttttatatgctctccttcttttcctgctgcataaattctatccttaatctttatcccaagtcatagttctcttgaggaccatgttttaatattagatttaacagacatgaaaaaaagctaaaatacgatcaagcaacgttttcctctgttt

SEQ ID NO: 58612 - DNA, 1346 bp, Bovine  19866880889910
  misc_feature (1)..(1): n is a, c, g, or t
naagacagttggctttctctttgaaggcagattaaaaacggagtggccgaatggagaggtggtgtcttaagctgagggcgcttcagagaagagccaggaggggtatgtccatggcacttgtctttgattcacatgagccatttcgattccggcggcgacagactccaaagttatcccagtgacaatgatcacttcacagagcagggagctaatacagtaaataaatgaactcagtgtatgagccacacctgcccaatgcccgtcatgatgtaatcaaggggctctggaaacaagaggatggccgggggttaagctgcgttagagagagggcagaaccccatcacgccaagactcccaccctgttctcctggctgaagcactgtctggtttgcctgattttttttttttattagacagctgtgatcttctcccttcaaacccttgtcaccgctgttcacagcgatgtaagtgatatgattagggaacatggcatcttgtgtaatcggtcataatcaccatctgagggtttcaggagcgtgacacgcgcctccagagctgcctgaaagccggcgcacagaatgacaggagaccacttgcgtctcccctccttgcgcacgcacctcctctcggccaatacatggaacttcccaccttccacacgctggagacccctttctcttttcatgtgtgagatgaaaacactgcagttctctgtcaaggtgttctgcattagaggattttccagatgattgaaagatttgcctgtaagtgtgcaaataattcatctttcaatgcaatttaaaaagaaaaatcttttaaaacaggttttaattctgtcacttaaaatatatggtaaaccactttcttttctctaaaataaataattatttagcagtacctcgaggtcaaaggaacctcatttttaatgtctgagacgatataatgaagtccttgtacataaatgttcagctgcttcagtcttgttcagctctttgcaaccccatggactgtagcccaccaggctcctctgtccatggggattttctaggcaagaatactggagtgggttgccattcccttctccaggggatcttcctgatccagggatcgaaccagtgtttcctgcatcgcttgcactgcaggctgattcttttccatggagccaccagggaagcccaatgaagtcctcaggatttgtaaaagtttcagttcaattcagttcagtcattcagttgtatccgactctttgcgaccccatgaatcacagcacaccaggcctccctgtccatcaccaactcccggagtttacccaaactcatgtccatcaagtcggtgatgccatccag

SEQ ID NO: 58613 - DNA, 2113 bp, Bovine  19866880897605
  misc_feature (1)..(1): n is a, c, g, or t
natgattaaaagagaagtagaaagaggtaagggcttcccaggtgattcagtggtaaagaatccacctgccaaggcaaggagacacaggaggtgcaggttcatccctgggtggggaagattccctggaagaggaaatggcaacccattccagtattcgtggctggagaatcctggacagaggagctgtaagctgtaactgtccagttacctggacagaggtaactgttaaatatgtggaatggatacttgagggttttataccttttagaaaaggtataaaaaaggtattatacctttctctttatatatgtttgcatttttcataataaaagttttataagtgtgtaaaaaatttttttaaaagatactctctttactttcaggtcagttgattagtaagtttaatttctctacaaagtcctatattagtagtacctagactagtgtttgagtatgtaaccaggggatggaatctcagagacatctttgaaattctgcctctcatacttccataagctacaaaagctaatcagaacttacagtctaaaaatatagcatctcacatgccttaaccttggtttccagggaggagacagaaacaaaatctaggagtgtaagcctctagagtgaggcctaacattctacttgtcctatcacaatgagttcatcaatcaaacaagcaaatgggttcaaatcctgaatgccccctccactagtgaaataacgtctgctcttagaaacaaaattcttttggttctttaaattgatgcattttattattttaaccacattagtgaaattaaaccattaaatttgcatcattcaaatatacttccattaatgctaatcaactaattgaggagcaatctacaaaaagtttcctaattagcacttggctccccaaatatccatttgcaatgaataatttatcacttaactgtgtcctgaagaaaaataaaggcctgaaactttaaaaagtgattctacatttactattggcttcatactgcatgagtacatgatataattgtaaggctctctaggaaaagaattattagaacaggttgcaacttctttggtaaaaaaattctcatcaagtgctcttaatgaaacaggtaagctcataagttattcaaatgaagtatagcaaatatgaaaacatttttttctttgtgaggataattatactttattgtcaaatcatatccttgtttgggtaatgtagtacttcaaagcctgcttctaactccaacagagaactttttggtccagagaagtccttgactagggctttccttgtgactcagctggtaaagaatcacctgaaatgcgggagacctggatttcatccctgggttggaaagatcccctggagaagggaaaggctacccactccagtattctggcctggaaaagtccatggagcccatggggttgccaagagtcagacatgactgaacaaattttacttcatttcagtccttgactaacttattcactccatgcagttgaatcatgtcaaacatctgctgcagacatttttttttttttctaaaaaaagaaaccaaaaaaaacctgaaaggagtttttcataggaattaatttttttaactggattacattttattttgttgttgtatttttttaatatggcaatataaacatactacaaaatgaataaaaagggtataacataaagtttcattttagtttctattactttcataattaagatttaattattattgcctggccataagcggctgtagtcccaaagaactcctagtctggaaggaaaaactaaatataaacaaagtacaaaaaaaaaaaaaatcaggaatatctctaaaaaggttaacccgaatggacttacttcagaggtgagcaaaccaccacctgtgttcccaagtcaccgagtctcctgttccggcgaattacgtttcactgaacagtcatgcccatccatttctatatcatccatggatgtgttcctgttacactggcagagctgaataactgcaacagagtttgtgtagcctacaaaaaaaatgactatctcaccctttcaaaagaagtttgctaacctctactttcctctcataggaattctttt

SEQ ID NO: 58614 - DNA, 793 bp, Bovine  19866880930943
  misc_feature (1)..(1): n is a, c, g, or t
ntgaggccgtttggtagacttagcacattaataaacaattaacattagagtgctaattattttgcttcacctgttgtcactgaaagagttccttacttgatatggaaaattacatttaagtcattttaagttagaaattcttcagcaaatggtatgcatattaaaatacatgtgtaattatgagactgtatgttgtctagcatttcaaatgccagtttttctaaacatggttattcttttatattttaaaatttcatattaatataaatcaatgcttttatagattacacagcatcttattctgatgattacgaactagactactatattagtttggattatatttggaaacactacaccagctataaaactatatgtttgatcgtatataactttacagcaattttcagtttgtagcaagtaaatataaacataaagacatttaatatcttattgaatgtatactgcattttaaaacacaataagactatttcttacaatagttccaatttggctcctggcttttgttgggaaagttgttatgtggatcctaaattatttaggtagacatcatgaaaaatattgtgaggcataccatatgtgtaaagttctcaaacttgtatgtcagaggcaaactattgtcacatgggaaatattttggtacaattaaggcagtgcataaaaaaggaatattccttgaacattattatacccaatatgccatcagtagaaatgtgataaaaaatgaaactatttattagaatgtaatttagagaacccgataggtgtccat

SEQ ID NO: 58615 - DNA, 1642 bp, Bovine  19866880930962
  misc_feature (1)..(1): n is a, c, g, or t
naaatacattactccaggaacatttcattcctttttcagatgcttaccaggtgtttttcttcatcaaattgattgtgctgttaattgtagtaaagactgaagtgagcatgggggaggcctccaaaagagcagagtcatttggaaatcaatttccacagctgcaactttgaaacagttctttagtgaataagcggttcagtttcattgtattcaaggtgagcattcttttcttgtgggatatcttattgtttccttccacttcaaggagagaaactcttttttaactttgtcaatttgcacacactttaattttttcaacctaggggaaaaaaaaaaaaaagaagaagaagactccaacaaaacagaagactactgggttttggtaggtgaaatattctagatgcttctcgtcctgtcccatcccccaccccagatcccagcacttcaagtgagtatgtgaagatccctttcttggatatctctggtacttctttaatttttatttttattttttttaccttattttgacaaagaaccaaggaaaattgcatctttcattttcaaataatgctagaaggtttctgtgcataccccaacgggagccaatcacggcctgttaacaacaagaaaaccagtgatctggggatatttaatgccgcattggccctggaagaaggaggactctttcatttcgcatactttgtctccgccatggagctggctgacataatggacttttacaaggagctctgaagcaattggcaattaagtggtttgaaggggtgcttctgggctgctgtgaaaggcttcaggtgtgaaacgcttgttttcaagagcactgaacaaaatgtatggttgctttcagcgcccccttgtccttcccgaggaagggggggagccgggggaagcaaggacactcaagagcaatttgctattcagcatctgaatgccgggttgctttcttcccccccaatccttgtgcggctggggaggggggcagattgagatggcacaaacagctctcggcacaatggtagatcaagagagaggcagggaaaatgaggccggggagaatggacgcctgaatgaagggaagacggcttgattgttaattgtgggtaaatgtgttgcaagagtgaaaagggttcatgggctactttaaagctatacccaagcaataagtatagagagtggggaaataaggagatggtcctgacccttttaaggactatagtagtacatctggcccacttgaaaaagtaaattgagaactgttcaaaaaggtaggcaaatgcatatgtgtgttcgaatctcattgcttacaagggaaaaaaaaaatctggcaactccaattcacatgcaatgtgcacttcaaagtatacactattctttttgagtattagtcaataggacaaagataatacgcaataaggatgctgtcgaatagataaatatttaaaatatgacttttcctcaagaatacagccttctattctaggataaaatatatttgcactgaagctagcacaagggtaaaggaaacttcaaacagtcttcatgaaggatattgttcccttagttctgtttcatgtcacttttcctagtctgacctttacttccaacatatgattttttcctaacc

SEQ ID NO: 58616 - DNA, 1105 bp, Bovine  19866881235839
  misc_feature (1)..(1): n is a, c, g, or t
ncctaccaagagagcgggggtgtaaaatgtgcatcgccggagagaagcactcctttctgcaagatgcagtgtaacacggggcttcttcaggggtatcagaaacctaactctgactccctgaactgcataatttgtccttcttcaccaatagatcctctttcttcattccttgtgaaatgcaaactacgtattttagttagaaaatgtggaccctaaatatcaatctggcattggaaactaacagttattaaggatgagtctgtgtttctttctgtccaatatggaatggctttatatgagttgaccttgtttatctattctttggcaccaatatatgtgggcttgggtttgactggatatatggctggaagagtagtttctatcatccaaatatcccctttctacacaagtcagagcaattctaaaatcatcaaacatgctatattcacatcttaaaatatactcgagtgtgtgtttaaatagccctctattgtacaggttcttcttttggcattttccatattcacttctaaacaaatccaacgcttcaggtcttagggcaacgatggggtaagggttaactcaatgctcttcagtagcttttctgttcttcctaaccaggagacaatgtagtaataattggcgctgccaaggagtgaaggcatgtgaaaagctcatggtaagactgggaaagaatgtttcgagggttttccccatgatgaagattagcaggggaaatccatataagtttgtagcatggaaagtataacgttgtatggaatcttcactaggccccaaggcagatgtttttcatcagcaggccctttttacttctagattggtgaggcctgttaagaacagctttgggaattcctatgcaggggcagccagtgttcaagtttaagtcaattaaactaagtctgccaaagcaattctctatgcttactgccaaatcctgcctgtgaacaaggaaacttaacttttatctgcagagcagggataatgtgaagctgcttcagaacccaacaacaacaacaacaatggcttaacttttgtttaaataataaaaaaagttagttcactttaaaatcaagcatgtgtccta

SEQ ID NO: 58617 - DNA, 1521 bp, Bovine  19866881259828
  misc_feature (1)..(1): n is a, c, g, or t
nccctcttacccctgcttattcctgaacatgctgagaaaagttaaaattttaaaaggagaggaagtatatcatagagatatactaaccctcgaattccttagaggggtgaataaccttttctcttgatataggaaccaagcattgatctgtcacgctgtttgttctagtagagctcccagaggcacgttcagtttgaaacgttaaggctagttcattaggcgtccccagcccgtttctcccagagaatcaagataacactgtggttagttaatggctttctcttgtttcccccagagcctgcctgtctgaagcctgcaggctcgagaagcttcttccctcctccccccgacaacccccgcttctctttgctattagtcacagctggtaaggctcacaggagccaagcctgtttgaaaacagtcggatcacgaaagcgtttgagtctttctgctgcaagcaacaaacttgcccgggcggccaggaggagctgagtgggagtgggggcggggcggggacgcaccgggcaggaaagggaaaagggaaattgctcaccaccccagttcacaaccctctcccagggagcccacggcaggcggccttgctgggaggtgggcagactgactgaaacgaagtgatgcctcttggggctcctgtctcctgtccgctacccactgggctccctggtatcctggtcatgaggtccagtcattatcttattgataagactggaggtagtgaatgacccttcagctgttgcatttctctaagacccacctacccatccccactttcctctatacatactttttatagagcctgaggggaaggaaaaaaagaaaataagaacctagacataatctcttcagtcgccttgcgaccccagaaatcgcagcatgccaggcctccccgtccatcaccaactcccggagttcactcagactcacatccatcgagtcggtgatgccattagacataataggtaaattcaaatcccaacaccagagccataaagatctctaaaatcctgaggttgaactgccaaaatgaaaacagggtgcctcacgagaacggcttgatttctaaccgccctgttatttgagggttcagttactcctcccaaaacaggccctagaaatgctaaataaatttatttgttgcctctgatggagcctccatgaactgctaccaagaaccactactctactgttgcctgaagtgcctttgaggactgctgtgcaaaaaggatgctcagacaagtcccacggtatgtaggtgataacagtgatgtcatcgccagtgacaaattacccttcgtcacagcccctgaacctgattcatgaatgcttccgttgcattgggtttatgaggctaataaacatatatgctttggggtcgagtttaaatacaagccggaagggtttcatttccctttttccgtgtttcaaggattgtattgagaaatcacagaggaaagttttatgagggattaggtcaagcccataaaagtaataggttcttca

SEQ ID NO: 58618 - DNA, 752 bp, Bovine  19866881482558
  misc_feature (1)..(1): n is a, c, g, or t
natgagggactatggaatctatcctttgcccattacatgcatcatagttcaaaccacctaaaaagggtgtcttcatgaccccctggtcggcatagcctgtatcatttccatctaaataaaccaatctttttcccctcaaaatagaactctgctataatttgccctccttccataaaaactggagagagagaaattcaatggaaaaattgagtcccaggatgccaataaagccggggtgtctgccaggcaggatctttgtgtgtgtgcatccctacgccccccagcaccagccagtaagatctctaccctgagagaattacattctcacctcattctccttgtgacctggggtcaggtaggaacagggcaggtttgtgaacttggaagagagtcgcactaacaggcccctgtggtaatgaaatctcgaccatcacccctgtaccagactctaatcaactgagtgggggggttgttgcctctggccaaaggagcagagataacaaggtgttggaggagtcaggatacatcaagcaagcactccaggcagaggtgtcttcgtcaaaaagcctctccacacacaggtatcattatggcgggactcttccgcctgggaatatatattcagaaaccttttcttgatctccttctattcccttcccttgtcattcattattttatttcctttagttttgattaaatactctgctctgttatcagaaaaaattaatgattcaagtatacaaggacccaaa

SEQ ID NO: 58619 - DNA, 1244 bp, Bovine  19866882004783
  misc_feature (1)..(1): n is a, c, g, or t
ngctattttattgaaatgtattttgaggcaatgctttttaaaaatgatgcagctttcagcagaaggaagcgctaaatgagattgcaaatgccttaaggattgacttcctccggagaagcagaaacatcatatgacatcccttatatgaggaatctaaaaagacataatgcaaaagaacgtatttacaaaacagaaagagactcacagacttagagaacaagcttatgggtgccagaagaaagatggggggaggggcatggggtagctagggagtttgggatggacatgtacacactgctgtatttaaaatggataaccaacaaggacccactggacaccacatggaattctgctccatgttacatggcagcctgggtgaggggcctttggggggagagtggattcatgtatatgtatggctgagtccttttgctgcccaactgaaactatcatagttaatatagttaactggctatacctcaatacaaaataaaaaggtttttataaaagaactgattttctcttcaacatttgtcacttagactctgaaatcagtgttagaagaatcacatatctgcatattggaataactatcgacttattttcccgtgaagggaaaatatagagaattgctctctaaaaaagagtagatttaaacatgtatattatcatatgtgaaataagtcaccagtccaggtttgatgcatgaaacagggtgctcagggcgggtgtactgggatgactcagagggatgggatggggatggtcaggatggggaacacatgtacacccatggctgattcatgtcaaagtatggcaaaaccactacaatattataaagtaattagcctccaaataaaataaattaaaagaaaaaaagtagaaaacaaagagtagattgatgaaaatataaaggaacatatattatggagggggtttgaaacatcttttttgaattttgaggtatcttagtccttcatctgcagtggaggaaagatttgttcacttctaaatttttccagtctcccaagtttcactcaaagaccctacgtctgtaacctcaccaccgccctctcacatggctgcagagacctcaccccaccgatcacctacagtgggagctggctgcaagctatatacatatctaatatcacagagaaagaagaagaattacattattgtagtttctggaaggctatattacagctatttcagaagagagattatagcagtgtttaatgaat

SEQ ID NO: 58620 - DNA, 958 bp, Bovine  19866880435057
  misc_feature (1)..(1): n is a, c, g, or t
ntgaatgggaggggagttatggggagaatgttgtttagtcattcttttgtgtcctgtctgactttttgtgaccccgtggactgcagcatgccaggtttccatgtccttcactatctaccagaggttgctcaaactcatgtccattgagtcggtgatgccatccaaccgtctcatcctctgttgtccccttctcctccttccctcaatctttcccagcacaaatgtcttttccattgagtaggctctttgcatcaggtaatcaaagtgttggagcttcacatcaatccttccaataaatattcaggacggatttcctttaggattgattggtttgaactctttgctgtccaaaggatattgggggagaatggatacatatatatgcatatgtatggttgagtcccttcactgttcccctgaaactatcacatcattgtttgttaattggctataccccaatacaaatttaaaaagttaaagaaaatcacccatcaatacaaccaaaaataaaacaaaacaacaaaggagaaatttatttttttaaaaagttgagtttgttctgattttcactgattacttttttaaagggagttaaaatatttaaagaaaattagatcatcatgtagttgtatgccattatattctctttaatattcaactgtaacttatgtaatttaaactataaattttagaattgtattttatttccttgctcagtaagaaatatagaaagttgcagtgccatcttgtgaaaatgatgcagaactacattgtgctaccttatttgaataaacttaaataggcagagaaagggctgtacagctaaagagttgtgtataatagagattaattagcacatttctgttaacttagctagacttaatgtaaaaagaaatagaatataggtgggttttccaccctcccagatttttctgcagcaggaaaacagccaaaaagg

SEQ ID NO: 58621 - DNA, 1064 bp, Bovine  19866880601276
  misc_feature (1)..(1): n is a, c, g, or t
ntgcttttgagtttgctgattcctagaatgtcaacatttactcttgccatctcttgtttgaccacttccattttgccttgattcatggacctgacattccaggttcctatgcagtattgctctttacagcatcggaccttgcttctatcaccagtcacatccacagctggttattctttttgctttgactccatcccttcattctttctggagttatttctccactgatctccagtagcatattgggcacctactgacctggggagttcctctttcagtatcctatcattttgccttttcatactgttcatggggtttcaaggcaagaatactgaagtggtttgccattcccttctccagtggaccacattctgtcagatctctccaccatgaccttgctaaagaaagccttgatatgtagctggacctgtaacacgcatgtcatgatatcagtcaagtattttactggaataatttttgacatctcatatccataatacttggattattttctatattgctgtctacttaagtttgttctaatgattttccttgaagatgtaaatattataatcatataatttttctaattccctggacttgtggaaagatgagattatgactagtagatgtttagaaagaattagttaacatttcatttttttcctgttaaacataattaggaaacttaactatttcagttttgccaagatgtttttagtgataacttagactttagagctttttaaaatgctgtttatttatatttattttatctttctcttatctgaagaccaagacatttggaggcggtggtggtggtgctagaagtaatctcaacatgcatgctgctggtaaccgaaatagggaaattttacagaaagaaaaggcaaacaaatcagagggaaaacatgaaggtgtctatagagaactggtaagactgaagaaccaaccattaagttcgcgtcttttttgctttaatagtcttgtttttaaattctcggaaccaccactaacttttttagtatattatagacagtgttacaagtataagacgactttca

SEQ ID NO: 58622 - DNA, 1432 bp, Bovine  19866880631258
  misc_feature (1)..(1): n is a, c, g, or t
nacaaaacaatatatatttaaaaacttatacttcacttgtttattggccatcggcataacttttctttgttgcttataggttgatgagaaggctctgagacacataacagaaatgggctttagtaaagaagcatcaaggcaagctctcatggataatggcaacaacttagaagcagcactgaatgtacttcttaacagcaataaacagaaacctgttacaggtccacctttgagaggtataatccattaatcaatgtgccagacgatattgtttgcttttcagagaaatgtatgttgttgacagaaactgggttttgttgctgtgaagtctgtaacttcatttacctttatggtaagtggagggagcacccattttggaaccacagagacatataggttatttttagtctcatagtcttcatctttatgtaaaataaagtagatctaataaaacaaggttttgagtaatagagaaaatataaaataactggctctatttaatctatttctagaactaggccacttttataactgactaaatagtctacaaacaataattaacaggaacatgacttttatttagtgttacttttaaattattgtatggtcaagcatatgtcatttttcaaatcctaatcatatattcttttaaaaaaataagtagtcactatatagcagagattaccacaacattgtaaatcaactgtatttcaatttaaaaaaatgtggttacagaaaaatcttataaaaatgatttatttccttcaaacacaatttacatgaacaaatttccagataggccatttagaagattaaaggtgctagttaatatagtcatttaaaaacatttttgttataaaggatatagatcctacagaaaaatatgaaaagaaatatgtgtataaagttttacttaagaggtctgctgataatattttagtgtatattctccttttgtttttgcatgtataatgtatgcatcttactttacttcttcaggtaaagggaaaggcagggggcgaataagatctgaagatgaagaagaactaggaaatgcaaggccatcagcaccaagcacattatttgacttcttggagtctaaaatggggactttgagtgtggaaggtaggctaaacttaaagtagatttctgtttaaagtaccaaactttatttggaattatacaagaaagtataatatactgacaatataaacatatattctgaattttgtaaatttatttaatcacaaatttcctgtttgacaaatgcacagaataaaattttaattgttgtattctgaaaacattgaagcttattttgccctttaactgaatgatagacaatatcatcaaattctttatcccagtttactgactgacaagattagctatgaaacattgttatgttggagaaattattaatattattatt

SEQ ID NO: 58623 - DNA, 865 bp, Bovine  19866880673967
  misc_feature (1)..(1): n is a, c, g, or t
ntataaatcgttccctgttaactctgttttttttcttttaggaagaggtcgttttctttcttaattatagataaaaagggcaaatagaacaaagagaaggaggagattagcaaagacacattgctaaaaatgatcagtcaaaagttaacgacactattcacataaaatatgagtgcttgaaaaaaagctagaaataaactaacatgattaacttctttgaacatcttgccttaaatatcaataccatatccttaaaattttatcaaatgccatacaaagaaaccagttagaacactatttaaaaagtagaagtatagtaatgatgattaataatgaaaaatggctatctattcctggtggtatgttttcaagacaatgcctataaattattcttgcaaaagtaagtgctttccaaatatgctaattgagcaaatatgttttagaatattttatagttaaaacttatgagcactaatcacaaatggttaatcatttcagtccctcagaatttattatttttacatcttaaactggtagctaatataacatactttaagaatggattaactaattctttttctaaaagtaattaattgaaagtgtcagtcgctcagtcatgtccaactctttgccaccccatggactgtagcctaccagggtcctctgtccatggagttcgccaggtaaaaatactgggagtggattgccatgcccttctccaggagatcatcccaatccagggatagaacctgggtctcctggattgcaggcatattctttatcatctgaaccaccacagaagcccataattaccacatcataatgccagactcctttttattccacagcagtcagcccaatacat

SEQ ID NO: 58624 - DNA, 3243 bp, Bovine  19866880685452
  misc_feature (1)..(1): n is a, c, g, or t
nctggaatccgattgcagggagaaatatcataacctcagatatgcagatgacactacccgtatggtaaaaagccaagaggaactaaagaccctcttgatgaaattgaaagaggagagtgcaaaaacaggcttaaaagtcagcatttgaaaaactaagatcatggcatcaggtcacatcacttcatggcaaatagatggggaaataatgggaacggtgacagactttattttcttgggctccaaaatcactgcggacagtgactgcagccatgaaattaaaagatgcttgctctttggaagaaaagctatgacaaacctagacaacatattaaaaagcagagacattactttaccgacaaagtccatatagtcaaagctatgttttttccagtagtcatgtatggatgtgagagttggaccacaaagaaagctgagcactgaagaactgatgcttttgaactgtggtgttgggagaagacttttgagagtcccctagacagcaaggagaacaaaccagtcaattctaaaggaaatcagtcctgagtattcactggaaatgaagtaaaactcgctcagtcgtgtctgactctttgcaaccccatggactataccatctgtggaattctccaagccagaatactggagtgggtaacatttcccttctccaggggatcttcgtgacccaggaatcgaacaggggtctcctgcattgaaggtggattctttaccaactaagctatcaggaagacctattcgatactggaaggactgatgctgaatctgaaactccatggactgagtggactccatgtttggccacctgatgtgaagaactgactcattggaaaagacactgatgctgggaaagattgaaggcaaaaggagaaggggatgacagaggatgagatggttggatggtatctccaactcgatggatatgagtttgagtaggctcttggagttggtgatggacagggaagccgggcatcatgcagtccatggggcccaaagggtcagatatgactgagtgactgaactgaactgaatgccataggcaggttgggggcttgctcctacgtcttcgttgattgacttaaacaactgaccctcaccacctgaaactttccttgtgatgtttggcagagaaaacaagagtcttgtatttaaggactggacaggagcttgcctgtctcctcttcttggccccaccctgctgtcatagaccttccaaagttagagcatcctcagtaaggatgctgctggttaacagccctctgtttgatcttggatatcccaacaccagtaaaggactacactgtttaaactggggtggtgagggactcccatgaaggaaataaactaagcctctaccttgatgtataatcatagtgaagggaagagaatgaggaaagccagctcagtggcataggaagggtggatggtggtctcatttgaattctatcgactaatctttgcaatttccactaaattgtcctctcctgatatcaagacctaaactctgtgtacttgggaccttgtcttgcccttgactcttttcactaattggagtgaatggggtttgggaagagctctggtttcccatagaagttagtaacatttggggctgttaaaattttggagtgtcaattgctgttctctacttcacattgcttgtgtttgcatgaatttaaaccttaggcttctggcccattaagtactgcaaactttgattttctaattatcctaagggttttgagaaccgtttgttagtctcactatcttgatactcaccagggaaaatatccaatcctctatggaacagagttgttaactgacacattcactataagaaggaaagtgcataatgttataaatgaagtcactgccatgaaataatacagatgtattcttttcagcgaattctgtgcaagcacccagtcaagtgagacttctctgattatatacagggaatgtgtttcagaaaatcaccagctgtgtttttcagtggcttaaaagctgctgtgctatagcattccagaataaaataagtaaataccacctaccaaccagtcaagcttattgatgcaacatccctttacttcaaagcttataatgaaattgattttctgtgctttttcaattcaacttgcaaaccccgtgaataactactctaaaataatttcagcttaggaatgttcaggaactggtgagaaattgatagtgactgttttattcttagccaaaaagtactgagtaaaaatgtaaaggaagaacttgctgtgtttagatgagaagaactatatgataggaggcaaagaaccagaacattattttccatgatatccagagtaaaacttcctttgatttttagtgggattgaaccctcaaacaaatgagatttcatagcctggagaactgacagaggctgtaaatcagattctaattctgaattgtcattcagtgattacaactatctgaggagacagtgattctgatgagaagatttttaaaattcaggaaatcatccagatatttgaaaactcctagtttatagaattttttactttgcattcaaataaatagaattttattgatattcattttgaagacatgtgtggatccagggttttgtgtgtgctgaagcttatacaatttgaggagggggatttctttaagaaaaagaagataaagttttgaatataaaatctggtaacaaagtgattgctgctgttgtttagtcactaagttgtgtccgattcttttgcgaccctgtgtagtctgccaggctcctctgtccatgtgatttcccaggcatgaatatgggagtgggttaccatttccttctccagggactcttccagatccagggatcaaacctgtgtctgctacattgcaggtggattctttaccactgaaccactaggaaagcccaataaagtgattattatttagaaatatatataaattgtagcaagttacacatttcaaaagcctgaaatagcacaaaattcagaaaattaacaaaactattttaattgatggatttactgatacgtttctacaatacttttttccctacacttttagcagcatacccattaattgtctcttcatatgacaaaagcttcagaatatagcttttttttacccagagaatagaaagataattcagacttttctctagcatagttagcttatatttgtttatccttattaaaagtttagagaagtttcagcttcata

SEQ ID NO: 58625 - DNA, 1338 bp, Bovine  19866880790165
  misc_feature (1)..(1): n is a, c, g, or t
ngagccctgtgcgggactgagcccttagctgggggctcttgtgctatctccaggtagatgatgtcagaactgagtagaattttaagacaccaatgaatagccaagaattttgtagcgcgagaaaactcccacacgtctggtgtcagaagtcctctgttttgttgtagtgtgaaagtaaaagaaaaagctagaaaactgaattttcccttattcacctgggttaagtcatgctatcccgaatggtaatttttctttcttatatatacagagatccactcttatattcttttcccatatagatcattacagagtattgagtagagtgctaccatagtaagtccttattatttatcaatgttcaaatggtacttatatttaagaacattttattgctagaggatggaggtcatagtgtcaacttaaaaattgttgcacagaccatggtggttggcaacatcagtgtcatcagagttcacttgagtgctgactgtgagatgtgtaccaaatgcttcacatgtattatctgatatagttctcatagaaagtccataaggtataaatgttatccaccttttccagactaaaagatattaagaaactcactctaactcagtttgtaaatggtgaaattaagattcaaattggagacgtcagataccagagcccacactctgagtaactgctctttcctgcctttcagaaagaagcctaggggtgcggtagcgaagtggtagccagactgctctaggattcctcactgcttcggttttcttgtcgggcttcctagcagaaaggcaagcaaagatgtctgaatatattcgggtaaccaaagatgaagatgacaagcccgttggcataccatcataaaatgatgggacaatgcagcccagcttctaggggcatgtggtctgcactacaggaagccagtgtctcagtgtatgagaggtgtccatctggtaggaggtattctgcgtgcccctaatgccggctgagggaatctggtgtacgatgtcagctatcacaataacaaaagaaaaatggatgcttcatcagcagtgaacacgaaaaaagtagtccagaaatagtgttgggtctcccatggaaaacagcaggacctaaaagagtattttagtacccttggagagggtcttagggttcaggtcaagaaagattctgaaactggtcattcagggacttccttggtggcccagtgctaagactctgcactcccaatacagagggcctgggttcgatccctgttaagggaattattaatagatcccacataccacgactaaaaattcacatgctgcaactaataaacccgacacagccaaa

SEQ ID NO: 58626 - DNA, 1044 bp, Bovine  19866880810069
  misc_feature (1)..(1): n is a, c, g, or t
nattatataaccttattattaacactagcaagcgggtactctttctgcccccttctgatgcctatgtcagaagctttctctatctcctttatactttaataaaactttactacacaaaagctctgagcgatcaagcctcgtctctggccccggattgaattcttctcctccgggggccaagaatcccggtgtattcgcgtgattcaacaacaacctttcaggtttattgctggttttgaataaagaaatttatttcaatatcactggttaagaaaattctgtttaagcaaccaattcatgaactaaaatttcttttcaaaagctacaaatcaataaatagagaaccaacctatttcaaataagtaagaaattaaaaataatgaaaagaaaaccttttgtctaataatagtaaataagagagggtatgtacaaatgcaaagataaaaattgttttttattatacattatttttaagaatgaaaactgacaaaattgttaatcctgagccattgatttaccttctaatttttacctgaacccctccaaggtttctattgtaggagaaaactttcttcagaaagtatcatctatcccaactaataataggaacccctctgccattaaaaaaaaaaatttgttgtgttcagtagtaaactgttaagaaaaaaagaaagagggagaaaagaagggtggtttgtcagcaaaagcaacttaatggaattgttaaagagacttggaaagaaatgtttacaagtaaaatggtgtaagcttaagactccaaaagataccaggacattctctactgatagaatatggaaaaagaatgtcaaaagtttgttcaattagttactttatgtgaaaagacaataatgattgtgagtaatctaaatagaacataaagggaaggaataagagaaatttgcaatgatttattttcttacttctttgctctttgcaacttctgcaatagcagcagtcctttgcttttcaaattcatcattgtcatttggaggtttgacaggcattgtcacttgtaatgtcttt

SEQ ID NO: 58627 - DNA, 2311 bp, Bovine  19866880891376
  misc_feature (1)..(1): n is a, c, g, or t
ngccagtgcctatctggaccctcccctttggttccccacagcctctactcctctcagaaggtttaacatccatctctccctttacaccagtttctacaagaaatccaaccaaatgaaataggctgtgatggtctgtggatttttacttcatgctgggagggtctggaaacatgagggtctccatgcagctgtcactgtctgggcccctctgccttttcaccgcctggtgtcctctcaggggacccgatgtgctgagcacactccagtctgccctggtactcacagcagggcctctgccaggagttctgggttatgaagtttcctctttctcattatacttgctttggatacagtttctagaatgatccggtctgatatcttataagttcctcttctcacctattcagctgccttcccccagtagcaaaaagtaacacactggtttccttggtgtgtgtgcccagaagtgggattgctgtgttgtatgacagttgtatttaagttttttaaggaatgttcacactattctccagagtggctgtaccagtatgcattcccaccaacaaaaagattcccctttctctacaccttctccagcatttactgtttgcagactttttgatggcagccattctgaccaacatgagatgatatcttattgtggttctgatttgtatttctactaataatgagtgatgttgagcatctttatatgtgtttattataaaggctcatttctataaacatgttctatgtaatctactctacttataattccaaattggtaactgtttttgatttgtaatatgtctctttcaaatatttctatttcaaattatttactaggatcaggtagaaagcttccatatggatgagttttaattaaaatacccgtgtgccatgcaccggaaaagcatattttaagagaagtgcaaacagactatcacaatgaaaaaaattccctctttctggtggctagaaacaggactaagatgaagcatgattctaaaaccagcaatgtttttcataaatcatgagattatcattaacaacattcttattacaaatgccactgtgatgttcttgcttgtagtgtgataagggctgcatcagcagggttgggtttttgtggcgatgaagtgcttagtgttccatttgccctgcagggtcttctgtgacaaacatgcttcatctatccaataaccaaagtcagccatatgcaaatgtgggcaacactgatgattttctacatatgtttccgaatattaatagataaatgttatatttatttcctttaatctattgttggttacttttagctcttttttcatctcctccacaacaaaaacatatactgtaaatgactattaatttggggcattttcttagtaaattctttgtcttctctaaagttaaaaggcaatagtagcacttaacctttggcttaaaaaatatgattcaatcgagttaaactgctgttctcccagaacttaaaaagtaaaataccaatataaatatgtggtaattatcaccagaactgttcatttttaactattaaatttaaacaaagagccattgctgtttgttcatgcaaaacaaacagtgcctgcttaagatctttttgattaatttgtctctctgtgtgcagatccaagagaaagcatcgccttggcctcagcacacacatctatgaaatggaaaaaactttgctgtcccagtcaattgttaggattttcccaaagcaggggtttagtggtaaacaatggagtggggggaagtccaaatcctggtgaacaggccaacatacccagggtctggcaaatgcagcctagttctaggaccggcatcaggaaaaaggaggtgctttgctattggtcttccctagtgactcagttggcaaagaatctgcctgcaatgcaggagacctgggtttgatccctgggtcaggaagatcctctggaaaaggaaatggcaacccactctagtactcttgcctggagaattccatggacagaggaggctggcaggctatggtccatgggatcacaaagagtcagacatgactttaagactaacttttactttttgctattgcgggaaggcagctgaataggtgagaagaggaacttataagatatcagaccggatcattctagaaactagtatccaaagcaagtataatgagaaagaggaaacttcataacccagaactcctggcagaggcactgctgtgagtaccagggcagactggagtgtgctcagcacatcgggtcccctgagaggacaccaggcggtgaaaaggcagaggggc

SEQ ID NO: 58628 - DNA, 1826 bp, Bovine  19866880937601
  misc_feature (1)..(1): n is a, c, g, or t
ncctgtaaaacttcaaaatgtagcaaggaaagaagattctgatgatgggtactagtctaccccaaagtgaaagtgaagtcatgtcccactctgagccacctcatggactgtagtctcctccatccaagggattttccaggcaagaatactgaagtgggttgccatttccttctccaggatatcttcccgacccagtgatcaaacccggggtctccagcattgcaggcagactctttaccatctgaaccatcagggcagtctaccccaatcctcccccaaaagctcaactgagcaaagaagtcaaataaacacaaccctgaagaaatctcattattactcaaaattgagagtggcacagactgaggaatcagcaggcaacagaaaaagatcatggtaaacccataggattaggagtccctttataccaactcaggctcccagctcaggcagaaagagccactgaaactggatactgagaaggagcctatttcacgtgctttgtgttctaactagtaacatatacatggtctttttccgtgttcataatttaaataataaaagagcaacgtgtgcttggtggactgggagcctacgccaatcctgactaggtaagtgcctaaatgcatacttctttgcctcatcaaaggccctagaataaattacaatctcatcatcctaacaccttgttaaccagggacctggagctaacaattaattctaaaatatcaaaaagacaaataagaattagtggtttatctcataaaatatctaatttatgagaaaataattaggacttaggacaaacatatactgacttaatgagcttttgaaaatagttctattaatattactttgaaagagaacatttcaaagcccctacagaagcagttggttgttccaagcaaaaaaaatttatcaacatatttcaaactttacatctaactaaatacaaatacatacttgtaactatatatttttatattcagttagaaataagtatcaatagagaaatatttgtgtaacagatcattgcctgtactcctgtggagattacatttgtcataaaattgctagggctgtttttttcattttacaacattcatttcagaaactacaattttctattctacaaaaaacttgaagaaatttaatgtcccttgaaaacacaaaaactatacgatgaaagataccaagaataattaaggtgatgctaacattcattccacaagcatttaagtgcctactgtatacctttcccttggactgcaaggagatccaaccagtccattctgaaggagatcagccctgggatttctttggaaggaataatactaaagctgaaactccagtactttggccacctcatgcgaagagttgactcattggaaaagaccctgatgctgggagggattgggggcaggacgagaaggggacgacagaggatgagatggctggatggcatcactgactcgatggatgtgagtctgggtgaactccgggagttagtgatggacaggaaggcctggcatgctgcgattcatggggtcgcaaagagtcagacatgactgagcgactgaactgaattgtataccttacatcctgctaaatgctaggaatactacagaaatatgaatagacttgatcctcacctcacaggagcttacaaaacaacaactcaaactatttcaactaattagaaaagccaaatatttatttagtttgactctaaaatcaaaatatatttaagagaaaaaggtaaaattatttcattaactttatcatgattatctctctctcaaaacaatacttaagagaatcaattccaa

SEQ ID NO: 58629 - DNA, 1157 bp, Bovine  19866881047304
  misc_feature (1)..(1): n is a, c, g, or t
ntaactttcctaacaatcctaagaatcccttttatacattccttacctgccattacctattcaggtatccagactattttatttctttgcttttctcattcaacttttgaactatattctagagtttcctttcttctatatgtgggtttactgactacgccttggcccatgcattattgaaagtttattgaagagtagaaagaggctcttcatactctcagagagaaaggaattaagtttaatttttaggaagagctcaattgggaatttattgcagactgaattggttaaaaaaaaaaaagcataaagatagaatcaacattttgcttttgttacccagagtaacaaggagaattgcccaatcactaatgtgaattgccagtcatcttaaatgctaaacattttgaaagttattggtttgattactcaattcttttcacagctttatttttgttaatatggactatattttgaggactaaattgagaagtaaaaagaaattttaatcatggtaggtgattagtaggtttgagtgtgtggttacaaaataaagcacataaattgaaaatacagagattttgtatacactgattcatggaaactcctcctgtacattttcatgaagaaatcatgctaatgttaataaatgactaatctatcttaccctctctttgtctctctctctcttaaactctgaagagtcaatgcttttgtaaaagtcctggaaatagcttcaagaggaattttcatatggatttggagatagctgggatcaagcaaatagtctacttgccttaaatgccatgtataagactgaacaacagatattttcttacatgtggcttgctaatttatttcgttctttctgtctctttacatgatccattctgaaaatttgaattgagaaagtgtaattgaatcttctgctcctcctgaaaaacaaaatctaatttctcccattaatatgttatctttcaatgccaaaacttcgagagaagaatgcctgttaccaaccacagctttacattatgtgcaaataaaaagtccacaccttcctttagctttatccaaaaataccaacacactcttctaagaacagcagcaggagagcaaacacagctatcacactatcatgctttccaaggattaacatctat

SEQ ID NO: 58630 - DNA, 1604 bp, Bovine  19866881069402
  misc_feature (1)..(1): n is a, c, g, or t
nttaggctgtaattcatcttcagaacagaaggactccaaatgtaaaggtcagactactcggaagctgccttggcatctgacaaaatgattctgtgtcccagggcatctatcagccctccaggtgggcctgagcaatccattgaaaatttcacgatccccgcccccggaacatggttgtgagtagtactgtattatccattcttacagaccatcaaacgcagatggggcttgatcccattctcaaagcagagggaggctttggctcatgtgctgattgtagtctactcaccgcccccatccaccttccaacctcctgggcgcaggacccaggtgggtccctgacgggacaagcttctcttggcactgacagcaaaggcttccggcgctttccatttgtcgcttgacaaaggctgcagccggtgtgcagtccaagggtctggcttgacagcgccgtgtgctgtgggtttgtggtttgccttcacttgttttcgccgtgtgtgggaagctctcctgggaaaggaggccgcgcctgggcgtgccagactgctcagtgatcttccgctgtgggtctgaggccagctcctccagcacggggagacaggccaggctttctgaagaggcttgcaacctgccagctattttcaaaggtactttggtgtatgttctcttctccaattgtcaagtctgaaggtgacaagttgtttttcattcattatttctttcccttcttctttctttctgccatggaattgtaagtcccaatttagcattttctgattatattccctttgtcaaagttgcaacataacctttcagatctggcagtatcacctgttaacatctccttatgagtaagtacttgttaatggactccactcccctcttctctccctgttcaggattttatttcatctagaatatgtcttttattaacatcagaaatttaattatgtacatatttgaaacctgaagccattaagtctacagatcccttgaaaatgctgtttgctagatgtgcaatcacaatgaatgtgcagaatggcacacagttagcttttaaagctccccttaaaacaggctgagggactagctttttaagaatagagaaaactgaagcgacttagcagcagcagcagacattagaagaaacaaggaaaatacatgaaataagtgaggaatggagttaagagcattatattcaaagggaagatattggagagagagagatgtgaaaaggaaggaaggaaacagagacttttcagtgtgaacacgaacgattcctcttgctaaggaaggcagaggctgctggctcttcctcctctcttgcatctcctgggtcttatctatcccaagtcagtgtgtacataatcatgccctacttgtgagcatgtttacctttatgtgtttaattttacacttcaattatcatcatgatttatcccaccggactacagtctcctcaggggcaggaatcatgacaagtttctaggatagaagggttagctgttgagagggtaacgacgtctggtggatatgaccacccttcagaggaggacttctctccggcgacagtgcggcagtcagcgtttcagcgctcagcccat

SEQ ID NO: 58631 - DNA, 1323 bp, Bovine  19866881305362
  misc_feature (1)..(1): n is a, c, g, or t
ncttattcataggcttatcagctttaattttctattgctttttgtactctatttttatttctttttgcttgctcttttacttttgagaaattcatcctttatttcttaaaggcaaatgctctttgattactgtcttcaggtaaaggtgtcttagaatcagactaaggttgggagttgatggtggaattgctgaccatcaactctggaagagccaaagttagctctgttagactagtactcctctatcttttcagtgggagactatctgtggtggcagtgccagcaccagagtatgtaatactgattacaaaaggtgccaaattttcatgggcatttttacaggtggacttttgtgggggggtgatacgtgaattgtagagttatcaaagaacttcaaaatggttgtgttgggcgtgggtgaattggtagagatgattccctcccagcctttggattaaataatttttcacccttcagttaattattgctacagatgaatggttggtttggattgaataaaagaacaaagggcaataagacaatgagtaaaaaactgaaaagagacaggaaaagtaaaagatataaggtaaaaagttgcctaactttgtgccacttgaaatcaatagtgtttattgaagattcttaggaacattatgttagacaaaggagagttgaaaagataatgtgagaaagtatctgagaggaaagttttgttggattaaatttaaaactatgctgtttttagttctatttttattgcacatgtcaatctcttaagagtttactctaacttaatatttaagttggatattgtatttgtgtaacagggaagaggagcttattgattccttaagaagcatattgatgtttaaatagcttttcttagaaagcatttggatacttttattaacataatatccctttaaagacataaaaggaaaagtatgcgttctccatcctgttctatcagagatggtaaacagggagtatccagggctctctggtatttgcagtagaaacatttaatagtagagaacaaaactacttgtagacttaagaaagtaattttggttaactttgattttagaaaatattaagccatttattttattttaacaggtatctttcagatgaaggcattgaagcttgtacaagttctcctgacaaagtcaatgtaaatgacatcatcctgattgctctcaatgtaggttttatttattaacttataaacatttagaatctggaagctatatttatgaaaaatatctcatagaataaactggctcttataaagtggagaacgtcttttatttttattgtcca

SEQ ID NO: 58632 - DNA, 1230 bp, Bovine  19866881372236
  misc_feature (1)..(1): n is a, c, g, or t
ncattaggtcttcctatgctctgagatcagtcccctttttcctcctcctccatcatccatctttcctgtcctgtcagtatccctaaaacatgtgccctccaggtgacccatactgtgatgtgtgggcctcctctctcactgctcctttgtattcagccacactagatcttttgctgttcaatgcctttgttcagtttttcttctggatcaccctaacctgatctgtcctttctgttgaaatcccctccagtttaaacgccaccactccacaaagccttcctaaaggtctcagcaggaagtacgttcccttccattattttttgtccccataaagccttttctttatttttactttctttgttcttctcacatgatttatagttttgatatttgtgaaagtgttttacttctctcccatcagctctggaaagcagggactagtgtgtctatgaaacatctataacactccatctaatacaacacctactatttagtaggagatgctgaattttcatatccattgatacatattttattttctgttgtaggaaatcattttggaattattcccttacacaacacaataagtgaaaatgcttgtgtgctctctttttatgtggcccctggcctggttactttcatattgtcctttttattgcaatgtaattaaattgtacagttaaaccaaatataactaggggacatagagctcagactatttcctccagttacaacttggagggccaggctttatccgccatttccagtctttcagtattcacatattggtcatgccgaagtatttatcgtttcagaaaaaatcaaacaaaaatgttataaaggcctctagataccatataactgcatagagctggaaaaataggaatgaagcatagacagattaattgaggtggaaataaaaatatggttcccttagcttcatgctccatgcttcaaatggagatttctaaaagttctctaggaggcctttgctatgtctattgtttggtttgctaaggttggaagatgaggaatttgggaattttaactccaaaaaaacttttcgattctgtgtatactgtgaaattgaattgattttaaatggtagtttgtatactttacatattttaaataaagtaataatattaaatactacttattaatcatccaataatccttttaaccttataaccagatccaatgcagatattattgtccccatttcataga

SEQ ID NO: 58633 - DNA, 1006 bp, Bovine  19866881407250
  misc_feature (1)..(1): n is a, c, g, or t
nttgaatgtgtatgttttgagtttgagtaagtattcttatcattttaatactcacgtatttaagatagttgctataccttagatgttttagattttagataatttcaaaaggtctataatgtatcaacatttttcacattttctgaatgttggtcctcatatgtgataggtggtaatcatttagctggaaagagaacaagagtttataatctgccctagcttttgaagcagatactcaagagaagagagttctacagactcttcagcaattcattttaatgtttaacaatattctatgtaagcgaatttaattgtattttaatctaaatttcttatgttgcaacttaagtccgtaatatcttctttatcttccctcagggaaatggagaacatctggttaccttcctttgtgaataattcttcatatacttgaatcttgtaaatgtcactgctacaggtttctttttgttaaaaccatctatcttggttcctctgtttattctgtctccggggttccattcatcttcattgctcttctcagagtcctctccagttccttgcatttcattttctggttatggtagtagttctgacctcagtgtgcatcagagtcatcctgaggcctgctacaacacagagtgccagcttcccacctcgcccactgccatgtttctgactccactgaactgggaaagagcctgagaatttgtactttgaacaggtttctgtgggatgttgattcagccaatctgggaaatatacttagaaaacctctagggtgtagaactccaaattaggcagcagtcttggacaggtctgatgaatgcaacagttcctcacagaagaagtaactagtatcaaagcagtgcctgcatatccttatactagtctatataagaaaactagcactctggattattgattttccattttttctttttctgtctttaaggactctcagaacctaccactgttaaaagctcatagggaaaggtactgcgagagt

SEQ ID NO: 58634 - DNA, 2019 bp, Bovine  19866881484309
  misc_feature (1)..(1): n is a, c, g, or t
naaataagcaaagcagaattcacagtctgaagatgaggtactaacaaatttcagccctttcaagtggtataggtattttcttctgatgcacaaaaatgcagaaggcaattcaaccctttagaggtctgtttttcatcagctttgatcttaaaattgagacaagtgtttggagtactgtcgctgataaggagcaaagcgagggctggaagcacacttgaacagaatgtggttgctcacacccggaacgattaaacactcactgcattttttcaaggcaaattccacaattcacatagttttagaaatcattacagagaaaaagaacaccacacacagtactttcataagagcaaacgctgtcatgaccacagaataccaaagaataagctctgcacatattcccagtttcatctttagttttccttgtttgtttctagacactattttctctgccactgacagtgtttaccgtctccggttgtcacataatgaaacagaagccgaaagcctgattatggcgttagtagtttagaaagacaccaacatagctaggtgtcatattacctttgttttatttttattattttaaaaattctctctcctgagacaggctgtttttttagtctgaggatcctgaggaatcctaggtcagcagagttttggtaactggaaggttacgctcatagctagctgcagggttgagatgggcttccttggttgctcagttggtaaagaatccacctgcaatgtgttcaattcctggagagacatgtgttcaatttctgggtgaggaagatcccctggagaaggaaatgcaacccactccggtattcttgcctggaaaatcccatggacggaggagcctggtgatgtcacatgagtcagacatgacttagcaactaaaccaccaccatagttgagatgcagtccaataagatggaaattactagagatgtttcccccctggaagaggaagcgatgtcccagatgccaacccttccttgccattataaaaccctagggcccaggccaaaggtggactaataaagtgtgggacttcctcagctgtgcatttcattcactgcccctcttcatttcaggtggggacgcacctgaaaaacagaagcttctcacttaactactgggctttagtttcccactttgctttaacagaatgtgtgaaatctcttgagaattgtacttttttgttatctatgctaaatattcatgtgagacaaagtagtatagttcatgaaatcatttaaacattactcaggagatactgcaaggcccctggaagcagaaaagggagtaagacataacatgccagacctcagactgtcaaggtctagtcagagacacagagaggcaaacatctgatgacagcatagcatgggaaatgcagtcatcacctccgcagggagctgcaggagcagggggagggtgaactcatcctgctgaggttccgggagagaggggctgcgacacggtgacaaaggaaggatcagctgaggtggagctctccaggaagagaaggcatggaaagccgttccagaaacagctaccggcagaagccaaggctggtgcagtgtttggaaaagcgtgtgggaagcagctcgttgggaaagtttgttagcgagtgatctcttcggatgagggagaaccttggagcaaaaagttaattcccgtacctctagcactggcacccagagagatgcaatcatctttagagttgctctgagaaagggaggagaggtggagatggggcagaggctgcagggggtgcgagaggggctgctgggaggaggaggcggcaaggcgccccggtcgtgcccttctgtttacagactgtttctgcatctaggtctttaccaggaggattctttttcatttctgcactggttacctcagtgacggggcctcaaaaatgactaatggacctcatgagtgaccagaatcaaagatgttcccagctttgctatgtcctaggacagcgctgtctaaatcccaagaaagaga

SEQ ID NO: 58635 - DNA, 713 bp, Bovine  19866881559320
  misc_feature (1)..(1): n is a, c, g, or t
naaattcgcaatgttgctgcaccaaaggataatgaagaatctcaggctgcaccaaggatgttgcgtttacagatgactgatggtcatataagttgcacagcagtagaatttagttacttgtcaaaaataaggtaattggctctttattgtgtatatttgttgtgtttaaaggtacaattcacaatggattttatttctaagacctttaaaaagaaggaatgaactcttaagtacatgttatagtttttcagtataaattagagagtttgtactatatctgtaaagagaaatagtttaaactggatttagttgctttaatattaataacaaaaacagaaatttaagatattcttacatggaaagtaatcttgttaattttatcactaaattttagattgttaaaaattttccgaacagaaagtgaaagtgaagtcgcttagtcgtgtccgactctttgtgaccccatggactgtagcttaacaggctccaccattccatgggattttccaggcaagagtcctggagtgggttgccatttccttctccagaggatcttcccaacctagggatcgaacccaggtctcccaattgtaggcagacacttgacagtctgagccaaatttctttaaatatgttacagtttcttccttgacagttagttgtgaccatcacactgtttagtggtttagaaaagttataggcaaatgagtttt

SEQ ID NO: 58636 - DNA, 1270 bp, Bovine  19866881680099
  misc_feature (1)..(1): n is a, c, g, or t
naactttcaaatttgcattttttctgtcaaatgagagttcaaaaaattaattccattgaggttttaatattaatatataacttgaattgtagaagaatacattaataggaaatatatatcattctaagataagaaaaaaatacttaatacattattcctaaactgattttttttgctgttgttttataagattagattgcagatttcctttcattagaaaagtactttacaacattcgttgaacaatacgtcatacaaataatctttcttgagaatttgtaataaatcagagactttctgacaattaaaaatagaaatagccttcatatatcactgtatcagataagctgtgtccagctataagaaatagaaatcctaaattactttgctagcatatgagataagtgcaactgtgcaggagaaagggagtgcaaaaagaagaaaaaacctcctcctggatatcacagtcacttgaaagtgccgagggcaggccttcggcagaaggcctggtcggtggtcacctggcccagcaatctgcaacagtgtaggcgccaaggatgcagacttgatggggaatgtgccctcagcgcccccacccccggacttggggcagctctcaggacaccacagactttgtcagtgatgccgcgcctcactgaggctttccccgagccctggacggcggggccaggactgcagagcagcttgagggctgccccagggctgactcccagcagggacaccctgttgaggacagctgtggctcagccttccatggggactgagactactgagagccttggagtcgctaagggacaaatacttgaatccttggttgagggcacagctgccagtggggtggagttgcacaccatggagagctcgaactcggccccagcaaggcctagagcaccccacctcctgtggatgccccagcctctgcagtgggcacggtgcccaccagtcagcccaccaagtcatggaccagtctttttcatgattctaactctattcttcctccttgcctgtggtttctgtggaaactaagaattccccttccaccacatctcccttcatctctgaaaagcaggcagaagtcaaggaagggctggttccagtttcagaggatcccgaagccataaagattgcagagttcctggagaacaccaccctgattcataaaccagtgtcgttgcaaccctgtgggctgatctacacaggaaattggtgctacatcaaagccacactgcaggcgtggtagtcttgccca

SEQ ID NO: 58637 - DNA, 637 bp, Bovine  19866881924974
  misc_feature (1)..(1): n is a, c, g, or t
nacacaatggtcctatttcaccccttcccaccgtgtaatcacctttcacacaagattgcgttcttcgagtcacctgtccaacgtctcctcccggacttcacatgccctgcaaaagggacatgcactcagtcccctgctcccccttccttacccagccccctgtaaaatggacccatcaagtggacggactgaattacccccacatttttggctgtcacctaataggagatgagggcccaatgtggagaacaccacaggagaggaaagccaaaaccagagataatgctaaagatagtggaatgactggggaaatctgtccctggaaaattgggattcaaatgttttatacctgaaataaaccacaggaaatcaatgaatcttcataaaaccacagagtgggaaagactttagagtcgctttttctggctgaaccctgttcaccatgaatattcacagttctttaacaataatccacattcttcatttacaaaagtttttttttttctttcctccttagatacagaagaagccaagtctgtgtagtgtggcctggtccctatactttgttaaggatgtagagtctgtatttcctgagtctcaacctcattatgaagaggagctattattttccccattt

SEQ ID NO: 58638 - DNA, 1208 bp, Bovine  19866880296487
  misc_feature (1)..(1): n is a, c, g, or t
naatggactggttggatctccttgcagtccaagggactctcaagagtcttctcccaacaccacaattcaaaagcatcagttcttcagcgctcagccttcttcacagtccaactctcacatctgtacatgaccactggaaaaaccatagccttgactagacgtacttttgttgccaaagtaatgtctctgcttttgaatatgctatctaggttggtcataactttccttccaaggagtaagcgtcttaatttcatggctgcagtcaccatctgcagtgattttggagcccaaaaaacaaagtctgacactgtttccactgttttcccatccatttcccatgaagtgatgggaccggatgccatgatcttcgttttctgaatgttgagctttaagccaactttttcactctccactttcactttcatcaagaggcttttgagttcctcttcactttctgccataagcgtggtatcatctgcatatcagtcgcttcagtcatgtccaactctttgtgaccctatggacggagccctccaggctcctccgtccatgggattcttcaagcaagaatactggagtgggttaccgttttcctcctccaggagatcttccccacccagggatcaaacccgcgtctcttaagtctcctgcactggcaagtggtttctttaccactagagccaacaggaaagcaggggatgcagtttcggttcctggtcagggaagtaagatcccacatgccatgcagcacaaccaaaaaagcaaataacaacaaataaaatggagatacttgtatctctctccatctttgcgtgttgatcggatataataaagtatgcaaaagtatccaggacagagaaacctctggcactagaacctcaatagcattaatagtatgagaacctttagaacctacacagcagtccctcccagaagcaggttcgtcctcaactgcttcacagaaacctctagaagcctctcaatcactgacccatgggctggggaaacagcacttgctgcctggccctctgtgtacccttctgcctctgcacagtttgttagctagggcagttgtgacccaaggaggaatccccagagccaagactagctggctggtctctccaatcctccagcctggcccagcctttgtggtctggcctggttctcacagttactttcaaacaatcttcacagtattagtagggtat

SEQ ID NO: 58639 - DNA, 1801 bp, Bovine  19866880385870
  misc_feature (1)..(1): n is a, c, g, or t
naggcttgtgaggtggatgagaaaactggaaatacgctgggtctgcagttctttgtaaaccagacagaaacaagcagacagatgcttcctgctgccctgggctcttaaacagaagttctcgggttggatcccagatgtgggcactgtacgtgctccatgcagtcccagccccccacccgcctgctgtttgcacgttccctctcctctccagctggccccagatgtcctgagttggcctgcacctgccttggggtgtccctggatctggctgatgttgcagatgctttagcctcagatccatccccgaggcaggatggagtcctcaagttcatgtcacttgtgaactggtctgacttactgtcggacaggagacgaaatggtccctgacaagcactactgtgaccctctgagctgcaccttgtccacccagggcatcccttcctagaagcaagccccttggccgggcccagtgggcaattacctattgctgcacagagatcccgctccctgcacgctgtgttcatcaagtcagacagcgcctgtgtcaaatccattgtcacacggtgctactacgtccctgactccatatgtgaaatcaattaccacacattagggcgtgtttcacaccataatggagcgtttttctgtaccattgtttgcatagagagaataggaagaatcattatcaagtgattggaaatagatttttgtgtctgctccaaggcaggagggcgtggagcgaaggtaagaggactcagcaccgtgaggggaagcccttggagtccctgtgcctggctcccagggatggagtgttcagagaggatgctgggggaggctcctccaggaaaggaaggaaatatgcattcaaacctggagggtaagaatagcttcctctgtatcatttaggttctctggggtcctctgatgccagatagctggctccggtccatcgtaacccacacacagcatatccctccccacaggagagagagaagcagccttgaaagcttcggcttgaaatctgaccaccttgatagaaatccccatctggccacttcaccgctgtggagctctgtctggacaaggcacccacctctaaacctcaatttctttatccgtaaaatggggataataactgcaccagtccaacaggctgttcggagaatcagaagagatgatgcgcgtataaaacacgtagtcctgtacccggtactattttatttcataaaccttgggctgctgaaacaaaatcccacagacagagtggcttattaacaatagcaattatttctcctggtgtggaggctggggaggccaagagcaaagttccagcagactccccatctgattcagagatgccgtgtcctcacatgtggaaggggcgagggaggtccctggggcctctcttacaagggcactgacccctcatcagcccatgggacctgtcttcaaagaccagcacataggacaacctggactgatttcctggaaggcagtttttccagagattgggaagggggtgatttcgggatgattcaagtgcatcacatttcttgtgcactttatttctattgttatcaatttctattgttatcacatcagccccacctcagatcatcagacatcagattctggaggttgggtctcctgacataggggattaagtttcagctttttagggtgatacatttggtctttaaccctgaattttctgtttagttgctcagttgtgtctgactttcacaaacccatggattgtagcccaccaggatcctctgttcctaggattctccaggcaaga

SEQ ID NO: 58640 - DNA, 1747 bp, Bovine  19866880491988
  misc_feature (1)..(1): n is a, c, g, or t
natgggctccagtccatggtgtcacaaagagttggacatgactgagtttctaacacttcccctttttcaataaaacaagcccgtgatcctctccataattttaagcaaatgttggattactatactacattgctgggcattttagagtccactctctaatcatttgctcactaaagactgactctgtgctagccattgtgatagagattccaaaatattttttaaatcatccttccagtttagtggaggatgtccacattatcaaaaatacattttcctttctatagttgtaattttctgctcctttagctggctgattagagtcaaaagtgatggagattcccaagaaatgctgctgtcttcataagaataatgttcccatccatttctgcctcctgacgctttgactgttcctttctcctttctgtttctgccagaagaggaagatgtatgcttctttttaaacaaaagtatctgtgacccatgaaacaattcaagaaaaggtcaattttcagagaagaagcccagaatccagctggtgtcatttttttctgatgagtcctgggcatgtgctaatttgtagttcattgtcatagtgatgattgaagtccaagaacagaaagttaattctctgtttcagaagtctccagagctagacagttgggtgcaaagtccagtgggtcttcagaaggggtatgtaaggcttggactgtgccctctctagcccaccttcatggctggtagccatgccctggagaaacctgggcaactgtatcacatggacatcactgggcctctcctgggccacctggtcacattcaggtgctgagcacagctaagtgtccttgggatgctgtggaggaggctgggaatcctcttgatctgccaggaagcccaggagagacatgtgtctggttaataatagaaccaactacttttcaaggctcttttaatttattagaaggaggcttcggatggcaggtggttgcaactgggaaggaaaaaagggggcaaatactacttctttttgctcaggcatcacctttggaaacaacttccacccccatctctttggcctgttgggggctgggctgataatcaccgataggagaagacttaggcataatcccctccttcctctaactgagaccatgcattttatttaattggcatcaccccatggccctacgacatctagaatctgtctctgtggcctttcttatgcctcaggaaggattcttgaggccaacccaaaagggcagctctggctgttgaacaggcaactccattaatttgggatgaactgagtgtcagcaaattgagtttcaagggcaacccaggaacctgtcaatctgaagcagtctgccatgtgtccagaggatcctaggagctggattttggaggcttgtttacgttggtatatgtaatagctacaatcccccaggtagattaagtaatttcttcatttagaacatccaaacctggatgacatttgagagattttctctgccttgtcaagggcaaactctcgctttattgcttcccctgattctttacttaaagacaacagacggctttctccctcgcggcgactacaggagcagaggtgagtgaaaattaccgcagatgttttatgatgttcaagctcttgcaatcacactccccaaacaggctaatagcttctctcccgtgttttctcattctgtctcctgtaattggcctatattttctttccaagtcaagattt

SEQ ID NO: 58641 - DNA, 1800 bp, Bovine  19866880552523
  misc_feature (1)..(1): n is a, c, g, or t
ncccgagggcagacggtgggcagaatgggctggtaccaatggttagttttcaagaactttgctattacacagtcatcactaacattttggttatgtgaacttataaatcatgtgtaataacaagccccaccacatcctaatggtttgagcacaattatctgtgctctggagcctgggagatcaacagtccttcaggacagaccccagcccactggggcggggaggtgcagggaggagagcagatggtgagggtaggagggcaggactgagtggtgcccatcccacatcccacatgatgcaggggcatcatgacagaagctcagaccaggagctttaggaggtaaatgctcaggactggagaggggttgggtgatggagagccatatttagcactgaccagcacaccagtgcccagggatgtggagaaaagggtggtcttcctgccaaagaggggctgaggcactggtggaaagtggaaaaaacatcaagaaaaggtactttctgggacttcaccggtggtccagtggctaagactccaggctcccaatgcagggggcctgggttcaatccctggtcagggaatgagattccacatgccacaatgaagacccagagcagccaaataaataaatgaaaataaacattttttaagggagcatcctcaaagtattttcttagaaaagaaagaaagagtacttcctccctgcctttctctcctgtgatccttgaccaagtacaggaaggactccggagtgagaagctgagggtgcgcagtggtgataccatcaagtcacgagatcccactgactctgaggggagtctgggagccctgtttcaggctctgggccccaaggtccttcctagctctcagtaaaatgcacgtctttcttctgagaagaaaggagggcaagtagagcaaggaaggctctcctgtctctcctgagacctagaaaatctttccagaaccaaagggctctgggttgagcttgtaagaggaggagcatgtaagagtgggacagtgcgtgaagatctgaagcatgagaaggggatgtgaggaagaagtttggaattttcttaggagagtggctgctggagtcaacaactctgctgtggaagggaagagaatgctgggactggtcccagaaagagcactttctgcccattattctctacccataaaggatccggacgcaagagccccctggggctttggaacaggaagagtgctccggtgcccactattctcctggggccccacttcagctgagatgtgtggggctgaaattcattatgtgaatgagtaagagatggtgtttacgctctgcaaatgaaagggagagtgtgcatgtggagatctgtgagagagagttcacattgacaaaggccttctgtgtccaagtgtttaaagaggggctgtaattaaagagaaacacagacaaacaagggcaatcataagtcacttctttagggcaggcaattgttttcctacacgcagcagttttaatggtgagttacaaggcttccaatgacattttacgttcactgtgatccatgggttttggtagggactgtgatgtgtcgctagtgatgatgggcacaggagaagaaacccttccccacctgttggcctcacttccccttccccagtcacacctcgagcacagaagtgggccatgtggacatcgccaaaggcgtttgcgtacactgagcccttactctgcactcagcactacactgatttccatgtgcatcgttttccgtgaccctggtctctctgctcttgggaagctgcccttctgt

SEQ ID NO: 58642 - DNA, 1152 bp, Bovine  19866880570206
  misc_feature (1)..(1): n is a, c, g, or t
ntgagcaaacgattaaggggaatgtgaatcaggaaaggccccagcagaaaagaagagggatcccagtgctcccggttcccctgggagaagtgggctgagaactgtccctgaggaacaaacaggtggagttcctggatgagctggcactgcttaggctttcaaagcactgtgccccatggatggacggctgacagcaatggaggcggcaggtggactaggggtctcgtccttcccagggcacgtcctcggcatgccccacgacgactccaagctttgtactcggctgttcgggcccctggacaagcaccacatgatggcgccgctctacgtccagctgaacaaaacacggccctggtccccctgcagcgcctcgttcctcagagagttcctggaccgcgggtacggtaggtccccgcttctccctggccggcggcgggcacccgcattcctggaccgcggggtacggtaggtccccgcttctccctggccggcggcaggcacctactttgcttgagtctcaggacgggagacattcagcagcagtgtcctcactgccctccagggctgaggtgctctacccactcctctagcctgctgttcctcagcccagcttctagcgccaatgagattatctgcagagcaggtagaagtggtctgagaaggtctgttggagaagatgggttcccacagaccttgaaggaatgaaagaatgtttgtcatacagagcagagaagggagcctccggctggagccgtacatcacagggtagcgtgaaaacagcataggcaggaacgccccctgagagcaaggagtggggcgaagtgcctggtgcaggcagcctggcttgtggagtaaagaaatgaagacacaagtgattcttgatgcagacataatagatcgttcaaacatcaatactttggctttaattctctgggcctggatttaacagtccatttacatccctaattatactgtgacttagattagtgctacaattagctggccttccctcggtaaacactgcatacatataagacattctggatgacaaagaaattcagtcctttaaataaatgtgctactgataatcaaaacgtggaaggaatttctctagatgatggagtgttacagtttgggatgaagtcaaggagt

SEQ ID NO: 58643 - DNA, 1729 bp, Bovine  19866880598918
  misc_feature (1)..(1): n is a, c, g, or t
ntttgccccatcctcctgttgcttctcacctctgcttgtctttggaccctgtctccctccttcacagctgctcgtcttccccacccttctttttctcccccaagttctgcatcagcgctatcaaatgggagcccgggaaaatcactggcaggtgaggaagaccacaacagaacactgaggaaatacaaacgccacggtggacaggaactgtgagaattccttggaagaattcaaattcttttcacttgggctgctctgaatacacaatgggagtatcagagccaatcaaataatgatgctgcctctggctcattgcagttcatttttaataaatgttacagctggatacaatggccagatgaattttaaggtcctcccaacactgagattccatggttaatagaatattacagctgtagtaattttaaaaatcctgtattgtctacaattaaggatgctgtaattgtctattctaattgtggcaaaaggccatctttttgtgtcccagctccaaggaccagccacgttctaagctctgcagtgtcattggacgggagttgctctttcctctcctcctgtcactgctgcaaccagagccagggaacactagcacacccagaaccttcagaaaggccagagatgctgctttccaattcctcccacagtttggggaggagatgggctatcagcgctctcattccagtgttgctgtggcttcaaaacaccataaagcaaactgagaatggttctggccaagacttcagctccagcctcggcatcctcccatcgggaagaagcctggtcagaacccccagcttctcagccggaggaggtggtgtgggcatagtcatgggagcctccttgagcaggaacctcgtctttagaggacgtccatcctactgtcttctcccaggattcaagttgctacccagtagggcactgtgggcttcctggtggtaaagaaccctctgtcaatgcaggagatgcaagagacttaggttcgatccctggctgggaagatgccctggaggggaaaatggcaacccactccagtgttcttacctggagaatcccatggacagagtgaacctggcgggtctacagtctatggggtcgaggagagtcagacacgactgaaggcacttagcatgcatgcatgcagggtactgtgtcttggctttactggcacctgaccaggcgtgatggagagttttttgaagtgttttatgtatctattttcttttttaactttttactttatattggagcagttaacaatgttgtgatagttacaagtgcacacagactcagccatatcaatacatataaacgtatccattctcctccagactcctctctgcgatgggggatctaacgtgtcactttggcaaagcggcagtacccagatacttggtcaaatactggttcacatgttgccatgaaagtattttttttttttttaagatgagattaacatttaaatcagttgactttgagtcaagcagggtggaaatgggcctcatgcaatcacttgaaagcttaagaggaaaaggactaaggtcccccaaggaataaggaattcttaatggcctttagactcaagacagtaacatagcttttctctgggtttccagattgctaattttggactcaccagtctcctcagtcacatgtgccaattacttaaaataaatctctctctctctctgtacagtggcttttaaaaaca

SEQ ID NO: 58644 - DNA, 1972 bp, Bovine  19866880656044
  misc_feature (1)..(1): n is a, c, g, or t
ncatgtgctgaggctctgactgccctgtgtgatggtcgttagaggtggggcctttgagggtgagggtgattaggtgaggatgggactcttgtgcccaggttagcgcccttacaaggagagacatcatagcttcctgtctctcctccaggtgaggatacagcaagagggtgcccatctgcaggccaggaggagagctctcaccaggaacccaggcagttgcttcctccatctaggacttccagcctcagaactgtgagacagtaaatctgttgtccaagccccctattcgtggtattttgcaatgttagccccagcagatgaatacacaggtttgcctcagttcattaataaagcaaatgggacctcttcaaacatctcagctcaacctaactgcacaggaggcaaagtgatgagatggctctcgggataacatacctgtgattttaggtgagttttcactttcatgcctcttaatagactcagctataaagtggggggttggatttacatgcctcaagcccctctagttcctagggaatcggtcagactgccattcttacttctggttgagttgttatgaactctgtttcctctcagacttaaggagtgacagagaaatgatgatttcagttctctgtttgtgatgagttctcatctatctgcaagtttatgtgatttttttttaagccttaagaacagatttttccaggacttccctggcagtccagtggttaagactccacgcttccatgcagggggcatggctttgatccttggtctgggaactaagcttgtgcatttgtgtgtgtgtgctcagttgcttcagttgtgtccaactctttgtgaccctatggactatagcccaccaggctcctctgtccatgggattttccaggcacaaatattggagaagattgtacatgccacactgcaaaaaaaaaaaaaaaaaaaattcctaaggttgaggctgatggaaataggttcttggggctttggagcaatcatgagtggttaatgtgtgaagtgccttagggcaggtttagctgccagagaactagctctaagttcttgaagagctaaagcagtggggctagttgagggacacctgccatttctgctgtggtttacagctgcttgtggtgaggcatgccagtgacaggtgtggaggcctcactcgtcaccacaggtaggtgggcaagaccaatcaagcagtgcgaaacgaattgtgtggttattccagcttctctatgataagcttgtccagggagggggcagatggacgctagaggggtctggctgtctgggtgtgtggaggaaggtggggtgtttcacagaacttcacaatccccttggcaggcataacctgagccattagactgacctcatccatcttgatgttatttctctcaacaagcaataacctcagctttccatggcttgtggtttctgtaggctgggactgaattccttgactctgaaggaaggtgtccaattggaaacagtaaaaaaataaaattagtccataaaggcattttgtcatcagggagtgccccaaatttggaagagtctgttgggtaaaggtcttggaaatccacatggagcccgaggagagatttgtcagccactcaggcattcttataaacaacattgattaagcatctgttgtgtactaggccctttgctagaaatgtcagatactggagatgaacaaatgctggtcttgttttcaaggaactcacgtattagcaagagagatgaaagcgtgaactgttagagtgaattgcatgaaaactgcggacattcaaccacttactctgctctattaaaaaccacgaaatttcctatggttcagtcagatactattatgtcttatgtatagcatgctgtgggaacagagaagaatgagtgatgaatttacatattggatcgttgtcaacaggctttaaccttggcctgaaagggagaatagagt

SEQ ID NO: 58645 - DNA, 1268 bp, Bovine  19866880668978
  misc_feature (1)..(1): n is a, c, g, or t
natggaaaatagatgggaaaacagtgtcagactttatttttgggggctccaaaatcactgcagatggtgactgcagccatgaaattaaaagacacttactccttggaaggaaagttatgaccaacctagatagcatattcaaaagcagagacattactttgccaacaaaggtccgtctagtcaaaggctatggtttttcctgtggtcatgtatggatgtgagtgttggactgtgaagaaagctgagcactgaagaattgatgctttttaactgtggtgttggagaagacttttgagagtcccttggactacaaggagacccaccagtccatcctaaaggagatcagtcctgggtgttaattggaaggactgatgctaaagctgaaactccaatactttagccacctcatgcgaagagatgactcactggaaaagaccctgatgctgggagggattggggggcaggaggagaaggggatgacacaggatgaaatggccggatggcatcaccgacttgatggacatgagtttgagtgaactccgggagttggtgacagacagggaggcctggcgtgctgcgattcatggggttgcaaagagtcagacatgactgagcaactgaacctgaactgaacccctgctctggatacaaattctgattttaagattgcctaagaagccaccctgcttgactcattatttcacagtatggttttaagaccactcaaccacactgcaagcctttttcaaaccagttctgtaccaccttgtccttatataattgttttcaacctcaagtgaggacttgacatttttacacagttgaatttcatcttattgattctggcctataacatcagtcttttgagatttttctgaaatgccgcccagttctggtcatctcttagtcaacatttttatcaaccaattatatgaagacataaaagatatacatatcaagtttgtgggtaacacaggaagtcctgtttccccagagaccttcctttggaatggctcaaaagcattaatcagcacataaaagaacaagagattgcctcccttacaaaaacacaatgcaaaacttgccaaagtttttagagaaaagctccagaaatgtgtctggctgaggatacaggcttccctgagtctatttcagagctcatgggggtcaagtcagacaggcctgtataggggtcccagctgtgggagagttactctgttttcctaaggatcagttttctattgaaaaggaagtcagaagcaagcacc

SEQ ID NO: 58646 - DNA, 1978 bp, Bovine  19866880704146
  misc_feature (1)..(1): n is a, c, g, or t
naggatgctcggaggtgggtgggtgggaccgggaccctccaggtttagaacttgaacttggggcaggttagaaatgggtgggtgccggcagcagggagcaagctggctacacagttctcgaattgatcccctgccctgctcccccaactcacccccatatttaacaccttgtaataagtataaagagcagaaatttacaaagaaagccaaagatgacagttgcagggtaaaaaaggtgtgggaaatatgtgaggaacagaaggctcagaattctgcttggctattagtagcttgtgaggtgtccacaggaaaccacagtagctgggcctggggaccgggtggcagaagggacctggggaaacgggccagagcctggggtgactttggtctttcatgctcctccagggggcagaaactgaccccagggtcctggctgccaggctctgctcttgcattgccttcttcacgcccgcctttagtatctgctttgcagactcacactgatgctgtcagcaaggtacttagcactttccaaaacaggacaccttccctgagacttcagtgacggcaaattgtgctggtcgtttagtgactcctcaaagaaatataaataacgagaagcggagttttgtcttctgaaccaggacagcctgctctcaccagctaagcctgttttcaacagaagcaaagcagaaagttcaaatgtagcccacccacaagccaagttctcctaaatcctgtaccttcttttgtctccataattgagggtccagcagtcatcctgtctgctcagactcagctctgcacgacctcaggggtggagggcagcccactgactgaccaccacgccagaccacatttccttcttctcgggggaaggccgatcctatggccatcatggcccctctcttcttaagtcaccaggcacttgtctgcttacctgcctgtgcttctcaaggagaaacgagggagagtccttctgtagtgataaaaagctgtgaaagatgaacagttatttccggagatgaagatgggcatttgaagtccaaggtaacatcatttcatagaagaaatatctcaccattggctttataggttcttgaggccacgataagtgagtagctgccccaggaacaaatgatgtgcagtgtcaaaggcacaagcagggggaggtccatgcccggtggacccctccgccccccagggtgggaagcagggctgtcccaccctcacagatgtcacacctctggtgtctgcctgacatcggaaccagcgttcaattagctgaacaaatgtgttccatgttcttccagatcatctcagagccatttgtatttggcttcataatgcatggtggcaggggggtgggatgtgggtgggaggtggcagtggagaggtctgggtaggaaagagttgctgaagatttatctttctaattatgctttgcttagggctaatattaaaattagtcttaattccctgagcacatagcagctcaggaacacgctgggctttggggaggctgggctaggattttcatttatttgggatagacatacacgggtaatggcaagtcggctattcagccacgggactgggctgagatgtccaagtgtccctcctgggctggccgcccctgagttcactcaaggaggatggcagggagccaccacactgcccttgacctgctctgccaaatggcttcagcaggtaaaccacacagctcttcctattgttctgcagcaaaataaccctcgatatggtaaataatatgcaattaccaaattaatacagaatggcatgtctcctttgccccaagtacccaggatgtgttgtgctaatgacttttgcacctgctgagcgtaattagtgagtaatctgcctggctgtgtaattacgggtaaacacatgatatttaccaataacttcctgctaggtgagcaccagtgaacactaacaggtagccactgagactaag

SEQ ID NO: 58647 - DNA, 800 bp, Bovine  19866880740121
  misc_feature (1)..(1): n is a, c, g, or t
natcctgccgtcccctgggccaccacaggctcacccacagcagagcaggagggctgttccgatgcctgcttcccaggaagccgggctctgtgcctcgggctccctcctctgcatgcacagtccccttaattatgtcctccctgcacacagcgccttcatctcctcctcctttgaaagaagcctgggcaagttcttcccgcctgcccgggacaggtgtggggatgaccccagccctccaccggggcccttggctttgatgctccggctttactgctgtcctttgtattccgtgcttcccgctcccgcgcctcctgcccagggtgttttgatgagcttccctctgcactcatattgtctcagtcgttaaccacccatttgcaagtctgtaatttacttttgatcattcattttatgaggcgcgcagggtaaaaagccgatgctgttcttccttcgtttcccctactcctcggtctagtctgcagcggacgatgctctgccagccccagaccctgttgccatatcagctcataaagaggcatgtgcagccctgaccttcctgggagagatttttctttctgtttctccttctgatgtgttctttagcttcctcccctcagggattagcttctctgggaaatggaggagttgggggaggcaattatttgcgagtctattgatatgataaccccgattgacagcagggggactcgctggcagaacggatgggattgcactaaaccccgagaggaggagctacaaacggagacccagcaacacttcccaaactatatttcacagct

SEQ ID NO: 58648 - DNA, 1746 bp, Bovine  19866880766455
  misc_feature (1)..(1): n is a, c, g, or t
nagggcagggagctccagcagaggacaggcttgggtgtcagaaaaacacaggtggtgatggtggtgtctccaccctcgctggcctgtttctctctggcagaaaaagcaatgactctgtgattctgacatttcccaggcatcttggatttcatcttaggaacgtatgtacattcctgatgggtggacagtggaaaaagaatggcttttgatgcatcttctgtgctaggtcttctgtgaatgctcatatacatcatgtcactgtatgtgagaaatccttgagaaatagacgttatgattattattattatcattatttagtgaaagtgaaagtgttagtcccttcagtcgtgtccgcctctgccaccccatggactatagcctgccagactcctctgatgacagagttctccaggcaagaatcctggagtggtttgccattcccttttccaggagatcttcctgatccagtaattgagcctgtgtcttctgcattgtgggcagattctttaccatctgagccatcagggaaggccatcattagttacattgtaaacatgaagaaactgaaggccacagggttagatgatgtggctgaggtggttctcctgagttgtggagagccaagctgggttccctagaccccacgctgtagtactgcgagatttttactgcattttctcatacactcatacatcagattccgtaccatgaaaatgcatgaccaggctacatatgatcatccccacttgacaaatgaggaagctctggctaagaaaggttaattaggaagagaagcagccttagatcctgatctgactcttagtccagacttttctgacgaccctaagctgcctactttttcctgtcactgctatactcagtcttattcctggctcttgtgttttgaaggctggaaaattcccctggttgaatctccaaatttaaagtgtaacttaaagagccccagggaaaacaaatcaactgcagtgctttccatcaagcttacaaagtccaccccaaaattaatgggacagttattgtttataaaatgcgaacctgattaaaaacatatttattgaggattagcacatctgcaatagctacagatctcctcatagtcattaaaatcttaaaatatgtttctagtaacaacgcagttatttatatgatagttgcctgagtaaaacagaataaaatgaatatttgatgagtatagatttcaatctgtaacacacagatggtctggggttgtggggctggggcaatgggaacaaaaatcgccttaaaagaacagtgtgaggttgatttatgttgatcaagtggtgttttcccgctgaataaaatccactggaggtgtgctccctcagggaagtggcttccttagatcaaatgagaagagtaggtagtaccatgggtaactctgtaaccttacggattttcagaagtgcgtccaagtacagtaagaaacgcctgtatttcatatcattcaaatccagtaagagcagaaaaattactaatcttgaaaataagactctaaagagtaaacttctgtttgcagtgactgttttgattgttgttgaggtatagttgctttacaatgttgtgttggtttcaggggtacaatttttaaaatttttttggaatttatttgtttctggctgtatcagggcctcgttgctgcccatgggctttctctagttgcagcaagtggggcctgctctactagttgcggtgttacagacttct

SEQ ID NO: 58649 - DNA, 1064 bp, Bovine  19866880780709
  misc_feature (1)..(1): n is a, c, g, or t
nttttgttgacaaagttctggaaatgatgatggttgagccagctggtgtattatgttccagtgaaaaatcgtgatgatgtggagatcaacagtgccatgaaaacctccaatgcatctgcacctccactaaggttgtgggttacacccaagtgacctcagcgtcattttgatccagtttgcatctaggactgactgccagttgctttcaaaatcctgtgctggcttcacaaacccctaaaattcggctttcattcccagttgcctttatttttgactttgcttttgctctgtgcagtgcataaccttcccttaggacccagaggtttaaccctgactcttggggtaggttgcctgtttatgtaccatgaccttgaggaaccagaaacccagaagtgcaatcaaggaaaacttccaaagacctggatatctaccctcttgaagcaagttcaaggctgactcagaaatctggtaactgttgcatcctttagcccaaggatggccatgtccagggtgaagctggggcaagcctagttgcaaagatggggtggaggaggaattatgtcatccaccaggatggggtgaggcaacatttgggggaacactgtcctgccagcaagctttgtagggaaagggctatggataaaattatcaagtattattatcaagggttatttaaaaaatgcacatgattgatttgtaagcagggagacagaagtaaaggtgagatgaaggatggtgcatgatgggagttgctcatcaaagacatctgagcaggggagagaatcacctgtgggggctggagaggcacagagtctggagaagggcctctagggtcagcagtagacagcttccatcccaggcaccaaggagttggagaatttacataagatcccaactgagtgggtgtggattaagacctaagaatctgtttccaaaaccagctccctccctagctccattcccaggttgggctgattaatgcatagattttgaagtctcagaggcaagagcctctgggccaaatccaacctgcagagactctttttgatagccttaagaatgtt

SEQ ID NO: 58650 - DNA, 684 bp, Bovine  19866880879020
  misc_feature (1)..(1): n is a, c, g, or t
nggggtcgcaaagagttggacacgaatgagcgactgaactgaactgaagatgaattaactaacccaaagtggttgagttgctggatgacagagccaagattgggagttccatccatctctctaactaaagcctgggccaccttggcctttcagtttcaacatcctgagggaagctggccagtggccccagggatttgacctgcaataacgtgagggagaagcagagatgttggatgagtccatcaagtcacagaccagcatctttggaggcaatggccctttggataggggggcagtgaaatttagatttcagataaatgatctagaatatatacaaaatctgcaatatacttatataaacgttatttctaatatttttttaatttgctaaatctggcagcctgtcatagaaaggcatcagtctccaaactgttcagcatctaccagaacctaaactataatttagttgtagggcttggctggaatctgaggagtgtttctggaagagggaaagatgaaggtcaggtcactgcagtgggaagggctagactgaacttcaggacacctgcttccagccccaggatgccctacctagacaggctgctccctcgccctcgggctctgcagtccctgcatatctttccacagttcctggcagcagcattcctttcatactggactttg

SEQ ID NO: 58651 - DNA, 1682 bp, Bovine  19866880880392
  misc_feature (1)..(1): n is a, c, g, or t
ntatcccactggaaaggcagtgggccttcccagctgaaaactgagtgtccaccaaccccacaacccaaaactagaccctgctcaagtactgggaagaaaagatgagacccaaagcccaggggatcctgagctgagacgctagagctgggagaaaagtcctgggaagaaaagatgagacccaaagcccaggggatcctgagctgagatgctagagctgggagaaaagtcctcagatgcacctgtctctttaggacatatgttccctcaggcctaggcctcagcaacgagagacaggaacgttctggctgactttccacctccaccagctgcccagcccatccctggcagacgcacagatgcccccaggaaaggagagagaagaggagtcttccccagccctcactgttcctcattccaaacattctgtgagtcccagcacactggaagagtgtgtcctccgccaagcacagctccctgtttctaagaaagggaagaaaaaatagttgaaagggtttttggaccatggagagcttaagtttctggtaacataaatgaatcagacacaggtaaaagaattttctccagaagtaaagaaagatgctgtgagttcttctattggaccagaaagtggggaaaagatagcggagaagggagatgcatccaaggttgaaaggagggagaaaaccactgtgaacggtagatcaaagagagggtctggtgacgacaaaggtcagcgtgcacctcccaaggccatatcctgcacttgcttattactcaacttcttcacctctaaagttatagatttaaatattgtgtccaccaaccacgacttccaatccttccagacgctttcatgctccctcaatacttattctagggaccccaggtccttgacccacccaccatacccacagccccatctttatttctcctccatctctacttctttccctgtgcacatggagtccatgttccagcactgcaagctccatcttgccaacattcctgtcttccttgccccactgactgactagggcgccacagcagagcccacggagaccactgcaccctctgccccaggcttaccatcatggtgttgactctgagaagcagggcccatgccactgaactcaaggggccaccatgaagttagcatgttcagtggaagctctaaccagccacccaagcaggcctccctcattagttctatcgctgatcctgtataaaattaccttccactttcttcactctcctgatgagttcatgatcccaccatgagtggaagacctcacctctcccaactcagcagaactcaaccctacatcacccatgatttgaggagaaaggagacacagtctcactgctgaccagtcaggctacagacctgaagctagaggaacaccctgattttatcttattttagaaccgagaagcatattccagtaactctcaagtatatagtagacggggtatttgggaccttattaaattaatctcccaggtcctccgggcatagagcataggcttccaggactccccaccccgtcatccttgcctgcccctctttcttctaccacccacccagagtcctgcctttccttgtgcttgctccctggcatgatttatcacttagtccacactgtctgctgtcgctgctgcaggacctggaccttcagatctca

SEQ ID NO: 58652 - DNA, 819 bp, Bovine  19866880931344
  misc_feature (1)..(1): n is a, c, g, or t
nagaatcccagggacggaggagcctggtgggctgctgtctatggggtcgtacagagtcggacacgactgaagcgacttagcagcagcaccagcagtgatgaggaaattgcaacgggagggctgaggtgggtctgggagagggggttagcctccagtcttcatattgcattcctgaccccaactgccttgagataaaggctaagacccagggcgcagccagccgcaggtccggactgatgctctgggcactggggccggacgcagatgcagactccgccgcgggttgctctggccagcccacgcctcctgcttcagcgcaacgccactccctccccgccaagtggctctgcgctcgggaggcgggatcgagttcttcggtggccccaggaggctgcaagctttgggaggctgggagaggagggagggagagcgctgactgggcagtccaaagaggagggggcctttaataggctcgcccagcgcctggtttgctgcgctgcgaaccgctggggttcggagaagcggccggcacctccctctagctctccgctgcaaatcttcgtccttgcacttgacagcgattgcacttaagctcccagggcgcgctctgcttggaaaggcacaggtaggaggcgcgagctgctcggtgcacgctcacagctctgggaggagtctccctccctggggttctcctttctgggagctgcgggcggcccggggcgtcggtggttccggtgtgcgggctgcaaggagaccgtgccggcggtcggggagccgggccgggcccttccgagagcgcggctgtgcgctgcccggcgc

SEQ ID NO: 58653 - DNA, 1117 bp, Bovine  19866881012635
  misc_feature (1)..(1): n is a, c, g, or t
ngctgagcagcagagctcagcaggcagacaagaggggtggccatcctgcctccttcctttccacctcactgccgcctctgtctgctctatgcacaacaagctcttaggcgggcggctgcaagtgcacagaaagctgggtcagggatcaggcagggtcactgggcgctcaggccttggattcggctgctggtccccacggtgtgctgggcgtggacacccctttctctttccatgctgtccccaggctctaccgcacacttggccctgggccttggcaaacattctaatttgctgcataattaatgtaacagtgattcaaagcagagaggcttctgggactaattagtgacctgaatctccatggtagcttgcattccattcttatcagtgccgggaagagctgcactccctgaaacaatgtctcccacttacgactgcgacacagccaagaggcaaagatcattttccctttcagtgtgcacagattccagcagtatgtgatcacgtcccacgggggctgcacttcccctggaagagcctcaccgaattagtccctcgtgaactttcaggtttctatgtgggcctggggagctgtcgtcgcaggtggagaaataaagacagtcagcaacagcttgctgaccatccacagaatggacagcattgttctgggggttggagaagcttgaaagagaatggaggcctcactctctttccagagaccttgtagtaggataataaagcccacagtgatgagaatagatgacctgtgcattctccttcctaacttgatcccctgtttgtctgagcttgcatggctcccagtgcgccagtattcaaagtcagagtgacctcagaccaggaaagtcaggagcaccgcagcagtgatggcctcactgcctcccccgcccccgccagcttcctggagctcctcacccccatcagaaccactgcatttcagctcacttgctcaggcccagcctcatgaagcctagagtcagcaagttgaggacacggatagtgggccaatccagtctgaccactccttcaattcacgtacacatgtggtccgtggctgctttcacgtgacaatggcagagtttaatagttgcaacaagca

SEQ ID NO: 58654 - DNA, 1170 bp, Bovine  19866881049463
  misc_feature (1)..(1): n is a, c, g, or t
nctgctatctagcgtgtgagtttggtaaattacactgaatttctctggactttgttcttcatctgtaacatctatatggatcgtcctttgtgtagtgttagcaggacaatttatcaagtctctggctaaaaggaggtgtggcttaggactagatctgggtgagatcagctcagagtttaggacctggtgtttaattcatactggtatctcagagttatttcccatgtgggattctaggatcagagtagatggacctcagagaaacatgaccattaggaaagaggtgatggcggtggaagctgcccgagttcatcctgaggctccctggacaccatggactgatgcccatttagacttgattactggaagcccaaggggccaagcactgtgtggttaggggagtcatgtcccggcaggaaagactcagtgacttgtgcaagctgcaagctgagccaggaatgcaacccaggcgtcctgactccacacccctcccagtgataaggccccttcccgctccctgcatccggggctggacagccctggagccaagggagtgacctcagggcgtccggtgagctcattctgcggccgtggtgtggatgtggacggcgctgtcccagatccgagggaagggcttcacagcctgggtttttcagaggccggtgctgggaacaggcccttccccggagactggaaggaggcggtgtgctttgagaaggctccacggacctgggcgcgagagccagtgaagcattgaagggaggggagagaatgatttatgagcgaaacataaatgagcagaactggctggcttgacctcaggaccaatggaggggcgtgggagaacattctgtaaatactttagaggcatcggtgccagagaatagcagctgaacctggatgccagggaggggagggagcgcaaggctaggtctgtcagggaaatctctcctggagccgtcgggaggcaggcctcctctgtttggtcatctcctcgtggcaccgggtttgagggttggcaggtcccaggatacagaccacgggggccagagaaataggcccagatcacttttcctgtaaggaaatcaggcagaaattataaggcaagacaggcagtgaggacagggtgaaagggagagccctgcccttcctctctatgtcctgttctaa

SEQ ID NO: 58655 - DNA, 680 bp, Bovine  19866881051995
  misc_feature (1)..(1): n is a, c, g, or t
ngggcttcagggcggctgcacctggagcgcttcatcccaatggccgtctgccccccaaacccggaggctgagaggcagctggagctggagatcgaccgcacccatccggatgatcatgcgggacttcgtgtcgtcctggtaccgcacggtgagccaggagccagccttcgaggaggagatggaggcagccatgcgagggctggtccaggagctccggaggaggatggccagggtggacagccatgctcttgcccagagggttctgactctctgcggttgtcacctgcagagctatattcaggcgaaggaggccgcagggaaacagagtggcccaggggagccctcccagctctgggaggcttactgccgggccagcgctccacaccctgcagtgcagagccccagcgctgaggtcacctacacacgtggcatcgtgaatgtgttgcttcaaggactagtgccaaagccgcacttggagacccggactggcaggcacatagtggtggaactcatcacttgcaatgtcatcttaccactgatcagcaagctctcggatccggactggatccaccttgtactcgtgggcatcttctccaaggccagaactaacccagcaggagtggctaatccactctgcccagccagtgccctggaacagccctcagtgcccacatctctgc

SEQ ID NO: 58656 - DNA, 1482 bp, Bovine  19866881070793
  misc_feature (1)..(1): n is a, c, g, or t
nttctgcctggaaaactcttgcattttgtgcagcaatttggagctccttcctatctgctggatgggggtgctgcctgattcacgaatccagacataagatctttaaaatctcttcagttgaattctgtttttcacaccccaacccccaatttccttctcccactgcagcaatgaccgcactggtctcgtcattcttctggcctctgtctggcctctgcttcagtgtgaccttggctgggagctgtctgtgcatggttacagggggggagggctgaggccaagggagaaactgaggtacaggcggaagggggaacctcgcctctcccccttccccctttccccttccagggttactccatcactgacttttccaggtggacacttacccctggcactcagccgggaagaatccaaaaccctttgtttctgaggaagccttttcccttcatgtttgtgagggaaaggaaacagaaaaatgagagagaaccacaattgagctgcaaaccccacatagagcctgtggctgttgaagacaaaaagggcttttggaaataaattgtgaaacagaaaggggaaaaaaagccccataattttctctgcgcttgggcggtttctactgttccactgtgaaggaacatcccgtctgtttctagccatggctcagaacacggctggccaggaatcagtccccgagtaacacgcaatccctcatcaccagggaactctggggtgtgaccaccccctgctccatggatcccccaagatccacggggcaagaggcaccatgaacgattccagcgcccatcactagatggagctcttgctatgcacaaatccaggccccctgggcccggggggtagcggcgaatcccttagctggagggcagcatttttcgagtggtacttggttaagagaatccatttctcttccagttaggccagaagcccagctgctttttcaggtgctcaggaattctgtgcgtgtggattcatgcgtagcatccttacgtgcacgcgctcgtgcgcatgcacacaccccaaactcccactcattacctttactagctatttccccgaggcctggacccgccccactggcagcctcagtctccccaggtgattctttgtagccccaagctccccattttggggtaagactctctggcttcgtgaacacacagcttccatgtaattagctgtctaattgctcccccacactgagcccatgtgtgtgttactaattatgatttatgtaaaaactctccctgccattctttgttctctgctttctctctatggaggggccaagggagggatttgatttgcaaacttgtgaatggaaagttttccttcctctgcgttgtctggactcttccagtttcaaaatccaggccttgtcttggacctaattcccatgtgcctgcctcctgcctctcgctccccgacacaagctcaaggacagggtgcatatcacccgtaagg

SEQ ID NO: 58657 - DNA, 1483 bp, Bovine  19866881127682
  misc_feature (1)..(1): n is a, c, g, or t
nctcctgaagtcttttcttctttctctccctctgcacacctgccgggaagggagctggtcttgctcacctttgaaacctccccagctccaaagtcctatgtgtggctggtgaattcaaataaacacatacacacacacacaggctgcccttgcaggcgcaaagacaaagaaaaccgacgaaggttaatttttttggcctcttctcataatgactcatccataacgatttctacgggctgtattttcttctgtgacagaaacaatttactgcattcctgcaaagcccattttctcagcgtgatctagttgtgcggtggtttgggaagtaatttactgatattttgcttcaaaatatcttacaaagacaaagggttctgttgacacttgaggtgcattccttatgggctagaaagataggataaaacaattttaaaaagtaaaaacatggtattacagtcactttgaacttgggctgtaaatcacacgcccctggttgagacggccctctcctccccatcatttccgagtcttgctctgagcgctaggatgctctgtatgtttgcatgggcagattcactttctgctttgttggaagcatgttttcctgttggatcttgagcccggtcctcaggatgccagtgcacgcttttcttctgtgttcttcctgcctgtcacatctgtggaggcaggtaaccctctccagatccgtaataaaggagccccacagatccctgcctccctggctgctgcccttggtcccagttctttttcttttcctgaacattcctcagtctgggagtgtcgatgagggtttcccgggggcttctccgttcaagctgcagactagagaactttcaggctgaccctggctggcccctggctttgggcagaaactgtgaggctgtcctcctggtccagcgcccctgcaaggggctcctcagcttccctggattatccgctccaagctgagctccttctccaaattagacaggatttagacttcgtcttgttcttagtgctggcacacatttgttattggttttacccaagatttagactccttttaaaattaataatgattttaggactttataatgggcaaggtttatgatcatcagtataatcctataagtctaatcctaaaccaacatgaattatgctcaggatggcttcagccagatgcacagatctttgatttcctgagcagttgacatgaggaggggagagagaagacagccactgttagctccaaatccccaactgaggggactccgtggaaatttacttctaaaggagaggacttcctggacctttatgtttgctaaagatgaatttaagttacactaaggtggctcagaaggtaaagaatctgcttgcaatgcagggtatgtgggctcgatcactgggtcaggaagattccctggagaagggaatggcacacccaccccagtattcttgcctggagaattccaggacagagcag

SEQ ID NO: 58658 - DNA, 717 bp, Bovine  19866881144202
  misc_feature (1)..(1): n is a, c, g, or t
ntgcatgtgtaaataggtgacatttgaaggaacaagagcaaagtgactcagacatagtgccctggactcataagaactaggagagacttacccattatgcagttaggcatttatctaattgtctcaaaggcaatatgcgtcagcctctcccaggatgatggggacagaatatagcccaaccattggaatcttcatttagatagagattgggcaacaaggaaatttacccagtgtgcttttaagaaggttttcttgcccagaacagtacataaaccttcttgtccggaagatcctcattttttctcagcctgactccaatccatttgccaatccaaaacagagtgtgttacacattaaagccacaggagtctttatgggtaacatatggagccataatatcttgtaacccagtagtattgtccctagagctaatataactctgttaacatatgtttctgctattcccatcctgagagatgtgtattgaaatatgctatgcacaatgtatggttaattgaaagatacagggggtatattaaaaaataaacctgtttatatgacctatgctggaatacatctgaaataccatacagttgttttcaactgcatatagaagaaaagatagtgaacaatctcactgtcttttcctctaattgctctgtccttttcctttcaacctcccatgtctccttatatgttttgctggtgccaagctaa

SEQ ID NO: 58659 - DNA, 652 bp, Bovine  19866881187304
  misc_feature (1)..(1): n is a, c, g, or t
naagtggggaaattaatcaacttttcttctcttagcatgtctttgcctatctcctctgctgtctcacctaattgttttgcactcaatatggacaaaggcattgttctcatttcaactttccctacaaagctcaggtgtccttatctgactctgaaactcactctaacctcatccagcaaaacctgcctttagctttgcagcaatgaatagggaagatcctcagcttctttcaggatgtgagtgcaatactggagcctcatctcccactgggtcacaccaggaaacacttctcagtttccctttctggactcaacagcctcgtccctcctctcgtaggcacctgaaagaaaaccccagtgtccaaagtcattggtgacagcgatgcccagaccgtgtgactgctctgaaaaaatttctaactacacctatgaagcgacaacctttctgtaaaaaccactgcagaggtttccaattctgtctacgtggttaacaaaaaatgtagaggggggacactttcatatccaatttatttcatgatgaaacggagcaggaccctatggtccttgaccaccgcccccccaccagccctgcccaacacacacacacacacacacacaccctcagcctgccttttgtctatggaaaaattttg

SEQ ID NO: 58660 - DNA, 936 bp, Bovine  19866881253012
  misc_feature (1)..(1): n is a, c, g, or t
nctcctctcctgtgcagagactgggcctgcaggctgtcacccattcatcaacgcattctaactgtaactcaggtattgatctgtgtttgttggtttttttcctgtaaactcgggctgtaaaggtttcattagcctgcctcacagtcattacatcaagtaataggtaacattcatcttctctggacttcacttctgctcccaatggatatcggtttgaagagcgttaatcaagctatgaaaatcattggcagctcattcctttatgatgaaaaaggtggtttgcagcgtcactggctagcagaggcctggccccttagcaccttcagcaattacgggctgtgtggcttcctgcttgggagaatttttttttgcctggtgcctgtatgcaaatctcattctttaaagcgagtctctgagtcatgtgcagttagacaaggcacagacaaggctgggcttctctgcagaccgtgggcagagggagggtggttaatcactgtgtggatccctgccacatccagacccatgcagaggtgagaagggggtctgccaaatggtgtccgggaactcagctaccagtgacttgtctacctgctccactctgtccacccaggtgcagctcagttcttcagagtccattatggctgtgctggggttagtggaggcaggggaggggggtgatgagagatgagaaacagggacaatgaggagagtacagtgttccaggtaaggggtggaggtgaccagggccagggcagtgggaggacagatgcagcaaagggcctggaaatgtgctagaagacttagagacatgtgtctagctccatccaactctgtgagattagaattacaaacccatttcccagatgtggaaactgaggtgcaaagagtttaagaaacattcctaacctcagagcttcctactgggcttccctccag

SEQ ID NO: 58661 - DNA, 1539 bp, Bovine  19866881262916
  misc_feature (1)..(1): n is a, c, g, or t
natcagtgctgtaatagtgaaatgagcaaagtggggaggaaggggttggctttgtcttgcggatccagggagagcatcacggaagaggtggctttagaactggaccttgagagatgcggaggggtcactgggcacagatgaagcgaaggcaccctaggcagggggagaacaaagccagccagatcatggaaggggatggggaggcctggtcgtggcctgaggggcgggtgacacagccacgtgagcaagttaagggtgagacttggaagggccagggcatggtccccgataaggtaactgtgagctggtgcaggtctttctttaggaaatgatctgatctgattttttttttctttcctttagtacaatgtcatctttgctggtgtgtctgatgatgtggactgtgagaggttgatggtagagaaactagtaagagaagtgacacttaaagtcagtcctggatgtggtcctgacggacccgatttggccgatatgtctaagtagacaggacaggggctggtcaccaaatgcatctgggggatgagagagaaggaaaagaggagggtggcagaggtttctagcttgatgggctggtcattcatgatggaggcagggttgcagaaggatgggtggatgtgagtggggggtgaagggagagatgcagtgactgtgctgattatggttctctcaggaggagaggggcagtggagggtcttgacatttagatctgggtgtcatcacctcacaattacgtgtgccaaggctgtcactcaaagtgagactgactgattcccacttccagactctgatccaatcgccaggctgctcatcctccctttgtctgtccaaatcccaattcttgtctgaatctgactggcatgagggaattgtctaaacacctctctcatttcagtcaggacctgggaatctctgttgtgtttctttcttttttttcattttccaagtcatttcccaggactcatggcacctcaggactccaggggagggcctgtcagatggagtttatttattgaatgaaaagcacttaataatttggttctgttttcccttgtccttttatttttctttctacctctctctctccttccctgggctttgctgagtggggaatgggtcagcagtttggccaaaacattcttgagtacttaattcttcagctgttttacaagcctgcctggtttatgtagctaatctttctctctggtgcttgttcctggaggaacgtgtgtgtgtgtgtgcatgtgtgtgtgtgtgtgtgtgtgcatgtgtgtgtgtgtatgtgtgttggggctgtgggagggctgggatggccatggggccctgctcaatcaagagaactaagagcatgattaagtctgaggtgtctgcctgtgctcagctcttgcattcttgtccactggctctgggttaatgtactcagaccccttgagcattcttgttcagtctggggagcttggtgaggtcatttgtctcaaggtttttgtgagatctggagaccctgcaaagatatagagagat

SEQ ID NO: 58662 - DNA, 2701 bp, Bovine  19866881316519
  misc_feature (1)..(1): n is a, c, g, or t
nccggggccagctgaggaatgtcttccagacctggagaaccagagctcccagccgctggagcacaggaggggagaggggtgtggagccacagaggagggcctgggcttgacggcctttctctagatcctgggctcaggagttcattccagattggaaacacatgcgcgacgaggcaaggcaggaaccagaaatcaacaacacataaaaatatttccttccaagacacttttccctcctcgatcttgcccctcctccccagacttcacttcccttctttattggccatggggcttgctggggaggtacaggctctcgggccccataaataataatatgaggagaggctttacatacagttcgtgtctccattcctgagtcgttcagaatgcacctgaagctgtaacagccaagggagagatttccaatggcacatgaagcctgctctaagaaatgtgtaaaaagggctactccttgttactccagtgtttggtttggctttttcccattagtgtcgagtgatggtggcgccgcctccacacctgtaagtcagaagttggagggaaactcatctccaaaagcaggttctgagcaaaagtgtcttgtgagcaaggaccttctacacaggaccctcatgtggtgcccaggaagatatgagcatccttactccccaacaggttgcatggcgatggtttgctgctgtgtacatacacggacttttctagggagaaagcccacagactgttgtcaaattctataggaaccatcactcaaaatgcttagaaatgactgacttagttgttacctagtctggtgacctcaatcttatctgaagtttgaatcctttccttaaagtttcattaattcaataacccaatgtatgcttgaactcctccaatgatgaaaacctgagccaatagcctaataattgagaacaagggctttggagtgccagctccaaagcctgtattcagagtttgatgtgtccctttctaatcgtgtgactttgggtcagtgattcagcgtggttctccttcatttttatcatctatatatgtgtatggatcataacacatcttaggtatttttgagattaaatgaaatcatgtatgcaaaatctgtaggcagcacatgggaacatagtatgtggataagaactgtcattgctgttactatcatcctcatctttttttttaatgtggttttgttttgtattatttgcaggtactttttaattgaagtgcagttgatttacaatgtgctaatttctgctgtgcagcaaagcaattcagttataaatgtatatacatgcttagtcgctcagtcgtgttcaactccttgtgaccccatggactgtaactcgccaggctcctctagccatgggattctccaggaaagaacactggagtgggttgatgtacattctttttttatattcttccccattatagttgatcacaggatactgaatatagttttctgtgctatatcataggaccttatagtttatccattatacatataatataattatattatataacatattataattatatatagttatactatatagtattatatgtataatagaaagaaagaaagagaaggccctcagtcacgtccgactctttgcggccccatggactgtaacctaccaggctcctctatccaagggattatccaggcaagagtactggagtgggttgccattttcttctccaggggatcttactgacccagagatcgaacctagacctcctgcatatcaggcagacactttaacatctgagccaccagggaatcctatatataataatatatctaattgcatctgatgatcccaagctatcaccctcatctttatcatcattgctgttaatacagaaacaattcactaccatttggaaagaaatggtaatcctgtttttcttccttaataaaattcttcttccttatgttgaactgaaatctgcttccctgcagcttctggtcattggcgttcctagacacttggtcaaacacggcaagagtgggaaattgaatgcaggctgtcccattgttcaaagtagcaacccaggaaaacgtaccttctataataaggcatcatagtaagaatcactctataagaaaggaaattaaagtgagagagttttagactcaggataaagtgggtctttttgtttcatgaagacattctgacaataaaggatatgcagagtacatcatgcaaaatgccaggctggatgaagcataagcttgaatcaagattgtcgggagaaatatcaataacctcagatatgcagataataccactctaatggcagaaagcaaagaagaattaaagagcctcttaatgagagtgaaagaggagagtgaaaaagctggcttaaaactcaacattcaaagaaaactaagaccatggcatccaattccatcacttcgtggcaaatataagggggaaaagtggaagcagtgacagattttcttttcttgggcttcagagttactgcggacagtgactgaggcatgaaagtaaaagaaacttgctccttggaatgaaagctatgataaatctaaacagtgtattaaaaagcagaaacatcactttgccgacaaaggtctgtgtagtcagagctatggtttttccagtagtcatgtatgaatgtgagagaaggacataaagaaggcttgaacgttgag

SEQ ID NO: 58663 - DNA, 853 bp, Bovine  19866881361155
  misc_feature (1)..(1): n is a, c, g, or t
ntgagcatttgggaagagcatctaccccaagccccatttctcagccccctactgtctccagacctgaggggctcccaaggaaaggccgctgggatgcaaaggtgtcctttgcctgcagaactgaggctgccttaagtaaaagacattgtttgcagggagttgaggctggaaaggggctgcccaacttctgtgcgcccagctggttctgatcaggggcacggataccttgccaacctggcgcttagccctggcagaacttggcagcaccggcgtcagcacgagaagggaggggaacagaatttctgcctggggattcagcccaggaacctgaagcttcaggggagagggaaggagaagacaatggggatctgacctcctgtggtgagtgtccctggtggagccacaactattcttggcccacctgagctgccctctgcctagacacagctctctattgagctggggcagggaactgagtccaggggacagttcctgcagccaggccgattccaaatagatttactgatgctgcggactcagcaggaggtgtgtgtgtcaccctacaccccagcacctcctccaaggaccagatgaagcagaaggctccaggtgaggccgcactttctcttatcctggggagcgcagaaccagagatgtgccccatggaggactgacctacccagagggcaccgattcctgaaatgggcaccctggccgcagctgcagactcagttgctgccattttggtgatggcagtcttggctatcatcccattctagcctcagcctgtgcccagctgatgcctgccttgggggctttggcaccacctgtgcagaacagtctacatgaggca

SEQ ID NO: 58664 - DNA, 2128 bp, Bovine  19866881384171
  misc_feature (1)..(1): n is a, c, g, or t
ntgattctggaagattaagcaagaaaacgaaggcccactaatactgtagccagaaaagtaacctggcttgaaattcgtgcactaattcaaaagaaaaaggcaggctgccagcaattcacgccacatttatctaagttacattacatgtttaatgcttattttgaccattttctccatcctcagaaacagatatccatgctcctgattaaagactagatgcagggacttcctggtggtccaatgcctaggactccacgcttccccccccgggggcatggttccatccctggtcagggatctaagattctacatgcctcagccaaaaaaaaataaaaatccacacacaagaaataaataagtaaagactagagacaggagatttagcttcacatttcttcctttctccaaactgatcatatttttctcccatgttcttggtgtcagaggcagagcaggagcagggaagaccagggagttgtatacctggacacagattgaccaggatttctctatcagctgtaatacagcccgtttctggtgcagggaccatgtttggaagtgttctttcagtaattccacaagcactttcaatgtttgtgtgtctaatggtttgtaagctctggcctcaaggggcttccacatggggacaggttggcatctccagtgataagcactgtgatgggatgtgaacaggtggctatgttcaccacggcaggagaagttgtcttctgtggatggtgagaatcagagccatccacacctgtacaattcatgtcacatgacggggctgtttcctgccatttccccaacgtgactctactcttccaggaaatctctgcccaggaagaacttttacaaacagctgaacatcctccatttaaaattgatcaactttccaaaaaaataacatcaagttgattgtctatgattcaagtcacttccattcctatcaaaacccttacctccctgggtccaaagcatagactcacatcttgagtgttggccaatcctaagcaagtttctgcatttaaagatgcaccttaaacaagacttcaaaacctcatgcgtgtcctggctttgccttaccctgccaagaccctctgagaattctgtcaacactgggttctttctcatcacagaaagcaacaaacccagctctgaattatcaacaggctatttgatggcacatttgacaatgaggaggaagaatgaaaagagaaatgacaagtaggtcttgaaaatgacgggcctgaacctgaagctgcagaagacagagcgttcagctgagcaaaagcttacagtggtgccattccaggcctcctggggcttacattgcattgtatctgggggacattttcaccttcttcctgtacaggatagcatctctgtaagcacctccttccatgactgttggggctgcagtgtatcatgtcccatttagaaataatgagcgacttcccgtcccccagagcaaagtgcttcactctttatgtggtcctccttcctccctggctctgtctctaccatgttactatccagggttccccacttcccacttccctcctgtcccagaggtcatgccgattcctcgtgcaccaaatccaatgccactgcttggggacctcatctagccaggtatcctgtctccaggatagtcatcaagtccatagaatctgtgcagacaacatatgatcagttcagtcattcagtcgtgtccgactctttgtaaccccatggactgcagcacaccaggcttccctgtgcatcaccaactcccagagcttgctcaaactcatgtccatcaagtcggtgatgccatccatccatcttgtcctctgtcatccctttctcctaccctcagtctttcccaggatctcctagaaccaatgatttcttctcttccccaagatgcattccttcctgctcttgctgctgctgctgctgctaagttgcttcagtcgtctccgactctgtgcgaccccatagacggcagcccaccaggctcccccgtccctgggattctccaggcaagaggttttaataaagccacagcctcttccagggaatattttctttccagaagcccctgagacccctgcatggaacacatagactttacggattgggc

SEQ ID NO: 58665 - DNA, 1313 bp, Bovine  19866881465333
  misc_feature (1)..(1): n is a, c, g, or t
ntagcatggcatgagaaaacccaacttcgcagaaaaggaccacactctgcttacagaaatccatgtctaaacccaatgacaagctcctttcaagcttttgccaccaagaacattctcaagaatcctaacttcctcttttttttgttttgttttgtttttttaattttattttatttttaaactttacataattgtattagttttgccaaatatcaaaatgaatccaccacaggtatacatgtgttccccatcctgaaccctcctccctcctccctccccataccatccctctgggtcgtcccagtgcactagccccaagcatccagtatcgtgcatcaaacctggactggcatctcatttcatacatgatattttacatgtttcaatgccattctcccaaatcttcccaccctctccctctcccacagagtccataagactgttctatactttctctttgaatagtcccaaacactccagatttatctctttcacttccctagccctacttctaatcaattttctttcgcactttcccatccccctgataaatcaaatgccaatttatcctcttcttccctattttctgcctactttcatttcctctcttgctcttcactcatcagcctatgcaagcatccacatgtacattcagggtgtatttgatatttcttgtttgcagaaagaagcgatacctcaaattcatcaaatgcccaggcaataaggaagaacactattaactgcaaggaaacaaagtaaagtatttaaggcaattgcagaacaattcgagctaataatacaactaatgactaatgatgtctgtatgtggctttgccgggcacaaagcacataacaacctgagtcctattcaaccttcacaataatatgtaatctcacctaacaatgcagagaacaggatggcggagtggagtgaagatgacatttaccaccacgtagtaggtttgaattgcgactctgccaactaatgcgtgatgttacttggccagtgccaagccacctcagttttctcagctctaaaatggggtaaaaatattcaagatgcaagtgtttgtgatagttagtgataatgcatacagaatacctctctcctggttggtgagttactacaacctcaatcaatatatataagaaaacagaggctcaaagacttttacaagtttgctcgaggccacacagctggtaagtggtggagttggaattcaaaccaggcttttttgaatgaggactagaacttttggttctagtcatatcaggactagaacctttggttcagtgtgtctcaggacctaagt

SEQ ID NO: 58666 - DNA, 747 bp, Bovine  19866881485027
  misc_feature (1)..(1): n is a, c, g, or t
naaaccagttgggcccaacagacacatacagagcactccacccaacaacagcgcaatacacatttctctcaattgcacaacgaacaatgtccaggacaggcccccaaacaagtcttaatagattctttaaagagactgaaatcatacaaaatatcttttccaaccacaatggaatgaaattagaaatcaatagcagaaggaaaactgaaaaatccagaaatatgtggaaattaaacaacatacttttcaacaaccagtgagtcaaagaagaaatcacaagggaaattgggaaactaccttgagacaagggaaaatgaaaacataacataccagaacttacgggatgcagtgaaagcagtgttaagagggaaatttatagttgtaaatgctatagaaaggtctctaatgaacaacctaactttatgctctaagtgtctagaaaaaatgatactggctgacagtttatgttctaaggcctcagagaccatgcttcctggatggtatgacccaccctgacttcaaatgttccctcggtgtttcaacatctgcagctccaaactttctccagcccacacatccatattttgcaagatagtttaacatgagtgttatgttcagcacatcccaaaatgaactctccaccttctccaggaaacttggctttgcctctatggttcaaatcccaagtcttctctggttcctttctctctctggccaccccccaccccactcacctggagacagtgt

SEQ ID NO: 58667 - DNA, 754 bp, Bovine  19866881651749
  misc_feature (1)..(1): n is a, c, g, or t
ngccaaagccctgccaacaagctcatgcagacacagacagagagcatctcatcacagagcagcttctaggcccaggaactcccaactgcctgctgaatggcagtctccgacacaccagagaagtaaattaaacgcattaatctcagcgagagtcaccattgaggcattcagggctgcacagaaatttccaacaattggcctcatttgcttcaataacaaataaaaaagggcgggggagggagcgtttgggtgggcctggacggcttttctctgctcgtctcctccagacgggtaatcaaaatgaagttccacattgagaatacgcatttcattttattctgtgcttgaaagcaaacacatttggccctttctcctgtaataagatggatcctttatctgttattcatttaggaacataaagatgatgccgcaacaccaagaccctgcaagcttcatttcagcctcttctcagcataaaaaggcaaatttattcctattaagattgttttgtgccgggtacacggtgttcattctcttaaagccgtgcagctatttggatccgtctctgttttcattcttattttttcagtcatttaatctctattcacgtgcccgggaaaccccctccctcccatgtcatacacaaaggttgactacaggctttgtatgaattgaagagaaagttcagcacaaacccaacctcaaaatgtctgatttggactcacttttcaggatttaaccaagagcctggatg

SEQ ID NO: 58668 - DNA, 1612 bp, Bovine  19866881892037
  misc_feature (1)..(1): n is a, c, g, or t
ncacctgctgttccatcctgaagccctcaggtcagttcagtttctcagtcatgtccgactctgcgaccccatcgactgcagcacgccaggcttccccttgaccatcaccaactcccagagtttactcaaactcatgtgcatagagtcggtgatgccatcctaccatctcatcctctgatgtccccttctcctcccgccttcaatctttcccagcatccagggtcttttccaatgagtcagctcttctcatcaagtggctgaagtattggagtttcagctttagcatcagtcctttcaatgaatatttgggactgatttcctttagcattgactggttcgatctccttgcagtccaaaggactctcgagtcttctccagcaccacagttcaaaagccctgaagctccctgaaaagggcctctaggaaagttcccatgaaagcatcttcaagtgtggcttcttcctgcccatggcatcaccatgaaattcactgaaattcagcgttgtggaaagagagcagaaactcttcctgtgcagcagatgggcctggtgacacagaggaggggagagctccttgattttggagctgactcgagaaactctgtgctgcccccgtggctcccactcagaggcctttcttcatagagagtgaagttacctcttttcattatctttttcattcttttctggagcatcacacactacattttttcctgaaaattttccctggccaagatgaaaaacgaagaggtggaatcagaatttgccacttattagttgtgtcccattggggaaattattcatctaagtatcaatttattaatctgtaaactggggatacaaatcagaacaaaaatgggtggtgtaaggaaaagtgctttgtatatatttccatacatatgtcaggaattattttgggttcttcctctgaggggaaatggtatgataaaattgtgaacgaccgaagataaactctattttgatattctatgcctctgtgggtgctatcgttgagagagagaggtggagaaagatttctcagtgtaatttaagtaagcaggcgtcagaattggaggggagcagagtgaagggtgaggaatttattataattctgatctattgcaccatctcaaaaagacatctatttgaactcatgtacaagcagcaattacctggaaaataaatgtaataaggatctccttagttggcagtaaaattagcatcactgaattttaattaatagtccagcttggaaggaatatacttctccttagatgaaaagaatgcccttagctatggagtgagctcacccaaatcagcgctttctacagattttttttttccctctctgagtttcctggagaaattttgcacccccagtgtcaccgagagctcattccaaagaaataacgtcaatcaacaccctcccctgtgagcctcccttgtgaaatggtggaagcattggggaaggatggggaagacttgactcatcacctcttgggtcccttttaacttgaatgtgctctgtgttttgatcgggacatgtgatacttctgggtctctcagttctaaacattgcggtgataatggccattatgcagatggtcaccggg

SEQ ID NO: 58669 - DNA, 708 bp, Bovine  19866882136514
  misc_feature (1)..(1): n is a, c, g, or t
ntgaaggcagttatcatctctacttctcattatttttttctcccacatgagctaagggcagacctcagcgagcaggaaaaatggttcacagtggcttgtaatatttccatttcttaaggaagaaataaacatggagcaatttgtcacccactaactgtcctattttttcaggtagaatacatgctattttcagcactgaagttaccaacattaactctctattcccaggaagccagtgaatttggtcatgctctgaagcttctgtcaacctcactcctggaaaatgtgacttgctctctcctgtgccctcctaaaatgctctaaattatcacatttctttgtttcagttcatttataccgaggcctgcctttcaagaccttaaaagtctcaagcctggcccatcatagtcaagggagcattcactatggctagcagtgtgcccagaacttggtcgcaagaaaataaatgtttgttgctaaatgaatgctgtcaatacatcataataaagagggttgtcaagatttcttcaatgccttaaactattgggaatctgttactttacaaagttggtttattatttctcctgtcagcttcaggttccaaaaatatggagcacgtgtacaagtgtggaagccactttgtatatatttcccccataaagaagatctatgccagctctctgctgtatttatcggcgactagcatca

SEQ ID NO: 58670 - DNA, 1291 bp, Bovine  19866880437339
  misc_feature (1)..(1): n is a, c, g, or t
nattgaaaactccatacaaatgtcatttaccatttgcaagtaagtgtagagttgttcttaagcatgatttcaaaggtaaaagtgcaggaaaagcctatggctggaatgaaagtgaaagcaattctgtgcctatacatactataagagggcatctgtcccctttgggaactaggctatgattgcaaagactccaagttactattataatatttataatagcctagtttgtaatgattttatttggcctgcagaaacagagttatggacagttgtgcgtcaccattaggaaaaaaaaaaaaaaaacaatgaggatggaattgatctcatcaatttccctgtcactaaaaacttagcatactccacgcctgttctttacccatattccttgtcctgggtagaccaatcaaaatgctgcttttactcatggttttgtctaaggaaaattgaaaggcccttggtgagacagaagcatcagcaggtctctagggggctgaagtctagtttgactcaaccacagcagcttgaaccagtgatgggaatttaacccatcagccaatctagtactgagtccaagcttgctctgctggccacgctgcaggccaatgaattggagatgaggtgttgaggcaaggaatatgactttaattagaaagctggcagaatgaaaagatggcagactgatgtctcaaaataaccatcttattggtgtctcagtgccaggttctttcatagaacagagatggggggaggtgatggaataaagtaaaaagcccattactcttgcaagtgtctcttggaagggccatcctggggagggagtgtgttaatttcttccttcctgcagccatctacaggtggatagggtcctgaacaaaggcactttggtttaacatttaggcagaggggtagggttccctgaggtaggttattatgtgcagacagtatccttttagtgaacaaaagcaacggggagcaaaggttaaagtaaagaaacggatccaacatgcagtccattcatcccagtaaaaaaaaaatctattaaaatattaagccagagacaatttgcctcccaatatcaattacctttctctctgcctagaagaatgaacaagatgaatgaataatgcaagaaattccttctagttatgaaggtttccctttccttcttccttatgatggatagaatgtaaacttaacagccaaactgtcagttttaatgtaacctcagcaacagttagaaccagacatggaacaacaaactggtttaaaatgggaaaggagtatcttaagg

SEQ ID NO: 58671 - DNA, 1160 bp, Bovine  19866880785818
  misc_feature (1)..(1): n is a, c, g, or t
nacgcctggtgctctctgcacaaatacctttagctctgtaacagacttttcaaacccctgaagattctgatataaaaggtaaaatcagaagacaaaaccatatgcataacaactagtgattaaatgcccaagtttagggtaccactgtgcatgtgtgtttatcataggaggatacaacagagaaaaatgatccattaaattaaagtggctacaaatttggaaaaattctgtacacgcaaaaatgaaaataaacctgtcagaaataatgcatggaccaaagatctgcatgaaaacataatcacacatttttaaagtatacacctcaaagagcacaggttcaaggggagagagagcaacagaggttgtatgatgtgaatgcttattgcctcttcataaccacaaactgtggttcttaacctggaaacatgcatctgattattgtttgcctcagaaaagccataaacatcaggagaaggaaatgatccaaaaaatgtggcgtgttcactctaaggggtaaactggaaataacaatgaactgtgagtattgatttaatgtctactcatcattaaacaagatgcctgtggacttgtaattattggtttagaagggcagcagtgatacatatgaatctctcatactggaaacttaagtttttgcattaacatttgtctcagggaccacagtatctgtacatcatcaatataaagagttatactcagagattgtccacatgtgcactctaaaaaaagactacactgtgttcagagcagtcaagaaatacttaaaaaaagatagcacaaaagaagaggaagatataggctttattatggcaacatggaaaagactgatattctgaaaagttacatgagttagttactttctagaaaacatatctttgacaaaacattatgactagcaatggatttttctaatttgtttttccagtggtcatgtaaggatgtgagagttggactgtgaagaaagctgagcaccgaagaattgatgcttttgaagtgtggtgttggagaagactcttgagagtcccttggactgcaaggagatccaaccagtccattctgaaggagatcagccctgggatttctttggaaggaatgatgttaaagctaaactccagtacttggccacctcatgcgaagag

SEQ ID NO: 58672 - DNA, 1595 bp, Bovine  19866880845984
  misc_feature (1)..(1): n is a, c, g, or t
naatgaaacataccaagttaaatttgctctcatgatgtccattcaaatactaaataaaaggcttcttcaacaagagagatgaaacacctataagtagattgattttaacagtcctgaaacacagaagttgctctacaaagtcacataactcaagtcgttccattacattcctgatggagagtatgaagaactatatcatttcactaaaaaaaaaaatggagtgtcacaggaaattattaacaaactttaagtttcattttaatggtcttatttcatcagcacaagaacctgataaactgtttattcacatggacactctgaccactataatgcaaagaagagcaacagtataataatgagctgacatgaagataaatgattccaattagtttcctcattagttttaactaagattatttctttaatcatgactgatttatctccatttcacttctctagtgcttcaggaaggtgcctgttagactaaagccaggtaaagagagttaatttaaactctaggcagcaaccttctattttcccttgggttgatatgtgactggcactcaaaacaaaaggatccacatactcgtgcctttgctgttattcctataggaagatgatcgataatattaaagggcaaaatccacaaaatataacaatgagtgtgtaatgcacatacatatttcatatgaaaagaacagctaaacattttttaataaatgtctagagaattctggaaaaatcttggattgaatttatgtttctgacttagtcttgctctcagtttcacatttgccataaaaccacagtgagtgctgattgaaaatggggacattcaccaaaagcctaagatccttcctaggtgattggggttgccacgccgggaacaaatataaaactgtattcttagcatttacagaaagttacaggctggcagaacagggaagactttgcctttctttcagtctcatatgacaactaacattttgtgctttcttgatgaagacatagcctacagaaaccagttaagcccctaccgagaaagtctgtgtgtccacgcccagggtttgctccaggaaggaattgtacaggtcctctgcctcatacttcccctgaggcttatgtggtatggcattggtgtgatgaagcacctcaaacttgaacagttaaatgttggaaaagagacaggtgctttcacccagaaatttgagttcacagatgctctctttccatgctcaagtggaagaaaaatggtttgttcatctgattcttaactaactattatgaccaacctagatagcatattcaaaagcagagacattactttgccaacaaatgttcatctagtcaaggctatggtttttcctgtggtcatgtatggatgtgagagttggactgtgaagaaggctgagcgctgaagaattgatgcttttgaactgtggtgttggagaagactcttgagagtcccttggactgcaaggagatccaaccagtccattctgaaggagatcagccctgggatttctttggaaggaatgatgctaaagctgaaactccagtactttggccacctcatgcgaggagttgactcattg

SEQ ID NO: 58673 - DNA, 1175 bp, Bovine  19866881493421
  misc_feature (1)..(1): n is a, c, g, or t
ntcacttaggcaattgcaacatatatatcatttttacatattctaaatgaacctaagtatctgtgaaagtcctcctttatcattttattatttcatagaatacagcaaatttaatgttgaaatctagaattcctttaaacgagactcgattattttaaaagaggaaaacttggaataaacttgcaagaacttaacaaagtagttaaaaataagaaaatgatacccattttcaattgcttctcttgaatgttcattaaggaaaatgtcagttaagtggattgctgtgatagtaggtgtcaagcaaataaatgatgaactgaaataatttaacagaattaaccgaaaagtgatcaagcataaaagaaatcctctcaaatatttgttttacatagttctgtgagctgttgaacttttgaatagctttaatgaatcctgtagggtcttgcactcactcatgttatggctgggcataaaaatgtcagtctttttctaaaagttaatgactcagaaatcttttcagatttctctggatagcaaacagttttttctgagtgctaggttttgttggattgtctcctttgcaacctcatttgagtgagaacaggcaattaacaagtatcacgtaaccttaagctttggaggcaccaaatataaggtagcaaaggtggaggattatgctgttttacatgcatgtggtcgagttaagccaggagactctctgattttgcttcctcatcaaaaatgcacttgtgccatgcttccctctcatgattatttcatatttcaagtaagcattcaatatctgacaggtttaattgtgggcattgaggtaacatggaaaataagaaataaaattatctgctttcataagtatatattctaggggaaaagaaattaatgtataaaaagtcataaagacaaaggatacaaaatataacttcaccacacatggtgatcaaggaaaaagtctctaagaaaacgatatatgcaccaagcattaattatgattagagacaaaaacatctttgaatattgcaaatatatttatagacaaaaatacaattaccctattatttatctgagaaatgctgaaagaaaaagaggattcacttaggattcaatcttaagctcgctcaactagaatagactgacagggcactaggtaacagctcaca

SEQ ID NO: 58674 - DNA, 952 bp, Bovine  19866881633961
  misc_feature (1)..(1): n is a, c, g, or t
naatcaaaaagaactggacacgactgaatgactaacactttctttttttttctacttttcttacaattttcccctaagttttatattacatcaaaataaaaatattagcacaaaataaaaaagaagtaaggaagagtaagaaagataggaaggtaggaaagtaggaagcaaggaaggaagcgcctgggttattgtattggttggtagttgacgtactaattacagttaaacttgtagcacagccccaaataactcaactcttacagaaattagaaggattagctcataccctatagaggaaaagggcttgcattctcctaaaatagcaatacattagtctctaacagttctttaaaatacagtgttctgaatataatgaaaaattaacagatacagaataaagtagaaaaatgtaaccttactgaaaagaaaataatagaagtaggccaatagataatccagttactggaaatggcagtaaggtctttaaatcaattattataactatttcaaagcatttagagggatatttcaaaaatatcctttcataaagaatatttcaaaaggagaatcagaacttcaagaaaaggaccaaatatgaatactaatattaaaatattcaatatctgaagattttctgcagatctgccaaagcagtaaaattaactgccatttttcttccatttcttcctgaaataactttcatggagatgcaaatgagtgatttaaatgaacccagaaataacattagaagggagccattgctttgaaagttattcatcacctcatcctttagaactgggaaaactagtcactaaaccctgatccagtcaaccacatgatgaagatgcactaaatttaaatttttttctcatattttgggctctaaataaaaaggacactacttatctcaactctgccacttgcttccgaaacagatggcttcagttat

SEQ ID NO: 58675 - DNA, 1828 bp, Bovine  19866881929138
  misc_feature (1)..(1): n is a, c, g, or t
nttgtttatttatttttatatatagttgtgtatatctgttaatcccaagcccctaatttatcccttccctcctttccttttggtactcatatgttttttgagtttgtgagtctgtttatgctttgtaaccaggttcatttgtattttttagattccacatataagtaatatcatatgattaagaggtgagggtgtgggtgcgggtggatgggttgcgggggaatgagtctatttaaactcttccttagaacaatagtgacaccctgtggtaaattcttattataggctatagtacacagtggatgggtgtgggttccctacttgtctacttgaaggcagaaagtactgtcaaccaaattaatcagacctcaaattaaatgagaatgtactgagtgcctcctatgtacaggaactatgccagtgccttcatagatattatttctttttagtattcatccagatgaccagatgctaaactaattttatatgtatctgtgtctcactgtggggtttcctagctggctaagtggtaaagaatctgcctgccaatgctggagacgtgagtttgatccctgggttgagaagatcccctggtgaaggaaatggacaaccaactccagtcttcttgcctgggaaatcccatggacagaggagcctggcgggctacagtccatggggttgcaaaagagtcagacccaactcagaaatgtactatattcttttccaaagaactttggtgttacttgcccatttaagggcttccctgttagctcagccagtaaagaatccacctgcaatgtgggagaccgaggtgcaatttctgggttgggaagatcccctggagaagagaatggctacccactccagtgttctggcctggagaattccatttaaggtgtgccattgagatccaaattgtcttgggaaaagagtcaaaaaatcaatcaacccaatagaattatcacatgatatctaactcatttttctcacttattttattaagcttctttgtagtattaccatattcaaaatattctcaacccatgttctcaaagttatttaccttttatctttgagttgcctttcatttaaatgaataaaatatgccaaatatacatatttctctagggctaattttaaaagctattatttatcacagaaaagtccaatatttcacatcatgtaatttttaatctttaaaaatgtaggttccagggccatttaaatgtgtttatgggttaatataatttctttataattctccagggcttggcctatagtttttgtgttccttgtatattgcagactttcagatatgtcttattaaaattaatcaacattgtacataaaattttagccaactttttcttttaggtatataaaactctagagcataccaataagtgctgaaagaaaatagagaaataataaagttgatttgttaaagagatagaatttagtaccatattctcccttttgatttttgctgtaacaatgttgcctacataatgtatatttttaatagaaggctatcagtgtaaacacatgtagtatactctattgtttctctgctttctggagtttgtctaatatgagattgctgtaagccctggggagatggagaattaagtgatgagatcagtaggggacatataagcaatcagcaaaagatttttgagtagctgctcactgagcctggcacagtgaggaatacagagtggtagtaaaattatttccctccctcaagacagttaagtacatagaataataacagtcttgattacttttaaagccattatgtaggtcatttgcagataataattatcaa

SEQ ID NO: 58676 - DNA, 990 bp, Bovine  19866880662889
  misc_feature (1)..(1): n is a, c, g, or t
nggtgtctaggcaagatgagaaagcaaattgcttcaaatatgaattgcatgatgactctcatagtgttcctattattttctgaaaattcaggatggctttatgttgagcttgaaccagaaagattctatgtccattctgggtgtaatctgtaagaaatgaactaaaacaggtgaacatgttaaaatgtcatcctttgttttacagcctagccaccacttttctgattgcaaaacaagtccttcagtcgtgtccgttgtttgtcagtagttcttatgattaacttccttatacttagataacttattaaaaagattttaaaataagaggttcaagggcatttttttaatgccttaccttctcttgtctagggagtgcaaggcaaaattcagacttgaatatcatttttctttcttaggaataattgttcattttgtagttgtttataaacgtgatgctcttgcacttcctattagctgatgataattcaagttaagtcagccatatgttaaaactcatacattgatttaatgggagaaatattggtattaacaccaacctcatcttagagatatgagtctttttaaacatatatatttgactaataatgccagaggaaaattagtagaatcagggaatattacacttaaaagaatgagatactggtactactgttcatttgcataaatgtgactgaagggatggtaattatttgtacccctttctactttaagaactagtgtatcttggccttgtcagtgactgtggtcattccactgttactgattacagtctaacctataatcagtaaggtataatcagtacagtaatcagtacctgtaatcaggtactgattgtctttagcatgtcaaatcatcaccaatgtcttaaacatcacccatcattggagaaaggatagtggtaaaattatagaaacatttagtgtggataaagctgctcaattgtatcattagtagaatcagaaatacaga

SEQ ID NO: 58677 - DNA, 1430 bp, Bovine  19866880822117
  misc_feature (1)..(1): n is a, c, g, or t
ntattgatatttctcccagcaatcttgattccccttgatcttaatccagcccggcctctcacatgatgtactctgcatataagttaaataaacagggtgacaatatacagccttgacgtacttcttttcctatttggaaccagtctgttgttccacgtccagttctaactgttgcttcctgacctgcatacaggtttctcaagaggcaggtcaggtggtctggtattcccatctctttcagaactttccacagcttattgtgatccacacagtcaaaggctttggcatagtcaataaaggagaaatagatgtttttctggaactctcttgcttttttcatgatccagcagatgttggcaatttgatctctggttcctctgccttttctaaaactagcttgaacaccctgaagttcacagttcacgtattgctgaagcctggcttggagaattttaagcattactttactagcgtgtgctactgctaagtcacttcagtcatgtccgactctatgcgaccccatagacggcagcccaccaggctcctctgtccctaggattttccaggcaagaacactggagtgggttgccatttccttctccaatgcatgaaagtgaaaagtgaaagtgaagtctctcagtcatgcccgactcttagtgaccccatggactggagcctaccaggctcctccgtccatgggattttccaggaacagtactggagtggggtgccattgcaactgttactagtgtcaccctttaatgagtagcaaggtacaggaattctaattttatttgaggttttattcatttagggggaaaaacttctccctgttacttttcagaaatagaaaaactatgtcttatttacttaattgtaacccaatcattttcttttctccatcagcagaatattgctgcctaataaagggtatatctttgaaagaaaaaaagtgatcatatactaataagtaggactagtaaaagtagtgaaagtgaaagtagagtctctcagtcatgtccgactcttttgtgaccccatggactgtagcctacaacactcctctgtccatgggattttccaggcaagagtatcggagtgggttgcctcttccttctccaggagatcttcccaacccattgatcgaacctgggtctcccacattgtaggcagatgctttaacaacaagcaaagttggaaaacacttctttttttttttttcacttgtcttactaggcattaaaaagcagagacattacattgtcaacaaatgtccatctagtcaaggctatggtttttctagtagtcatgtacggatatgagagttggactgtgaagaaagctgagcaccgaagaattggtgcttttgaactgtggtgtggagaagactcttgagtcccttgggctgcaaggagatccaaccagtccat

SEQ ID NO: 58678 - DNA, 609 bp, Bovine  19866880887005
  misc_feature (1)..(1): n is a, c, g, or t
ntcgaggactctgaggctcctagggatggcagaccacaaaatgcgaagagtatggggtcctaaatgatttcatagatggcttcccactcatgacctaattggactatgtagaaaatgagaactaaatctttattcagtgtagtctgtgagacattgaaattgtttgttacagcagttagactctcttgacttatctggtgattgtagcctctgatgggccaggatcaatgtaagaacttgagacagggatatgactatctcagaaaaacatttgttcccttttgggagttgtcacaaagaatcttgatcctacaattcaggaattactctgtaggtaatttaactcttcttatcatatgcccattgctctattgaggaagtgacaataacaatctaccaaagcaaaagaactctgacctctcccagagtaaagcttagtagttaggtaaacaaactttcttagtgtcttttatccttctgatgtgtagttagctaattattgctatagactctttcgcagtgctttaatcattcttataaccactaaatggtatcatatatcaactggaaacttgtagcaaaacaagataaagatttaacctctctttt

SEQ ID NO: 58679 - DNA, 987 bp, Bovine  19866880956793
  misc_feature (1)..(1): n is a, c, g, or t
nactaattggaaacagagactttatggaagtgagcactcatttaacttgttcacgtgacagttggctttgaattctatttcattaccaatcaatcaaacagtggaaacagtggcagactttattttttggggctccaaaatcactgcagatggtgactgcagccatgaaattaaaagatgcttgctccttggagaagctatgaccaacctagacagcatattaaaaagcagagacattactttgccagcaaaggtctgtctagtcaaggctagacaaggtttttcctctagtcaaaaaacctctagtcaaggtttttccagtagttatgtatggatgtgagacttggactataaagaaagctgagtgccaaagaattgatgcttttgaactgtggtgttggagaagactcttgagaatcctttggactgcaaggagatccagccagtccatcctaaaggagatcagtcctgagtgttcattggaaggagtgatgttgaagctgaaactccaatactttggccacttgatgcaaagaactgactcatttgaaaagactctgaagttgggaaagattaaaggtgggaggagaaggggacgacagagaatgagatggttggatggcatcactgactcaatggaccagagtttgagtaaattccgggagttggtgatggacagggaggcctggcgtgctgcagtccatggggtcgcaaagagtcagacacgactgagtgactgaactgaaccaatcaacctaaattaaaatacccagctcacagcaaaaattggaaaatgatgtcttaaatattaaagcacatactagatgtcagtagcatgaagtttaggacaaagatgaacaaaagcaatgacatgataccagcagctttgagcccctgccatcaacaatggggaacatgatggaatcaccagagtgagtgatgcagtgacttttctaacttatctttacagacttgaagaactgttaa

SEQ ID NO: 58680 - DNA, 859 bp, Bovine  19866880996775
  misc_feature (1)..(1): n is a, c, g, or t
ncattctatttagatagtgtgttagtcgctcagttgtgtctaactctttgtgaacccatggactgtagcccactgggctcctctgtccatggaattctccaggcaagaatactggagtgggttgccattcccttctccaggggatcttcccaacccagagatcgaagccgtgtctcctgcattgcaggcagattctttactgtctgagccaccaatagtagtggcatagtaaacacaagactaactggaccagtgcctcaacattctgagaattatgtctttttctgttttgataaaattaaagtcaagggaatttaggcctatgtgatcataagcctttgccctctgtttatccttaactgtagttttcagattggagaaaactgtaagatcctcagaagaatgtaaagttcaattaattatttaactgatccctgttcagacatttattcagtgagcccacacatgtcccaggcattgtgctaagctttggggataccaaggttaattgacctggtccaacctctcgaggaagacacagtttgagaattagtttctatataatacaggagagacaagttgtaccaatataaaattcagagactgggcatgtgctggtgggtaggcagtgcagtgagtagaagaaggaggggttatgtgaacaacctgtgacatctcctatcccagcaaagtcagttgaatgactcagatctgcaatcgagaaaacttgttttggaaaaatattcctctctcttagaggctcctgctccctttaaggagttaatttacatcacctctcagaagtgagagatggacaaaaagcagagtggaactctgaagcaaaatgaaaaagatcaat

SEQ ID NO: 58681 - DNA, 643 bp, Bovine  19866881097106
  misc_feature (1)..(1): n is a, c, g, or t
ntactggcatttaaagattatcattccttgaagcttaacttcataagtgctttattttgatgtgtctacttgacctctgcatttctttgattttcacttttacattaaaaaaaaacaaaaaaaaaacttccctggcttatatcatatactattttatgaagtaactgtataactatctagctactgttgtgtaactactgtttgtgaatactgttatatttttattacaatggatagagctgggttcagagacagacttgcaaatatgcatgtaatttctttcttaggattaagtagaaaagatttacaacttcaaatttgtttcaaccatgtctcttcttaggatagcagggtccaaagaggaaagcagggaggacgtagacacagtatgcttcactcatagccccagcacatttcttatttagcttttaattcattctttcaagctatcaacatgtgacactaggcacttactcagtggacagcactctacaaaacagggaattataaggcactcttctaagaaacattgccacaaatagatcaattatgtatttcttccactatgtagtcttatttggaaattgagagaatttttggttaataaagagccttgcttatcaaactgaataccaaagaaaca

SEQ ID NO: 58682 - DNA, 875 bp, Bovine  19866881274813
  misc_feature (1)..(1): n is a, c, g, or t
natgcacacttttaatgccagatctattttggctttacctttaaagaaaaatcactgcactttgctgtatttgtcaaaaatgacaggctaattctttgactcaaaacagtgtacatgaaatgtgatttttgttgcttttctgaaatatagcacagcttgttttttgaaacctcctttgctgtggttaagattcccatggcatagaacaaattgcttattttgaggttgcagaatatagctaatctacaagaataagctttctaatatctgctatcaaaccaagaaatgatgtgttgcgccggaaacatgcacgtataaaagaaattattttcttacacaggatgctgcctcttggactgtgcatagagttgatttgtaatgtaaattaactctccaactattgattgttccatctgactgggacacattaaagctctgcaaagaggttcagagttatcaataataagaatgccgtgtatgaaatgtaatggggtgcgtcagctggatctgagtgtgatattgcaggaaatgttactcaacattaccatgtgtcacctattctttgtgcataatattttaatccattaaaatgtttctttttcttgcttttaaaaaattaacctacttcggttatagcaaaaaccctaagaggtagtgtttgaccactgacctttgcagtgtccttgttttgttttttttttttttttctctctttcctgacttttttttttttttttgtcttggtggcctcattaagatgaagaatgacaatccctagaaatagaacatgccgggctcccaggtgcagtgctaacaagtagtaagtcccattaacttcttaactcctcagacaagaactaaattggccatagata

SEQ ID NO: 58683 - DNA, 929 bp, Bovine  19866881362450
  misc_feature (1)..(1): n is a, c, g, or t
naaaggttggtatacacgatgacatgcttttgttccttcattcaatgatttttatgaaaaattttgtacagatggtagttgctttcaatttgtatttgaccatctttaaaaaagaatcttctgtttattagtcttctatataatgtatatttaaattcacaaagatgttcaactccaaggagtaaaatcattaactctcccttcactacattaaagaacagaaaccaatgcccaaataacatagatctaataaagaagattctgttaaaatgaggccccttagaagtgtgcattaagaaatatttagcaaggattgaaaaccaggcaccatgcctaaaattctgtaacattaagaagaaaacctaagcaacacaaaacttattttgcctaagacatctaagtgactgcaccactgttgttcattccaatataatatgctctgtgctctctgtattaacgatgctgctgctgctaagtcgcttcagtcatggctgactcttagtgaccccatggactgcagcctaccaggctcctccgtccatgggattttccaggcaagagtactggagtggggtgccactgccttctccgtattaacaatgaatgactaatattccatgtagccactaaaagtaattctaaccagatggtcctgtatttctgaagatgtctatatgtattttctctcctggagcaatgctatcaagtatattgatatctctgagaagcagggctgctgaggtaaaccctgtattaagaagatacattataaacaacagaagagctagctcaccattcacatttatgaagaggatgctgtggcttgtccacttacctcttcatctatagccatgtatacaaatagcgatccatcactagagttactctctttaaactgtaaggtagcaatatgtgtttaagaaaaacag

SEQ ID NO: 58684 - DNA, 1464 bp, Bovine  19866881516386
  misc_feature (1)..(1): n is a, c, g, or t
nccatccctgtgattctccggcaagaacactggagtgggttgccatttccttatccaatgcatgaaagtgaaaagtgaaagtgaagtccatcagtcctgtcggactcttagtgatcccatggactgcagcccaccaggctcctccgtccatgggattttccaggcaagagtactggagtggggtgccattgccttctccaaaatgtttactatgtgccaaacattgttgcctggcactctacagaaaatatctcacttgatctttttaacttattttattttttatacagttttaaaggttacactccacttatagttattacaaaatattggctatattcactgtgttttacaatacatccttaagtctatcttatacccagtagttactggtaaccattggtttgagctctgtgtctgtgagatctcacttgatctcggtagtaaccatctgaggtctgaaacattatccctgttttaggcatcagttcagtaggcagttctcagagcctaggactctaaagccagtgttcttccttttctgccatggtaccttttttcttccctaatgttttagccatgcctcatggcatgggggatcttagttccctgagcagggatcaaacctttgccccctgcattgaaagcacagaatcttaaccactgaaccgccagggaagccccgccgtgtcatcttttaagtggctagttttcagcaaaaagaaggtacactgtgtgttatggctcatagtatagtttttaacagataacaaatttttagaaagcagcaatttttaagaaagatcttcctaaaaacaaagaaaaaagaagtgtgctgcttttcctcacttaaaaaatgtatatagttgctataaaatttctttataagggcatttggaaaacttgatacaaagtaattcaaaattataccagcaatttaagtgaaatccaaacatgcagcaagattctctactactttaatgatttcagttaaataaaacctacaagctgataaaaaaattttgaagctgtatttgagtaggtgtgtgatgttggcatgctgaccaattacaacaggaaattaacatagcattacataatatagcacgtaatgaaaacaaggaaaattttgaagtaagccatggaaaaatcataacaaactacaggactaaatggaagcatcaagggggactggtacattgaagtatattaactatgagaacgttttctaatccatcatataacattattaagactgcaccggaatgattacaatgctaaattccatgtgactgctggactattattgagattggaaatttgaaccagatgattaccagtcttttaaagttgaggcaggaggggctgctggtatgagttgtgtagaaagatgaactgaaaacctatcatgtttaacagaagaaaaggaggagttggaagggaatgtaattgttttagaaatag

SEQ ID NO: 58685 - DNA, 1283 bp, Bovine  19866880446439
  misc_feature (1)..(1): n is a, c, g, or t
ngacctagagagaaggcacctctctgcattcccgaaaacccctcaaagcttcagagcagaaggctcttctctaggaatgaaatcccaggaaaagcaatctcctgtgatcaggagttgtcagagcctccaagggctaggactattttaagagggggaggctgaggacaggagggcaggcggccagggagagcagcttaagcaggctggaggacacacgtgcagagtcaggtgcagggggcgacgggcagcacaggagtgtctgacacccggctgcacacggcaggagccgtgggctccgggtccttccccaggccacagatctgcccgcgtttctcagcatctggacctcctgctggtgactgtgtgttgagctcactgtgattggtcacggccaaggtcacagccaaggtcacaagcagtccggtctcttcccaggagcgcactgagaccccccgtcccttcctgggagaccccttcctttccccaggcatcggtgagccgcaggaggagggtctccgctccagcaaaccctcctgacattcccacaccaacactgacatcacctcctctcctggccactctctcacggcacataaatcatgaaaacaaacactcggaaagtgtttacgagcattttagcaactcctcctaaaagcacatatgcttcctcgtagtaaaaataccttgggaaacatccttctgttaaattttttaaaatggacaaatcttacacggctttttttttttgcaggactaaactacagttgagtggctgaataatagctggaggaggatctaacacccaaccacagtgtaactctaaaaacactccactgagactctgatggtacttcattaacagttaaaagaaagagaacagttactttctttggataaaagtacatattccaaaggaaatcctggaacaaagtcccttcaactgctgaagatgacattacagacttttctgttataattgcaatgaatttggacagcaaatttctcttctgctcaataaaaagacttcagttaaaaaaaaaaaaagtttccttccaaaaatagaccaagccctcagttctattttcccatcttacattcttttcctactaaatgtaccctgaaacatttcctttcattgttggcaccttgggttgttgggatttaaaatcggacaatacacagcaacaaagaagtctttaaataaagctttccaaatggaaaaaggcatctaagggtatgccttcccctgggcccagaggatggagccctgatgcctgggagca

SEQ ID NO: 58686 - DNA, 3122 bp, Bovine  19866880533191
  misc_feature (1)..(1): n is a, c, g, or t
ncttccatgtccctcaccatctcccggagtttgcccaagttcacgtccattgaatcagtgatgccgcccaaccatctcatcttctgctgccctcttctcctcctgctctcaggcttctcaggcagtatcttctgctcgggagagctgtccgtttcactgctgcgctcagccttggagccgggcatgctgctccagccttactttgccagcttatcctccctgccttgcctcaccccagtcacacccccacaagccacccgcttatcactaaagcctgtgtcaatcttgttacaggacataggggagaaagatgtctcagagatttcaactgcgggcctggactttgctgcgctcatcattatcggaccaaaatctgtaaaccggtgctcctggagggacacgtctgctccaggaggggtcacaacaacaacactcatgttgtggatatcttccagcgctgtcactgtgcgcccgggctagtgtgtcagagtcaggcggctcaagatccagtacacacacagttgcacgtgtgccagaaggcctaacggctgcaggtctaatccagcagaagtctcaggcatgcgctcacacatcttcccatctacacatcttaaaatccaatcttgtagtcagtgaaacaaactgagctggagaagctgtcttgtgatgaatagaaactagtttggctttttgtttccgcagaaaagtggacatgattctagaacaaatttaggttcatctagtgattcagttagttcaaataaatcttttaagtactttctggtgaagttctgatacctgacgggaattgggcggggaggcagagtgacagtttatctgttgttaaattagcttaccagggaaattttccttaaaacccctactgttcataatccttcatttcttggaagggaaatgccgtctcgctacaacaacagaaacttggttaataaagacataagattgaaaagctaatagcctatgttggtataacccactgcaagttccaaagcacctttccattactttgttctcaatagccttactacttaagaacttttcatatttctgtattgatataatttctgtatttcaaagcttgggctttcaaggagtgcctgaccatctgtactcaaaagttacaatggaggaaaacaaggggaaaaaagtgaaatcttgtctatttgaagtttaaatggtcatatttgatacaaatgggtgcatgttggaaaagaccctgatgcagggaaagattaaaggcaggagaagggggtgacagaggacgagatggttggatggcgtcaccgacgaaatggacgtgagtttgcgcaagctccgggaaacagtgaaggacggggcagcctggtgcgctgccgtccacgggtctcagagagtcggacacgactgagtgaccggaatgaacttaattagggaagttctttctggtggattacaatcaattgctacagatttcatttaagagataaaccacacatctgttctttagtttataagtatttataacaaaatcaaatatgggtcaagcaaagaaaaaagttaaatttatgaagttctctaatctctaaaaaagcctgaaccctcttccagaggctggcccctgggtgcaccttaactaatttataatcagtaaacaggaggaaaggtaatgaggtaatgtagtttataacataagggcaggaaatgagaaaataaaaatccccatttaagatttgttatcatctcatctcttaattctctctactgacccttagtaaagtgcagtcatgaacagaatatataaatttaaacgtttgctaataaagtaagaactagatcacagctgataatcatacaagaggttttattgactatagtgcaggctacggcatgaagaagaaatagttacttaaaaacaccacagacccttacatagcaaagcttaagaaataaattaagactctgattgggctgtgccggggaggatgggcctcactcgcttcggtccttgggctcacggtatttccactggatgtagtcgaagatgtccttctcactgtccacgggcaggggctccccggcaacgcctgcaaggagggacaaaagaccttcctcgtgagctagttctggagctcagttacagaggggtcaggatggagagctcaataggacttgctttcagagggaaaagaaaatagtccataagggacttaaaaagacctccctcaagagcttctggtcatgctttgccacacacgttatcaccagcgctacacgacgaacctgaatacctcaactctggccctttgaagtgaccctaatccatggctctcctctctgctggatctccactgtgccagagaaaagaccccattgagctcctctgtaactcagcacagcccctggactagcagtgcagcagtccgcaaagcccactgaagtgaaacctgcatttagggagggtcccacgtggtctgtacacccactgacacgtgagaagcacggccctactttacagttttaggacaaaaagacgaaatcttcactctcctagtagatcacagtagaccacataataaatatactgtgaaatgttaacaagatccataaaacagactaagcaattcttactctttaaactttgaaagtttggagtcaaagctaccaagtttggcctgacacggaaaggagtaacaccctgagtttttcagaaatcttggaggtacatttaagaaaacaaaaatcctttagatcaataagagttttttctttttttactaaccatggaagtagaaagaatttaatccattctaacacagaaatcttgtcaactagagctgagggcctgggaacacctatggagcaaagctttctttgttgcctgagggactaacaattctaaagaatctacaattaactaccatggttacttaaaggctcttagaaaaaccaaagttgctaaaccaaaatatccagatgactgggattatctccgatgcagacacaaatactcaccagtgacacccaggggacggattgtgtattcattgattgtgaagcctttttctagggcatgagctctcatattcttattaaaacatcactcccagtaaatagaggacacc

SEQ ID NO: 58687 - DNA, 2411 bp, Bovine  19866880565726
  misc_feature (1)..(1): n is a, c, g, or t
ntttgcatgtattgaggcttcctgggtccaggcccagttctgagggtttgatctgaattatttccatttgatcctcactgcatttccatggggagggtgccattacattatactcacttaacaaagtgagtatagggaagcatgtggaagctcatgaagtttaggtccttattcaaagtcataaagctccagatttcaacttgggcttcagttattttacattgttttactatcccacattcttccagataggattggaggttggcattgtcaacagtggtaaatcatagaagatacttttataaggagaaacgatgctagcggaggaagggtgattcaggctccactaaaccctgtcaccacgggagccaatacatctagggctagtcttgtgtcagaggctaatttactttagactgttaactataaactagggtaatgttttactggattacccctgcttgggtcattcatcactcctccctttctcacacctgtccaataagaacttagtctcctcaaatttgtcctccttctctgctctcatcgctgttccccttatcaggtcctcatcatttcttgctggatatggaagtaggatattcagtaaggacatgggaaactagaatcctgtgcattgctggtgagaatgcaaaatggtatagctgctgtgaaaaatggtctgatggttcctgaggaagttaaaattagaattaccatttgattcagcaattttacttctaggtacataccctccagggatcccccagtggctccgccgactcaacacttcttcgtctgtctgtctgttttttctctacactgtcaccagaatcctgttgctttcacttcctaaatgtcttcctttcagtttcttctctgttccagctcagaccctatcatggggagtgtggccatctaacctgtctccctgtctcttgacctcactctacttcaacccaccctccacataccaattgaaagatatcaattctttgcataaaattatttactgccttttggcgcatcaaaggatattatcaaaaaaagtgaaaaggcaactcacagaatgaggggaaatatttgtaaaccacatatctgacaagcatttaacattgcatatagataacattgcatagattctatatgcaattgcatatggaattcataaagagctcctataaccctacaacaaaaaaagcaaataactcaattaaaaaataggcaaaggatttgaatgacatttctccaaagattatatgcaagtagcccacaagcacaggaaaagatgctcacctaaggatcaccaatccttagggaaaagcaactcaaaatcacagtgagatactgcttcacacccttcaggatggctattatcaaaaaacaaaaacaaaggggaagatatggggaaactcaaattgctgttgagaatgtaaattgtatagctgctgtgaaaaatagtctgatgggtcctgaaaaagttcaacatagaattaccatatgatccagaaatttgggtcttcccaggtggtacctagtgggtaaagaatccacctgccaatgcaggagacgcaaaagatatgagtctcttcttccctgggtcagaaagatcccctggagaaaggaaatggcaatccactccagtattcttgcctgggaaattccatggatagaggagcctggcaggctacagtccatagagttgcaaaagtcagacacaacatagcaactaaaaaacagcaacaacataccccacagattaaaagcaggaactgaacaaacacttgcatatggatgtttagagtagcatcttcacaatagtcaaaagggggaaagggcagtgcaagtcctcaattttgtgtccgactctttgatgaccccatggactatacagtccatagaattctccagatcataatactggagtgggtagcctttcccttctccaagggatcttcccaacctgggactcaagcccaggtctcccacactgaaggcagattctttaccagctgagataccagggaagcccaagaatactgcagtgagtagctgatgctttcttcagcagatcttctcaacccaggaattgaactggggtctcctgcattgcaggcgattctttaccagctgagccacagggaagcccaatttataaaatggacttgtataaatgatgttttctggacaccaacattaccgtttgtctacagatcggacaactgatggccccaagccacgaaccgtatctccagtatgcaacaatgcaggtacctaatgggaagaaaacatcaatactgatgttgttaagtccatatatcccaagaaagtttcatatatttgaaatattttaacaacatcatctactttagaatgttttttcttcatccaaccaactcttcaggcaaatt

SEQ ID NO: 58688 - DNA, 3161 bp, Bovine  19866880586297
  misc_feature (1)..(1): n is a, c, g, or t
ntctgggctgcatctccacaaccgtaaagtggcatgactccccggaagtcctacttcggagggttcagggcatgactatctgtagcgggcctggtgcagtaactggcactcagatgctctatcccaggccatcctcacgtaaacctcaggacccagcacaccacacggcccttcctcggtggcgctcagcagaagtttgtgtaatacaatggttgttgttgttattcataagtttcggtcgtgtcctactcttctcgaccccacggactgtagcacgccaggcttccccatccctcaccatctcccggagcttgcccaagttcatgtccattgaatcggtgatgccatcccaccatctcatcttctgtcgccctcttctccttctgccttcaatgtaatcctaggcaccaaagaaaaatccacccccccaccaattgttatttctaggtctcccaaaggccagagcgactttgaggacataaatactagagtctccctggaagatgacctggggtatttccagatctgcagaagctgcttgcggatagcaatcagggttcctcagccaggatgcccagtggctgcgctcaccgccctcaggctgatctcagtccttgcggcttagagattatggagcagtcggaagtggatgccagagaggagcagaggggagaggaaggtttcagaagtgtttctgctgaaaaggaattgatgcttttgaactgtggtgttggagaagacttgtgagagtcccttggattgcaaggagatccaaccagtccatcctaaaggagatcagtcctgaatgttcaatggaaggactgatgctgaagctgaagctccattactttggccacctgatggcaagagccaactcattggaaaagaccctgattctgggaaagattgaagacaggaggagaaggggacgacagaggatgagatggttggatggcatcactgactcgatggacgtgagtttgggtaaactcaaatggtgaaggacagggaggcctggtgtgctgcggtccatggggtcgcaaagagtcggacacgactgagcaactgaacagcaacagtaggtcagggcccctgagttcccagacgcagatggcagagcactgcagagcccactccccacgctgggagcctggcccctcacgtgaggacgccctcacatgctttccttcccctggacgcccctgccaaggactgtgggccaacagacaacccgagctggtcctcctcatgcctcagggagctcctggcccaaaggaagggtgggattagggagtatcgactgagctcagaggaaattaaaattctagaaaagaaattccacccccacccccaccccggttcagcaaggagggagatgccacccccgtggatgattcccagcccgggcagtggggtgcaggctggtgtgtaggagctgacacctgtgccctccagtgacagctgctgtagttcacgtcaaagacagcactgtgatttatattcacttccacttcggaaagcgaagttttgttatggctcccgtgtcaaagccagtttgatttccatacattctgcttctcttaaaagaaaatcaaaggaactgaaacgagcaggtctttggcagcatctcacaggaaatgttcaataagtgaaagatgagaggggcaggttgatgaggggagacaaagattgcaggatccatgtaatcactgcagccgtgtaaacactgaggtcaggaggggaccgccgaaggaactgggtctaccagatgtcttgcccctttgggtggttccacttctggaaatggcctggatgcagtcaggaagacggagtctggcctatcaccgatcttgtggccttggctgggtcacgggcctctcagcctcagctccttgtggcctggagaccaggttttggggaatttgcaggtagatgatgggggagatgactgtgatgtcacacaccctgggggcaccacttggacccgacctgtgtctatgtgagtggtcccccttcgaagttgtgcagtcagatggtgttaggacctccctttcctgcagcaacagcctcagccctcctgacgccacagcagacatgtagctgagaacggcaccaggggcccctagcttgcttaatcaaggttgtgctctgccttctttgggcaaaagaaatttgatgatgttgagtgtgatgcatagatcctaactgccttgtctgccctaccccattcctgggcacacaccatacttctgtgtaatgaaaatcccatggaccaggtgcttgcattcaagctgaggtctgaggtcagagtccccatgtgctcaggttctgtgtcaccttctccacacatgtgaaggaggggccaaggagctctgcagggggctctttcacgagggcgctgatcccattcacgaaggccccacctccagaccaagcgcctcgggaggttcccacatctaataccatcacactgggagttaagatagcaacacgtgaatctgggcacacgagcattcagaccacagcattgctctttctcctctgcatcctgacacacgtgttacacaagacacggacatgggggtagtgacagcagatgctgctgtgaaaaggcaaggaaagatgtttaaaaagctgcccaggtctcaatacacgttagctggaaacagcgtcgcttatcttcggtcatggcaggagtcaggcgctgggacgaggccttggcactaagttgactcagggaactgatggccttttgctgatgccactgagggtcccggcagcctgcactcatcagtgcaggagacttgggtggtttccttttcaactgaaaatacacttatggatcacaagtccctttcagcctctttgttctggcaaggcctttttgcacagtccactttgctttattcttattgttcactaagtagttgtcaactctttgcaaccccgtggactgtagcctactgggctcctatgtccatgggattctccaggcaagaataatggagtgggttgccattgccttctccagggcatcttcccaacccagggatcaaactgaagtgttctgctacgcagacagattgtttactactgaaccagctagttagtcctttattcactgtactgactgtaatttaatagtaaatacactgcaggga

SEQ ID NO: 58689 - DNA, 2643 bp, Bovine  19866880703586
  misc_feature (1)..(1): n is a, c, g, or t
naaatggcaacccactccagtattcttgtccaggaaacctcatggacagaggagcctggtgggctacagtccgtggggctgcaaagagtcagacaggactgagtgactgaacaacatgtatgcaattaggcagagtatacttacaaatggagtacatttctagctgctgtcttaaacgaattttgcttattgtgtcataaaagttgggctctgacagagtttctgctggaggtggcaaactgaatatcctcataattttccttttattcctaaaacacaaaaacgatgcagagaagagatttgtattctcagctataggactgtaacactctcgtgactgtagtaaccagaagccgcattaaaaggacacaagtggccacgagtccctcttcagttctgtccccgtgagatgctgccttggctcaagtattctctctttcactaaaagtaagaagttgcacatgtatagtcacagagttacaagaaaggaaaagcagtgactgaatacacccacttcatacgacatgtctctcctcatctccacaaaaaatgccctattgtttagaaaaatgcacagacaaaaaaagtacgattcttttcctccctgtcatgtcatgcaaataaagctaatttactgggggtagtgaataaacagaatgtgagcagaccttaattctgggaaacaatgaataaaactatttcttaaatagagtagcatggccttagtggggtcatctagttaaaatgaacaacagcctgtctatgcttttaaaacagtggggtggggaggaggcggcagctctctttaggggaccgctgtcgcctgccagtggccctggggtgatccgtgggggctcttctcgcccctccccccagcctggagtccaggaggccagcggctcagggttcacggggctgtgaagggcgagcctgcatgtcccacaggcagggtgaatctgaactatttcccaggccaggcagcaattattcttggatgactaattatcccggactgtctaaagcctctgaccttggtacaggacgtcacaaagcatgtggctatgagcagaagcaactcaatccaactactgctttcttcctcttcaaagcaatacctccctccctttttgttcactgttcttaaaggagccagggagtgtggaaaaggacagttaaactgtgcgacagtcagcaggaagtatttgtggaggatttacactaatgcgccacttcagggacacaaaggttaaataaaagcccctgttctcgggggactgagtgtttgcaggatggacagacaagaaatcgaaccatataacatcattcactaagttctgggacacagtcatgcgtaagaaacagaagggaaagcttgaaatgtgcgaggacagaagtgctgaacatgtaggagttggtgtttgtgcatttcagggacgtgggccaaaaatatgtgctcgtccgagggtgacagtgaactggctgagtgataactctgagctatatcagaagtgatagaatgggagtacagagcagctggcctgggagccgagagctgcactcacagcccggctctcagagcagctgggttttgcaagccaagtcctggtgtctggtgtttgagggcagggccgaggagagagagctttcatagtaggaaccaaaatgctggtgaaatcatttttgtgcattaaatttagatcaaaccaaccaacctgcaaaactcgcaaatgctcaggatcttctcatcaaccctgagaacctcaagcctttacctcttggcatacatgaagagcccgaagctgacgagtatcaccaccaggtacacgttggtggcttcattccaggcctcgtggacgctgtagtccatggccccgtcgtcccccatcactccgtagcccccaggcatgggcctgtaagacaataaagggggcaggtgacagtgtgaaggccggacaaatgcgggcgaacagagggcccgcaggccagcggcagcccctggtctccctgtggcccaggagccaaaactggttttacatttccaatggatacattttaaacagttgagagtactaccagtatcttccatttttgcctcacagccctcaaagcctcaaatatatacaatctggcctgttaagatttacaaaacagaaaacagactcacagacttagaaaacaaacttatggttaccaaaggggaaaggggaggtgatggggagggataaattaggagtttgggattgatacatatgcaccacttatatatcaaataatcaacaaagatctactgtgtagcactgggaactcgaatcaacattgtaataaactatatcggaaaacaatctgaaaaacaatggctatatgtacacatataactgagtcactttgctgcatacctgacactaacacaatattgtaaaccaccaatcatacctcaatatattaattaataaaataaaaaattaagttaaaaaaaggcaagaaaaagttgaccaaccctgatctagatcactaaggcacagaacgcatttccccttatttctgactttgaaacatcacagatcctacataaaagttcaaacttggagattaaaaaaatatttctaaaaggatatgggtgaaatatcactgcacattttccaa

SEQ ID NO: 58690 - DNA, 930 bp, Bovine  19866880914166
  misc_feature (1)..(1): n is a, c, g, or t
nagtatgctagttgttcatacccagcatcccagaaatacatgcaaatcatgacatcagactacttactgttctttgtgtaagtgttaaacaagccgtctcttctcctaagcgtggagtggtgggccagtgttgagtaaaataattaggataaaacctcaaacatccccctgcacaatatccaaaagagtctctctgagattatttacgaaaagtaatctctttcaaaatttaactaatcctggccactgaagaaaaggacaaatcagtcaaatttaaattatgattctttagaatgtgttggacaattctgagacacactgagaaaaaagtattaaaaatagccaagagaaggcagcagctaaaacacaaaggccagaggtgagatcaaaattagaaacgtacaatgtctggagggctgtccatataagggtatctttaaatcagtaataagttgggaccatccactgggcaaaataaacagctgccatcatcgaagtggctgactccatctctcattcagaaatctctagaccatctcagaagacaaatatgacatgactttatgctcaacggtgtttggggctattctcaaagctggtctcgactttcccagtcccacatgagaaacacatatacatgcatctttccttttgacaaaagtatgaaaacgcaacagtagaggggatttccctggccttccagtgactgagacttcaccttccacgagcatgatgcgggttcgatccctggtctggggactgggatgccacgtgcttcccagccgaaaaaaaaaaaaccaaacccgaaaccataaaacagaggcagtgttgtagcaaattcaaagcaatattagaggataaaacgtctgctaagccttcctcaccccatctgctagactatatttactacactccccaaccccataattt

SEQ ID NO: 58691 - DNA, 902 bp, Bovine  19866880996676
  misc_feature (1)..(1): n is a, c, g, or t
ngtagcttcccaaaccagggatcgaacccaggtctcccgcattgcaggcagattctttactgtctaagccaccaggaaagccctggtggtctagtggttaagaatctgcctgccaaatgcaggggacacaggattgaccctggtctgggaagatcccacatatcgaggggaaactaagcccatgaatctactgaagcagcgctctggaggctgtgcgccacaagagaagtcactgcaaagagaagcctgcgagccacaaccagtgagtagccccactcaatacaattagagaaaagtccgagcagcagtgaagacccagtgcagccaaaaaaaaaaaaaatcagtgttgtacacctaaaactggtattaccaatatgtcacgtcagtatacttcagtaaaaaaaaaagagtgtaaccccatgttgcttttcatatttttgcctcttccatgagaagcaactgtgatagcaaaccccacactgggcatctacccccagcccctgcccggccgccaggccttttcggcctgctccctccaagcctgctaactctcaggagtcaagaggatccctgggttttggcttgtatcctttcacctcaacttcaccaccctcttccaggcttcgtgtttttctaggccagagttcactccagatattttcataagcagatcaggttttgcagggagtattaaaagcatcagctgggggagagatcgccttcagaaacagttgttgaaaagctcacgaagggctgcaggggaacaaaggggcgggctgataaacaggcgcgtcattaatcccaaacgttaattctggaaatctggttgcttggcagcagcagcgccttcaaacagacccctggcattttctccaaaaatatctgtgctacagaggctcatg

SEQ ID NO: 58692 - DNA, 867 bp, Bovine  19866881007147
  misc_feature (1)..(1): n is a, c, g, or t
ngatacacctgagcatctcaataaagaggattccccgactgctgcaaccagaggcagtctgagcacagcagccaagactcagtgcagtacattaagacgtaacagaagtatctgctgtagggaccaatcgataacctctggataagaaccaagtttcagaggtgaaaaaccaaacaccgtggaaacaagtcagtggactctgatgagccagtgtgactctggggaattcagctgcaaacaacgtcaagaaaccaggccaaccttcttacctgtctcttatacgtctcgagttgactccgagccgcgttggcttttcgcagctcctcctctagactgactgtgttctgcatatacatagtattcttttcttctaagagcttaacttgccgcctcaaatcacctagatcttctagcttcttcttatatgattctacttggccttctagtttagaaactttatcagaagaatgtctagaacgagatgggaaaccaggaatcacaaacacacccacagttgaaagctgctgtagacagggataaaccaagaagatcgccaggaagtaacacattctaatgaaatgacgagaccaaaggtcgagtccagcttagttttttgggcaggttcaaaagtatgaccaaagtgacagcaaaatttgtaatgaagaacattacataaaatttaaggaatgcacgcaggagcaggtactcacagagctccatgcagcacaaaagcaaaatatactgtacagtgtccaaataatttggcaactggatgttattagtgaccagaggaacagctgtttcagaggagcagttgggggggggggggcggtggcaaactctagtgggttaaggagagaatgtaaa

SEQ ID NO: 58693 - DNA, 1350 bp, Bovine  19866881253862
  misc_feature (1)..(1): n is a, c, g, or t
ntgacgtgtgaaccagctcgactgcccttcagaaccggaagcttgtaacttgtgtatttttctcagaatgtggcgtttgaagctttaaatttgaaaaatggcgatgtttttcttttttacatattttacatatgggttgttgcccagcccacaaacttcccccatttttctggaaaaggaaacgataacaaaacagaccttgataattgttgtttaaaaactaccaaagtataatgaaaactcccctatagagaaagaataaagcggtcctctatcttttagttttttccttaattgtactctctctgtcttctctaatttctggaagatacctccaacttccagttcttctatagtattttttattttgatttaaatcctttcctagagttttctttttctgtagcattctgtccttgtatcatggataaatatctgtaatctgagaagattactgatagcttttgtgtgtgttttcgtctccctgaataatcattgtttcttccaagttgcttttttctgtttgttctggtctgtctttcgtgctttccttgattattttcctgtttagagtcacaaaaagccagatgaaccatcatctgctgtttcctttggttctttagtaatcgtgaaggattacagtacaaagcgggtgataatatgtagagcacagagaagttaagttacaggttttcacagttctaaaaccacctccgtttaaagcgaaagtaacttcacacttaacaatatttgattagaattaagcctgaagtgtttttaaaaaatcttttaaacattattttaaatatccattttagggtgtttgccagcttcccagtaaaaacgatgaaaaggaatatccacacaggagaattgatatcaggtattgctcaaaatttgttgctcacctattaacttctttcttttctcctttccccccctccctctctatatcttggaatttgcataaatacccaggatcccttttcattctgcagtcccatgctactgctaagtcatttcagtcatgtccaactctttgtggccctgtggactgtagcctgccaggcttctctgtccaggggattctccaggcaagaatactggagtgggttgccgtttccttctccaggggatcttccggaccccgtttcttacttcccctgcattggcaggtggattcttcaccactagcaccccctgggaagcccctgaagtgccattcttgcaatagacagtttggcctgaaagtatgtaaagagtaacactatccacagaatctgctttatcatctctggatttgcctcttgataaggtgccttccacagcatgaggtggatcctgctgggg

SEQ ID NO: 58694 - DNA, 1388 bp, Bovine  19866881296468
  misc_feature (1)..(1): n is a, c, g, or t
nctttgcttatgtcccaggtctttctagcagtaactagtaccaccgggaaaattctgctcataagtatataaatgaagaagaagaaaaaattgtaatgcttaccctaatggaaacagcttggtacccgtgcaacaaaatacagacaccagtgacacaaatgatccataaaccagtccaagtatatataaatatttataatatgataaaagtggcattttctaatccaatagggaaaggttatttgttaaatagtttgggaatgattggtaggtgttttgataggaaaagttagattcctgctctgtatcatatacccaaatggtttccagagaaattgaaaactttaatgttaaaaaaatgaaaccctataaatactaacagaaaataacgaattagaagaaaaaaattctaattgtgcattagaagcaaaaactatgaagggtgagattcattagttgaattggataaaaactaggagtcttatgctttaaatacataaacaaaattaaaataaccagtgataaatatttgtgacgtgagagagaatcctgtaaatccaaaggaaaggtgtatgtgttaagcaaaacagattcgtacatggaattccccagcagcccagtggttaggactctgcgcttttatggcagaggggctgagttcagtcccacaagccgtgaggtacggccaaaaaagcagcaatagattaaaataaattaggaaccatattatccatatttgagaggtgaaaagatctatgaaaagaagtcaggcttggaagttacactccataaatgttaacagtaggtacctgcctagagtaatgcatgatttttatcttctttgtttttctgcatttttttaaatttctaaagggagtatgttcatttcctaattaaaaataaaacttaatagctgatatattttgaaaaatagcacttggtgtctacctttctgagtagaggatggcagttgttgtctttcttcaagtcttagaacagcagaatctgtttccaggatagttaaaacttggaaatacggcatatggtcacaaaagtgggagacaagttcaagaagaacatattgtcattgtttttaacttactttttgctgttctaagaagaattattagacagtagagctttctgggtctgtttcgttttgatgacaggcttgaagcagccaaagatgactatcgaatacgctgtgaagagctggagaaggagatctctgaacttcggcagcagaacgatgagctgaccactctggcagacgatgctcagtctctgaaggatgaaatagatgttcttaggtaacccagccccccatccctgtgggatctcagacccgccaggcccccggggttcacctccctggaaccatttctcat

SEQ ID NO: 58695 - DNA, 867 bp, Bovine  19866881364000
  misc_feature (1)..(1): n is a, c, g, or t
nccgtctcgcgatggtcacatggggcgtgagaagcgtgtgtgcttttcggtccccatgtgcgccggtaagctggcggtgggcctcatgcacgtgcacgcacacacgtgggatgcgaagctggtgctgggcctcgcacacgtgcgcaggtgcacacacacacccccgccccctcagcgtcctggcccagcggctggagaagtggctgcagctgatgctgatgtggcacccgcgccagaggggcaccgaccccttctacgggcccaacggctgcttcaaggccctggacgacatcttgaacttgaaggtgagcctgcgcccagtctgccccaggccatgggccccctgacccctgtgagggtgtgatgggacccttgctgactgatgggtcgtgaggccgttgccggggacccacaggaagggaaagattctggcgtgcggaccccaagcggggcctctgagaagccgggccagcaggaaggcgtccccgttgagccgtgtctcctgtgaccctcccgtgaccccccgggtttttgcagctgcttcatgtcctgaacatggtcacgggcaccctgcacacctaccccgtgaccgaggacgagagcctgcagagcctgaaggcccgcatccgccaggacacaggcatcctcgaggaggaccaggagctgctgcaggaggcagggctggccctgatccccgacaagcctgccgcccagtgcctctcggacggcaaggtgagcccggcctcctgcaggcggcaggtggcccgtctgccacaccactgggcaggcgcctgcccgttccgaggtgggaacgcgagatcccgcgggcttggtaggagacacggatcgccccacgctttagctgta

SEQ ID NO: 58696 - DNA, 1582 bp, Bovine  19866881408525
  misc_feature (1)..(1): n is a, c, g, or t
naaacataatttttcttttgaaaactatccttgtcgctacaaaatatagccagattaagactaatttgcttgcaaaatgagtccagtttcaataaacttaacctgattatatatataagtataattgaccatatatgcttaaaactcagaatttgggggttccatcaagatcatggcaaatagaaagggaaaagtggaaacagtgacaggttttattttggggggctctaaaatcacttcagacagtgactgcagccatgaaattaaaagatgctttctccttggaagaaaagctatgaccaacatagacagcatattaaaaagcagagacatcactttgccaacaaaggcccatatagtcaaagctatggtttttccagtagtcatgtacatatttgagagttggaccacaaagaaggctgagtgccaaagaattgatgcttttgaactgtggtgctggagaagactcttcagagtcccttggactgcaaggaggtcaaaccagtcagtcctaaaggaaatcagtcctgaatagtcattggaaggactgatgctgaagctgaaactccagtactttgaccaccagatgctaagagctgactcattggaaaagacccagatactgggaaaaattgaaggcaaaaggagaagtgggtaggagacgatgagatggttaaatagcatcacggacttcagtggacatgagtttgagcaaactcgaggagatagtaaagaacaggggagcctggtgtgcctcagtccatggggtcacaaagagtcaaacatgacttagctactgaacaacaacaaacgctcttttaaattggttttgctagaacttttcataaggattctcaggtttgaactataaaaggtttctcaaggccaggaaagtcatgctaaggactggccatcagattctgtttgagatacctataaatttgggtgaataactctcttcttgaggatccaaaatgtcttgaggttcttgaacctgctgggaaatggcttgaattattcacctgataaggttacaaggtaccagactatttttttcaagaagttaatggctccataaagtcagtcttagttccttaatgctgtcttgtcttatctgagtctatgcacatctctcaattataacattccaatcaaagccttgagagtataaccaatgtttccaattgtgtgctgttgtaaggagaataggttcttactgaatttatgcaaataacagtattgccatgaaaataagaatactcactaagagtttccaaattctggagggatcaagtagagagaaaagataaatgtttcagttctgcttacaaagatataattcatcagattgctgtaaatcacagttagcttaaggggaaaggtttctttacatctggaaagcaaagattaaaattcagtaatatttcagacaaaaagccacacttgttaatcttgatacttcataggtttgatgccatcaagttttccattagaattcttttaattttttacccagttcagcaatataatctaaacattttcagaaacctgtacttatcagaaagccctttctatgagtctt

SEQ ID NO: 58697 - DNA, 1046 bp, Bovine  19866881520083
  misc_feature (1)..(1): n is a, c, g, or t
naatggaatactatcgggcctttaaaaggaaggaaattctgatacaggctgcaacacggatggatcttgagaaaactgtgtcgagagaagtaagccagtcacaacaagacggataaagctctaccgttctgcctcagacagagaactggaacggtggttgccagggctgggatgggggtaacgggtggggagttatagattaatgggaagagtttccattttgcaagattaagagttctggaggcaggcagtggtggcggctgcacagcagcgggaatgtgcttaacacaaccaaactcacacttaaaaatggtcacgatggcaaatttatgttgtgtgtatctcgccacaagtttttttaaagcccacagctcaagagtcatgtccctcttctgaagtctggagtcgcacctgccagatctccacgcatcaccctgaatgtagggggtgacacctggaaccttgttggaaactgagatcttatgggaaccatgaaaaattggttccactccagacctcctgaaccagaaactccagccctggaattatcactgcaacacgtttgtcagatgactctaatgtccctcaaatatgagaactattgcccaagagtgatagatgtagggcaattggaagggatatgtttgaggtgtcttgaaggtagaaaaatatgacttggtgtggaatggacacggggcagagaaggcagaggctggatagatctgaatgaatgaatgtcttttaaaactattctgctcttactttttcttccttttactagagtcagaaagaaaaaataaaagcatgctttctcaaagcatcaggttggagaacaggaaacaggctaggatggttgatgtataatctttagaaatccacaggaggtaagctttatccaaatgtgtacttagctgcacacacggcaattatgaggcaggtgagtggctgagtcatatatttgcttaccaacaggcccgggtgacgtcacacacaaaacccacgctcacagcacacggtggagagctctgagcaggccctaagttctt

SEQ ID NO: 58698 - DNA, 707 bp, Bovine  19866881712274
  misc_feature (1)..(1): n is a, c, g, or t
natactgatctattcctttcaagaagtcagtgacaagaaaagaaattaaaagatttaaaaggcacagctctatgggttgaatcctactttggacaagcaacttcttaagttaggctattcttgagataggtaaacttcaatatgaaattaatgattcttttaagtatgatcatagcattttagaacttttttaatgtaagaaaagatttctttaagatgcatactgaaaattacatgtgcacacaccgagttggaaatattgggaggggctgagcaagaatacaaatttgtcctcattttagacaaataaccaaactctgtggtttgagttaattaatcaacaaatattaattaaaccatgaccacatactcaactctattagaagccactggggatggaacagagggtatgctgtagtttagctgaggaaataaaattcacagaataaagcaatagagaacaattatgttctaagctgtatatcagaggctgaaaactccacagactctcagagtcaggagctgggggagggagggctgtgtgttctgtgatgacgtcatgaggagggggtgtgagcagagtgctgaaggatgagagtaactgagggctctctgtgcgctcacctgggtatgcccgcatgtgtgccctgcatgctcacacacatgaacgtgtgagatagaaagctcgacaggtcttcaaacgtcca

SEQ ID NO: 58699 - DNA, 2472 bp, Bovine  19866880625636
  misc_feature (1)..(1): n is a, c, g, or t
nttgtgtctgactctttacaaccccatgggactgtagcctaccaggctcctccatccatgggattttccaggcaagagtattggagtgggttgccatttccttctccaggggatcttcctgacctagggatcaaacctgggtctcctgcattgcagcagactcttgaacatctgagccccaacaaagctagcttgtcaagtcatgatcaggaatgacgttttggtatagtgtcacttcagttcagtcgctcagtcgtgtccgactctttgcaactctatgtgcagcccgccaggctttcctgtccatcaccaactcccggatgtaaatgaagcaaaaccctgatgatactgccatctcttttactttaacattcattctattgggttggtcaaaaagttggtttgtggttgtccacaaacccgaatgaactttatggccaacacaatatactcacgtactcttggcacttcctctccaacacgaacttccatcatgctcctcctcttcagaatctcgctgtgccttcgggcactcctgatttatgataaactcctccagaacttgagtttcttctctgaaccctcaacacctttaactgaattccaattcttccctgagagagtatcattctccacagtcttttcaccctggttattctctcacacctaaagtgcctcagagtcaggcagcaaagttctctgctgctttcgcagacactgttcctctaaaatcatggaaaagaataacaattttcctttaaggcgcacgtcgttttgtcttcatagttattctgtctgagacatttcctcttcattccctgaccattttctctttgtttcttgagaatcacaatccttgattaaatcctatttcatacttcaatttcagccaccatcttttatgactctcatggggataacccatccaagaacctggcctcctttaaccaactagtccgtctccagtgtctttaccttttattccatctcagctgcctactgttatgcttagtcgctcagtcatgtccaactctttgtgaccccatggactgtagcccacctggctcctctgtctatggggattctccaggcaagaatactggagtgggttgccatgccctcctccagggggtcttcccaacccggggatcgaacccaggtctcctgctgtgcatagattatacaaattaagtactgtctgtacaggaagggttgtatgtttatgaaagaaagaataaagtctaattattaataaatcacaatgaatatgtatattattattaatagatttaataagttgaataagaaataaaacttgagaggggaaaagggaagaggctatttcagacaactgtaatagagagattactatatggtaccaaaaatgcatgtgaagaaagtaactggggttatattaatatacaggaaaatgaaggtgaaaagtttgctcagtcgtgtctgactctttgaaaccccatggactgggaattctccaggccagaatactggagtgggtagcctttcctttctccagaggatcttcccaacccagggatcaaacccagatctcccgcattgcagtcagattctttaccaactgagccacaaggaaagaatgtcatataaacaagttgagagtaagggaaaagttcaaattatgagagggatacaccatggtgggcttccctggtggctcaaatggtaaagaatttgcctgcaatgcaggagacccaaggttcagtctctgggtcaggaagatatcctggagaagcaaattagtacccatttcagtattcttgcctggagaattccatgcacagaggagcctggggggctacagtccatggggtcacaaagagtcaaacacgactgagcgactaacatacacacattgatataaacttcaactttattcttcaaatcatgcttaaaatagatcttaactatcatttaatttttggtttgcgtaaataatatataaagtatcaggttctcaatttttgtaggcatttggaactagtatttacatgaactcaaatttctggtatatttttggtttgcatagtcttggatctcaaattagaaagaatcagtctgttaacagtataaaatcaattttaattcattacattgagaaaagtaaatataaacaatattgaggaatataaattttttaatgtaagaagctaatttgagctccaaatatcaggataattggatgtactagacatatgctggaagtgcagagaatacttccccttgatattgactcttttctagatcagtagcagttccaaatgtagtaaagaagcagacacgatttaacaggacctaaattattaaggccagtgcattgttgctagagagttcattaagaatcccatcaatacagtgtggttcatgggcgctagtaagagcttcatggaacattttaaaagagaatgagatatctcaatagactgatcttagtgg

SEQ ID NO: 58700 - DNA, 2262 bp, Bovine  19866881121379
  misc_feature (1)..(1): n is a, c, g, or t
ncgggtttaggccgtttctggacataacctctcgtctcgcttgaaatctatttactagaaatacacttgcttccttaaacaaaattagaaaaacaaaaaagccagatttaaattagtccactggttatttttaagcacttattgcaaatttaacaactacttttagactaaaattttggaatttttctaagccattgtcatcttcttagacaaaaaaaaaaaactttcaaaattttcaacatatatgtgtatgtttttatatatatgtataaaacattgtagcaaattggaacataatcataattaacattttttaaagttttggagacagttaccctgaagaagagtctcaagttcttatccaactaataccttcgattcaacatttttatgtttcatttttagtatctacagggtgtcaggttctgtgataaattctggcaatagatacatcaataattctgacctagtggaactcatagtctggcaaaaggaagaaatttacataaacatttatgatgtaaataatgtattaaaactatttaacttgaatcattaaattatagataccaaccatttttgacttatagaaatggcaatttcatatggtttaattaatacatttaatgtcctccttaaagtctttagttgtacaagaatttcctaattctgtacaagaatttcattaatttgtccattaattgagcaaggatgattaactcccagaatacaaattttatcactactaaataatttttatttaattatctgctttgtgctaaattgatcagagtggtagaacctgattaattatgactgtattctatgaccttttctaatagaaaacatataataatctattttattctaataacttttagcataagaaatagctatgtccaaagtatttacttattttgcctataaaaatattatacactttccattttcacatcatccgattacctacgttaacccaaccagaatttgttcccagttttacatggtagctgctatggtatataattttatttatttttcctaaaaatgttcacatttttaggaaaaattctagcaattgcaatgccaggtccctttggctggtatatctttctgacttggcaaaatttgaaatctccctgcagagactctggctgctggcctcttcagcacacgatctgccagccacagaacaaaataagatattattgttgtttagtaatattcaaatataaattctgtatcacagttctctcttttgtgccctgtggcctcaaaaagccatagaagtagtctttttctctattttcatctgaatttaattagtattcagatataatttaaataacccaaacaacagtgtgttatgtgtctatcaacactaatgtctatattgttattacaaaagtgttattaatattaattttcagattatttttaagtatattattaactcaataaagacagccatacattgatgaatctacagacatcaagcacagaaatttcaaaatatccaagaaactaggtattaatgacttaggagaaagtaaagatctatttttcaagaaagaatgagggccacagataaaggctgtcattcaccaaggagaaagaatacattttatgtagacttgacacggccaaatagaaagtgcattctttctggaatatgtgaacaggacataatagaaaaactgccaagatttatcacacctgctgacaactacccatgctcgctggttctgtgggtatgaatgatgtcatcatgagaaatatacaaatcattcatcatgagaaatatacaaatcatttctagaagccataatatcttaagcaggaactgaagggatcctgggacccacatgctgttttaaactctttctccaatttaatgtatgatttcagttcagttcagttgctcagtcatgtctgactctgtgtgaccccatgaattgcagcatgccaggcctctctgtccatcaccaactcccggagttcacccaaactcatgtccatcgagtcggtgatgctatccagccatctcatcctctgtcgtccccttcttctcctgcccccaatccctcccagcatcagagtcttttccaatgagtcaactctttccatgaggtggccaaagtattggagtttcagctttagcatcagtctgaaaaaatgttgagttgctagtaaaataggtggtgacaaaatcatggcaaaatcatgatttaagatgccaaaattggtgggtctggccaagaa

SEQ ID NO: 58701 - DNA, 828 bp, Bovine  19866881718205
  misc_feature (1)..(1): n is a, c, g, or t
natgagataatacattaaagcagtttgcacaatccctggctcgcggtgcataggcaggtgttagatgatgatgatgatgatcgccagtaagagcggtaatctcatcaagatggatcctatccagaacaaggagccggtttagaaagtagaatgtttcaacccttctgcacccactgttagcctaaatgagggaataggcctcatgctgttcaagagagcagatcaagttctggagggagaaggagcaggaaggaaattaacacacaacaacatgatccctataaaatgtggtgtgtacacaatgccacaattcagtgctcaaaaaaaaaaaaaaaagttcctaaacacacacaatatctggtaaagtctggaatttaaagtataagtggtgaaatattacagcatcttgaattttgttgctaattaaaggactgctgttggacagataattacccaccagcaatgtgaacctggacaaatctgccttgcagttttttctagtctcagtttcttcatctgtaaaaggagggcaggaaccaggtgaattttcgggtgccctgtagtttacatttgcactcctagaaaaactcatcttttattttgattttatattggcctttataatgcaatcataatcctaatttatccatctcctccccataattctttatgctttctgtactttttcaataaactttaatactaacatttcatacacatatataaataagggaaatcaaagttaacttttcttcaatcatttgtctgtgttcatactctatccatttcctccctgatccaacaaaatctgccaatacttggattata

SEQ ID NO: 58702 - DNA, 1348 bp, Bovine  19866880402180
  misc_feature (1)..(1): n is a, c, g, or t
ngagaagactcttgagagtcccttggactgcaaggaaatccaaccagtccattctgaaggagaccagccctgggtgttctttggaaggaatgatgctaaagctgaaactccaatctttggccacctcatgcgaagagttgactcattggaaaagactctgatgctgggagggattaggggcaggaggagaaggggatgacagaggatgagatggctggatggcatcaccaactcaatggacatgagtttgagtgaactccgggagttggtgatggacagggaggcctggcgtgctgcgattcatggggtcacaaagagtcggacacaactgagcgactgaactgaactaaactgaatggtgtggggttggacttagcactcctaagagccctcctggcttaggcatttcaggattctaagtgccctgggacatggactgtgttgcttctaagcaggagctagtttgggtgctttggcacagaggactggggctctaccctgaacagcttggcagctggcccatcatccctccccctcactttttaagcacctccttgcatgcagcactctgtgccaggaactctggaggccacaagggagatgcggtccctatgtttaagaactatagtcaggagtttgagatggggtgtgcccaggtcccagtggactgccagcctgggtacaactcagtgctcatatttgcattcccagcaattagagtgggaccaatagggactcagtaaattcttgtccacataatgagggaatgagggtgagacccactagcctgaaaccctgcagaggaaacaatccgtgggtaggactgagaagtagggagagacacagccatgggtggtacccagccatctcggaggcagacctccaggcctcataattcctgcgtcctgaagcccgacgttagatgtactgagtttgcggaacctgttgctttggattcaattttggaaacgtccacagccttctggttatgtaatgtccagagtcaggcctggatggctgcccttggctgcccaagcctggtcatgggaccagcttatgtcttcagacagccatggggaaagaagagtgggtggagggggaaccaacaagagcagtaacaacccaaaaacccactgtgtaaccactggcagctggcaagcagatgcaaaagcagattagacaaaggcagaggttcaggagatgcaatccctgtctgctctgaaacagcccttcacattatgagagacgctctgcagctagcagagcactgggaggggaagagcggggggcagcagttcctaagcttgcccagctcctctccttccttcaggccggatgccagggtcac

SEQ ID NO: 58703 - DNA, 1561 bp, Bovine  19866880529006
  misc_feature (1)..(1): n is a, c, g, or t
ncctttgcctgatgggtgaattcccagctctttgtccgctgagcatctctagcacacagctgtctcaatgcacactggaatgcccttcctccttctcttatataatctgcttctgaagtcatccttacctctcttacaggtcccacaagcccctcacttccctccagcaagatgttattatctcagccatctgcccacaggctgtctttcctccagacctggtctcatgtgttcagtgtgttgcccctgaacacatagagctgtgtgtgctgtcgagctcagtgctgggcacagaatgagctcccagggctgctgagcaaggtggatgacggaggagactgaggacgaatgtccagtccaggactctggcctttatcctgtgggcagggagcagctactggagcagataggtgcttgaggcctgggatccggtgggatatttctccataccaggtagcagtgggtgaccaatattctgtcatattctatcctagttctctcagctcattaagatcttccattccctgggtcctgagaagttcccgcttgtggagcaaacatttttccccaatcacaagccaatggtgagtaccttttttcactcttaccatttttgtgttatggaataaatacagatgtccatgtactcagtccgtttgaatggaggaggtgggcatgggggctgctccctgaccacctaggctgtaaggaagagctgtgacatcctgtgggaacacctggctttccaggggaagagtcaggtctccaggtgaaatttcaggtggtagagtaaatgacaaagatacacagcattccgtgggaccctgggaatcttcagcaaatcgggacaacttgagctggcagttggaaacaaaggtgaaagatgtttctaaggtagaatgttatttcatgtgagccctgtgcaggacttggtttcaactcttattttaataaaagcagtgatatttttgtttccattaatcatcaaagggcagtttgctcgtgcatcctctctgcactcaaacttttgaatatacccaaggttgttgctgggaagtggttggagtttagcttggaatatgtgggatagcctcccatttggagggtgggaaaggtgaacgtctttttgggtgtgaggtgaggggctctccatcccgcggccagaagaagttagatggaagagttctgggatgctggaaagagcccgtgacatgcctgctgtcatggtcagtggtcttgttaaacttgtcaaaggaatgcagggccatggccccatgcatgccttgcaaagaacacaagtcgtggggcacaagatggttaatagggtcccaacagtctgcttttagtcccaagtttaggcaactgagcttccaagtcctatttgaagacactgataggtgtctccaagtggggggacagtctaagcaggcaaaaatgtttctcattgattatctttcccttgtatctgatctagtgaggcgtcataccagccagggtgtgctggtggaataagaagggggcatgttccaacaaagtagaaacagtaagaaaattcaggatt

SEQ ID NO: 58704 - DNA, 2743 bp, Bovine  19866880538977
  misc_feature (1)..(1): n is a, c, g, or t
ntaaaaatgcttttatcctttgatccacaacaccatttcaggtattttctatacagttgatcctgcacatgtaagaaaaagcttgtttttaaggccattcactgctgccttcttcgtaagagaaaaccaaatttccatttacagtggattagttagataaattgcagtataattacacagtggaataattatatagctgtgaaaaggataaaatgttaatgacctgcgtggaagagctccagaatgcattgctaaatgtaaaagcaaggagcgaatggcgtggatagtgaacactgctgattgtgtaaataagtgggaggaagaaacagaacatatatttccgtatatgcataagggaatactggaggaacatgctagaactaacaaaagtgcttacctttggggagcagggggcaggaaagcattggatgagaatgagatggggtagggttttcaataaaaacatcaaatattttttagatctttgaaccaggtgaatatattacctcttctgaaaacttatggttagcttgtttggagttgaaggaaaggaaaaactttccaaagaaaatacatttgggatctctctctctgacctcaaaccaagagatgggcttgagaggaaacaagagagagaacagatgtgtgccctgggatggaagcttccctcccatcccagtcatctagccttcacaggatgactttgcaggtccttgtattacgagtctatttccaggacttctctggtgtccagtggttaagaatccgtcctgcaatgcaggagacatgggttcgatccctggtcagggaactaagatcccacatgccgaggagcaacttaagcctatgcgccataactcctgagcctgcgtgacacaacaaagatcccgcatgctgcaactaaggcccgacacagcccgataaatacggttttaaaaaggagtctattttcccacctttttaatctgggcttgaccatgtgacttgtttttatcaaaagcctatgatgggatgaaatgacatcgtgcagcttctaaggctgaaccttgagaggccttgaagcttctacttttgccgttttggaaagtaattctaccacataagggagctgggtccagcctgctggaggatgaggccccaggagagagagaggctcggctgacaggcgacaccaatatccagatgtgtgcagaagccctcttggactgtccagccgcaggtaagtggcagataactacagccctatgagcaatcccaggagagcagggttgctagatttagtaagcatacatgacacccagttaagtttgaaattcagattaaaaaaaaactttttgaatataggtctaacccgtgcaatatttggcttccctggtggctcagacagtaaagaatgtgcctgcagtgcgggagatctgggtttgatccctgggttgggaagatcccctggaggagggcatggcaacccactccagtgttcttgcctagagaatcccatgaacagaggagcctggcaggctacagtccatggggtagcaaagagtcagacatgactgagcaattaagcacatgcaatatttgaaggcatacactccaaattattcattgtctgaaattcaaatctaattgggcatcctgcattttatttggtaactctccaggagagaccatcgggagatcctcccagctaaaccaaactcagtacaagtgactaaatgaaaaaaaactgtgaacaaagaaaatggctgctttcttaagccactaagtttcagggtggtttgttatgcagcaaggagtacctgatgcaggtacacatggaggatcacagtggggcctaacctatgcttgggccttgctaggtcctgcctgcccaccaggttccatcctctaggcctccttttgcccattcaaagctggggtgaggccttagtgggtcttgctctgagtccccaaccctgagccggcccagctccacccacaccgcaagtccactctcagcccttcccgggtcccagagcacttacttgagatggggatggggtgatgctggcttcttggcctcttcgccctgttgggaggcgctgcggccctgcacaggaggccggggctgcgaggtaaggggtgcgctcgacttgggggcctggtttggagagctgcctccagatgcacgggagagctggggagaccctggcgatctctgctgtggcgatccagactgagggctcaggggttgctggccttgtggggagagcctctgttgggaggggctcccagatcttgggggctgaggagactgagctgggcgagggccccctacagggagaaaaaaatgattccattcaaattcttttaggataaataaggctgtgcaaaggtgtcactttgaggacgttcattacagggttcttcctgccagtgaaaaactgaaaacaatacaaatgcgcaactgtaggggaactgactggagcgttaagatacattcatgtaatggaatgcgctatggtcatcatgtatgatgtggcagaacaatattaaatgccatgggatgctgttgataatatatgctaaatattaatatagactactagacagaaagcagcttatagaacagtatttgtgggttaattacattttgacatgtataaaaatacatgcctgaggcaaaggaaggagtccttgccctgtccaagggagcaggctatgcatgctaagtcactcagttgtgtctgactctgcgatccca

SEQ ID NO: 58705 - DNA, 1150 bp, Bovine  19866880593093
  misc_feature (1)..(1): n is a, c, g, or t
ntttcctatttcctgtctccttctcctctgacacggttataaataactccagggctgccctgtgggcttaaacataggtgaggaaagtggaaggtatgaaggtggagctacatctgcacttggccaggggtgacagggtttcaggttgctcagaggaatttggtttccttattttttccactaaggagtgaggtagtgaaagaggaaataatctgtgttagcttgaggaggcttggcctcccttgggccagtgctgggttatgcctgcaaggagctgctgctctgatgactgcagacccctgaggccacggggctgagaggcttagagagaaggcatctcaggatactaagagggcccggcaccatgtcgggaggaccagtggtgtccttctgaagccctatctggttccatgtggaaagatgaacaggcaagaggctgtgtgtcactttccttcttcagctgccattcattgagaccactaggcctgggcctcagtcaccatcatctcccagtctggctgcctctgcccagctttaaaggactgtgtaaaagtccacaaatacgttcactatggatgcactcactcctcgaacaaagatttattgaacatctactatgttccaggcactggacaaggtactgaggccacagagaagaactggccatagcccctctgtcaaggccacggctcagcctgtccctcttttggctgtggctccttccccacacttccaacttggacagatgaatacttaagggaagcacatgaaagggccccctttcccaccgtatcttttgtttcctaaggttcagaaaacagaaaaggggggttctgaagtggccagtgtaataacttccttataaaccattcactgcctggctcctttctccccatgggcccacagaagctcttacaatcatgatgtgatggtttcttgtggtacccatcctactacaagggcttccttggaaactcatttttcttctggagcccaagagcattgggacctttttctgtgtggtgtgtggctcgggctgccagcacctagagaggatgtctttggttcacatgaaggtgcacgacaggagtcattcctgactcagcaagtgaggggagtcagaccccttgccgtgtcaggccgtctctga

SEQ ID NO: 58706 - DNA, 1371 bp, Bovine  19866880598483
  misc_feature (1)..(1): n is a, c, g, or t
nggttttaatggagtggtgtgatatatctgcattggaaacctgactttgtaaggccctcttagggacttattagttaaatgaccttgagctgatttcaaagccttggtttctttagcaataaaatgagaatgtccttccacctgccttgtggggttgctgcatggattgaatgatataatgtacagaaagtagaggctgaacacagagcctgctgcacaggaaccactaaagtgggcaattaggttttttgttgttagaaaagcactctttaaatgctgaggtgcttgtccgacagtcaatggtcgtgtatacaacggccgtgaattttatattcctttttcatggtgagttttaagagcatgaagtgaaaccaagaggccctgggtatggagaaaagttagaaataaggaaacaaagatttctgaccatctcctgtactattttgcatcactgttcctaattttccatgcttctctgaaccaatacctgttggcaggtaactttgtaatttctcccattaaaggagaagtatatgtatcctgtgcttaattttgggcttggtcacctgacttgctttggcaaacaggataccagtagatatctggtagaggcttaacaagagcttgtgtgcttgggcatgggctcctgtacctctgcacttgccatgctgacaacgtgccctggttagcttgctggtccatgtggagccaagtctagctcggcccagtcttgtttagttgctcaggcgtgtccgaatctgttgcaaccccatggactgtagcctgccaggctccttggtccacaggattttctggacaaatttactggagtggattgccatttccttctccaaggccaggaccagaccagccaattcccacccagaagcaagagcaagattaatggttatctttaaagccactgagttttgggctgttttgttaggcatcatagttgtggcactaagatgctgatgacccctgttatgtaccagctcaagtgcttttacttaggcttttaaatttgattctccaacatccccatttactaatgaggaaactgagacttcataagcccttctggtccaagatcacacagaaaggaaaaagcaaagcttggaagcaaccctgttctgtctgattcccagaacatctctttccattacatcatgaaagaaaggggtgggaggtggtggaatgccatgtgactggcctcacagctgtgcttcagtctggggccgtctatagtcatccctgagaccacgctggccaatatcataaatctaagattgtgacatcatgggatgactcaggcaggaggtggaaggacagggaagccctggtgaagggctggtcagtataaacctcagt

SEQ ID NO: 58707 - DNA, 2005 bp, Bovine  19866880608793
  misc_feature (1)..(1): n is a, c, g, or t
ntgatcaaaactaactttagccataatggaacagactggaattgtgtccacataatagagtgcaatgaaataaagcatgtctaatgtttctgccgaaactatgtaagctgaacctagccataaattaacatcaaaaacaagacatatttctacaaaattaatggcctgtgatcctcacagatgtcaagtttatgaaaatcaaggaaattaaggaattttttcagattgaaggctagagacatggaaattaaatgcaatgtgtaatcagtgtagattggattcttttgctacaaagggcaaaacacagggctgtggattcaatggtagtaatatagcagtgcttgttaatttcctgattctgatggttgttttgtgctgtaagaaaacatccttgttcacagaaagtacctcaaactgttgtccagtatggtagcaactaagccactggtacttagaaacatgtctggcataacacttcttaaaatattttggataaaaatgatacattattaaaataatttcagctgtttttttaataaggactatcaaaagtaaaattacatggatggcttgcactgtatttcttttggatggcactacaaggtattcaggttgatttggtatcatgttagcaacttatcctcaaatagttcagggaaaaaagttattaaatctgagttgcagcttttctgaaagattgaatgaagttattttaaaataaaaatttgttaatgagggatataaaaaggtatgttattttagattaatgggcaaatgggcattatgaaattttaaggttatatatggcattgacattcatttggggcctatcacaaactaaatgtttataatgtacgaattttaggagttaaccccccacaaccgtcacaagtattgggaattattttctatgtttaggctgtgatggtgcctttaaggagctgcctttcactagcagcacaaagtacacatgaagattaagcttatctatcccactggatattgcctgctcctcatgtaccccctttctgggttgttcacttggtctcttcatcactgatcttcctgcccatttgccattagctgtgaacctgcttgactctcacacctgtttgtcctactctttagcctttctttgtagggcacccttgatttgtcccagtgtcctgcgaacagttcgagccttgcctcgagagcagggcacacagttctccctctgacaagaaaagaggctcggaaagattaagcaacctgtacaacactgtgcagctgggattccaagtctatttctaattcatgccactctgtaagaggcccacctgcttatctcgatgatctgctttctctaattgttctgtttccttcatagagcttaccacaactcataatgatcttttatgtccctcaggagatgctgattctgtgatagcagctatcttacctgacatgtttacagctgcatctcactgcctggaacataaaagtgcacaatcaacttttattgaatggcaaaaaaaaaaaaaaagtactagtttaccagtgggtaaaatctttttcaagactacaatgcagttatttgtaaagatttttctttttctttaggtatattacatataaaagtggatattttccatgataagtgaaaatggccaattctttaagaggagaagtattgaatctttataagaatgtaagtacgtacgttgccagttttgtaaatgttatatgacatagattgtttagaaatatataatctttcttttttaagctgctgtatcttggacgagactatccaaaaggagcagactatttcaaaaggcgtctgaagaatgttttccttaaaaacaaagatgtgaaggacccaggagaagatcaaagaacttattgaaaggggcaaatttgtaatgagaagaactagaagcattatacttccttaggaaatacagagctatgaaacaacgctattactcagataccaacaaaactaaatgatcagtattactat

SEQ ID NO: 58708 - DNA, 986 bp, Bovine  19866880703688
  misc_feature (1)..(1): n is a, c, g, or t
nttaatgaaagtatagagggaggcaggaaccagaccataaaagaaagatacagatcagtggtttttacaagattttgcagcagtagccttgttttgagatttaaaaacccctttgggaatctgcagaaaaccatagacatgcttatcggtaaagaccctcatgtccatacagatttcaggttggtaacctctgaaaaatgtaaagacatttcagatagtggggaaagagaagagaggaaatgacattgtttgcaagctttctctgtgccagaggctttgccagttacaataaattatttatttaacatgttttttataatcccatttgataaatgttgaaaccggatatcagaaaggctgagcaatatgctttaggttcagtgggtaataaatgataatgaatttgaattaaagttggcttctctccagaaatattatttttatttgatatagagtctgatttcatcctgccaatggtatttttattattaggtgaagggtctgtattttcaaacagctgaagcagtatccatttcctttttactggctctagctgaatagcagagcagctcagattctaagtttccatttctttactgccacagtgattataatgtcagcctttattactcccagcagagtggtgaaatataatccctacaccactgccaattaaggcagcatcaactctattcacatttgctccctctttgtgaatgctagaagatctgctccaagacttttccagtggtttagtattctgctcaaaggagtcatttgctgagcatcatccttcttaattagggacctaatgtattgcagtcagtcctttgaacaaggggaggatggagacctaaaaaggaggcgtgaccattcatttcaaggtaatcagctttgaagctgcttgacaatggatattgatttcctcatgcctggaaaacctctggagagagggttctgatctgagcagtctaggcaatccatgt

SEQ ID NO: 58709 - DNA, 2031 bp, Bovine  19866880716554
  misc_feature (1)..(1): n is a, c, g, or t
ncaaagtaatgtctctgcttttgaatatgctatctaggttggtcatacctttccttccaaggagtaagcatattttaatttcatggctgcagtcaccatcttcagtgattttggagccccaaaaaataaagtctgatactgtttccactgtttctccatctatttcccatgaagtgatgggaccagatgccatgatcttcgttttctgaatgatgagctttaagccaactttttcactctcctctttcactttcatcaagaggctctttagttcctctttgcttctgccataagggtggtatcatctgcatatctgagattattgatatttgtcccagcaatcttgattccagcctgtgcttcttccagcccagcgtttctcatgatgtactctgaacagaagttaaataagcagggtgacaacatacagccttgacgtactccttttcgtatttgtaacccgtctgttgttccgtgtccagttgtaactgttgcttcctgacctgaatacaggtttctcaagaggcagatcaggtggtcttgtattcccatctcttccagaattttccacagtttattgtgatccacacagttagtggctttggcatagtcaataaagcagaaatagatgtttttctggaactctcttgctttttccatgatccagcggatgttggcaatttgatctctggttcctctgccttttctaaaaccatatctaaagtcatattagagatatgactgtaatccattctttttaattatttcaggatatttcttggtgcggatgaaccacagttttttcagccattctcctaccaatgatctcccaattctcttgtgaacagttatgcaggaaacatcctataacgtagttttacttagcagtgcatggaaggttcttcttcccctcgtgcattcctacttaagagctttaaagtcagttcaaggatctttgcttccaaaagaaaaaataaaaaagcatctctgaatacccccaaggagtgagtcccacccaatgcccctgagtcctatgcgcttgcgtctctgttatagccttttcaaggatgtgttgaaatttctcaaaaaagtctattagccagtcagccctttgagggctgggactgtgctgctcgtctctgcgccctcccagtacagcataaagcttgccgcaaagtatgtgtccactggttatttgtttacctgaacagcagaaaatttgggctttgaaaccgaacaggctggagttcgaatcatcatggttctgtcacataccgtgtcacttagtctctgaacttagtcttctcatctgtgtaaaggggaagaaaaatccccaactatgtgttgttggaaggatgggatgagaccctgtagtgctaggagtggcatgaggatggtgtttgaggatggacactattgtggttgggatgtgcttgaagaaggagactagactgagactttggcttggcactgggccccttctatgcacctttgggcttcacagatagggaaacaccctggaaccagcaggcaattccctaaaaaatgcccagataaatcttgctggttccaagatgtctgggacctattgcctctacctggatcctcctaaatacccaagccctttccagatggaaatgactggcttccattccctgtgacatatcttcatgcgtaagccttgtagaagtcacccaaaacttctctccaagttgattcgctgtgtcgtgaaggtgcaagacttgatgaagggtgttcagtattgtttttgatatgggtgcccttggggcaacggttggggagggtctttgggggagatgttgggctggaatcatctgaggtatctgctaggtattgatcacggtgtggctgtccttttgcctttttactccaccatgccttcctgagagtctattctgggagcttagaagtgtcttggaccactgggtaggaactgatgatacaatagcaacctgaataagaggtgcacaatgccttggcgacaaatgttagttcctgcggacaagccgc

SEQ ID NO: 58710 - DNA, 1464 bp, Bovine  19866880730954
  misc_feature (1)..(1): n is a, c, g, or t
ntattgggatgggttgccatttccttctccaggggatcttcccaaccgagggatcgaacccaggtctcctgcattgcaggcagacgctttactgtctgagccaccaggaagtgttccatctctctatccaggctctactatgtgcttagcactgtgctagtccctaggaatcatactgaacaaaacaaccccctgccatcctggtgctcctggtctagccaggagacaggcccagatgaagaatatttactctgactcctctcttcatcagaaattactaactggcaaacctcatggagtccacggtcttattttgttggacttacattatatacttttgattttaaaacagagaattcatttatcaagaattcagacttctggcttcccctgaaaatcaataactgagcatcacgagacctgtatttccacgtggcaaaagctggctgagaggacggcagctgttgcctgcagttggggcatcagttctcacgcccaacagtccccatggctccctgttgtctctctgcagccagtgtcaagtggcagaggcatttgtcatagagcctgggctgccgtcttccttacagaagggaaatatttctctgtgcctttgccttttcctggcacctgccccttcactcaccgaccaccttgccttctgtgagcagctgcacaagcaacccctaatttaactcattccattatgaagatggcaattagctcagtgaaaatcttcaggaagcccacaccactgcccttcctccaaactcaggtttggaggtcagaaaaatggatacaaagcaccgtgccctctcttgccatcacagacagcctccctcctgctgaggaaacatcccatgcaggcttccacaggcctcaggaggaaagacattctgcaatgagactgatgtctgcccagtgacctgcccccccagggcaaggctgtagccagacaggtgaagtctggaggaacaggaacagctattgctaagagagcccatggcatctgagggacttctctgaaagaggaggacctaggcaagaaaatcacattttgaagaatgaaggaagactcagaagttggacagtggaattatccagaaaaaggcagggcaatggcaggaaaaatgactaagacataaaagcagagagaggaaaatgaaaagtttcaggtctgagactcctttaagggcttgcaggctggccccttcagagtctgggttcttctgcattactcctccctggctgcccgcctagttgtattggaagctgcaggtgatgggggctcactcctcactgggcggcctgcgtggtcttcggctgatgttcccgttacatacactgagctgacacatctccctctttgtctgcttcatcggcctcagttctcccagttgggaaccacatgaaaccagtcctctagccacgaggtttctaaactggctcttcatcatttaaaaa

SEQ ID NO: 58711 - DNA, 1524 bp, Bovine  19866880757167
  misc_feature (1)..(1): n is a, c, g, or t
nggactgtagcctaccggctcctctgtcctggaattttccgataagagtactggagtgggttgccatttccttctccaggggatcttcccaacccggggatcaaacccaggtctgctgcattgcaggcagacgctttactgtatcagaaggataaaataataagccctttaatttcttgaggaatgtgtaataagaaagtaaataaaacgccatatcttaacctgcccctttgttcaagaaacacttactgagcacatgctttgtatgtggccttaatgacagagctcaccactctcaaagggttctccttctggtggaaaataaacaatgggggctgtggctattgtacactgggatgcgtgctgacacagagatcatacaaagcatagtggagcacagaagagggagggatcgtcaaccttgcctgggaacactcttaggagaggcttcacagaggcctgggggcaagaattagccaagtgtcaggacaggaagggtgcagttgtgcacacagggtagtgaggtagtcaggtattcaagccttcccactaaagagtatgtttgaaatttcaatttgttacatgtcagggaaatgaccagagtagaggttgcatgcaaaagggtggtgggagatgaagctgaaaaagaaaacagtctctatccaggatggggtttgtatggcaacgcatgcggttagaaatcgaattgtgtcctgggggagtgagacatatttattggactttttaaaccatggagtaatatgatcatgttttcattttaggatgcacatgctgatagtggttttagaagatagactgggtggcatgaggctggaggcagggaaattccgctctggattgggtgaaaaaaaacatcttatcctggaatattatgcttggggagaaggttcatggaaagaacttcataaaatgtgtgtgtatccctgacttggtgttctttagcccattgagcttcattctcatacctgtaacttgtatttgagaatagaagggataacctgttttccttaaaacagagaggatggaaccaaacccgcaggatgtgtttgagctggcaacgcatgaaagtgaccaccatcaccctcatcttgttcaccaacagtcctggccacttgctctgacccatttcacacccacattccagcttactcccaacctgctgaatctctggcctcgtgatttcttcaactacttatgctcttctccccatgccatttctccagctttgacctccagcttttgctcagccattctttacgtttgctgccagctctgctgtcatctctactgtttggggtctggctcactccctgatgagaggagccctgctgggttcaccccagccctgccagcaggccctgcccggatgtgcttgcacacaggatttcagtctttgcatttcagtaggaatcaagggttattaattaacccagggtggaacctattatgaaacatcccagaaagctggaacaaaccaaagggacttctgaactcacagcaggg

SEQ ID NO: 58712 - DNA, 1131 bp, Bovine  19866880778923
  misc_feature (1)..(1): n is a, c, g, or t
ntatttcattttgccgtgacgatgataatgatgatgacagtaataacatttacctagtacacactccgtccaagacatagtgcccagagtttcacaggcattacttgcctaatcgattcaggtaactggtaacattattatcctgttttatagaagaagtcagaggccagaaacaaaggtacttgtccacaatcataataaccataaagaacagggctgggatggggaaagttcagttggctcctaagcccctgctcccaactgcttcttcctctaccacaccctcactgagccgccatcccatgccatctaactgcggggtaccaagggccctatcacagtaccaactggggcatggagggaaactggggtgcatcacaactctgtggatgtaccaggatgtggcaaaacgtaggcatgcaaaggaagtcccaaatgagcaagaactcagaaaggggtctgagagaccacgggattatcagaggtgcaatgaggagagggcaggaagcactgacaggagaagattttggattatggtgaaagcatagagtcactcctccagggatgactgcagcctagaaatttctggacagcaattatgaacatttagggaaattagctccaaagatgtctgcttcccttgtctcctccacttctccctgccccctactcccccatcccagggtttcttatctgaattcttgctcttataaacacaattgtctattccagttgcctcactattactaagaaagcaattccaggcacacggcaggtagatgcctgctctgagatgcggtccctcatatggttcaggcctccctaacctccctgtttgtcttgcctttttctccagtgatccgagccaaggtggtagggaagaaactgctgaaggaggggccctttggcacgatggtctacaccatcaagcagatgaaggtgagtgatagcccaatcccaggctcaggaggatttgggggtgggcaaagggcaaggtttctgtcagagtgtcttggccagtggaggcaactggaactggacttagagagtgtgtttgcttggtatctgatccccagccatagcccctctacctggcaggagagggtgtagatgaggcagcagaaggggaag

SEQ ID NO: 58713 - DNA, 2183 bp, Bovine  19866880808917
  misc_feature (1)..(1): n is a, c, g, or t
ncctaactcagccaaagtcatttctttttcttgcaaccaaagaactctatctatacagaaggtgaagagcggtacctgataatctgaatgtcattctgacggaaacagtgctttggggaccgtgatctcagtttattgtcattgcttgattgatgaaggcactgaagcctgcagaggacagtggctcctagatttcacagcatcagcagggaagggggaactggggaagacacagcgtccatcagactcctccccgtgctaccttctgctctaagacacttcccccagatttcctagccacactctcacagggtgaagactctaccagggcaggagacaactcttcactgttttcccctcccttccctctcgccgtgcaagagcaggggaggaagcggccggggcacagagcctctggattggatggcggggagacctcacggagagaggtcagcacttgaaaaattcctcaagtcaaagggctcggggcctgggtgccacacaaggccctcactgtgtgcggacattgtccccctgataaaaggggccgggcctgggaaagcggcgctggtgtccaggcaacaggccaggctgctggggaatgcccaaggcccctcccgccccaggcaccaaggcggagggagggggagtggcagggggggtgcccagattgggaggacgagcccagaagcccagcgccaccccaggttgcagggggtggcttgtgtgaatccgtgaatgaagggagtaagaggatggcaagacccctctcaccaggcctttcctagctccctgccctccacctctggattaccccacagggaagaggcagggcttgcccttatttcaaggagagtcttaggggtgggggaagaggtgggtcaggggagacataaggattttgtttcctagagcctagtgtctcgaagagacaggtgtgtatcctgccttgagcccccctaccaactctaggaggaggggaaccagcccggtccccgtcttcccatcttcagagtagagagtgtgccagcccaccagcacccagacacccctcctccagggcttctagaacgcagccctcaagcacgtccggctgaactgagaaacgtgccaagtggcctcctccccattgcctgccagtgccactatgttcaccagcagttagtatcacaattagctggttgtttgttttttttaacatttttatttatttggctgtgcaggggtcttagctgtagcacacaggatctcccgtcttccttgtggcatgtggagctctcgctgcagcatatgggatctttagctgtggcatgtgggatctagttccctgaccagggattgaacccaggccccctgcactgggagtatggagtcttagccactggaccacagggaagtccctgcaatcaactgttaacaccatcaccatttcagtgcctgttatgacagctaagcccaataccagccccacttgtggcatcatctccacctcttactgacccttcatgagaggtgccacgatcctgccttacaactgaggaatgtgaggcccagaggtcagactcccccaaggtctcatgagtgagagagaggacgggggtccaggcagtctgccttgagactgtccacttgattttgttcctgccctgctggtgactgagactgttcagtcctcatcacaggccaggaaagcagcttcctgagaatgaggtcaatggaaggggtgggagggctggtttggctacccaaccggaatgcaaggacgcacaaaggccagcttctcactgggcccatgttagcagggctgggcactgcctcttgttgccactctccgtaagtagggtagaaagataaactagcagacatctacttaaaaatgaattccagataaacaacaaataatttttgtggtacaaatctatatattgcaatggggatatgtttatactgattcattgtttgtctaattattaattggacatacttatttttactggctaaagcaacaaggaactctacccaaaagcctctgctggtgatgccagctcttaatttaatgcccccttcccacccactgcaaccgtcccccgacaagatggcacagtgggaagcagaaagtcctggccaccctgaggccaattaggccacagcaaggcttcaaggggctgccaagacaccctgag

SEQ ID NO: 58714 - DNA, 1755 bp, Bovine  19866880883020
  misc_feature (1)..(1): n is a, c, g, or t
ntctttcaagacccagccccaaactgctcccccgaagaccccctagttccccaatgtcagtaaggttcatcccagacccaaggttttatagcttaataacagaagctgggaatccaacagctttacttgttctgctcttccccgttcactgaagaaaaggaaagaaactctttgctgggtcaataatcaacttcaaaatttagtccttttgcctaattctcacttccggtggcggggggcggggggcggttcttaaagccaggcaccctataactgggtcaggctggcaaccctaattcaatagaaggaattggctgtgagattctaaagaagctggagctgtgaggcactgcctgaggcccccaatgagaaatccaaagccccaggctcttcccacaggatccttgatcttgttctcatttcctcctccagaaacgtggggctaaaataagcccagaggctgaggcaggggtgagtcagctcttcgagtgaagcaatcactgcatggcagctccttgtaagaaacatcccccttgagtccgagttgtttatgccaaaagctgcaagcctgaaaaatgagttcccctaagataggttggctccctcttgtctcaaatggtaaagaatctgcctgcaatgcaggagactcaggttcaattcctgggttgggaagatcccctgaaggagggcattgcaaccctctgcagtattattgcctggagaatccccatggacagaggagcctggtgggttacagtccatggagctgtagagagttggacatgactgagcaactgagcggatagcatattaagaaagagaacaatgaaagactgtaggattagtcagttatatagaataatggaggtacatgttatagattttgcttgcctgatttatgagctatttaatcatgaaaaccaagagaaagctttatttattttttccaggccatatctgccttaacataaggcaaaacttcaccatctactgctaattcagaaaataaataaataaactggacaaagaaatgaacatctaaaaaaggaataaacaaataagcaaacaaaataaacatctgaaaagcattaattggtaaaagtgataagggcaatctattatgatatatcgcataaatcccttgaccctacctttatccaacatctttcagttaatcactcaattatatacatttcttcttgttggaaggtggctggttactcatgctactacacaactggaatcaagaaagatgatttcagatacttttctaagtaagtgtctaagtgctataaggcatctctcatagtctcataatatgcagttgctttgtttatcccccttccaaggagcgtttcattatgttcaggtcactatgcatttgctgtatcttaatcttttagtaccgtcaaggttatttcatcataccatcctttagtatttagtctgggtgggaaacccctactctgaaatgtgcagaaaaactacctatcatggaattctgcacagtttattaatagaatgaagggttcaggtattggccagggaagtgattgcacacagtttgcacttgggcaaataagagtttaaattccaactcaaacttatatagtaagttaccaacttatttgaggccccattgtttcacctataaaatggatataatgaccttgaatctgagatttcttgaggccagcaaagaaggaaaataagagacaggtggcatatcaagaatatagagtaataagtagaaag

SEQ ID NO: 58715 - DNA, 1315 bp, Bovine  19866880891906
  misc_feature (1)..(1): n is a, c, g, or t
nctaaatcccttccttgtgtctaaggcccccccaagcttgccactgcccacattttcaccctaattcccactgcgtccccagcaagcctctactcacaccaacctttactaacaagttttccccaaattctgtccaactctgcccgtatacatgtgacttcattccctgtcatggaagcctttgtctaacgcccatccaacatatacacttcctgcacagtcactatatgccaccccttggatggagcctggggatacagctgtaaatgaaacatgcagagcaccttgttctctcagcgcacctaccttggatttgagagagggacaacaaagaaaataaacgtgcaattacaaatagtggctaactctatgaagggagagttcatggtatgataaagaagattcaagaagcacttatttttttagaccaatatccagggaagtgcactctggagacagagcatatcaactgaactgtgaagtatgtaaaggggtggcctagaaaacagtgttaggtagcatctttcagagaaaaggagcagcggatgcagaggctggaggtaatgaggctcattcagtaaagatctgaaaggcccatgtgttggaacatgtagacagaagctggggtggtaaggaggggaaacacaggatgaaacaacaggtagtgcgaactagatcaggccgagcctcagaggcttggatggagacccagcttctccttgaaaccttccaaggtgtttttggtccttgttttcctcccccagattcttccaagccttgctttctccatcacttaaccaggaccaagcactgtgtttttaaatctccagagagtcgtgaatatacagagagctgcctccttcagtggggagctgcctcagaccactcaggtcacagctctccaattccttggcttgacgttgaggttggtacaactctgatctggcctcacactgctctgactacaaccccccaagagaatgcctagcaggagtcctgggccacccccacttacttggttttcttgggagccttctgaatagggcccttatcagcctggggatctctggtttcaaaaatggattcgccccttctaacaggaagtcaggcctcttgcgccactgggcagtgctgaactctggagccccggggcatgtgagcggggacaggggggtctgtgagagactgatgcaggcctgccatccccaggggaactaaataaagctattgttgggaagggaagagagaaaatagccgacaagatgtttttttgtccttcatgacctgtctgtgtttgggggaggggctggcatgt

SEQ ID NO: 58716 - DNA, 961 bp, Bovine  19866881064612
  misc_feature (1)..(1): n is a, c, g, or t
ngcattcattaaattcaattttacatttcaaacgtggcttaggaaaagatacataagacccaagaaataagacaatcaatataaagggaaataaaaacacacacacaaaaatctgaagacaggatgtgtatctaagaatgcacatcatagtgggcttcccaggtgacgctcatggtaaggaacccacctgccaatgcaggaggcataagagacaagggttcgatccctgggtcaggaagatcccttggagagggcatggaaacccactctagtattcttgcctgtagaatcccagggacataggagtctggcaggctacagtgcataggattgcaaagagtccaacatgactgaagcgacttagaacaatataagctagatatttgaatcagagccaccaaacagccaaagcaaaaaaggaaagcagatcgatgacaagcatccctacttccctcactgtgtcgtttgttctggtacaggagaacctccatctctggaaactggaaggccaacacaggctctgccatgctggagcaggtggccatgacagagaggtaagaggtaacggaggcgcttcgggaagggtaccgaccacagggggaggtagacagggatacagcaaggatcctgtcatgaatgctgtctcgcactttggccagcgtctcaccacccacagagcactttcctaggcatgatccgctttattgcccataatagccttcagggaatgttttacaataaccccattttacagatgggaaagatggttcagagggggatcatggcttgtccaagtcacagaactgatcaatggcagagataagactaaaaccttgacatcttgacttcgtccaggggtctttgtggccctgccagttgctgcaggaagagagcaggaagtcctcaccagtctcttctgctcttgacagctgtatggaagcatcccgttagggtaccacag

SEQ ID NO: 58717 - DNA, 2132 bp, Bovine  19866881126667
  misc_feature (1)..(1): n is a, c, g, or t
nccccctgcttaagatagggcatgagacttaagttgacatgacacaagtccttctgtaaatcaagtatacttcaataaaaacaaattttaaatgaataaataaaagcaaccagagaaattaaagacaccttaagtaagaggaacaaagataagaatgacagcaggcttctcacagaaaccaataaggccagaagaaaaatggaataaagtatttataaagtgcagaaacagaggagagtcacaatgaggattctgtactctggaaagtatctttatgcatgttgatgtatggcaaaaccaatacaatattgtaaagtgtaaaaaaaagaaagaaagaaaaaaaaattaaggcagcaggaagacttgtaaacatcaacaaaagctgagataattcaggaccagcagatcttcacaaaaataaatgttaaggggaattctggcagaaggaggaggctgaggggcagaaagcagagatgaaggggaagggaggggacaactgaggggccgatggaggatctgaggggagagtagaaaaggaattccttcacagcaaactgatgttcacgtcattgactatacagcctgatggtgctgaggccctctttgacgtctgaccagcgtcattcccatcagcactgtgtgctctgctcatgccctttcttcaatagagtcctgcatcttttcccggacctgttccctcttctgctctttgttcccaaatcacttatctcaactccagtggcccttcctcttcctccttggttcttgtcagtctccagagggctggacacctggcctctctgactcaattttgtaagagactaacgtcatcctgttgcctcctatgtcatcccgcccacatctgaatgtcactctccttttcaggtgatctttttctgtgatccctggtttttttttctgctctcccttcagcatcttttgaatttgcaacatgagcatatattactataataataaaaatgataatattgataaaaactcatgatgggtaacagatgaaagaatgaatgagtaaggattcccagtcccagaccctcttcaatgatgcaagctcagaatctgtgaatggatgcagatacgttcattcgccaccccaggagctgtgggcacttgccaaacaactgatcagggactcatgttagtgtaagtcaggaaaaacccaggccatgtgggtaatacttgagtcacctcattcacccctaaacctcaacttggaaccactagtgattctgagaagcatgggactcagcattccttttcccaaacacccctgctcagaagctcagaatcctaacctccttcccagtcagccatgctgtcaagccatccgactgctcaggccactgggacaaaagggaggtgaggggcattagcatcaaagtgaccagcattcacttttaggctctgcctcttatttgtaagtgtgcctccaggtgaggaaactttatcttcctgagccatggtatcctttcctgtgaactgaggctaagctagtacctgcctctggaggtttctattaaataggaagcccaaacacaataagaagtgagagtgcctagaatgaattaggagcatttccaatctcctttctctaccaatgagatccaagcactaatcaatcgtttggtctgttttctccctcctgataatctctagagataatgctttaagccctggactggtggaaaaggggcttggaggcactgtatctaattttcataaatgcccccagggtactttgcccgacagagcccctatctcctcatctgtaaaatgggcacaattgtatatatactgtaggtccagtataagaactaggagggaatatgcctgtgaaaacattctgtaaattgccagtgcctgcacacagatgagaaaccacagtgcttctcatctgtgtgcagagcatcagattacgtgttatcatcatataacatctaataatacaagaacagaacctctcattgatgatgtgaagtcagtggcaggcaatggcatgtccaggtcaggggatggttgggaggggtcaacataaaagatgaagggtatttattactgactcatttagaaatgctgatgggtgggggatcatagacaatggatttagtgag

SEQ ID NO: 58718 - DNA, 1522 bp, Bovine  19866881174912
  misc_feature (1)..(1): n is a, c, g, or t
nccaaggtgtaactgacaggtaggcagttgaaaaagagatgaggtggtaagggaattaacatcttttggagtatttgttttttgctggacatgtgcctttatggatgtatttttcattttgtcctcatagtaaattcaggcgggttttaaaatcgggggtgggggatggggactggtgtgatatagcagggaaatggcatttacagcagtgtcttttagggtaggctacctagatctagatctttgctttgaaggccttgagacttatttttgtcagttcccaggggagatcagactctgagagacttaacttatatgaactgaagttgatgaggaaagggagacctcagaatatgtatttttaatggtctgtgaacaattaatgtcataccaggccagtgttgctcaaccattttttcattatcaatcccctaaggaggctttgtacacaatcccccaccccaactcccaaatcattctccctgatgaaattttaatttcatagatatactatatgtttgtatactatggcccttttgaggtcacaaaccaatgtaatagctaggatttttgcttggttggaggcggtattgtttcttttgagaatgcatgaactagactgatgaatctgtacggatggtcttaccattaagaccagaaaaacttgagattccttggctacaatactgtgtattcatctctgtactctggaggtccttattgtggggagtagaaatgctctacattacagcagtagacacttctacgcccattttctagttcaggaaacaggtctagaggaggttaaattacttcaaggacacagagttaataaaagtagaatttaggattggagtagatttggctcctgagcctattttttaagaacagtgtttaatgtcgctcagatgatttgatttatgttaagtaaggaataaggaagtgaaaaaggaggaagaaaagtaataccgttagatcacaagtttatgtgaatgcatgttaagtcacttcagttgcgtccgactctttgtgaccctttggactgtagcccaccgggctcctttgtccatggcatttttcaggcaagaatactggagtgggttgccattttcctcctccaggggatcttcctgacccaggtattgaacccacgtctcctgtgtctcctgcattgcaggaggattctttatcgcctgagccatcagggaagccaccagtttacggattatattaatttagtattttcagtaggtactttgtatgttgggtaggagtatgctgctcatttgacaagtcatttaaataatttttactgtggcttatagtatctagtatatactctgtactattatttatccttttatttataaattcctaatcactttttagtaggtccattaaagaaagattttgtttgaagagaattcagccttcagagttacacagtgtctacttcctcgtctactggagactttagttcatttctctttatgtaggaattatttggaaaactaacttacca

SEQ ID NO: 58719 - DNA, 876 bp, Bovine  19866881198777
  misc_feature (1)..(1): n is a, c, g, or t
ncagctcactctctccttccttcatatgccacgtcacagaaaggcttccctgatcactcccctgccctcctcacgatctgttcctcttatcctgtttctgccttcagaatccttctcctcacctgacatactgcagtgtaatttatttattcttttatctctgccgcctcctacaagatgtattgcttatcgtgatttgctatacaaatttttggaaaaccactgctctagactatagatcagcaaactttttctgtgaagagtacggtggtaaatattttaggatttgcaggccatgaaaatgattgaactctgatgttgtagtgtagaagcagccatagacgatatgtacacaaacaggcagggctgtgttacaaaatctttattaacaaaaccaggtccaggactaaatttgacctgtgggggggtaatctgccaagtcctgcattagagtgtagtctagtgagagcctgtgtctttcatgtgtaaatttcctgcattcaggagccatgtgtttttcatgtctcgatcttaaccaacagtccttcacctcagggtctagcccattctttgcatataacaaatgctcataaatttttgccaaaatattcaataaacatttactgagtccttaactcagaacagctaggcaccaactccattaacgttggttgaatgaacacaagagtcctggcctcaagttctcaaaagcctttgcccctcctccaatccttctgaagactgagatccagagtccaaaggatgtccgcgccctggcagcctgggtcacgtgctgccaggggtcggaaggggtggtggggaagtgatgggaacaacagaaggcttgatggactgtttagggaactgcctaattat

SEQ ID NO: 58720 - DNA, 913 bp, Bovine  19866881209940
  misc_feature (1)..(1): n is a, c, g, or t
nttttattaatgatttgataaactttattaaagggactgaatggaatgcttatctgcagacaggttaggggcctcttgtgcttttcatctttttgagagtagtgcactgtccttcattgtctgtttccctctatttcatgtcattgcccaggggactgaagccaaagctgtgtccatgccgcagaactggaggttgggaggcgtgtataagctgcagtacacgcaccctctctgcgagggtggctctgctgcgctcacctgtgtgcctttgggaaacctcatcgtcataaatggtaactagctggaggagtcacgcttgttagtttatgagtctttacgtgtttctctcccaacacttcacagccacttcagtgatgggctgtcgtgataggtaactagctggcagagtcaggcttgttagtttatggatcttttcatgtttctctccaaatgcttcacagccacttcagtgattggctgtcacagtacagctaggaatctttctcaaatttgtttgatccccagaccactaatcacacgggggccaaaaggttacagaatacagggctaatcatgctattatgtcacagcctaacttgcaaggtcacagctatcaaatagtgaatgtgaggttgtaatttttgcttcagtttcttataaaaacagctcaacaacacttcagcaatttattaacctttatgtactagtcttaagatacttaatatagagaatagctgctaaatgtgttagtttctgatgttttgttcctttactaattcttgataaatcagttgcttgtggacttagtggcagacagccattccagaagcattccaggcctagttctttgaaaagggagcagtgtgtccttaaatctttcctttacccaagacatcctgctcagtgcacatgt

SEQ ID NO: 58721 - DNA, 2710 bp, Bovine  19866881232411
  misc_feature (1)..(1): n is a, c, g, or t
nacccctcacatgggcccccttactttgccttctgggacactggatggatgagatggtccactgagggaatacaacattagtggaagggacagctaaagataaacctggggaacatctacctttaaggggtcagcaaagaaataaataacagtaggaaaatgaaagaggtcggcaagtttggaggagaaccaggagaaagcaacctcatttatccccctctggaagaacaccagaattgtcagacatcctatttcttgctcttctgttctctggagtcctctacaccagacaactaatttctttagaatgttaagtacttcacaagttgctgtaaacagccccaaggtgcacatccaacacctatcatgcagattaaactattaatactgaggaaggagcagcagaagagataatcaagcttaatgtgattttttttttttttttccccaagaaaagcataagtcagtaaggaatgctctatctaaatagcctctttgggcacctctatccaagagaattagctcattttttctggatcttagcactaggcactccagtacctcctacaaggacatcttttgttatcccaattatttctaatatgactctagctaactgaagaattaagagtttaggtcaagtaagaggaaggtgagtgcacttattctgatggtcattttcttcatctaaaatagcgagtatgatactatgctctcttggggttactgtaaaaattaaatgacatgatgtctgtcaagtgcttcagatagtcctggcatagtgacaaacttaattatatggtagctattattagatagctggatttatgaaacccttggaatgtatttttcattcttctattcctagcacttaacatttatcttcataaagctttgattgaagtgagaccatacacaaataagttaaatatatagcacgtatagaagatcaaagcatcccactcaaaaaaatgtcactttgacatacatattatttggtgctggaggcaaataagaatcaatagctgcaaaaagactccttccaggagcttgccttatctggctaaaagcagagacttctgagaaatgaggaccaccataaatcccctctcccgggaaaggttcatatgaggaagacaggaagccagcaatgagatgcatctgcacaaagaaaacctcctccattagttccccccagtacttctcttcaccagttgtgctgcccttggaaacctaaacctttttctttgctttatcacttctctgcacatttattgttctttgctaagatgctttttaagcccaaattctagccactcctttgagttactcatcagtggatttctcccacatgcatgcatgctgcatgtgttaatacaatgtttctttttctcttgttaatctgtctcttctcagtttcatctgcaaggtctcagcattggcctcctagagaacctaggcctgtacagaaaaaggcttttttcccttccctgtgtgtgttgaatgagaataaatagtatggagaaaaataagaagcatggagcaggagggaggtgatttaaaataaggttggcaatgggtgtttcactgaatagttactgataactatttttctgttactgatagtgaaggcatgctgatggctatagaagttgcctaacgtttaggcttggttattgtctttagaaagcttgcattggtgatgaatacagttgagtaaacagaagatactacacctatcacagtacaagcgtgcacaggctgttgaagaagtacctgggcacatcaggcaggcagcaagatcagccagaccacatgatgcctttggtgctacgattccttgtcttctctaatgctctaaccaaagcagagaagagacacaaagccctctcctgagttccctgacatggctgttttaagacaagactctcttgtcttgtatcatggggaaataaacacaggggaacaataagtttagaatctgtgctgtccaataaaataaccactagtcaaatgtagctatttaaatctaaatagatcaaaattaagtaaaataaaaattctcttcttcaatcatactaaccacatgtgcttaatgaccacaagtgggtactctattgaacagtgcagatataaaacatttctatcattccagaaagctttattggactatgctggcctagataatatgactcaggctacccaaattccaattgtgcatatgaatcacttggggatcttgttacaagcagattctgattcattagttctggaagtggtgactcagattctgtattcctaacgagctccctggtggtgtcaaggctgttggttcatgaaccactgttcaataacaaggactcagagctcagggtatgttctccagtgcttgtagaaaatagatggtgcccagggagcttctacataaccccttccacacccatcctgagtcttacttctttcttcaaggaagaagacatatatcaatcccatgtcccttactgaaggttcatagtttatggacaagcccatgggctagagactcagaatgcctatgttaaattatagtatataagatactgtaataactgtgtaaacttgaacaagtcacttaacctctctgtgcctcattttctatcatcaaaacaggaaataaagcaatatcttacctttgaaattttgtgttttataaatgctagctatgtgtatg

SEQ ID NO: 58722 - DNA, 966 bp, Bovine  19866881263685
  misc_feature (1)..(1): n is a, c, g, or t
natgtttctgggcagctctggtgttgcgcaatgccgccaaggggaggggggggaaagaaaaagaaaaaaaaggaaaagaaaggcaggaaagaaaagagctttggtattctcagcctccacagacaattcctccattgatgtgtagtgagtcacggcgggccgccaggccatcgtggtttctgaatcacttcctccaagagaggctctccacttgttcctgggctggcttcagccagggctggaatgcgaggaggttgagcccttcagaatgcctctgactgctttcttcttttctggagctccaaccacagaggtggaaaggcctggctggaaggagatgggaagcaggttgaacctgcttattccaaggagtggaccctgcccccagccacataattgaaactcatgccccctacctggtcagagcctggaagtccagtgaaaacccagattaagggccatagtattctccagtgggcgccagactcagatctgaattttccatctcctccacctttattctctggctgatttggacaaggctgacaccttttgggcagagttagatgtaaagtggatcctggtcattcctccagtgagtaacatcagggtatcttggactgcatctctcggtctcccatcttgcaatttccatctttgaagacaaggatattaatggcctgagacaccctctccaggatgatggtactcaagtgagactgttttaagttcttgcttagaataaacttcattcattcaagaaagagctttaaccctccctctgggtcacattttgtgtaggcgccaggcattgtaagaggaaagggatgtggtcctagccatatgaaagaaaaatgggaaagcatgtgatgcaaattcagtgtggcaatgtgctcaggtggagggacccaaagatcctacacatacttggggtcagggtaacttagggagggcatccaggaaggt

SEQ ID NO: 58723 - DNA, 1689 bp, Bovine  19866881372181
  misc_feature (1)..(1): n is a, c, g, or t
ncctgtaatgccccttgtctctgtgaggatgactttctgcctgggcatctgtccacacaatctttcttcctgcacaactcactcagctgaaatgccacctcctcctggaagctttctgtccatcccaggccacaccagtccctcttgtcttctgctcagcttcttttcttcccacatagatttcctaataatcagtttcttggtgctcactggcctgtgttattaaacagtgggggctgcacctggggctctagaaccaagtacagtgcctagaatgtggcaggggtcccccaagaatgtttgttgaatgaaggaatggatgacactacaggagggaatcaaaggtaatacaataaagggagacagggatgatatcgtgtttaggctgttggagtggggggtccagagtcccaactcctaagggtcacccagacaagaagaggggtgcagggaaaagtgtgatctgagaagccagaatgagactctgaagattcatagctgaagaggtgagtcacagggtcctgatacaggagacactggttaacacgtctctggagagggtcagcacccaaactccacccacagatgacaaacccagggcctggcatcctaacggaggtcagtggtacccacccctcctcctttgtcccccttctccctcctcttccttctcttcctttatcatgagtgattggaattaattcattgactcatgctattcattcagatgtatttgagggactacatgcctcaggtcctgtgctgtgccttagggtctgcagtcagcaggtagaggaagcccctatgtcacagaagcttacttctatcttgtgagatgagaagccaggtggtcctagtcagagagccatgggggcgtgcagcagacacacccggccaagcgaggcatactttccatgcttggggtgctgacagtcccgtcctgaccatgctttgcagagcaagagcctcagcgattctaatcatgcttggtgaacactttgaggtagttgactcactggcctcctagaaagccagatcacactagcaccatctccctttgaagatggtcctcactccccaagtgagtcagccctgaatccagccctggtggtgctatggatatgtctggggaaggcatcctgcctgagctgggatctaagaaatcaccacaagtcagccaagagaaagaaaggaaaaggtcttcaggtagagatggaaccagaggcaaaggcctggaggcaagagagcctagcccatcagagtgacaggaagcagagttgagacaaggggcaggggacagtgaaatccaagaggtaggcagggatgcttggcttgtggggaaggggagccttgttccaatacatggcaatgtcatttctcagatgggatttcactctttcagggcagtgatgaagacttatcactttgtcctgccagcagacctcatgataacatggggctaaatgagtaggtgccagagcctcaagaaagacctagaaagaccaagccttgcttgccccactaagcatcagactcaccagtgagcccatttcagttcacatcctatctgtgatcttcaaagttaagatttaatgaatctgtctgcctcacaccctcctctccagcccatcaacctcttccgggagttttccagggtgttttatcaggctcagctccagtgtgtcccag

SEQ ID NO: 58724 - DNA, 1176 bp, Bovine  19866881413129
  misc_feature (1)..(1): n is a, c, g, or t
ncccctggcatcaggagttggctcattttggagatgacaaggtcggccatcagctgcttgtcctcttccaacgtgctctccaatcagaggcattgagctgtccatcacctgtgggcgagaaaggagtcctgaaggaggggagcttggcagctgagcagcgcatcccaggagggtgggctcagacctcaggacagaagtgaacactagatggcagtgttctccatgcaaatctccagcccagcgcctcggctggaaatgacccccgtggagacagccgatttcccgcagttcagtctaaatcaactccctggactcagttcaattcagtctgcatttgctgggccttagacatgcgaccaagggcggggagcctttgctgaccttttctgctcatttctttggggagccggtctctgccccctcctttcccacctcggcccctacccaggattggggccagcttcctgaactttggcccaaggtcaaggttttccacaaagccggaagcagtgaaggaaggggctcaattatgatcaaaaaatgacacgggttgcagtcaactcaagattcggagagaagagggaagaggcgaggcctgttctctggaactctagcagaataaactgcagagaaatttcagccttccacagggagaaggctgcttctcaaaggaggcacacttgtaattggaggggccctcagagatcaggggcttcccaggtggtgctggtggtgaagaacctggctgccaatgcaggggatgtaagaggtgcgagttcgatccctgggtggggaagatcccctggaggagggcatggcaacccactccagtattcttgcctggagaatcccatggacagaagagccttgtgggttacagtccatggggtcgcaaagagtcagacacggcagaagtgacttggcatgcatgcatgctgagtgatcatatttgtgcatccactcttttggcagatggagaaaccaaggcccagagatgggaagggcttgcccaaaggcatgtaggccagtgatccaggtggttccctaggcatggacagaggtagaaggtcttgggtgggttggtggaaggggtggggccttggtgggctctctgtctcctccccagctataggaacccagcctgttcccccagctcaccgccatctaattctccat

SEQ ID NO: 58725 - DNA, 1137 bp, Bovine  19866881438157
  misc_feature (1)..(1): n is a, c, g, or t
nctcccttccatcccattgcttcagtggaaaacatctagaacctattcttgatgcccagcaactaagccacctagaaataaaaatagctgaagctgtgggaattccctggtggcccagtggctaagactccccactcaatgcaaggggcctgggttcgatccctggttaggaaaagtgtattagtcactcagtcgtgtctgactctttgcaactccatagacggtaggctgccaggctcctctatccatggaattctccaggcacaaatattggaatgggttgccattcccttctccagggatcttcctgacctagggatcgaacctgggtctcctgcattggcaggcaggttctttaccactgagccaccagggaagcccagattaggaaactagaccccataggctgcagctaagagtacacatgctgcatctaaagatcctgcctgccacagcaaggtttggagatcccacatgctgtactgagacctgctgcagccaaataaataaatgaggaaaaaactagctgaagcccaaatgggaaagctttaatgggtcccaaatcgtttccttccatctgtttgcctgccaccctccctgcatctccatcatagggctgttatctttagctctcagaaaagctcaagtttgcaatggaccatcaaggtcatctcatctgaccacactttggatattggggtctgtttgctcatttcccttcaaactgccctcccacctgcgctctagtgcttccagtgatcagcactcatcacaccctgttctgtcctctctggctcccctgttatgtccaaactcttaagaccctctcacatgcaagaaccctcacgtcatctccagctgcacctctacccacaggccttctgcagccacactccaggtctcacctgtttgtaggtggtgttgctccattattttgcatatgctgttcccaccctcttcccttctctgactgacagtttcctacccattctctaagactctgagcaaaacccacctctgccaggagcattgacagctccccagagggtttcaaggtttcagtgtcccattctccaaacttctccagcatttctcattttgcaccactgtcatctgtttatgcgtctgcctccctca

SEQ ID NO: 58726 - DNA, 1334 bp, Bovine  19866881516082
  misc_feature (1)..(1): n is a, c, g, or t
ntccttttcttttcgccatagtatgtcttataagccgggatgtagtttattcttctaaacacttcactggggtgtagggcctggagttgccatagaaacaccttttaactcctcatcatccagaaggcagcaccaattcccagggctttgggggagggggggggggaaggcaaagaagagacacttgtggatgaggaggaaggaaatggaaggctgtggggggattccttagagaggggctttgcccagcaatgtggcacccagccatgaaaagagccaggaaggttctggaagaggaagctagtgggctggagtgagcatcttttaaggactacagtattgactggtagagtcataggggtcaaggggaatgggagcgtctacacatttccttcagggagagaacaggcaggctgggaaccagaagaggagctgtgagctaggagtactgggagccacctactggacgctggcagggcgctgtaaggcagtggaggtcaacaagccagcagctcgcatctacacctcccagaaaaagcattatctcatccctgccactagtgcagtgcaccaaccaaggcagcacagctttggatcagggccagcagtgccgaggtctttttgtttctttttcatttttgctaccacaatgttcttgcctttcggtatttcctggtaacttcgcttttctctaggcagtcaattgaggagggggtcatgggaagatttcttactaaaatccagcaaaattacaagaaactttctgtatcagtcccagacacatagcaggaaacctaagcagtggtcaggcagggccaccatgggaagtggtctccttgttcctgtttccactgtcccctggcgaacttccagggtagaaacctaaaagccaagagcaagggaaggcatgaggtctccctctccacacacatcagaaatccaggtgaacgtgcccgaaccactgtcaggcagaggacgacgccctgactccacctgacgcctggacccaagtacgtgctcttcactgagaggaccagagccgccaccaccggcagcagctgccagcatcacttaggtgggaatgacacccacagggtgagggggaacaggccaagcagaatttgggtgggggcagtcaagggagacgaaaaccttgcagggctctggcagccccgaagaatccttcccagcaatccacaaacccagaggccagtcaggttcccccaggagaaggaacggggcatagcaaggaccccaggaaacccctaatggggtgaccctaggtcacacaaaatactcttgcctgccagccagactacccagtcaccacagcc

SEQ ID NO: 58727 - DNA, 1207 bp, Bovine  19866881521388
  misc_feature (1)..(1): n is a, c, g, or t
nctgctggacaagccgcctttggtcttcctggaattccaacacctgagcactggtagcaatcattttgcttctaaccaatgatgggactcccagggttgaggtgacaatctgttagcctcagctcatccctgtctgtggtctcacctccccccttcaccaccagatcagggaggttttcatcaggtctgcagtaagagcaagcaaaacacaatcaggcaattaatctgtcagccttaatttagctcagctgacttttcgcttaatgctcataaatgtggtgccttcgattctgggttccatagtaacctccttctcccaaagcaatgactcatctctgtagaggttgcccttcggtgcaagagaagaaatccagtgctctgggaatgcgatgggtgtccagagttgcatgaaacatgctgtttatagcatctccagtgtcaacctagttcccagacaccagccatcgcctcgtccccaaatcacccctgcctaagctgccatatctgagacaactggacaacagacgcaagtgtccaccttgtggtcactgcctgacatcacagcctcctgaccccagctctccccagtgaagccctgagttgggcatgctttcagaaagagagtctgcaggagacagcattctgttaggtgttgtgtgaggtctcgaagctgaacacctaggcttgggggcaggtgacaaagaaacaaacccacaagacgtacttcctcctgagttccccgccagagcaggccctgaagagttctccagcccattcagactctgacaaacccggaggcctcctgagacatcagagttttctctcaaccccgtagtctctgtttcgatcacatttttgttacttacctgagacaagattctggaatacgggaaggtggccttagagtcagagagacctgtgttgacgacaggatctgctccgtaaggtgtggtgacaattaagtgagataatgtgtacaaagcactatgagtttggttccttgtgtgtgtgaaggtcttagacttgtgatgataatcacactgttgatgacagtgaaaccagtgtgatgagattatcactgtgtctgtgggtgttcacacgtgtgcgtgcacacgcacacttatctgttatgtagatgtatatttcatacagtctcgtgtgcctagatatgctatcagccttctgcccatcctggtcatttccacca

SEQ ID NO: 58728 - DNA, 801 bp, Bovine  19866881596527
  misc_feature (1)..(1): n is a, c, g, or t
ntttcttgagaactcctgttgtgcctcctgattacctcctaactgtctaagtgctccccaagctgcacagcacttcactctattttgatctctctgccctgtggcatccactattctttgttgtagtataagagggtccatctcttgacttggagtctctcttgtttgttagaattccttagatctccaggcacacgaaaccctgtggtttccttgatgtggaacctcttttcatccttccaccctgcaagtggaattaagctccttccttcaatcatctctacacgccctgcacagccttccatcagatcctcagcatgtgttatacttatttatctaagcaattgtctcagttttttgagagcaaggactgggtcctattcatcctcttattgtcagcatggagtaggcaccgatcaatacaaacaaaggggaaaaacagacttgaggagggtcaggaacttcaatcatgggatcctgggtgaatttccaggaagactgagttaattcaacagcctcttcaccagtttcttcctggaaatgttctccttgcttctctccaggcagacagtctttcttctggagagaaggtgaaagtcctgtaaaaggtaccgtcctgtttttctcctgttcagccatgaatatgacatcatcttctcagttggcatgtccagaccatttctgatacttttcttattccaaacagaaggagaaaagcccctttcccttgatctcagcattttttgcaaacctcagtttattccagccagtgacacttttcatccttggagatgagccctc

SEQ ID NO: 58729 - DNA, 1697 bp, Bovine  19866881624396
  misc_feature (1)..(1): n is a, c, g, or t
natatgtaatattacaatattacttggacatttgaaaatgatcagagaagctattcattgtcatcagattgctgcaggggattatttttattgtgtagtggcaccctttcttcacgtgaaattatttgcaaaagcctgatttatggaatgaacacaagcagagccagttttgttgaactggatgtgaggtgaatggacccccgccagctcagcccctacccccctctctgcagctgctcctcaggctctgtgccgaaacttctgggctccaaaacagtgctttttggccaccattgggttgttagggactcctgtttctggcttcttctggagtggagcttgggttctttttccttgggttttaaatccttggagcctaacctgtaagtagacgacgtcttccaacaacaaagtacagtgctttgagtgctgctcaggtacttgttctgcaaagaaagcctcgtcatttgtagaatattttgcttttgagacttaaagtacacaaaattcaagttttattttgcctacaacaagaaaaaggtcaaacaaatatctcagcatacaaacaaccatagaaacatgctacagtgacagatcagtctgaatcacaaagcaggagtaaaactctgctagtgtctgcagaaaacaggaatattgccagcgtcatcctgcttttttaaaaatcggttttgcatataaggaaatggcttggaatgctgtgtgatgcaagaatgttagagtcctacatacatgtgaatttttgtctttttgggctacacatgtgtattcttttttttccccatcacagtgaagaaagttcagccaataatattttccagaggccatgtcacctttagtggcttaatgtacaggtaaaggattagggctgttgacactttcttttccctgtggaattttgtaatatctgagctatagattagcttttaacaaagtgtccaccagaggccatatggctttaattgggtctaggttgaaagagtcaccctgaaacttcgatgagtccaaaactggttctccagcacccctcttcatggccttataatgttgggatgcgccgtgtgtggtgtgtgtgtgcattgtttgggtgccctgtggtgtgtgtgtgtgtatgtgtgtgtagtggggatggaaggacatagtcataaccagaagcaccatgtactataaaacagtttccaaaatgcggtcctttttgagtggtctcggagaggttcgtgagccatgctggtgtcccaaggaaacagatgctacttcccaaacttatctcagacttactggcccatgggacagatcccgctcagcttaggataccagcagtgtgtcacacacctaaacttgcagtcctctcataatagtttattctgagttcttaaaaccaccatcaaagcttttcctcttaactagctcatagttagaagcttataaaatccacattcttctccttagactgagactgttaagctgtatgttgctggtgaacgatggggatgaagtcatggtgtgggtgtggcctgtttgctgcatgactttctgacgtcactgatgcgatggatgagcgccgtggtaggtgaacctccaccttgctggcttgtagccttaaggactttcctggcccctcattttcccctttagttatttttattaacagaagcttgccaaccaccacctctgcccca

SEQ ID NO: 58730 - DNA, 1433 bp, Bovine  19866881685668
  misc_feature (1)..(1): n is a, c, g, or t
ncatcaaatatacatgatgttcctcaccaagcacttggaaaagctagtgaatcgaattgtgttaaaaagcatgaagcggctcatgactgtgagatggggaggtaagcagaggaggatgtggacttttgacttagacctcactggactctgatctggactctgccatctgctagcattgtgacctggagcaaatcccttgccttctctggggtaattcagagcagatgagatgggatgagcaaaggcacaccagctgttgcagaagcatcagtgccttcagcatctcctctaaccgtcagagacactctgacagctcttcctgattgcagctttgcagaggttccaagagctgttttgcttaaactcacaggtaagtgacagaagcagaattcgaactaaggttgtcaggtccctcagcccgcttcttcctgctgcctgggacccgcaggaacgccctggtggaatcatcgcttcctgttttaaggccaccagccaacttaataagagagttgatttataaagaatttcacagggttccacccaagaaacatgtgagtaccttggaggccagcactgacctttgcctatgaaccactcttgtctgctgaactgacttcatcccaggcctaaagccaagaataagcacactcatgcaagagaatgagaagaagagaaagaagactatcagcccctggcacagtgctttacaatcagggtacaccccagccacctaaaaggccccattttgtcaagagggacagagacatagaaacagtctcctctggaaagatatgctacctgctcagtgtgcactgaccgcaccactcctccatggaaaacagaatatttctgagctgacaaacactgaaaaacagtaggatttcctctttcttttttctgctttcctggcagtgtctgttgacccatcttggctttgtattcaagaaaggtcagagaagtcatgccttaagaggctcccagaaggaggagggggcgcacgctgcctgttagagtgagacactgtaatttcccacaatctgatgagcagctccgtacttctaccccagcttgacagtcaatttgcaaagtatttccacactgggagcctgcttaggctcaagccatcttttgatgagagtattgttatcatgacacccatttaacagatgagaccagcagaaatcaaggaggcaaaatgattgggtgtatggtcacacactgcattctgtgaatgctgttcattcttttctctggtcccggaacccgtgccagaggagggaagcctccagagagctcgccagcccatccagaacacagcctgtgtgtccactgaggtcttcctcagccaaaatgtgcaggcgcagcccattgttgctattagtgggctagagaagtgaggcctaaacaagcaggtgcccccatgctcactgcgg

SEQ ID NO: 58731 - DNA, 777 bp, Bovine  19866881758316
  misc_feature (1)..(1): n is a, c, g, or t
naatccagttatgtccgatatcccagcttaaacttgccggtacttcccctaggcagacagcactactgggcctatattgtgccttggaacatgatcctaaatattcttaagaaaaaagaggtctacaatcaaatgagaatggaaaatgctacatgtcacagccacctaacctcaccctccatatccacaaaatacattccagcattataaagctctgagaagtccaggaattacagaaagcatgcccaacatttaaccaagaaacactatcctccttcctcaacactcagcagtccccagtaacacttacttttaatctcatgagacaagttttccatagaggacatgctgagaaatgcaggtctacaaaataaagtccaaactcctaaaccccttagcgtacaaggcccttcatcacctgacccctgactctgtatcaagttcacgttctgcagtccctccctctccattcccccacctcttcaagtattacaatagactatctttctaccttgcaaaggccttgattattgcacttcacccacccagtactgcaattttctgatttcatgtctatattctaccatgacaaaaagcttagaaaggaatagacatgtcacccgctgttgtacaacaggaatagtacctggcacacagtaggtacaataaatgcttgctgaacaaatgatgaaagataatatcttacaatttcatgtttttcagtgttttctaatttaccccaaataaaaataggcaagacagatgaggcaagacacc

SEQ ID NO: 58732 - DNA, 732 bp, Bovine  19866881761374
  misc_feature (1)..(1): n is a, c, g, or t
ntctataaatgcaattcagatggagtcaacgttgtttttgttttcaaatcagaccaaacccgtgtggatcagttggaacctgagtcaaaaccctatgtgttctaaaattaatggaccagaacaaaattggaaaataaaaacatcttttcaatgaaaactctatttcactgggtttgttgggccaggaatcttttatatcttttaaaaaaatgggaaaaaatccaaatatggaaacactaattactcattgcaaaatactcagaaaaactgaaatagtttaaaaatgaatgtcatttgcaatctcatcctgggatatttccataaaattttttgatgtgctcttcctcaccattttacataactgtgattattcatgtaataataaatatttccttgtcttgttaagaatatctcatggcaaagttccatattgatatttagaaagctacatcattatttttaatggttgaaaactactcactggatacattcgggttcatttcactaattctctactggcagttatttaggttactttcattatttcagttttgcaaataatgcttcagggaacagctttgcacatgaatctttgcaccctgggctgattattttgcataaattacccaagtgtttctaagtcaaaaatgcacatatattttaacaactttttacacatatttccaggtttctcccctagaaaggtcataacaattttcactcccaccatca

SEQ ID NO: 58733 - DNA, 961 bp, Bovine  19866881943401
  misc_feature (1)..(1): n is a, c, g, or t
ntggtggattataaaactctttgtggtgaggtttccaagggtggagatggggacagaaatttccggggttctcagccagcgattctcagctaacacttgggtggaaaatgccaaggtgatcggagacggaaaacagaaacccagggcagctgaccacggcatgcggctcagaggctccttggtggcctggtccactcaggggtggctcagtctcatgcagttctactctggtcacctgtaatcttactccccaggacacactcctgtgatacccttctcatttatcttcccttccccccaaggccacctgcagccatgaaatcccaatccagttcagcaaaacacaaaccagatgcactgtcccacacccatgacctgacacctgtttaattggtgttcaggcaggtgggcaaaagaagagcgaaataagggaacacacatcgaggggctcattaagggcacatagggttccaggtagatttggtgatgccagggacagaacacagaagtttgctcagccttgacgagagaggaagctctttgttctgtctccctctgccatgttttgcttttctgctcccattatcctattgcagaatggggccaccagtacctgctcaacctttgtcgaagctggtgtgtgtgtgtgtgtgtgtgtgtgttagtcactcagtcgtgtccgactctttgcaaccacatggactgtagccatccaggcttctctgtctgtggaatactctaggcaagtatactggtgtgggtagccattcccttctccagggaatcttcccaacccagggactgaacccaggtctcccacattgcaggaagattctttaccatctgagtcaccagggaagctcatcatagctgctactgaggattgaaggaattgatatggatagtatcaccattgtaatctgcagtgtgcgcagctgatagccacattcttcctatttat

SEQ ID NO: 58734 - DNA, 810 bp, Bovine  19866882018473
  misc_feature (1)..(1): n is a, c, g, or t
nccgctggatgtgctgtagtttacatatttgttatcctgtggttgaacgttggaagactttccagtattctgctagtgtaaataatgctgtgataaatacatttgtccaagaggctttttctgtaactcggattgctttcttggggtagaattccagaaaatggaaattgtaggttaaaagggtgtgctctaattagatgttgccaaattccttgccaaaaagatgtcctactttgcactgtccccaggagcagggcaagaacgggctttattggtttgctcttaagaggctgaggtcgtttccactaatgtatttcttggcctgtttccacaggtgaaaaaaaagacagctgtagctgacttgtgtgggactcccttggctcttttggcccaagaccctaccactccctgtccctggcagcctgtattctgggcctcacctagacagcccgagtgggaacaagccatctcgtccatcacagccatgaatttcctccggcggcgcctctctgacagcagctttgtggccaacctgcctaacggctacatgacggacctgcagcgcccagacagctccaccagctcacctgcatcccccgccatgggagaaggagggcaccctcagcccctggcagcctccttctcctctccaggatccagcctttttagctccttctccagtgccatgaagcagacctcacaggccccctcggggctgatggagcctccgggtccctccacgcctgttgttcagaggcccaggatcctgctggtgatcgacgatgcccacacagactggtaagcagcaat

SEQ ID NO: 58735 - DNA, 1303 bp, Bovine  19866880518798
  misc_feature (1)..(1): n is a, c, g, or t
nattggcccaggccacaccctgtccaccaaccatgagtcctggctcatctctctctgtgcttacgtttactcccaagcacctcactgtagccccatctcattccttatcatgaatctccagtcctcaacaaagtaggctttcaaagcaggttggaagagggaaggaatgtcatgggggtgggggtgggggtgggaagcataaaagagaaaaagaacagcttctgggctgcaccttccccaatacctgacctctgcccagcctgtgcagagttctggggcttcaggaatggatcaagtcaggccccattcccagggagctcccaggctggagaggtgggccttgctgtccatcactccaaacgttagcacttagggctctggactgcagcccagaaggggtagcaggagccaagtttatcttctctctacccacaggatgggcccagacttgcaccctggagatagccaagcccctgccccatacaagagggctcttccctccagagacagaaagctgagcttctcagcagtggaagggaccaagcgaccacctcagccaacccctaccatcaactgcacagatggagaaagtgaatcccagagagagacagacgcagactggggagtagatacctggcacccgaatgtggggtctaagcaagctcgccatgtgtttcccagctgcctgatatgtggcccagaggacacggcccggcctgggaggaataactctcctgccccctctgcagtcactagctcccagacaacagcttgctttgtctggagccagtggagaagtgcccaaggtgggtggagactcgccagcgtggggtgtgtggagggaagaggaaaccccgaaggcaaggggacagaagggaaagggctttggcatccggctgatctggttctggccccccactctgctgcttgcttgctgggtgaccttggatgtgtcacttaccctctgtaagcatgtgtttcctcacatattaaaaaaaagggtgagagtgtgcattctcatcaggccagtgatgcagagctgcagtgtgaacctggttctttcccttgccctgcctcctaccctggggttggcccacatttgaacctaggactggagagaacaacagaaacaccaccaggaaactccctgcagagggagggtcaaacagcgtatgggagagaggttacttccaactgggaggatcagtcagggaggcttcctggaagaggtggcatttggaagagttagaaaacaaggcagatttcaccagaatgggattgtgggcaggtgccttcctttggg

SEQ ID NO: 58736 - DNA, 1201 bp, Bovine  19866880833023
  misc_feature (1)..(1): n is a, c, g, or t
ntgtgattctttccctgcttgttaggggagtgaagaaagaagacaagactctggctgtggggatccagttcatgctcatgagagttttgggtaaagaacgtgctggggaccactggtccagataccggctatgtgccaggcctggggggcacagggatgagtgggaaccagtccctgaccttaggcttcaccggtccacggggctccaaatctgacctaggtaccctggatgtgggtgcgcaagcagctaaagagcccatcagggaaatggcatccaatacgagggtgaggggtgggcttgaaggctgaggacttaatgggccaagaggctcccagtggctcagagccccagtggttcagtgccagggacggggcggggtgaggggtacagggatgccaaggttccactgtcccctgagcacctcctccttcagcctggatgcccagccccgtgatccacggcagtgccatcgacaccacctgtgtgtactgggcccatagctgcgggcgtcaggccgtctgccgctactatgaccatgacctccttcgaaaccggtaagacctggtagtcaattgccagggggctatagggaaactgctaaaaatattcttggggtcccatcagggaggggaggtctgctgacacccacctgcaaagtgacacgggctctctccagtgctaatccccaggcctgccagctagatattgtctcccctttggatggatgaagataatgagatttaagtaagtggcccaaagtcatacagctgataactagcaaaggtgggctgagtgaggggagactaagggaagtcaagcagtggtgagaaagacaggaagttggcatggagtaggaagatggctctatctaggacactggaggcctaggatccaggcccagctctgtctccctcattgtgagacctaccttttttgggactcagtcttcccatctgtataatggggagcccaaaggaacctgaaggcagagaggctactggccctgagtacaatggacagttaaggagagggacttactagcagatctggaagcagggagctgtttacttccagctctgaggagtgcatggttccaggagggcttcctagaggaggaaaactcaaagaagaggggtgaattagagaagcaggaatcctcttgtggcaggcgaggtatccagagttgcaactaacaggctc

SEQ ID NO: 58737 - DNA, 1611 bp, Bovine  19866880852028
  misc_feature (1)..(1): n is a, c, g, or t
naccatgggccttgggttgggaggaatgtgacacatcaccctagggagagacaatttcacagaaatcttgaggggtggggagagagtgttctctggacaacagccttctccaaggcggaaaacatctggtgggggaggggctgggcacagatgaactctggtctccaaatccacccagaggagcttgtccaggcctcgtggctgggctgtcagcccagaggcagaggcctgtggatccggcagcaactccacagtctagtatcatctgctcccttctctaccctaaggtccccaaagttttgcctttgatctcacttaaacctctctccctactgttaagttggcttcctctgattccttcctgggccagacaattgtcaggtgcctgaaaaggtgaagtaaccaaaaggagaatggtggggaggtgcgggtaatggggaccctgactagctctaaaatcctccgtgaaccccagcagagagccccgctcctcaagggtgggatcggaaggagctgtgatggggttgcacgtggcactaggggaagggtttacattagggccgtgagagagggggagtggaggtgagaatctccctcaattccccaccaccttcccccgcaccgtggctgtgctgccagggccagtacctcattgaaggcggccagcagccccgatgtctgactggagaggccgaagcgcttctccaccgtggagatggagctcttgaggtagccggagatcatgagctgtgccagctgcagcaggctgtggcacaggacgaagaactggtggaggggccgcaggtagagacagtcgtggcggaggatgcagagagacagagacagagaaagggaggaacagagtcagaggagacagacatacaggaggagcaggagcagagagaggaagggaaagagagtccagggcaagaggagagaaagtattattggggtagtgcatggattctcacaggcctgaaaaataggaaagctgtcctgggtaccccgggggtctgggggagacttgaaatctacaggactgagagtagagtctgcatggggccaaggatggtgggagcccctctgtccccctacgtctcccaggctggactagaacccctcctgtccccaggaagctccccagatctcacctcgccccaccccacccagtcctcacctgaacttccctgggagaccacctgcacacagcgaacccccaagctacactctcacctcactcagccccacgcaaacatcctgcctgcctgcagccctcctgaaaacctgatcgaattcccaagagaaaaacgtgtctcacagaattaaaaatagggtgtttatgctggagcttaaaaatagaatgtctgttctaagtttcggtttcctcatctgtgtaacaaggatgacacccctgcttccccaggttactgtgagagctaaataagactgtgtggaatggcccctggcacagggcctggcaccgtgtaggtgctggcacagatttggttgtttacggccgcccttggttgagccattgctcccagtattcacacaggttcaggataccctggggtccttctctttcgccctaaaaaaattggcgccaaaaag

SEQ ID NO: 58738 - DNA, 3149 bp, Bovine  19866881067680
  misc_feature (1)..(1): n is a, c, g, or t
ntgtgtcatggttaaggtcatggactttggaaatagtgtgaccttgggcaagttacttaacctctttgtgccttggtttcttcccctgaaaagcagagatgctagtagtacctacatcataaggctgatgtgagaatcatagaaactagtctgtgtagaccacttagaacagcgctggcacatagaacatagacacagtgtctgctctttgtttactgttattttttgattgttattattaaactggtggctagaatgattcttggggttctcagacctgcatgatggttaaaatcacaaggggtgcttatcaaaaatactcagccttttccaagatcaacttagaactgccaccggagggggtggaaaggtagccaaggaatctgtacctttaacaagttccctaggtgattttgagccccatctaggtataatcaggacaagatgaactcagatatgggcttccctggtggctcaggggtaaagaatctgcctgccaatgcaggaggcacaggagatgcaggcccaatccttggatcagaaagatcccctggagaaggaaatggcaaccaactccagtattcttgcccgggaaatcccatggccaggcgagactggcaggcaacaatccatgggattgaaaaagaattgggcacaacctaacgaccaaacaacaacaacagtcccagatgtgcctccctactggagtgcccacctctgccatcagacctcttgaccccaaggctgagttaggtacctccttcttcaactgccacagcacctgcaaacactttctaacagtatggatgcatgacaacatcaaccccatgagtggggctggctcccagatgctttgtcctgagagcctctggaaccgggcccagaggacacagtcagcactcagcaaatgcatctgtaaaagtgggggtggggttggcttttgtgcaatttcctcctccacttattattcccccatcttgtgttccaggctggtgggaattcacgcacagccatctcagatcttccgcttctcacatactggtctgggcttgcagtggatgtgacccacccaaccagtgaaatcccccagagagacagaaggaatagcgagacagcaccttggttcacagtccacaggaactccatgtctgcctgtgaaggtgtcagcaccaccaggatatcaacagagccagaaacatactcccttctccggaactggggtgtgtctggcaaactgagtcctgacttttaggactgtttcatcaagggagaatagaattgtaactagagtccaagctgggatcctgggcccagatttctagaaggaagggggttggggcagggccacccctagtgactcctgttcagagctgtccagacctatcctgactagaggcacccttgggcagaagctggataacaagaagcggaatctgcctgtccatcttcttgtgtgtgtcacctgaggcttctagggttgctggaaaatctccaagcgagggatgggacatctgagcagcaggatgcagaaggcagagctgggggcctggagctgcttggcgtgaccagcaggcagctgagacgccacagtgacctgttctagaaacaatccactctcactccccacagaacgccagagctctgagacccccaacactcccccgtcctgactgtcttcgaaccaagcttcagttccacaccttgacccaccctgaccaccacctggattagagactccttttccccaaatggtgccctcagcataggtggccaggctttgaggtggtcagaacttgaaaggtccttagaggtcaccccgaatttcccctctgagatggcccaagttactgagtcctgctccaaaattctctccatcatgccagtgtcctctctgagtcctgaagtctgtcccccataaagatgggagcacccaagagaccaagagaatacatggccctgtctgtcccatagtgtatctgagcagagggctgagggcctggggtgcggggagtcagggtggaactcggtgaagactcataacaacaggggcaacaattacaactctccatctgatggcaactgctggctaatctccacattctcactgcattctgattgcagctttgggagatggacagggcagagagtatctcaaagatggggaagctgaggctcagagaggttaagaggcatgtcccaggtcagtggggttgctgggtcctctggttcagtgtctcctatgataccagcagtcgatcaactgtgtctgtgtggccctggggacaactgtgtgctctgaagctcaccttctggcattcgatcaatgtccacgtaaaggcgcaacatgaggctgcccagcccataggccatgcccggccccatcatggtcactgcaaacaggatacctgcgacaggaagcctgggttagtgccctctggcccagcttcctttcacaggtcagggcctgctcagcctccactgggcaggagcagcccatctcccccgctcaggcctgggaagctctccagggctcctctgggcctctagtggccacagaaggcagagggcagggattcgtacttagcccgacctgagcctggccccccctcagagcccgaggtgtggggtacatcctcaccgaggtagaggggcgagttgctgttgtgggaaaagtcatcgatgtaggagatgccaaagggctgaatgggcaccccgcccacaccaactagggtctgggctgtgaacatgatccccaccacagccaggtgccgagcctctgtgtagctagagcagctgctgttggatgaggctgaagctagggccttggtgctgggcaggcacagggaagcctcaaagtcttgtggcatgtctgctgagagatgataaaagtattaggacaatagctaagactcatacagcacttactgatgggaggaactcttctgaatccctcctgacccccacaacaaacccaggggatgggtactctcattactcccattttgcagatgaaaaaactgatgctccgtgcaccaactaacaaggggtggagccaggattggaacccaggcagtccggttctgagtccgtgctcttaacccaccctatgccacatctctgagcagaggtatgggaagcgccaggcgacg

SEQ ID NO: 58739 - DNA, 1085 bp, Bovine  19866881090330
  misc_feature (1)..(1): n is a, c, g, or t
nttgcagcactcagccgttgttacttatcaaagagactctgtcctcactaggctatgcctgttttaagggtggggctcacatgctaagccccagggtccagcctgatgcctggtccccagcgaggcactcaatacctgtttgtcccctcactgtccctgaaaaggccatggtcatttctagagccaagtcctttgtccaggctgtttcccacctcgaatggccctccctctccttgccatgcttccacacaggcttcaaagtccagtggaatccccctctcctcagagaagtcttctagaccctcctgtaagctctccacctccttctagttctcagcactgctgaagcatgttcacaatctactaagcacgttcagcgacaagcagaagcagtagggtagtggttagagcaaggggcgtgggctcagataggctttgggttctggtcccagcagtacttaaccatgacacgcactgccataaggttgagaaagtcaaggcccaggaagggtcagggacgtgcccaaggtcacacaagacacaactggcagagccacagctgatacccagatctccttgggtgggtcacttccggctctggccctccatcccctcagctgtgcaaggggcaggggagacgcaccatgcaggaatgctggggaatgcgacagagctctatggagatggctttggaagctgtgacttgctgtgcccaggagaacggagttgaaggttatacaggaggacaagcgtgtgggggttggagcttgggttaggatgggacagggaggggcttaccttgctgacaggtgggtctgaaactgccaagccctttcgccggaagcgaagctcttgcttctccttgggcatctccttggggaagaagaagtaggggatggcggccagggccaccgcgccagccgagatgaggaagcccagccaccaggcacccacccatcgggggtccttcgaggtcaggttgatgccacctggaagagagggtgttagggtcgggatgggctgtatgtagcttcttggccaccattctcggatcagcctctgaagtaggacgtgacctgggccgg

SEQ ID NO: 58740 - DNA, 1208 bp, Bovine  19866881166013
  misc_feature (1)..(1): n is a, c, g, or t
nccaacccagggatcaaacccaggtctcccgtactgcaggtggattctttaccatctgagccaccggggaagcactaaacaagacagaagttctgattcggggttaggacacatgggtatatctactctgtgctgtgctcagtcatgtccaactctttggactgtagcccgccaggcaactctgtccatggaattttccaggcaagaatactggagtgggttgccattttctattttaagggatcttcttgacgtaggaaatcgaaccagggtctcccatgtctcctgcattggcaggcagattctttttcacagcgccacctgagagacccagacttcatttatttcccattcatgacactccagaagctcaaatccctgtccttgactgtcctactacccgtgttttaacatgggatccaacccacactctagaatgaaattgaacttctagccctgtccatgctgctcttatttctctcctctattggagcagtaagtagaacacatcctaggaggacccagaatctgtgtttttaacagggacccaaatgattcttattcaaccattctgcagaagggaacactgagattggtgattgagacaaggatgccctctgctctactttcatgggtcctctcatccctttgcaggtggggaacacagccctgatcgtgtttgtgagctatttcggcagccgggtacatcggccccgcctgatcgggtgtggagccatccttgtgaccctggcgggcatactcatgactgtcccgcacttcatctcagagccgtaccgctacgaccgcaccagccccggtaagaacaggaggggctgggctgagggtggacatgagttgccacattactgtacacagggtccactcccaggcttccagtggtcaagatgggtccagcttcccagaacacctatagtcccccaacaccccccccaccactgcctcctttagcttcagcccggatgagtccttctggcagccctgggcagtggtgacagggggggtagtcctggggcagaaagctgaggccctctgtgtttctcttggtgagggcctgcttgtatggtgctgctttttttttttttttttttttttgaggtggaggtggatttaggtcctggtctgtgtgggtcctcaagaaatatttgggaataataataacagtatcacacaccacttactaggtacca

SEQ ID NO: 58741 - DNA, 2654 bp, Bovine  19866880350389
  misc_feature (1)..(1): n is a, c, g, or t
nacttctttagcctgaacaccaattccgtaatgaggctgaaaccatggcatgattgatttacagaggctgatgttagctgcttagattggcacgttctagggaccctccatgaaatgattttcctactgactgctatcactttatggtaggtgaatagtaaagtccacaagaagccctctgacatacttctagctttcaattatccacagtaatgaggagcaggcaggctgccctaatagttctcagtgaagcatcaagttctgatggcctagaaataatagcagtctctgggtccatgcacccatggatcggttatgtcagtggtactctctgcagttttccagggtagtgggtgggagagtagcacccacctgctgaataacccatccatacccactggcctcctgatgtcaagattcaaaagaggactccaagaaccactgagagctcaagtatggaggcaacccagcacgtctgctctgcggagacactgacagccctggcactgaatcctgtccaaggacagccttcctccagcctctgcatagaattcttctcagcgtaaggcagaccaactgttgatgaatctctgatgagtggaggaacggctagcagtggggagaacctgctgtgaacggggactctgaaggtcagggatgcagtgggtaggccatcccaaagaaacaagtctgctggctgggtccctgtgggaagatgtggagaaagtgctttctcttcacttgctttcttattttgttgtgtctcaaagcactgtcatggcccaggacatggagctagcacacttatttaagaattccctttttttttttttttgataaactgttaagaaggttttgtgtgccagagtgggttggatgttgggacatatgtgtaaaaaccactcagtggattcagaaagacactgaagctgggagtgaataacatgacaagaggtagtcttagaagtcaaataaaaattgaggaaagctactatatcacacagggaactctgctcaatgttatgtggcagcccagatgggaggggagtttgtgggagaatgcatatgtgtatatatatgatcgagtcccttcactgtgctcctgaaactatcacaacattcttcatcggctatgccccagtacaaactaaaaagtttaaaataaaaaaataataaaaaaaaaaccaaaattgaggaaagaactttttcaagtgaaagtttgtgggaaacatcctgttaattaatgcaaatgaacaaattgatttggatcattgatgatgaaatagcaataccatctaagcttgcacaggcatgttttccattgatcgtctgatcctaaaatgacccttgttaagtgcgattgacaaggtaataggtcgggtgactctcccaggtaacacagctagagagagaggcctggagaggcggtctgtagggtgaaaagggcactggttaagagtcagaagatctgttttatgatttgaatgaactaattaattcagcaacagtaggcaagtaagggtttcccaggtggtgctagtggtaaagaatccatctgccaatgcagaagacataaaagatgcaggttcaatgcctggatccagaagatcccctggaggagggcatggcaactcactccagtattcttgcctggagaatcccatggacagaggagcctggggggctacagtctctggggtcgcaaagagtcagacacgactgaaacgacttagcacgcactcacacaagcatgtaaatcacttaattgcttaaaaatttcctcactcataaaacgaggaggcttgtgagattaattgccttcaaccctctctgcacttgatctttccttcccacaggagagttttaaaatctattaaatcccagatgttagaccaccccagctcgactgaatctgaattttgtgagctgagcccttaagtatcgtacctttgcttgctggtttgtttgcttccaagttgcccaggagaacctctgaattggatgatttctgaggtgacttccagctcttccatttgacattattctatttcccaagtcctctatgtagggccagatttttttgataatttttatttatttgggtgcactgggtctcagttgcagtgcacacaggatctttggttgaggcatgtgaaatctggttccctgaccagggatcaaacccaacccctggcactgggagtcttagccactagaccaccagggaagtcccagagccaggtattttaagtccggctactttttgttgtgttggttcctacaatgtgaagacttggtgagaaattcagtggacttgtttgctcacaagagcaaacaggggacaggaatgcttgaacactgatgcctgtctcatgctactgatatttccactaacatcccaaaggctcctgaaaatgtcagtctcatgtaaagtaagaactcacttgtgtaagaggaaaacagtaaatttgtgttgaaacataacatcagtttaaggaaaagtcaaaacagagcaaggaacaactgtcatttttttagttatatgaatgtactgaaacttttctggcaagaaggatgatctttaagaagaaatagaacttcaaatgtcacagctcattgaaggagggagtagaatcctcacatccctaggaata

SEQ ID NO: 58742 - DNA, 1734 bp, Bovine  19866880371353
  misc_feature (1)..(1): n is a, c, g, or t
nttatttcatggctgcagtcaccatctgcagtgatttgggagccccaaaaaataaagtctgacactgtttccactgtttccccatctatttgccatgaagtgatgggaccagatgccatgaccttagatttctgaatgttgagctttaagccaactttttcactctcctctttcagtttcatcaagaggctttttagttcctcttcactttctgccataagggtggtgtcatctgcatatctgagattattgatatttctcctggcagtcttgattccagcttgtgcttcttccagcccagcgtttctcatgatgtactctgcatataagttaaataagcagggtgacaataaacagccttgatgcactccttttcctatttggaaccagtctgttgttccatgtccagttctaactgttgcttcctgaccttcatataggcttctcaagaggcaggtcaggtggtctggtattcccatctctttcagccatattaagatacatatattgtctctgcataagtgggaaggagaaacagagatagcagttttccttggagtgtttaatatctcccccctcataaaacttgtaacaatttaaaaggagaataggaattccctggtagtccagctgttgaaaatgaaagttgaaagttagttgtacagtcatgtctgactctttgccatcccatggactgtagcccgcccggctcctctatccatggaattctccaggcgagagtactggagtgggttgcatctcctccaggtgatcttcccgacccagagatcaaacccaagtctcctgcattacaggcagattctttaccaactgagctactacagtggttaggactcagtgttttcacttcataggcccaggtttcatctctgattggggaaccaagaccctgcaaactttgtggccaaaataagtaaataaataaagagataaatgaaaagaatagcataaaccaaatattccttgaacatattcatttacttgcattataaacattgcttcagtaaactagatctgattggctggagaaaatgtaaagtatccttatcactgttgtattaaagggtattttcctcaactgcaaagcacaaatgaaagtttttatacaataatcttaacaaatttcatgaatatcattccaaagtccatcatctgataagagaaaagaattttctttctcaatgtagtacacatttcactctgggaggagtcagcaatttctggctccaaatactaaggcacattttggcttgtaccccaaaaggtcatgtcattcttacacaacttaatcatcagctacatagagaaaagcaacactgcaatttttctgatcattttagtgaggacgactggctcaattatatttgagcaagtcagttatatttcaattcagtcattgaaatgtaattgactggttctcctcttattttcataatagacactactacctagaccacatttacttaactataagaaatgtcaggaagaattggaacttttctgagtgtgcccattaaagctgaaaatatgccatcttgtcttttacacgagctgcaaacattttgcattggtctcattatgcaatacaatatgcaaatattccagttgcccttctcaccagactgcaaggccaggacaatatgcacaccaaaaatgttttgtttgatctttgttaacttgattaatatgtgtcttggggtggtttggccttgg

SEQ ID NO: 58743 - DNA, 1997 bp, Bovine  19866880539871
  misc_feature (1)..(1): n is a, c, g, or t
nttcatcagcagatgaatggataaagaagttgtggtacacagatacaatggaatattactcagtcataaaaatgatgcatttgagtcagttctagtgaggtggatgaagctggaatctgttatacagagtgaagtaagaaagatagaaacaagttttgtatattaacacatatatacagaatctaaaaaaatggtactgtctagacttttaatgatccatgtcctctcctcaaagctctgtttcaagatgttttccatattgttgatttccttctcagtcactctcctttgcacttgagacaggcgtttccggaaatttccactcagcaggatgtagagaaaagggttgatgctactgctggcatagctgagacaaatggagaggtaatatctcagacagaaagccagtgagggctgctccacctgttaagttcaccagttgcatcacgtgatagggggcagcactcaggataaagatcggcaccagcgccagcaccatcgtggtcagcttcatcactctctgccttggaacactgggattgtagctgtagaggaaaagtttggaaagacagaacatgaccatagaaattatgggcaatggtttcccagaactctttggccagtccataatatctctgcagtgaaatgtaaagctcatttttcttcctacttattcagagtgctgtaaaaataccctttttcatcccactaaaattttccctgattttccaaagctggagaattttgagaaacaaaataaataacataggacttaattataatccaaaatatcaaataaagatgtatgaatctacgttcatataaataattgaataatatgtgggagaagagacaaatcttctttacagaaaaattccaaataatatatatagatactcccctttccaggagttcaatgttaattctcaccctccttcttttccctttgaaggtagactatacttaatgactcattttcaaataatagaatagaggaagagataaatactaattttgtatcagagaagcctggcaaatactaccttaaccaggtgatcaagattaacatcaacagagctgtcgtgtagttatcacataccccccaacatgttgtgatgagacttctcctaaaatacctaaccaaagtctaatcgtgatacactatcagtcaaacccagattgggggacattctacaggatacctacctcaagtgcttacttaatattatcaaggttatgaaaaacaaggaaagaccagaggagacaactgaatgcagtgtgatctcctggattgagtcttggagcagaaagaggactttaatggtaaaactggtgcagttcaatacagagtagagtttggttaatagtaacataccaatgggagaaggaaatgggcaacccactctagtactcttgcctggaaaatcccatggacagaggagcctggtaggctgcagtccatgaggtcactaagagttgggcatgactgagcgacttcactttcacttttcactttcatgcattggagaaggaaatggcaacccactccagtattcttgcctggagaatcccagggacgggggagcctggtgggctgctgtctatggggtcgcacagagtcggacacgactgaagtgacttagcagcatcagcaacataccaatgccatttcctttgttttgacaaatgaatcatggcaagatgttaaaggggaaactgggtgaggaatatatggaaactctctgtactatttttgcaacttttctgtaaatttaactttattctaaaatttaaaaatacttaaaatttccaaattttgtcctgttctgtcatatttagacatttcatagagatttctctgggacatgactgaaacagatgaataagcctggagaatattataaagtaaaagtatggtagcctaaaagtcattctaagatagtgattcttctgcagctcatcagagtaggcaccattattcctctaacttattgcat

SEQ ID NO: 58744 - DNA, 933 bp, Bovine  19866880852969
  misc_feature (1)..(1): n is a, c, g, or t
ntgcaatgtgtggggcaatccttccaacgaagaattgctgctactgctaagtcgcttcagtcatgtccaactctgtgcgaccccatagacggcagcccaccaggctcccccgtccctgggattctccaggcaagaacactggagtgggttgccatttccgtctccaatgcatgaaagtgaaaagtgaaagggaagttgctcagtcgtgtcagaccctcagcgaccccatggactgcagccttccaggcttcttcatccatgggattttccaggcaagagtactggagtggggtgccattgccttctccgcaacgaagaactatttggccccaaatgttgatagtgccatggctgagaaattgtactccgtatgattatgaagggactactgtggcatagttaatcctttccttccttaacagtctaatatgcatatggtttggaaaatagttgattcagtgggaaaattggaattacaaagagaatggatttttttcctgccctgttatgggaattcttcatagataagaaataaagaataaaaatggaaaaaaaaaaaaaaaaaaccctgttctgtagactaggaactagtttatttgtctactgttgtagaagtgtaatggaagcaatatgctaacctctgacatgcttcagaatcaccaaaaattccttaatagatctacattcttccatcagcagggagaaatcacatggtccatgactgttgtaactaaatatattttgaccaaagactgcttgcatcttttacttcttgagattagagtctatttggggaaaatgctaatagtttgtgtgataccaaactcagtctaattctgagcaacttggagaggttcagatatgaatttatttcatgataataatgatgagtttgtatgaatagatccaatttctagaggtcttttggacgga

SEQ ID NO: 58745 - DNA, 1189 bp, Bovine  19866880993672
  misc_feature (1)..(1): n is a, c, g, or t
natagcatattcagaagcagagacatttcctttgccagcaaaggttcgtctagtcaaggctatggttttccctgtggtcatgtatggatgtgagagttggactgtgaagaagactgagcaccgaagaattgatgcttttgaactgtggtgttggagaagactcttgagagtcctttggactgcaaggagatccaaccagtccattctgaaggagatcagccctgggatttctttggaaggaatgatgctaaagctgaaactccagtactttggccacctcatgagaagagttgactcattggaaaagactctgatgctgggagggattgggggcaggaggagaagggaacaacggaggatgagatggctggatggcatcactgactcgatagacgtgagtctgggcgaactccgggagttggtgatggacagggaggcccggcgtgctgcgattcatggggtcgcaaagagtcggacacgattgagcgactgatctgatctgatctgatacatgtgtgtgtgtatatatatctatatggaggtcatagtgaccagtttaatagctgcttatgtattactactttcttcgtagataagaaatttcatatgatctacttgttactttttgtcctggttaaggagtaaatcatcttagggacagagttggcgagagggagggaggaagcaagagatggggaaagatgggggatagaagaaaaaaggagaacttattctaaacctgtaaaaaaaaaaaaaagggactaggctgcttgctttttgttgactgtgaaaaatactttaaacacaagagaacctgtatgtaggaaccttgacttatttgggggagaatctggcaacacaaaattattcatgcatggagttttagaactggactaaaggacacatttaactttctaaaaattcagtcattttaatttacagactagggaactgagatccagtgtatgttgctgtttgaaaatcctcttttaagaggatgaagtttgagtcagttgtcactgaaaccagattctagtcacgggaacacagaataatgctttgaaaggatacattctagtatacattcttaagaaattcttattggtttgttttatagcgaatacaagctggcattctaaaagcattcaacaacccacctactaaaactgctgatgatgaaactagaaaa

SEQ ID NO: 58746 - DNA, 1006 bp, Bovine  19866881120110
  misc_feature (1)..(1): n is a, c, g, or t
ntgttaatgctggtgtcaagagtttggaggaaagcatagctctaatcaacttctcaaagggggaaaaatctaattttccaattttttctaattctaatttaatgtaaaatctcatataaacctgtggaatgtaattattttgaagattataagaaaaaaagttttctatttagcctcccataatccaagacttactgaagagggtaatcaaatagctctagttaatgaaagaaaatcatgggcgcagaaggtagaatagatttagaaaactgtcatattgtcaaacctaataaaaacagctgattcacgcaaccttagaagaaaagttcatgggaaatcaaaaattcaaaggttaccaaaatatcacccccacaaattattaaatgtcttatgagacacaatattatgtccctataattactattttcaccaaaaatgtttacctgaatccaactgagcttttggctctcacttgcagtgcgaaagtaaaagtcattcagttgtgtctgactctttgtgaccccatggcctatgcagtccatggcattctccaggtcagaatactggagtgggtagcctttcccttctcggggggatcttcccaacacagggattgaacccaggtctctcacactgcaggcagattttttaccagctgagccacaagggaagcccagagtacatccttagaaatgcataagctcgaatcaagattgccaggagacataacaataacctcagatatgcagatgacacccacttattgggcagaaagcaaagaagaactaaagagcctcttgatgaaattgaaagaggagagtgaaaaaattggcttaaaactcaacattcagaaaacatcaacatcagaaaagatcatggcatctggtcctatcacttcctggcaaatagatgggaaacaatggaaacagtgatagactttagttttggggaggtgcaaaatcactgcagatgatgaatgcagccatgaaattaaagatgcttgctc

SEQ ID NO: 58747 - DNA, 1153 bp, Bovine  19866881175025
  misc_feature (1)..(1): n is a, c, g, or t
nttaaagacaacatgaggtcactgagtgtgattgtttttctgcatgatatttttcagagttcagtcagtcatatataactgttttgcctgaaaatacttcttttgctaagtttttgcatatatttaggcatcaaatttcagcataacaaaagcataaagttaacatttatattagctgatttttaaagtttgaagtaactgaatagaaaagtgggaaaattaagatgaaaataggtactaacattaaaaaagaagaatgaacataaatttaggttattgccttgaaactacatggtcgatgtcagactgctttgtaaaaactattttttactatcaatattacctgcagagccatatataaaaccctctctttagcggtgatcatcaatctgacttttccagttatcgcttctttgcttttctttatatttttactgttattatatgtatctgtggaaaattattaaagagatgggaataccagaccacctgacctgcctcctaagaaacgtgtatgcaagtcaagaagcaacagttagaactggacatggaacaacagactggttccaaatcaggaaaggagtacatcaaggctatatgtggtcatcctgcttatttaacttatatgcagagtacatcatgagaaacactgggctggaagaagcacaagctggaatcaagactgctgggagaaatatcaataatctcagatatgcagatgacaccacccttatggaagaaagcaaagaggaattgaaaagcctcttgacaaaggtgaaagaagagagtgtaaaagctggcttaaaacttgacattcagaaaactaagatcatggcatcctgttgcatcacttcatggcgaatagatggggaaacagtgacagactttattttcttgggctccaaaatcacagcagatggcaactatagccatgaaattaaaagtcgcctgctccttggaagaaaatctatgaccaacctagacagcatattaaaaagcagagacaacactttgccaacaaaagtccatatagtcaaagctacggtttttccagtagtcatgtaaggatgtgaaagttgggtcataaagaaggctaagcaccaaagaattgatgcttttaaactgggtgtggagaagactcttagagtccctt

SEQ ID NO: 58748 - DNA, 1129 bp, Bovine  19866881207010
  misc_feature (1)..(1): n is a, c, g, or t
nacactttaaaaaaaaaaaaaactgttttccatgttcaaagcctatctgaaaggctggagtaaggtttatgcagataatgcattcatgattgaactatttgtatattaaatatggtcgtaggatataaattaacttaagttcttgaaatttatagacgaattcaaaaatgtaaatttgctcagaaaaaaagctatttatctcatctgtttgtatggtaattgatggttcattatgaaataatctgatgcacagagtccagctaaattagcccagccataatgtactatcttgaagcaacttcacattctcattagggcctttctaatttctaaagtgaaattaatgcaattagtgatcaaatcaatacatattgatcatgagtttcttcaatatggcatgaaaatatcaggtcaaaaagaaagggcttttttaaatcacagaattaatgtaagaaatttaagttgtggggaaaagagctttgttctattttcctatagtagctcctatttataagaaagtgactatgtcacttttaacattgctgacatgaaattcaacacaacgtgctacaccccagcttgccctccaacacatcaatactgtattcattgtccatatggattttttcctccccataaatatccaaaagcaaattttttcctcatgtgcagaattttagatgactaattactcaaaagcacttttgtctttttcacatgcaaatgtaagcaggattccagggagaagtacatccccctcccaagtcgttgacccagtatttgtacccaaggtggggtgggctggagttaaacgtatgcaggaagggacttaaagcccagaataaaaaaatcaaaacccatttgtgaaaatcaaggaactgctgcttttctacatactaataagcttatttcagtgtgaaaatgagacttccaagaaaaaaaaaaaaagaagtgactcagttccagaagtccttctcaccttcagccaaatggattctgagatgtggttcaacccgatgtctactcctggcatgtgagggggaatgtgcgatgaactgtgttaaatgctcaacttcttgttctcaaagtcacaaaattatgtagatcctgagggatatttctgagtaaa

SEQ ID NO: 58749 - DNA, 2221 bp, Bovine  19866881323533
  misc_feature (1)..(1): n is a, c, g, or t
naggaagatctcctggagaaagaaatggcaaaccacaccagtattcttgcctggaaaatctcaaggacagaggagcctggtgggttatagtctatggggttgcaaagagtaagacacaacttagcaactaaacaacaatcacaacagttataaatttgagcagtaaataacccatttagatagtgagccgaaattgctctttcagtcaaatgtttcgctggcttgcagacaaactgtggcctccatgtgtcactcagaccttgtggtctcatctgtgtttgcggctatgccctctaggcatggatccccactatcattagtggcgagggctgtccaaatttttatccacaaatttctttttttcaaataaaactggatgcagtctttcaacatataaaatcccaacttatgtaacagataaaaggggtaaggaattgaaaacacatcttactagtaacttcctcatcatgtctctccctgaggctatgcaaaaccctgggtctctgaaaaacaaatttggaaaccacttcagggctctacctacacagatggctgtctcatttctggagaaaactaaactctgttctttacccaagtgggtacttccctcatacttaaagcagtcaacaggcaagatacttcagaggggaacgtgttgcttggtgattagaatgagaacaactgataaagagaatgtcttgtttctgaggacatggcctgtgtgataccttagatgagagcttaacgtaaagcctcttttatgtggcccagtccttggactggaatgaaaagatgaggttggttttattcattgcagcttgccaaaaaggcaatgaattaacagcaaaaacctgaaaagtcctatgttcccatcttacttgttgacactgactcagctaaatgatatcaacaacatatttttagtcccacagtttcaatgaatacatccagatttactgttttgacttcttgtgatgacatctgaaacaaattttgaaaagtaatgacacgaacattttatgctgtcttccacttcctatactttaatctccatattgagggcacagtttcttccatgcatcagccttctaactttctgtttggttgtaaagggtaataacaacatgtggtagctattatcacaaccaatagcaaaaatatccaaaaaatgttccatttttaaacatgactactttctcaaacaattaatttaggaaggtattttcaaagcaacatacttattctttatttaaatcatataaataagctatcattgaagtcattctttaataaacttctctttagttaaccttaaaattcactaccttaaaatatttattgaacacctaccttatgtgagtttctgtgttgggattaccgaagtgaacaagccatgactgaacgaatgagctatctatctacagtttagtatgattgtcagagatttagaaagaagtggagtacatggcaatggcaacccactccagtactcttgcctggagaatcccatggacggagaagcctggtgggctgcagtccatggggtcgctgagggtcagacatgactgagcgacttcactttcactttccattttcatgcattggagaaggaaatggcaacccactccagtgattttgcctggagaatcccagggacgggggagcctggtgggctgccatctcttgggtcgcacagagtaggacacgactgaagtgacttagcagcaggagcggcagcagcagatactgtattaaaaagcagagatacctctttgctgacaaagatccatctagtcaaagctatggtttttccattagtcatgtacagatatgagagctgtaccataaagaaggctgagtgatgaagaactgatgcttttgaattgtggtgctggagaagactcttcagagtcccttggacagcaaggagacgaaaccagtcaatcctaaaggaaatccacgctgaatattcactggaaagactgatgctgaagctgaagctccaatactctggccacctgatgcgaagaaccaactaactggaaaagaccctgatgctgggaaaaattgaggtggttggacagcaccaccaactcaatggacatgagcttgagcaaactccggggatagtgaaggccagggaagtctggttccaactggtttgcaaccacagggttgcaaagagtcggacatggcttagcaactaacaacaatactttca

SEQ ID NO: 58750 - DNA, 1156 bp, Bovine  19866881496882
  misc_feature (1)..(1): n is a, c, g, or t
nctgaacactagtacagctatacatacatacatacatacgtacatgctttttgtaacttaaattctgccatgatttttaaggagtaccctgtattcagaatctcatggtttcataaacctttcagcaagaatctgttaagagcagcaacatgctgttttgattatgtctcagctcatccatttaaggaggctgaaaagttgtttcagcagatttcctgcaggtggatccgattacctggactccactgtttcagtaagataaatggaaaatttagatcttcatgaaagaagggctggagggagaaactctgcaatgaattgtctcaggaagtaaagagttccctctccctaaaaatgtttaatcatagacttggtgatggctgttggagagattttttggagaggattctgatgtaagactaaaaggcttataggcttgtaagttcttaaccaattgagaaattttcgaagtctagattatgtaaaaaggctgacataggatttattgaatttttaatgacatatacacaggctggcatccatgtaaggctggcatctggtgttctaagttatcactggtaaagtttgggttcatcatgacagcaacttcagaaaagcttgtgctgaatttattctttagcttgaaatcttcagtcacttttctttagcttattctttcttttcatgcactgtcaagctctggatttgaaggcaagtcattcaagtttaaagactggggaatccagatagtctcagacatgaatgttctttgataaacttctaatgattcttaagaattttggaagtacagaatcctctcagatcctacccaggaaagtggaatattaaatagtataggctcagaggaaattcaccacaaattaggaatccttctaaggaaaaatgtatcctcttcaaagtctcacattcttacttcttaggagctggcagaacacaccaattgatctttaagttattctcacttggcactgaatctctttgtgtaagttaaacacattaacagacataaaacacataacaaggacctactgtacagcacaggaaactctacttaatagtttgtgaatggcctgtatgggaaaaaaaaatctaaaaaagagtaggtatctatatatgtataacgactactttgctg

SEQ ID NO: 58751 - DNA, 891 bp, Bovine  19866881856147
  misc_feature (1)..(1): n is a, c, g, or t
ntgttgttgttatttacatactttggcagattttcaaagctatggataccattgggggactggtgatatccctattgcaccatttgtgccagttcctgggttagtatatatttaattcctatggctttcaaagaaaatatgacctgtcataagcaccaaatgtacaaaggcgggatagagtctccagtatcttccatgaaagagcatcaaaaatagattctgatttgcctgtcactatcatgaaaagcaaaatagaaagattacttggtatttaacttcagacatctgatatcaattgggcacaatccatctctcagtttagagtagttatccctagcctgctttcaggcttaatcccttaaaaaaaaatcttaacagtttccagagtttggtcttttttcaattttcagggcataagcctttgggaaaactttagatctaatcttccctagtgcctttccttttccaaaaaaaaaaccagagaatttcttcacatgtgggatttttgtggttatcatttatcactttaggctttcaaccacaaattcatccactattttgtaaacttctcagtcttaaggtataggaacattcataaaatagttttctagactggtgcaaactaaaaaagttctatgacttttattattaaaaatgatccaatgatccagtccaatgatgtaaataaacacaaagtattagatgtgagagtcatggatcttcaggcatgagtcatgttataaaatatggcatccgtgctgtgtgagaggtgagctgcatttagatccaagagaagtaataggcatacccagactgattttaataaggctttagattccctctcatcaccaccacttactcacctcttgacagtcttgtctacaagctaaa

SEQ ID NO: 58752 - DNA, 784 bp, Bovine  19866881876683
  misc_feature (1)..(1): n is a, c, g, or t
nttccttctctctcctcctctgtccccttataccctcttctctatatgtgtttaaggttaggtacagacatcaggacacttacatcttttcagaataaagatattctcctttaggggtaactttaaaatcgttgtcatacttaagaaatgaacgtaattccataaaccaatctatctcatatttaaatatctctcaattaactcctaaatatcttttatagctttaaaattctttcctgacccagagtacaatcaaggttcatgaattgcaagaatagacctttttccccttgattttcattgggagaagaaataattttatgataaactcttaagtgaggtgatattttattctcagattttgaaccatttttacatctatatcttgatttttgaaatactgtgtgacctttgacaacataccaaaattttgctatttttcataacatctttagactgagcacaaaattacccagcagaagggtgacgcatatggagctgatcacagaacagtggcttaatagagttagtcgtgtgacctgccagaagttgacctcatttcagaattccattggagcacgatacattcaattccacatagaatttgaaaagcatgctaacattcatggtagttctcattttgactttggttcagacagttgagtataacgattttatgcttttccaaatagtatttctacttccactaatatatgccaaaagaaaaaaaagaaagaaagaaaacgcaggagagatggagagagagaagaaaaactgttaaatg

SEQ ID NO: 58753 - DNA, 587 bp, Bovine  19866881968796
  misc_feature (1)..(1): n is a, c, g, or t
natgataacaaataacagacgtcatttcataaatatgtgtcaaggtttatgtaagtatttttatacacattacttcctaatctttagagaacatgtctaagcgttacaacaatcccacttgatagaagtatcatataaataagaagttaaagtcacatagataattaaattatttaggtggaaccgaaattcaaattcagcaccatctgactccaaagcccacaatccagtaacttatcctttccatcttctcattattagttatgtaagataacatcacaaaatcgctacctaagaattcacagcactcatactgagaggtcacactaaaactcaaagtactctttataaatgtatcatttctttataagaattataaaatattataccttaatacaaatttctttagcaactgctgtgaacttacttgtttgtgttttagaaacatgtttctggagaaaatcaactatctgagccaaaaccttcttattacaatgtgttgataatttttcatcacactcataacacctaaaaagaaataaatttaagcaaatattatgaaaacatgttcagtagtttttgcacat

SEQ ID NO: 58754 - DNA, 1407 bp, Bovine  19866880110303
  misc_feature (1)..(1): n is a, c, g, or t
nttgcctggaaaatccctggatggaggagcctggtaggctgcagtccatggggtcgctaagagtcggacatgactgagtgactttgctttcacttttcactttcatgcattggagaaggaaatgacaacccactccagtgttcttgcctggagaatcccagggacgggggagcctggtggctgccgtctgtggggtcacacagagtcggacacgactgaagtgacttagcatagcatagcatagcatagcatttccacttcgagagccccagacccctttctcttccttggggaccctggacttcttatcagtctgcctaggaattgactcgctcactatcctgagagtcttctgtgttaacattatctctaaaatgtttatgtaacaaaattgttctaagtgtgtggacacgatacttttttgattgatgattcaggatgaacaatgtgggctgtaaggaagatacatgatttatctgcataagattttcagaagatattaatactttaggtgttaaagaggagaaaatgtcccatctctaaattaagtctttatttttcttcaagaataagctctctaaaaagccttaggctatgatcaaaatattcaggttttaaagtgacagatattttgttggctgattatcaaatttgtgctgcttacatgaagaaaaatacttggcacaaaaattcagttccaccagaacttttccatacttgctaattggattaaaaattatcaaaaacatgaattaagagttcagtttcagtcgctcaatcatgtccgactctttgcgaccccatggactgcagcatgctaggcatccctgtccatcaccaactcccagagtttactcaaactcatgtctattgagtcagtgatgccatccaagcatctcatcctctgtcatccccttctcttcccaccttcagtctttcccaacatcagggtcttttccaaggagtcagttcttcacatcaggtggccaaagtactggagtttcagcttcagcatcagtccttccaaagaatattcaggactgatttcctttaggatgaactggttggatctcttaagagggactctcttaagagtaattaaattaaatcatatagaaatacttctgttaaatacgtgtctgtaaatatatattttctgtattaataggaagcaaaatatggatttttggccctgttgttccattttcaatgattagttcaaattgaataattttattgttgataaattaataacagagtgtcatgtctctcattttaacactgaaatcataaattgcatattcagtagttttgcattaacccttaaaaataccctgtaacattgctaaaatacacagagaagaaatacaagtctctttcagaattcttcagtggaaattgttactg

SEQ ID NO: 58755 - DNA, 2478 bp, Bovine  19866880288668
  misc_feature (1)..(1): n is a, c, g, or t
ncttctcctcctgccctcaatctttcccagcatctgggtcttttcaaatgagtcagctcttcacatcaggtggcccaagtattggagtttcagcttcagcatcagtccttccaatgaacacccaggactgatctcctttaggatggactggttggatctccttgcagtccaaggaactctcaagagtcttctccaacaccacaagttcaaaaatataaattcttcaacactcagctttcttcatagtccaattctcacatccatacataaccactggaaaaaccatagccttgaatagacagacctttgttggcaaattaatgtctctgctttttaatatgctatctaggttggtcataactagtcaaccataaaaagaacaaatttatgccatttgcagcaacatggatgaaccaagaggttgtcatgagtaaagtaagccagataaagaaggataaatatcacatgataatgcttatacatgaaatccaaaaaaggatacaaatgaaccactttacaaaacagaaatagagtcattggatttgggagaggtgggaatattatgaggtggttgaaatagtctgtttggggaaagaataggctccaagcaggaattctggtatgtaaggaatctcacggaaagagagatacagaatagggggacctgaagctgatgttatctgtgtagctataatccaggagtggacaagagtatggtaatgctgacagtgatggagttaagaacacagcatataaagaaggtaaaagggtctacttttgatagtctaaatcaataaaggaaagatgtatagaagagaacgaagccaagaacagaactccagaacacagacacttaaaggagttagaaaacaaaacaaaacaaaaattgcagcaatcagagaaaataaggaggaggaaagatcagagacaaaatactacgaatggggcaagagacacacacatagatacagacacaaaggaggctgggaaaaggcagcagagaatttcaaggcccagtagtcaacagttcttacatgtcccagaggagggttcagaaagaaacagctgagaccaggtcccgggagctgggcactctaaggagtcagaggaggaagtgagatccagccagtgtggggacagtgggaaggcagcaggcataagaccatcttgggaacactgctcagtgaagccctttcagaaatggggtgttagttcacgaggagccagggaaatgttttaagataactgagaaacaatgaaggtgctatttattgttcatgtatttcttcagagggaaagaatgtggaagtgtgtgaagaaatagagtgatttatggggcaaagtcctgtaaggaaagactcagtggaggcaaagcagtgatctctgtgttaaagctacaaagaggcatgctctgtgaagcatttttgtcatcttacatcatgtaaacaaatgtatatatttctcatttcttcaacaaatcaataactataggaaagcatgctctcagtcctttggaaactacacaggtactgggttctagctttggcttagcaaaacttctcttccatttcttcatctccaaccactttaaaaatttcactttgggcatataggaactggcttcttctagttttcccaaagccacctgcttgcagatttgggagatctcccaggagatacagcgaagcagtctttcagaggctgccatagatccaccttcagctgctcttcttatatcacaatggccacttgcttttctacagatgcttaggtttccattttgaacagaaacattctatcttgaatcagaattttccattggataaaaattgcatttagcatctttttgggagcttagactgtgacacaacttttttttttttttttcaggtgtcatcagagtttctgttctcagacctctgctcctttctactccacacatgtctctctttagtaatttggtctgtcaacgtggggtttaacttcatttgtatactgatgacaacagattgatgttataaaattagccttaatgttctctctgccacatctgtgctacatgcttgccaaactaatgtcaaggatagggtatctagagattgtcttcaactgatcactacaaaaatagttgttttcatgaaatgcaggcacattcttattccttggtttctccttcccagtttcttcaaacttcatattgtaaaccaacactttgaacatgagaataccaggcccaagtgagttttctcttttaatttttctaattaaaaattaatttctgggttaaaaaagaaaaaaaaagcagtatgcatagagcagaaaactggtgacatccagttttagcaatttaaatataaaaacaacacttcatttatatttcagaaagcaaataccagggggtaaggccaagacggcagagtaggccctaagctcatctcctcccagaggcacaccaaaattacaactatttgcagaaca

SEQ ID NO: 58756 - DNA, 2419 bp, Bovine  19866880392308
  misc_feature (1)..(1): n is a, c, g, or t
nactgcagatggtgactgcagccatgaactagaaagatgcttactccttggaaggaaagttatgactgacctagacagcatgttaaaaagcaaagacattactttgcaaacaaaggtccatctagtcaaaagctatggtttttccagtagtcatgtatggatgtgagagttggactatatagaaagctgaggagtgaagattcaatgcttttgaactgtggtgttgcagaagactcttgagagtcccttggacagcaaggagatccaacaagtccattctaaaggaaatcagtcctgaatgttcattggaaggactgatgaagctgaaactccagtactttgcccgcctgatgcgaagaactgactcactggaaaggaccttgatgctgggaaagattgaaagcagaagaaggggacaacaaaggatgagatggttggatggcatgcatcactgacttaaaggacatgggtttgagtaggctccgggaattggtgatggacagagaggcctggtgtgctgcagtccatggggtggcaaagagtctgacacgactgagtgactgaactgaactgacaggctggaggacagctactggggacatggtcacaggacccaggtctctaagcagggcgtgtgcatgctctgtcgtggtcccctctgcaaatacagcaataaacctatagtacacacacacacacacacacacacacacacacacacacacacacacacacacacacacagtggtgtttcatccttcctacatggatgatgaacctgaggcacagagagacaccaaactgactggacttgcacctgacaaccagtgagaggtggatagaaggcttccatctccaagtcagtgctttcctgtgatctgtgctcccagtcaaccattttcacctcctcccattccccattcatattctctctctctcattccctcctcctctcccacatttgctattacaatgattccaggtgactcaatttgctcatctataggaatatatgatgtgtaaactacagcactttctttaaaacaaacaaaaaaaaacccccaaaaaacataaaagtgattcaacatctaatgattgcattttcaaaattcaaatattcttacctgatcgacaagcaatgtctacatccttttcaaagtctgtctgtaacaagaaataataagacatagaatcatcatttaatgaagacctcaagcttatactgaccagagtatctgacgttaacaaatacctgactaggcagtaccagaatattgttaatactttgtgcaaaggaattttctcaaggaataatcaaatgccttcaagagtattttctagcaaccatatgttggataaaatcagttggaaatatgttgtacagttttaataaagcaatattgtacctatggtcctctaataccagatatgaaagaacagaattttaaggcaattccttaatgaaattaattaaggaatttcaattccacaatgaaaatactagaatgtgaaatattgtgaagatatgtaaataaatgtccttgttatttacatttaaaaaaattcactttgaatatattgttaataatgtaatatcttataatatagctttgtcaaacccttaaaatcaaactagggttttctgatgatccccttttatgcaaatctgacaaaagccttagggtttacggattaaagttgaagattaaacaatattaatctggcccagagcctgttagagtttagttccatcctcatattttctccaaacttttattgtaaacacatagttgttgctgttcagtcactaagttgtgtacaattctttgcaaccccataaacttcagcatgccaggcttccctgcttcactatctgctggagtttgctcaaactcatgtccattgagtcagtgatgccacccaaccatctcatcctctgtcaccctcttctccttctgcccttaatcattcccagcatcagggtcttttccaatgagtcagcgcttcacatcaggtggccaaaatattggggcttcatcttcagcattagtccttccaatgaataatcagggttgattttctttaggattgactgtcactatttggattagttcacttttaatggtgaaattatagtagcctgttttaatcaatatttagattcaagatatcagtatttatctctttatttttaaaaagaaattactctttctcctgctttagttactagcatatcatttaggctatttttgtgttgcctaatacaaacacattgataataaatcaggtatattatgaagaaaactctattaagccttgctgttaatgacatagcttaaagctcacttcatttctaaaatatatggaagtgagtatgtgtaaagtatcccttatccgaacagcagtcagaactcaggca

SEQ ID NO: 58757 - DNA, 808 bp, Bovine  19866880416861
  misc_feature (1)..(1): n is a, c, g, or t
nggtctcttgggggttgatgcaggcttctggctaggtgagagggctggccacgaggaaactgtgaggctggaggctggtcagaacagggaagccaaggtgtttctcctcgctctgctttgggcagcacctgcgtctttatctgcagttctgtggtgcctccagccttggctagatgcctcagcccccggggtcaggtcgctgtgccatctcccttgtctgtccctgtgggaggggagcactagcttcttctcctgtgaatccctgcgttcctctgtggccccttatgtggcttctcggctcctccatcacttggattcctgtgaaacgctttgctccagtgtcagcacttaagtggtttctcttattctcctgacatatctggcctaagcttttcttgtaactaaacagaattagatagtcaatcgcacaattgctgttttaaacaaagttttgctgctccaggttttctgagtattcaggtataaatttaacgatgtatctcaaaacacgctcagccaaatctctctctgtttctaagtgcataaaaagggacagcattctgtgctaactttttatatgccaattttcctctggacatgaattctggagatctcaatataatggctttgaaaggtaaaacattttagctataatgtcacatcacaggtgcctcccttatggctgcggtgaacatcaaattggataatgtgtgtgaaaaatcctttgaaaattgtaaagagcactttagatgtaaggtggtgtgattattatttgattaccattataccttgaatattgctgcagaaa

SEQ ID NO: 58758 - DNA, 1516 bp, Bovine  19866880502088
  misc_feature (1)..(1): n is a, c, g, or t
ncaaagatgaagagagatcctgaaagtttatagtaacttgtgtgggtataattttgaggttcttcccaactgagttgaggggaattctagaccaaaataggcatgcagacaagatctaggataaatccctaaattctaaatcagtgttaaacaaaagacagtttctgaggaaaatcattccttggaaccataggcataggggcagtgagtccaagttgagtcctgagtggctggagctccctcaagacaaaaacaggccatcattctgaactagcagaagggctactgtgtctgtctcgaacttgcacatccccgacagtcgcaggtctatgacaataatgaccacgtaaacacaaactacataacatttattcaaagtcagaaaagtttctcaaagaatttcagtgattatgaatataagaacataataccataaataatcataatgaccatatgaggtttttctacatagaatgactctttaaaatgtgctagagggattagaatggaaacattacaatattttgcttgttctaaaaatgttttatgtctaaaaacctttctgggtttgatattgtatagattgtgtatgcttgaacaatagactggatttccaagtgctgctttgttccatggtaatttttccaaatctctgtattaaatataagcatcatgtataagtatgattcagccaaaagctctgcatttaaatgacttagaaatcacaaggctcacatcttgaaaaggaagaaaattcaggattcagaatgaaaattcagtttttcattttcattctttcaaagagtttaatagtgagtaattgcttagggtgaccattttaggaggcagctgaatatatagatgtgggaatgaataataaaattagcatttatatagcatctttcattagctgatcatcaaatcaccttaaaatatgaattaattaatcttcacaacacctctgtacaatgcataagtttttctaatccttgaagtaaagtcatttgttcaaggttaccatgcaagtgcacagagagtataggacctgaatctttctatcctcaccaattttacactgactcaaagagacagtcatgtgcctgaatgttaacatgagaatcactttataaagttcatttaacccaggtcagacacttggtcatatggaataatgacatggaatggatgaagcgtagatgtgtacagctagccaagtttgggagcaggactatggccgtgaaggtccagtctggtgtgacttcctctgtgggcagagtgagtggttaactgccacaatgtctgtagccaaccatcagggaagatgatattctgacactagaggagaagcggaaagatgcctagagcatcaacatggagcgtggggagcagcagtagccaggaggtgtcttgagaccttgacaagtctgacctgagcaagacctgatatcttgagcataggaagacagaagggagcggccctctggctgacatgaggccctggcgcagtctgagtctt

SEQ ID NO: 58759 - DNA, 2829 bp, Bovine  19866880519533
  misc_feature (1)..(1): n is a, c, g, or t
ntattctggtatttattaagtaaactaattactgttatgtctccccaaagaattcattgtattttaggtgtactgccttttcatgagatctaatcattgaaaagatttaaaaaatctagtatagtgtgaaagatacttaagatatgttgtatacattgtttttcaataaagaggagctttgcacagttggtatatcgaacatgaaagtactgttacactgtagcaagaatactttatattttaaaagttttactaaatggaatgttttttctcctttgacatctagcaagttaaaatggcactcaagtatactttgggatttgttgtgatttgtgcacttcttcttttagttgggtaagtttcgatttttcttttcctgaaaatggaaacagcattattttaatgataatgataatagtaataagggctcattaataaaaacccaagagagaaaatcaagaaaattttaaaagaacagactaccaacaatcaataaccactacattgttctatctagatattttttaatgtgttcaaatatatgcagaaagccccttctcccatataccctccgtgttgtaattttacacagatgtgattactttttatgtgatttttgataatcactggttggtacattgcaggcatctcttcaggatagatgcatcatttttgtgtgtattgcattcccttcttaggttgtaacaatttatttggctggtcttgtgatggctacttggacatttatgatgtttgtggtttttccgtttttgtaaacaacactgatgaaaaatccttgtctgtacctcttttcagatttgatgcatcagtctttaaaactttgaattaatctttgtcaacaagttttttctttctctgtctctcttcttttattcttcctgcttccctccttcagtctctctttccctcccttttttggctgtgctgggcagcttgtggcattttagtaccttgatcagggatcgaacccaggccctcagcagtgagagcatggaatactagtcattggaccactggggaatttctaatgaattagttcttaattctttttccatacgtttttataaacttgtaacagtaagtttttgtgtatttattaatacattaaaaaatttcattttggaaaacatttgtccctgttaatagaagacatttatcattgttaaaatagatcctgatttttttttcccagcagcattcttaagcttcttcatttattcaactttaaacacttaacagtctttcctggtggctcagacggtgaagaatctccctgcaatgtgggagaccctggttcgaatcctgggttgggaagatcctgtggagaagggaatggcaacccactccagtatccttgcctggagaatcccatgaacagaggagactggtgggctacagtatatggggttgcaaagagttggacatgactgagcgactaacacatacacacaaacacctaggtgtgccaaagagcatgtgcatgtacatggaacactattaggctaaaaaagaaggcctacctctccaggtcaagttgtgggcgtgatcacaatgatcagcatgattccaagtacagccagaaccaagcaaacagaaaggtttcagagatgataaatgggctttaaaaattaaagtgagacagcataggacctcagttcctgaagaccaatgaattataaaaagcatgcatttgctgtagaagcagtaatgaaataatttctgtgagggaaattattttaagatccccaggataaacagtgagttaggagtcaatttaaaaatccttagaaccgaagatttcaaacttctgtctttttgtgcctgtgtgctgcccaactcatacccaaaaaggaacaagaatcagattcctaccaacttaagactcctaagacgtgtcatttgtcatgttggtttctgcagaagctgtatcttgtgaagtagtctttaaaaataaaaatgaaagaaaaccaaagagtaccatgagaagccacattctccttcccactgtaattttgctttggtttgctctctaaagatttaacaaaaatcaaaatcattggtctcagattcctgaattaatgtgacctcactccatggctgatgtggccaaggtagatgcttttgtgcaattagaacagaaggactttatatcagtaggactttagggctctggctccactgtgtttactataagctacacggatgacagggtggaggtcagagaaagaggtgaaaacgtccgtcacagggtcacatgacaggtagcaggaccctaggtagacttgaaggaaccagttccattctggcaggggaaacccacaaaaacaagtttcacacttgcaaaattatcactctgaattcaggaataagaggcactgggttgtagatacaattccatctgtagatactaactttaaatttagagaagaaaaacacttaatgaattaatattatgggttgggctttcttaagtgattcttaaatccagctgtgatacaattaacagctgtgataagaagtctaccatagctctggctcagaggtggtctttagtttcacagagtccgtctacagaaagtcatgtagctgtctgtcactgctaaatctgttgtttgcagaagccccagaactctatttgctgagtagagtcctcaccatttaagctcttcctacatacaggtcgtgcatcatgcagttctaaccacaacacaatataactgctgtcaaagtagtggtttccgggcaactgttggatttcctggtcacctgtgtaatcctctctgcatactggacactgagccctaccaa

SEQ ID NO: 58760 - DNA, 1591 bp, Bovine  19866880545774
  misc_feature (1)..(1): n is a, c, g, or t
naaaatatccaatgcagatatgcaatgtgtttggctatagtgtctggggtcttcattctactactaacagtatccttacaaatcccccagaacagatttcgagttctaaaataaaggttaagctgacaattatttttatttgaaagtttgcagcatattagcaacacgattggactacatacttaaaactatactgcagaaatttcaagttagaagacataaaattgagtagaattttgttatagcacaccaactagaattcatttcaccaagccactgtagctaaggaggagatgaacccaattttgccaccctgcaacattttccatttccccatttaaaatgcagttccctggagaaacactctccacaacgtccctgcctttgcattaaagccgtgttttccctttgttacttactatttctctaggttgctgagccaaaatggcgaaggtagagagacgatcacataagcatttcgtatgggatgcatcggtaagcacagttttacatccctgggtggaccacgttcccaaagaatcgttcctgcaaagtgtggggggaagatcgggataaatacgcctgacggccaattccgtaaagaagcaaatgcagtttaattgagagaatcgtctactgtaattcccgtacaggaaaaaggaaaaaaaaaaatctacttgttgttgaataggacgtaatttagatgcatctccagtaaggcaaagcgagagtgtttggaggaagcaggcgggcggcggtgcagcgtgcagagagctgtccagcgccggaggtgctgaaaccgggactgactctgtccagccctctgcgaggaacggcggcagcggcggcggcacgagcagccgccagagcgttggcagccacttcctatgctcatcggatcgtttcacacactcagagtgtaaagaggcttttcacatttcataccagctctgattcccgtcccgtatttttggatcgtgaatgttggcttttaaaacgaggatttctctgaaaagcctgcctaaaaggttagatagctcgtgttgggtgatagaatcttctccgctgttggttagggatttttttttcccctccccttagaattagctgctgtgaaaatttcaccctggaaatgggaagcagcagcagcagcagcagcggcatcagctggttccgactctcattgcctttgcctggtatccaggggaggggtgggtctcagacagaagcttcccactccacacttcactcagcccgagctcctctgaagcccttgacattgctccccccatccccacccacctctcttcccggggtggggcattaagcgttaagctaacctggagtctgctacaacatatagcagaataactccacctcaaagtctggtaggaaaggggaaagagggcctgcttcaatgttccctttggtgtagccattcaaaattctaaagcatatggtttatttcccaccccagcagaacaataaaaatggtatcaacctacgccttcttgagggggttaaagatgggggagaatccacccccgacttaactactccacaagaagaggaaggaaaaaaaaaaaaaaag

SEQ ID NO: 58761 - DNA, 1481 bp, Bovine  19866880568437
  misc_feature (1)..(1): n is a, c, g, or t
nttatgaggttgacatagtgactacgggactttactggtcccaagaggcttagaaacaattgcattgagtaaacatgaaaatggcctgaacagaggaaagcacatgatcctcaaggaagcctaaaaggatactacccacattcagctcttgtatacaagctgagagacacactcatgagattacaactttggcaacatggagggaagaggtgctgccaaactcatagctaaaccattggattaatgttgctttatcttaattaaatgttgttttaacttaatttgacttattgttataaccctgcactaagtgttgctgccctgtctgtccagtatttccagtagtagtagaaaaagaaacacgccagcccggcaatattccatgaaattaattacaaggggaaatttgctaaattgtgctctaaatgtgaatgattttcctatacttgctggtttggattttatggttagtttttaagttggttggagcaattgtaatacctttttaagaaaacaaattcctgaatgaagcctctaaacagaatctactgatttaataaaaatatattaatgaacaattgatcttgttcatgaccactaataagtgatcactttgtcagtcttgacaatgggatgtcccagttacaaccaaaaatgtatggttaatatttcctttgttccatattactaattctggattttgcaacataccagttacatacctggctaataatcttgctgagggattattgtccatatatcatagaacctgaaaacaattaccccttcatcttgaaatataatgatatgaatttttaaatgctctaaaagaccttatctttcaagtgtttgtgtaaatggttaaacttcctcatgcacaatgattttcactttactgtgaacataaccgtacatgtactcttaatgagcaattcatttacatcggtagatgtaatcacctgtttcatcacccaaaacaaatgtcaaattcctggagtaggtttctcccccaaggctaaagatgtttctcatatatcatgtaataaactgagaatgcctgtgagtacttagcagtaactctactcagggaaatcaaacctggagggctaggacagtggtgattaaagcagagtaggacctgtatcattatgtaagtgctgtagttagatctagacttcattgtctttttatttgtttgtctgtctccttggttattagcactcagagacttagctgtacaggagcttctcaagggaagaggaatgagaatcttgagttttctatgcatccctggtaatgactcatcgtttgactttgaactaaggttcacactaatacagtcttctactctgtcaagattaccgcactataggaaaaattatttttatttacttctctagagggctacaatttttaattaatgcttctgaagaacatttaacctccttgaacatgtgctagcttctgcataatgatctcta

SEQ ID NO: 58762 - DNA, 3646 bp, Bovine  19866880641405
  misc_feature (1)..(1): n is a, c, g, or t
ntttacactaaataagaaatgtaaaagtaatctgaataattgaaaaggaactcagaagccttccaatctaacaccatgcattttaaatataaggaccatgaagtccaaaaagttcagtttggccaaagacacaaactaggtagtgaggagccaagactagaactcaggtctgattgtctgcagcctgcatcgcagtgactcagggtcttcaacatgacataagagatgaagaccataatctgccactaacaaaggtccttctaaattatcttaattagataatagaaatccagtcagacttcaagagagctactacaggcacaaaaataaaacctattgtgatcaattggcaaattttttgattaacaaaaggacttagatggttgtaaaacagtgaaaagtctcttccacattagttgtcacatcttcagcctctgtgtgcatttccattctcacttactcccagagacaacaataaaacacagcacacactgcactgctacacatttaattaaatacttaattgccaagaatatgaaagaacaaaataattaccttaaatgtaccattttgatttttcatgtaagaaaccaaaaatatatccactggaagaagtgctgatgtgatcagtgcaatggccagagaaaaaatggcggttatggtggagacaacttcactttcccgctgactctgatatttgcgaacatatatccagcagaacgccaaaatagcctgaaacagacagaaagaaatgttttgttactgccctatctatgctctaatactgattttagaatgtgttttaaagttcctggtgggaaactttatgccaagtaaagatgctttcggatgtgcatggagaagtcccctaccccttataaacttagtcaggatttatcattttcaaagccaagttcattaaagcagtacatcatcactggggtgccaagacaccaaaaaaacaagcaaaggttgttgataacagtgctcagttacatatttgctcgcaaacacagtatgaccattaacggttgacacattacagttataactagctctgaatacttttccctatacattttcccaagctaaaggagatgtaactgaaagttgtttcccattgttcattgcagcactatttacaatagccggaacatggaagcaacctagatgtccatcaactgatgaatggagaaagaagttgttgtccatatacacaatggaatattactcagccataaaaaggaacgcctttgagtcagttctaatgaagtggatgaacttagaacccattatacagagtgaagtaagtcagaaagagaaagataaatatcatattctaacacatatacatggaatctagaaaaatggtactgaagaatttacttacagggccgcaatggagaaacagacatacagaatagatttgtggacataaggagaggggaggagagggtgagatgtatggaaagagtaacatggaaacttatattacaatacagattgccaatgggaattttctatatggctaagaaactcaaacaggggttctgtatcaacctagcagggtgggatggggagggagatgggagagaggttcaaaagggagaagatatatgtatacctatggctgattcatgttgaggtttgacagaaaacaacaaaatctgtaaagcaagtatccttcaattaaaaaaaaaaattgattaaaaaaaagttgttctatcctgttcttactacagaagcatcataaaacaccacccaaactgaaattaacttctgtccctttgtgacagttcaagaatatcattcagctaaaggttaactgtcaacaatcaccatgcaatcaacatattatactgtaattcacattttaaagggtattaaacaaagaagacagagaaggcaatggcatctcactccagtactcttgcctggaaaatcccatggacggagaagcctggtgggctgcagtccatggggctgcaaagagttggacacaactgagcgacttcactttctttctttctatagttcctgctggagaaggaaatggcaagccactccagtgttcttgcctggagaatcccatggacgcaggggcctggtgggctgcagtctatggggttgccaagagtcagacacaactaagcaactaacacacacaaacaaagaagaatgaacactgaaaatggatgcatgtgcatttcaaggaactttccaggggaaaaagtacactcagaggtactgaggttgacatctgtaatccatcaggtcttcttaatggaccaacatctttctagaaattaacacagagtaaaggactttagcatcagaattcaaattctggcatcagaattctctgaagggccactatagcagtttcaaattcaataggtctggagagggtccagaaaacctgtatttgtaacaagttcccagaaaggctgatgctggtccagagactacacttcgagaatctctgctttactcaatcataggggatggcagccagatcctaaatgggtgattctcaaccttggctgtgttagaatccccctggtaaaaacttaaaatttctttatgcaccccccctcccccaaatcactttcatcagagactgaggcttctctaggcatcggcactgaggatcccaatctgaggcaaacttgagaaccaaggttttacgtaagctctataaaagctctgggacacaagctttgttctgtcctttcatgcttttcaagatttaacttttggtgcagacaaggtacgggttccctagagaaagagatccaggcatggctttcttgacatatgagaagccatttttggcgtaagctacttggtgatctaagcctggccacaatgcttgcccttgtacagatctcagtaattaaagatctagagggaacaaaatgatgcagaaacaaacgactctatcaagcaagagaagtaactacagcaaagatagtacatcagttgtaaaaacttccaggtctgttttaaagattgtgctgaagtgttcaactacgagatcaactggaacctgagggatgatgctgatcttttctgaccctccttggattctgtctaccacccaagccccatcatgaatatgtatgacccttagctttaaacttccccaatcctgctgatgaggactggcttaggaaagacccccagtgttctcccttctcctgatctttggtttggttgtgtctgctgactcaacactcatcaataggcaaacctaatttttcatgtaacattatttccctttcgggtatcatacttcaggagccagaaatgaactaagaacaccacctaactagttatagtttctaaattctcctgacacaatcaacagaaaagaacagttccatcactgcagaaaaacctcctttgcccctccataattaacccctctctccacttccctggtggctcagttggtaacgaatctgcctgcaaaacagaagacctgggttcgatccctgggttgggaagatcccctgaaggaggtcatggcaacccactccagtattcttgcttggagaacctccttggacagaggagcctggtaggctatagtccatggggtcacaaagagtcagccatgatggagtgactaagcacaccactc

SEQ ID NO: 58763 - DNA, 1538 bp, Bovine  19866880663353
  misc_feature (1)..(1): n is a, c, g, or t
ntttcctgatatctcaaaatcttccacatgttattgtgtcctgtgaagccgactcatttcctgggagaatgatcagtgctgtcgattggggtatcatggagtttattttatttttttttaatttttaaagtagttttatttatattaccactttaattattctgtaatttgttttgtgtatagtgttctaattaacctaaatttaaagggctaatcatacttaaaaaaattttttttattatttttattttttaactttacaatattgtattggttttgccatatatcaacatgtatctgccacaggtatacacgtgttccccatcctgaatccacctctctcctccctccctgtaccatccctctgggtcatcccagtgcaccagccccaagcatccagtattgtgcattgaacctggactggcgactcatttcatatatgatattaaacatgtttcaatgccattctcccaaatcatcccaccctctccctctcccacagagtccaaaagactgttctatacatcagtgtctcttttgctgtatcgtatacagggttattgttaccgtttttctaaattccatatatcatggagtttagaattatgtttacaaaacaaatttttggtcaggaaagatcagagatcagttaacactggccataggaaaacattttcattataacagtcataagaccaacgtccatcaaaaagagaagctttcttcctcttaaggacttttggtacccagttgccagatcatccaggtgtgaccctaacctgacataaccccagaggcgggtctttaggtgccagttctcacagcacatggtatagaagagtgagccgtgagcaaagacagcagggagctactggtactcctctcctttttccaaaaagtatttttggcaatgtgcactgtgtcagcgtgctttactggattacataccatatcttgttatcatgtgtaacttgtaaaatgatataaaaacgttatatttgaaccaaccccatgaaaataattgtgttcctcatggacaaatggacatagttctgtgatgagtaacagaagctgtttccacagaatgcaccctggggtcaaatctgaatgtgctttgactatcactttattaaacaaaatgggaagtttctaatgtaattgtgggatgcctgaggtctaaaactatatacctttttaagtaatctgaatatatttattacatagataagaacatagtattttattgctgcttcaacacttcttaaacttagccacaaagttttgcctttggtgtccagtatattctgtgataaaagcagttttactgtgcaacacagataatttaactgaagaaaagccttcatctttaaaattatgtgcacgtatatcgcagtatggggcatcccaagtggttcagtgaggaaagaatctgcctgccaatgcaggagacgcaggacatgtgagtttggccccgagtcaggaagagcccctggaggaggaaatggcgacccactccattcttcttgcctggaaacatc

SEQ ID NO: 58764 - DNA, 780 bp, Bovine  19866880667496
  misc_feature (1)..(1): n is a, c, g, or t
ncttagtagacatgagttagagcaaactctgggagatagtgaaggacagagaagcctggtgtgttgcagtttatggaggtgcaaagagatggacacaacttagtgactgaaccacagcactctcccccacactcccctcccatccaggctgccaaataaccttgagcagagttccctatgtttctatgtatatatttatattagttttaatttttgaaatatatgaaagcattattcattcaaaatctaaataaaaatggtacaaaaatgtaaaggaaggtggtatgcaatcactcaattctagtttgtttagattttttaaaggaaaaccgatttttaaatatgagtttctgaaaattccaatgggatttttctaatgtgttagctctttattaaagtaattatgtccattggtatttgcactactctattaagaagctcagtttcagataagcaacatggttaggcagaggaaaatcagaaaacgtgatcaataaacttagagcataacaagtgtaccaattcctggcaccatgtttcctaaagaaagacttttaatataaatgttttattatcacacataccaagtctcacacatgatggaattttcaaatagccacatatattcttaaagaaaaacctccatggatggtagagtgaaatactgagacataaagtcctatcctggctccaaactgtatatattaaaggaatattgatcttaaaacactagtacagtaaataattgaagctttagcctgcactgcctctggcattgtt

SEQ ID NO: 58765 - DNA, 1151 bp, Bovine  19866880757277
  misc_feature (1)..(1): n is a, c, g, or t
naggagggcttgttttaaggggaagtctttacaatgtcacagtgaacaagtgctaactgtaacagccgtaatattagagagccatccaagctttgttttcccattaacaacctatctgcctgaatcccctcggcaaacacaaaaaggctaagatttcagagtctctgtggctctggaactcaagcatcatcccccagcttggagagaaggcatttcagacaaaccctcagcctcacgagccaaattgcttgtgacgtgacaggtgatggtggatgtcagctggacaagaaatgacttactataaactccaagcatctctcacttcactctcaggaaatgtaacttgtatcagatttctcttcctggaagatattcagcaagtcaaaggctccactgatacttgtaaatacggaagttcttcataaaccctgcctcacgcctatttagaatggaagaattaatttggaagccagttcttgatatttaaaaatagacttttttccatttagccatttcatttttaaagcaaaaaaaaaaaaaaaaaaaaaagttggtcctactaaatatgatctggaaaactaacttcagctctaccaaaatagactttttaaaaaagggctttgcttcgaggcttgtgctatgagctagtggaattgcccctggaatcattgcctaacactccttgttatttagttaggtgaaagagcaaaaaagaaaccggtagtcatgggtttttctttctcatcttctcttattctgtagtttgcttttgtcctttattttcctatacatgaaatagagatattacttgccacatgacaaactgagattcatttaggaatactgaacaaatatatcaaattgaacttgtacaatgaaattgccagttacttaatattctaatacataaagaaatttgtaagtttcattatggtctttattcttcttgacagaaaccaccagggtatactgagaaaaaataagatctactccctagttccatctgtctgtaaaacaactttatcaataaatacttacatgtactttacaatggtgcattatttagtatttttaaagattttttttgatgtggaccatttttaaaatctttattgaatctgttacaatatttcttcctctttttttttttt

SEQ ID NO: 58766 - DNA, 1256 bp, Bovine  19866880789481
  misc_feature (1)..(1): n is a, c, g, or t
naagaataaaaatctcttaattttaataccaagggaagcattttagtgtaaatatcttcatgaaatcaattttgaggtcaaagtctcagatctggacattgccttctgccatagctggtcattataaggagtcccacttctgatcttccaccacttcccctacagttttatagcatttcctccaacattatgattgaactgaaggctgctatgcatagagaatatcagaaagcagatgaaaactaaattttagagttttttttaacaatctaataaattgtaagttcaaaagagtctaaaatatgcaaaatacaaagggtttcagaggcactccagattatatctagaactctcaggagccggtgtaaaaaggacttcagaggcagtaagtttcttgggcatctttgggtaatttgaaatgcctttattttgggtctctatgacttttacttactcatattttttaaaaattgatttcagattgaacgttttgttaatttggtatacttctgcacctgtctatgaatatttaagtgactttcatttatgtgaataaaagtagaaaaaaaaagtagaaaagtaaaaataaaagattaactgtatttaaatttcactaaattttggctctttaaaaatagaccaatattaatttctgtggatgaattaatcatttacaactttaaactagatccaatgtgtataaaatggagggaaggtagaaaatattccgttgagaatttctagcctaatatacttatgaatgactttggcaagcaaggctcaacaatatttttcttaatgggcgtatcactgaataagcaatggataggatttcttataggaaattacactccattcaaaaatattcaagcatggatatcttagacattgcaaactgtcattatatctctttggtaacagccccagtaatccaatatggcctcatttataacagaaactttggcaagatgcagcagaattattctgtgtcacattaagtgtttgtgcatgtgtgatataaacaaaaagcattgcttgtagtctttaagagttgttacattttgtaacttattattttttaaatgcaaaaatttttcttcaaaaattacagtcttggcaagcaaaatcatacttggccttgaaagccagaaaggtaaatatagtaattataaagattttcatccattataaacttaggctaagaaaaaataaatttttctctaaacatacctaaatttatttcaatgtattatttt

SEQ ID NO: 58767 - DNA, 2227 bp, Bovine  19866880822801
  misc_feature (1)..(1): n is a, c, g, or t
ncatattaaaaagcagagacattactttgccgacaaatagtccatacaatcacagctatggtttttccagtagtcatgtatggataaagaaggctgagcattgaagaactgatacttttgcattgtgatgctggagaagactcttgagagtcccttggattgcaaggagatcaaaccagtcaatcctaaaaggaaatcaaccctgaatattcactggaaggactgttgctaaagctgaagccccagttctttggccacctgatgcgaagagccaacttattagaaaagaccccgatgctgggaaagattgtgggcaggaggagaaggaagcaatagaggatgagatggttggatggcatcaccaactcactggacatgagtttgagaaaactctgggagatagtgaaggacaaggaagcctggcatactgcagtgcatggggttgcaaggagtcggacatgacttagagattaaacagtaacaacagcctgcatcaggtcctccccaagagtaggcccacccccagtaacgcctcctccgacctactgtcctctcactgccgtgtccagcccatcttgacatccatccactttcctggagcaggccccctctggttagcagatctgacagtggggacatcctccctaccacagtagctcttagtcttctctcttgcaataatccttctgaataaagtctctccttaaatgaaatgctggtgtgtggggttatttttattttaacatacatctgtgcctttcaaaggaatattctactcaactaatgcaattttttaagccattgctctgagagcaggacaattaatcctccatctcagctgctgtgcactgagacaatggtccaaatgggtcccacagaaatctccacggagtcatagtccctttccttggagcagttaaataaaaatcacccctctcagactccagtgaatttaatcttgccagctaaaattaacacaactgaaagtaagtaagaatttcaaggaaaaaaacttcaaggaaaggtcagaacagttttaaatgtatgagattgccatagatgttggcagtgtgggaagactatttttacttagaggctgagataagatagaagttatcctacccctcttactcacttgtgccctggcatccataaaataacaagacctcatagcctatccagaaactattaaaaccactacaccttcatttggagctttttagagttctgatgaggacaatttcaagttataactgggttttaatatttttcataaagcatagtagttaaccattattactttaataatcaaatctactatgagacacaaataaaagatgtcagttacatttacaaggacgaacttattctttgatgttaggtaggtccaggttttcaaaacttgggttaagaaagctctttggattattgaggaaatttggacgttctctgtcaaagtttaagtattcgtttcaaattttgaaagcctcatttctacccaggagagttcacttttcagattaagagatttgaaaagcaagatagaactcaaagcttaaaatgtatggagataggcaagttttaaaatctctcctgggctgaattctcagtaataaacattagatttttagacttgactaatgtcatttgccattcaacatctatcatacaacatagtttataaatggaaaagaaagaaaaacaaatcaatttaatgcatgtgtgatctaagacctgatatatttctctaaccactagcaaaacagaaaatctgctttatttaacatctctttttctttgttagcttccctcagggctcagaccataaagagtctgcctgcaatgcaggcacagatttgatccctgggttgagaaggtccattcttgcctggaaaatcccatgggtggagaagcctggcaggtttcagtccatggggtcaaaaagagttggacaggactgagctactaacactaacagttttgtatgttagcataagcaatgtggtcatttgataaaggatattaaaagactgacttaacgagaattaagtgggcccatgtcaagtcctgtcatcttaatctccatctatttcttgttcacataggaaggctttcttatctctccttgctattctttgtaacactgcattcagatgggtatatctttccttttctcctttgcctttatcttctcttctttcctcagctatttgcaaggcttcctcag

SEQ ID NO: 58768 - DNA, 456 bp, Bovine  19866880872400
  misc_feature (1)..(1): n is a, c, g, or t
nactagaatatgagtaccgcaagcaccatacacagaacagcacataataggagctaaaaatatgctgaatgaatgaatgaacgttataccacaaagaaagtctaagtcatcaactcagctgtttctagaacctgtgaattctgtgccccgttgcccaggggcccttgccaggcaaggcgaagagtcaggttgtagagaaagaactaggcaagctaaatcataaagaactgttatattattcactaatgttctattatactttttcctttaaaaaccaaaagctttagaaaaaacttttacatagccttagcttgatattgccaactagatagtgaagaatcagaaatatttggaaaaaatgccccaagttttggcttgacttaatgtttatctgtactgcctattttctcctccacactgtgaagcttcattagtctgatttacggctgctttttt

SEQ ID NO: 58769 - DNA, 1413 bp, Bovine  19866880886752
  misc_feature (1)..(1): n is a, c, g, or t
ncaagaaagaatttcccttagggtgtgtaagtattcagcaagggaattctatattacacataaagagcctatcattttatcataagcagttgtcacacactaagaaacagatgcttttgaaagaaaaacagtagaaccttttctatatactgaaaaagcccttgcaaaccttttcagtaacactgacaacagaaggataagagctgtcaccagaaagaaaactttatgacagatttgtgtgaacaggaatgtttcaatcattctcagtcacagtaaacaggttccataattggatggacaattttatcttaccttcaacaatttaaaaaatggaggtcattcgctgtgctttcaaaacttaactatttcattcgaaagctttggcagcagtttagacatgaaccataatgaattattgttccttgtgattgcagggtaaattttaacactaatctttttctatgttttctgaactcagaaatcacatttcttattattatatagattctgaaatagcatttcttcagtcactattgtttcaatcaataaaaactagaaatattctaaattaaataatagaacctagtctctgactctgggaatgctgtggggaatctgtatgtcccacagatttttctctaacagtgacttttcccctctatgatgaagcactccatttcaaaagtgttttatatatatatatagagatagatatagatatagatatcctcagttccatttccctctgcatattatctagcaatatggactgtatttagaaggtgttgaatggatgaatgactgctaagattctgattctttgcacttctcctggtacttctgctctactgaggacattaattgtcatagctacagaaattccaatttagaaacctatattattcatcctcaaatcccacttggtaccaaaataatccaagttatttaaaattcttatgtggtagtactgcaaagtagatgctacacttctatttggaggagtttgcccttcatcggaagaagaaatataagcttctttctttaatttatctcacactgatgaggattaagtatttactttttgaaaatacaacaggaactgcagagattaaagtatccatataaaccattgattacaaagcagtagatccaattgagttactttaaatgcttattatcatctaaaataatgtagtttcctatttggcaattattcttgactcacttttattgattagtcataagcaatttcatattttagtaatttcatatttgtaattattcttggctgtgaaaatcttacatgaaacagcttgatttcagttaaactcaaggctctgtttacaagtaaaaaattacaagtacaaaatccacttgtattatctgctttaatgatttgtgtgagggagaatg

SEQ ID NO: 58770 - DNA, 4406 bp, Bovine  19866880993467
  misc_feature (1)..(1): n is a, c, g, or t
ncgaaggtgaaagaaagaaagaaaagctttttggaagctagctggcagtctctgtcacatctgctttgttcagcgacactgtctcagcatcaggaaaggcgcagttggaagacactagctgtgggcactttgtgtataactacttcagggttctccttgtgtctccatgtgtctgtgtgtattcagctgccaactccagagctgtttagggctcaggtgtagctctctaattgtccttacctggtgccataatggcatcatcatggcttactgaaaaacttattcagtggcagccagtgttcacacataaatgtgcccaagtgagagtgagatttaaagtttgccttaacgaccccccacttccacacactcttctacaacttacttgattatttcataagtcctttccttggagaaaagaggctggctctctggtggttaaagtgaattacagtatactatgaattcttttttaactgatggttgctattttttttcttccttgaattccaaattaatgagatttattaaaattaagtttataaaatgctaagctaatgaattataatgaggaataagaatattcttttgtaaagttgccattaagactgaaagagagagctctgtgattaagttcacattgtaattcaagtgactaaggaaagcaaaggttataagaggcaaaatgttcacggagaaaaattgctttactcccatcagaagactctagaggaaaatattactttaatttaaaattaaccagtgcatggcgctgtgcagaacaagcagaccttgatttgtgagtttacaagtccaggaatttctacttgaaaaccgagcagtactgagaaagatgactcatcatgggacaagggcccctcgtgtctcgtgtggtcatgaaagcaggtaccttaccaggttcagcctctcagaatatcgtgactgtcatgattttggaactgttcaacccctttttcatgcctctttcacctcagcctctccccacagcagatgcttggtttcccgggcagctgggcttccccaaggagtgtcctgcaagcttcctccactcacccatgccccctggcccctcggtcattgcccctctgcccggtggcagcaccacaaagacttgtttctgcggcaggtccaatgcccaaaatgacagtgccatccactgacattaggcctggtccttctgtgccctgttctttactatgtcgagagtacctgctgactcggaatttcagggcattctgctttcactgaggcattttattgtgggtgtatcttcattgtaactcagctatgacccatctgttagatatggtcgtcttgaagaactgttttgatttgtaacttacttaatgatgaaatgatttatattcataaactgtatgtggaaatatgtgagcaaagatcattatagctaccattgtttacttttatgttccattcagttattgaagtatgttacctaagttaatcctctcaaaaatggtttctgcatttttatatttgtatgcttgttttacagatgagaagacaagttttcaaagttgtgtaagttgcacaagctcacccagtactaactaagagacaagcctagatcacaggattgtctaggaccaatgcccattgtgttaataacaactagtatatcttgacttcaattacatattttcactttactctcaatatgaagtgagcaaactagaaattttttatattttgaaggaaacaaagatcacttcatctaaagcaattttttaactgagacccacagaaatgaacggagaaggcaatggcaccccactccagtactcttgcctggaaaatcccatggatggaggaccctggtaggctgcagtccatggggtcactaagagtcggacacgactgagcgatttcactttaacttttcactttcatgcactagagaaggaaatggcaacccactccagtgttcttgcctggagaatcccagggatgggggagcctggtggctgccatctatggggtcgcacagagtcggaaacaactgaagcgacttagcagtagcagtaagcacagaaatgaaatgccccccttttaccagaagtcagccacacagcacagacgagaactagaatgaatattcttgctgctatgacatgttacctcctgtactataacctagatgactcagtgaatatgccattttagaatctgatctctttcaaaccttgtcctttcggattcttagtggaaatattcttaagcttcatagcaacatactaattggtaatattatatcattaattttatactctgaattcaagagcctcataaataagattaaataggataattcatgaaaatagtaactggactcagacttttaagtagagcatcgaggaaaacaaatatgcaatcctacttgaccacatcccagattagagcatgtacatactccaacagaaagagacccactgagaaagacactctcagcagaggcccccacagaaggggatgcacccacaccaagaaccagcgctgctgctcatctgcctttgttgtcatgagctaggaaagtctccagcttcctccaagtcaagactgatcactgtgagctttatgagaatgctgcttgtcactatcagcagtgcgctgagcaatctttttttcatccacagtgattgacttgtgtgattctgtccttctgatcaaggacattcgtttttaagacagctggccagggtttgggatgcattctacagctgtgacggggccaaggtacatgcccacatgggatggaactcacgctctcaacttaattagctttaaacctaacacactgagccaaacggccatggagcattccccagaaagctctgcacatctacgcatgccactcattcttaactgtagacaagacaaatgcactctgcacatacaaaccactgtcatatgtcctgtaaacagtttttgagaccagtctgagttaagtccaggagagaaaatgtagggatagatcaatctaacttagatcaatctaactatttgaaatctcctcatgggacatgatctgattaaaaactttcaataagttaggaggtacttgccaaaagcaagatcaaagcataatgttagagaattccttctcccctcaatactttgttactgtgattgttcagcttaggttgctgattctaaattcatcgatactgaccttcaaatcttgaggctccttgaagctaagacacacaccttcctgaacctctctcagacgctcagacagcatatgtggtctaattagaatttagcttttgactgataacatgtgggtaaatctcatctgctctgagtttttatttcatcgtcttaaaggactcaggtttgctcacagctcagataccccaatttctcaatttctaaagctttacaactacattttccttcatcctgttttgagttgacaaagtatctcacagactattcactgaaatattaagtctagtctgtgctatgaccctcaaggctgtacatgaacccctctctgttatgtcctcttcttcctggtttcctacttctctcttccttgttctccatgtctctctggcctccttggttctgccatgcacactggtaccttccagagcaacctttgccctgactggatggttttccctttggatgctgtaggacctgctctcccatttctgttagcagtttctcacacatcaccttctcagggagacgttctctgccacccttcggaaatatgaatctctgccccagcaccgggtccttatctcccttctttcactttctgtattcttcttaccatttactgtccaaatactggattatttttcttaattattttgtttattacttgttcctgccctcatgcaagctctattaggggaggaatttgtgtctgtcttattaatatttatagctacatttaaaccagtgcctggtatggaacaggtactcattaagtgtttgctgaatgaatgaatgcagctaatctctgtctaggggcccttgttcatatatttctgatactgtgaatggtttggctagttgtttacattatgtatttggaagggcccaaccaaagtgagcaaattttctttttcatttttaaagctggccttctggggtgaggagagagtaattgtacttcttttcaagctctaaatcttatttttatgtgtcaaaaatacaggcattattccacgctataattcttcaaaatggatttatcggtggagccattactttttgtagcttccacagctaccaccagagagaaatcttggaaacatagagtttaaattcatgtcccaaatgtgactctcctgaatgcaaattgagtgtgaatttattagaaaccattagtgggagtaaagtgtcct

SEQ ID NO: 58771 - DNA, 1816 bp, Bovine  19866881051019
  misc_feature (1)..(1): n is a, c, g, or t
natattttgtccagtttcatagttttttcaggaagaaggtaaccctgttgtttggtcattttcagaatcctacattataaaaaattgctttcatctttttccctccattttattttttaaattataaaaatataacacatttagaggagacttggaaaatacaaaacccagttacatttagttccactaaccattacaattgttttttaagcagagaaattaaaatttctagttggagtttaaatatccaagtttaaatcaaaatttaatagaatgaatatgcagagaagcaaaaggatatagtagccctgaaaatgcactatgagccaattcaacataattaagatttatacaattttcatacaacagtaagatacaaattctaagttcccatagactaagagacactggaatatattcagggagacaaagcaaggtgcaaaaacttcatggtctaaaggtattgaaatcacatagagtctgttctcttattaccgtggaattgttattatagaaattcaatatcaaaagatatttgaaaatagcccacataatttaaggtgcaatgtgacatttaccaagagagatctttgacttagccattgaaagcctcagtaaagttaaaagactgacgaaacacagagggtgattgcaaagaaaaaaacatttaaatgaaaaattaacatcaaaatgaaaaattaatatcaagtatactttagaaaccccatgtatttggaaattaaatatgaaatctatagacccttattttaggctccatattttggtttagtaggaaaaaatgaaatttagtttgcttatttaaaatacatttgaaccaatagtacataagtgttcctttctctgcatctttggcaacagttgttatcttttgtctttttttataaaagtcattctaacatgttaaatgatatttccttgtggttttgatttgcatttctttaagttaatgatcctgaacaccttttcatgtacatgttggtcatttgtacgacttcttttgagaaatgtcaataatctgcctgtccttagagataaccctcccaacctcagaaaattatgtccacctcttgaaaatcatcagcatgtttttcaccaaatgaaaggattttgtgtagctttaccttctgaaataagtactatgaaaacaatacagtttattttgtttggtttccaaattcaaaattatatttgaaatattctttcgagtttgccacacctgactctctggagatcttgtctgtcctgcacatccacctccaggcaggccagtcacgggaacactctccagattaacctaacctcaacatctaaccaaaaaattctctttatgctctccaccaaatatgcatttgatatctaaatatgtatattttttattcacttaaccaaaaagatttagatattcatttgatcaaaaatacaagtgcttcacttagtgtcgtgactttattaaaaaaaaaaaaaaaatcaaacttctagaggtaaaaagtcacatgcactaaggcgccagagtagtgtatctgataacgtggagagagttgccaagttgcacttaaaaatagccagactaactatcctcattgtgatctgttttgtgtgacagggcttttcaccataaactctgaagcccccagtatttgtagcaggatgagactaaaccaggcaaatccattgttccctaactgtctttgtatttcttttctgttggaaaatgaaatgactctgatctttgcatctcaattttcccttaaaaagacattttatgagaagactgcagcttcaggaaaaaaaggca

SEQ ID NO: 58772 - DNA, 1240 bp, Bovine  19866881080483
  misc_feature (1)..(1): n is a, c, g, or t
naatttacattcaggcttcttctcataaaaaattgagcacacaaatgacattataacttttattctgtaagatagtgtacagctgaaagactccagggtttctaatttctgtaaacaattactctgtcacaaagaagaagtagatatttgaagtaaaagcagtgagttggagattaacaaccctctgaaagacacatgatccccccccatgctgagttgagtcctttctgtttccacagagcatctgtacgaccaccacagcatttctgcactttttcttcctggcttcattctgttgggttttgactgaagcgtggcaatcatatatggctgtaactggaaaaattagaacacggcttataaggaaacgctttttgtgccttggatggggtaagcgtattgctattctcttttatgctcttgttaaaatgactttgaacactgctgtaatgaatgaagttggaaactgtgattatccccaggctacttttctttgtgtctaattcagtatgtcgaagtggaaatataggatgttagtcatattggaacattctttgaggttgtggaactttaaaaagagtgaatactggatggccacatagctggtcagttggtaatcaatagtgctcacatggtagtaaatgagatgtaaggtatctacaggcaagaaatcaaaagtattctctactataggttctgaaaatgcaaaatgtcttaagaagttcagttcagtgcaaagttcagaaagctttaaagtgtctatttcaagagagctattcacgacacaagagaaagtcatctagaccatgaatgaaaccacatggctagtctatggagttctcaaaggaagcacaaaaattgctgacaggctgaggatgaattaatttttcattagtaaaagttcctctcacagtgccgtatgaaatgggaatctggaggacctatacatttcaaggggccaattctaaagtttaactgaaattaatgaattcatttagtttaattagaattaattaattaaagaactagttttagaaaaagctcaggattttttcacgtttgcctttgagtttcaaaagacttgcactaaaaataaatgaggaaatttggaccaaagatataacaaatgaatgctagaggtagcctaaagaatcacaaataagtggacttattaccatgtcagaataatccatgctagaaaaacacaagaccaggagcaccaaggttatccatcagattt

SEQ ID NO: 58773 - DNA, 663 bp, Bovine  19866881125295
  misc_feature (1)..(1): n is a, c, g, or t
ncttagttattattatgcattttcagagcactttataattaagcttcagatgaaactctctatggaaatgactcatcttacagaactagatttctatttgttttttttcttttctttttctcatgatattttagtttcccctacctgtattttatgacattccccactgctataaactatgctcctacttcatttttcagcctttacattaatttgactccttattcagattccttaataaaaatgctaattatgatcatatctaatagtgactgggaaggcactccaccacctccttcctccctccagctggacccactcacatccatcataagggtttggtttgtcagccagattgcagtattcccagctgccctttctccaagcccgctaaacccattttgggaaataaatccaattcacaagacactctatcaattattccagaaaacctcagatgcagaggcacattctgtgtattttctaacgcaatatctttgggagagaaccaaagctgaagatgaaaccgaatttattcttacctgttctcacagtattttacttattgctcctacatgtacaattagagcttctttggtcactcagccatatccgactctttgtgatgctatgggctgtagccctccaggcaagagtactgga

SEQ ID NO: 58774 - DNA, 1105 bp, Bovine  19866881263786
  misc_feature (1)..(1): n is a, c, g, or t
ncctctctgtgatggctggtgggttctttctggaggaggggttgaaacagttgctgaagttacagaagtaggaaggaggtcagaggtttgagtacattcaaagagtctaattctctctattgaaaactggagagtgagataacatggaattgctagacagctctgaagcctctatccagctgaatgaccatgcatttatctgctcatcaccaccagaaaaccaaagacctagagcgtagacccctgtccaactatgaaacaagaattccagccccctgcaaaggcttctttctgggtattttattgggttccatcttccatggaccacccagtacacacaagcttccgtttcctcccccttgaacttctcattcccctccccttgctgccgtgccctcagaagactgaacccagctccatggaaacaactcacactactgccaggagcaaatagagatttcagtccacgggctggggtattctgaaatcacactgtatcaaacccctcattctgaagcaggatgaagatgtgtctcaagctgcttcttatcttttaataaacaattacttttgaaagttcagaaccctaccaggctcggttctcagcttctcagcatgtgggacagacaactatggtcagagtgctgtagtccagactggacaaaaataacagctggcagaacaaactatttctagtaccattacttttacaagaaatgactagtatttatggaacacactcatatattaggaaagaatagtttagcccagacaaaaccaaggtaatcttttctttttctttagcatgtcttaataggctttgctgttgaggaatttagggtcaaatatttcttgaggatccagtgtatgcaaaatcttgtattaggcaagttataagcattttatagaagaacataaacatacaaattatttaagtataacacacacctgcaagtagttattacctatgtgtgtatttagaaggatttctaaaaggagcaagatcaagagggtaaggacacttcaagtactgaatttaagttgttgggtttttttttgtgcgaataaaacacattcttaaatcacttatttctttgccaataca

SEQ ID NO: 58775 - DNA, 1946 bp, Bovine  19866881304522
  misc_feature (1)..(1): n is a, c, g, or t
nttgcattatttcacttaggttctacaacattccaatccatactttccattccatttatttatataggtagatagataaatcctttctctgcttgtctcaaaatcctataagccaaaatttatacttgaaatatcaatagactttttattaggcagagttgaaagcattctatgtactgaaataatacagtgaattttactagtcgagatttcatataatatttaaaactaaggtagtctccaactgataggtaaaggttgagggcatagatagctgaatttttataaaccccatttcttacaactaattgaattaagaaaaagctacatatgagagcagaggcttttgagaaatcagatactttattgacagccaccagaagtacttacttgtttaactttgctggttgaaaaaatgatacattccacagaaacctgagttgttgtagaagaaaacctttctctggcagagcctgcagaatgtgataaaatgctttgacagtatgttcgagttacatgaccttcaatgaaaatagccaagtaataaattagtcttcccagctgctagtgaataatcataacagccaatagtatgtgaaaactaacaccatgacagatagtaatcatgtaatgtaacatattgatcccaagtgctgaaggatatgagtgcagaggcctgaaaggagctcagttaagaaaacatgtatttcatcaaaaatttcttgtgaaattagcactgtgttatgcaaagacattgtggaaaccgttttaagtcatgctctaatctgggaggatacaagggcattgtctggtgccgtggttttactgttactgtctttgagtagattttgaacaactatactttgctcaacatcatttatcccaaaaggaggcattgttaggactgagtggagaccttgactttagggtcaaaacaatgacagagccctttctcttgtctttgcttttagttttttcaatattctgtcttcatccttccctttattctacccatgattaagtatactaggattgcatacatattgggagttataggagttactggagttggtggaagtcatgtccttctcctttgaaacctctcagtgttgaccagtcgtctaaaaggtggccagtcttagaaatgtggcctttaagttacttcagcaactaacccctgatcacttctccagggacagtgctttctacttccagtgcttgcattgttctctaagacccctacctcctcatgtctcacacatctttcttctaacctagcagtcatatcagtattgttacacacaactctgcgtaaactgaacattatgcctcttctgaagacctggaaatctcttttggtgagatgtatccatttcaatctcatggtttaattgtcttcagttcactgccaaaattttgtatatgagaaattccagtgatccctctggtcttaggtacagaggctaagaggattgctactaattttatatatatgttgcctctggtggtttttcatttgagaaatttctcagttacctttacaatgattaacggttctgatcggagaaacagaactctcatattttttaacattccaaagctgtgccccaaacatattcagttgaaataaatggtgttggaccaactggctggctgaccagtagtgcactgagaacgagcctgtcctttatcttggatacattaacttaaacttccaaagcctctctgcatcttatcttggctctcaagcctgaatattctgtgtgcaatacaaaagcccagagccctcaaaatattttccctttcccatgaggcaaaaatattttcactggacattatattttttagttggaacttaaatcatatttttttcctgtaatactaatgaaaatggttaaattcttatttatgaaaagctcaaaatatttaaagatctgaacaatgta

SEQ ID NO: 58776 - DNA, 1155 bp, Bovine  19866881305906
  misc_feature (1)..(1): n is a, c, g, or t
nactaaaatgtcctagtaactggcgtatctgaatcccctcctgaaatacagcagcaggccaattaattaatatgaagctcagtggaaaggacaatgctacctggagaactaagcaattcaggcagccttgcagcatttaattaagctacagaccaaggaagagcattgatagtaatttagagcatcctcggccagtgaagcgtgggctccaaggcaggccttctccagtctgcttttcacttgtctggcgctctctgctcacccatagggaccaacagcatctactaccaggctctggtacctacttacaaggggatatgggcttccccggtggctcagaggtaaagtatctgcctgccaatgcaggaaacatgggttggatgcctgggacgggataatcccctggaggaggaaatggcaacccactccagtattcttgcctgagaaatcccatggacagaagagcctagcaggctaatccatagggtcccaaagagtcaggcatgacttagcaattaaacaacagtgaacccactttcagacacatatactgattctcagagcgtgagtgctttgactcgctttccaagaaacaggtaatagagcatgtggggactaaggaaggaaactggtaaaagagtgtcttgaaagtgtggcacccacagtgaatgtgttgtggctgtgagcacttcatatagaagagctgtcaccagcgtggaggtgtctcccctctgcagaccccagaggcccaactcaggctgggaagcattcatgcccctgtaggcttccttggtggctcagtggtaaaaatccagcctgccaatgcaggagacacaggagatgcaggtttgatccctgggtcgggaaaatccgcttgagaaggaaatggcaacccactccagtatactttcctggagaatcccatggccagagaagcctggtgggctacagtccaaggggtcacaagaagtcagacatggcttagcaacaacaagcccctgtagcaccttctcagagtacccgtgctgctcagctccaagctccgctaaacgggaaccacccgtggccctccagaattgctttggatgagagagcaggtccagggaaggccagataaagggggccacagagaaaggctcattttaggagaatcca

SEQ ID NO: 58777 - DNA, 939 bp, Bovine  19866881307531
  misc_feature (1)..(1): n is a, c, g, or t
nagattttttcccctgggcattttaatacttgaaaaagagtttatcactattgaaattctgacagtacaaggttaaaacttacatttaacctgagttttattgtataggatggtcttggattctttagcttaccgattccatttgtaacaggttctaactttcagcagaagagactccaggtgaatcagtggaggactaatgccaaacatggaggcattacaatcacttctttactgtttccactgagaagagacacccatctggacatccagttccatggtccagtgtgagttcagcactgttagaaaagatgaggatgagaggagacacagagactttgaagttaggtctgttggagagagagcttaatccaaaaaagccaggaccactggaaagtgagtgaagacgatgggaagtggaaagccacagggaccctgggacctgtgttcctttaccatcactgagcgtattcaaaagttcctgaaacatttctttgtcctcagaattataataatttaccttatttcaaaaatttcacttaaaaaatatcttctgggagtctttgaaagttcaggtcatttaaaatgcatattattaattttactgagttaatagccattatggtctagcagtatgtatagtatatatcagaggacatcttaaacgcatattatcataaaatgtatatttaagggctttccacctacataaattgaatttaataaattgtaacaactacagtgggactattaggatctttgtaaaaacacagttcagggtcttgttaaaacatattttctcttggtgtcatattctacttagggaatttgttctagtaaccaagagcttgaatgtgtttgtcttgctgagttaaaaaaaaaattgaaaagtaagattttttttttcagtatacagtctaagtcaagaagaaagcaaat

SEQ ID NO: 58778 - DNA, 1438 bp, Bovine  19866881378796
  misc_feature (1)..(1): n is a, c, g, or t
nttgttacacaagtggctgggtggcatgatattcatgctctgacccctgaagagaaggctgaagcatgcattgtctaagcaccaggacttgccagctcttcactgatatcattggcagatcaatcttgattttcattacagtctcatctcttgctcaaagcattttctaattgtgtcactaccctgttaccaggcaaaagcaaaaaagatatatcttttaatatgtctcccagtccctttggcaatcttctagagagtaaagttccaataatttttccaggtgcatctccctttgtcccgtttctgacaccctgtgtctgaaacagccaccagactgctaaccatagctctcttcctgccttgtttttctcctttgcacattttcctcattcatctacctcaatatatttattttttgtctaccctttctttgctggctcacggaattttacctgaaccacccagcttccatgtatcttaagatgctttgaattgcaatatcactttggttctgtattttaagctacttaagggcagatactgtgctgtgttcaattttctctctcttatatggttctaatctagtggttgggaaatattaacataattacttactaaagcttccacctcataaagtcagatttagtttatgcagcttatggtcatctgataaatactgggcagtttaaacctcaataatcccattattaattcttttacatattttcccactgttaatccttttacatattatgtgaggctttatgtaggctgggactctttcattgctctagaatctcatgtctattatccttttattctcacaaagaccatctctttatttggttctgggaataagtatcaagcatctcacagcttcctaaaacagtgggtgtatttctatgtttaagccactttttaagtcagatactgacatctgtccccttttccaagtgattctcatctggtgccctttttttgggaaaactgaaggggaagtggaagcaggaccctgctggggggctgggagagatggatcgccatcctaagtctccgagttcccggtcaggcagggtcttggtggatccatgctgtgaactgcccttgacgccttgtgagccctgcttgctgaaggcaagtcccctcagtgagcccctattgagctctacttttcccaataacacatctggatagggacctgaataaattcacaaggaggctagcttatcctcaccatcagggaatttatgttttgtttcaggggtatgatctgccatgcagaacacaacacatttcacccttggtcatagctttccatcatgtagctttatttggcatccaacacagggcaaggcttttgtatttgtctaagagtggattctcccaaagggaaccctcccacactgtgggtgggaatgtaaattggtgcagccactat

SEQ ID NO: 58779 - DNA, 847 bp, Bovine  19866881498393
  misc_feature (1)..(1): n is a, c, g, or t
natggctgaattgtttaaatccatcagcttagcttaggtacatttattcatggatgaatggataagtgttaggggtacaaaggagggtattaagtgccaaattgaagcttcaacaatacctattgctgccaattggcaggactccaaatatcccctcaccaaacagatggtatgaaagttgcagcagtggaaaatatgacaggttttaaaatgcatgcaatgaattaaacattatggagttgaacctgaaagtttaaacttttatcttaaaattatacctctactaataaaacttcatagaacctttgaatattattaatgcacccacattattaatgcacccacacaaatccaatatgtgtcaagaagtttaggtcaagttcttaaaatatactatgaatatgatagcatatgttttttttattgatcaagtatgctaatatcatctaaatgaaggctcaaagggaaaaatacagagccatgttggatttatttcattctggatactagaaaaattcaaagaacatggaaaaatagagattataggaagcataagtgtttaaattattaagcaaatgcacaaataagtatcttattatctaattattttcctttctcttgggttctttagaagattacagtcgaagtattgttcttgatgctataggattcagtgcctttttaaataccagcatattcatcagactttttcacctgctttataaatataaaatacatttttggttatcatgtatattcatagtgatgccttgataagaagtagatagtaccaagcgtctgtcttagcaaatgataatccggggtcacaaaaggtagtttcagaagc

SEQ ID NO: 58780 - DNA, 750 bp, Bovine  19866881560884
  misc_feature (1)..(1): n is a, c, g, or t
naaattctcttattttttctaaattggatttagcccccaaatgcttctttagaggaaaacaacatgtatgggaaaacagggcaaaaaatatattgtatagccattttggaagttgggtgtaatgaaaattcaagaatctatgattatactatacatgtaacctgcctcatctaactctagtattaacaaaatgcagaacagagaagaatacagcatgaaaactcttcttatagattcacagatttttattcactggtgtattgtttgaaagtttggactgtacctctccttggccacaggactggtaggagagtgtataaaccctcccacgtcattcatgaaagaaaaactgctatgtagctaaggcatcaggttaaactgatccaggaacattttcagcacagtgcagaacagaacatggtataatgatacaagcaccagagccttctctctcagaatttctccttgcgttttatctccctctgttctgtctataccccctgaatagtgaagagtttcctgaactcttaactcattcttattgtttcttttacaagaagcatatgttgatcttatttcatgaggctctatttagggctctattcctgtaactgaaagaaataaaatatgtctgtgccttatctttcaaaggcagaacctacttaccattgactcttaggatgcaaagaatacagatgagttctgtatgatctgagaagcaattagcatattgtgaactcccaaatgtta

SEQ ID NO: 58781 - DNA, 626 bp, Bovine  19866881717732
  misc_feature (1)..(1): n is a, c, g, or t
ntcctcaaaacaccccagttatttaactcaagtcatacatttttacattctgctgaaaatgattattcagttaaagaactacaatactgtttaagtgtaaaagtactttttggttaaatttttttgaagggcataacatgtagagtcattttcacctaatgttctcttcgattattgtctaaaaaagctttttagtggattttcgagagctatgttacacttgttagcaatttacatctgaatttaggaatcaaaatgttaatcaattaggccaaaacacaggaaatcttattacaattaggataatgaattaaaaattcgtgcttttgatgtttcaaagttttgaactcatagagctttgatataatgtttaataaacacatatttctactattataaacagcctctcaatccccaagaaattaagtcaaaagcatgtatttctacactggaatacataatacttttattcagaacaagatatttttacttttaaaaataattttgtcagaaattccccattttattaagaaaaaacatttagattatcaataagcaactttaggtcacaacataaacacagaaagagaatcaaaatcatcaccaaccatacccttattatgtgt

SEQ ID NO: 58782 - DNA, 868 bp, Bovine  19866880563569
  misc_feature (1)..(1): n is a, c, g, or t
ncatgttggaatctaattttgaacatgataatagctttgtttaaaaaaaaaagtcttgagttaacagtgaggtcaaaaacaatgaaatgaataaaaaatacatttactcagtcaacagaatttatttgttttggaacaggctgtttctcaactccgctgagtgttttggaaaaattaactgtattgttttttcgaccctggattaaacttttctctgtgcttccactggtcccataggtcacagtgccagatttccacatggatgtttacaggggtcacttacttttccctttgcttctcttacatgtgcttgaagatgcacagagagctgtcttctttaatcttttaaaaagtctcccaggaatttcaatcttgcctcaaaccaatgggcagagagattgagtggaaagagccagagcgtggccaccaaggaacctggacttgagtttctgtgtttcccccaaaactgactatgacctcagatatggccccttaccctctctgagccgcagtctgtgaaatgagagaatgggactgaggcagctgtcaccagccaactggcctgctgctgactggtttggcccacgtgttgttttttttttaattaagtgtgtatttctttgggctgtgcagggtcttcgttgctgtgccggctttctctgcttgtggtgagcgggggctactcttcgctgcagtgctcgggcttttctttgtggtggctcctcttgctgtggcttgagggctctagagggcgcaggggcttagttgctccaaggcatgtgcaatcttcccagatcagggatggaacctgtgtctcctgcactggcaggcgggttcttagccaccgtaccatcagggaagtccccag

SEQ ID NO: 58783 - DNA, 1015 bp, Bovine  19866880570560
  misc_feature (1)..(1): n is a, c, g, or t
ntgatcggacgtatctaggtgtcaatcctatgctaggtgacctacacagcgtcggcacaaccctctgaggtatatgaaactgctaaccccattcacagatgagaacactgaggcaaggagaggttaagtaatgggccccaactcacacagctggtgaatggccagttttgtctggttccaactgagtctggtagtgacccttgactgtgagccttggctgcctcttctacccagtaacacagtgatctcatgagtgaggggcctccctactcgcagtcttgattctgctcacaccatgctgtgctgggcggagcagggacactaggtggagcagcaggagggaggttcgccccaggggagcttgtggtggcctgaacaggagggacaaggaacacccagtgtggtggctggccacagagagagctggaaaggagtcatggatgggaggaccacgggctggttcctctgcttaggaagggagtcctggagatgggacaatgcctggagcaactctatttggcatccacacccccaactctgtcctaattgctctttcccttcccctcctcagcccccagtgcctggtgctcacggggccccccaacttccgcccggccctggtggacttcgtgggcaccttcacccggaacctcagcctgatgatctgtggccatgtgctcatggtgagtgtcccctgcagggagggtggggctgtgttcctggaggagcctttgggcaccgggtccacccccaagggtgggcgtggggtagggtgaggtaggggccggaggaggggctgtggagcctggacaggctctctccccttccctgtccctgtcactggcttctccccactgcccagcccctcacctgctccctccatcttcctcctggccttccccctccctagtgaaaaagtgaaagtgaaagtcgctcagtcctcatgtgtctgactctttgcgaccctaggactatattcttcaggccagaatacggagtgggtagccttccgctt

SEQ ID NO: 58784 - DNA, 836 bp, Bovine  19866880633920
  misc_feature (1)..(1): n is a, c, g, or t
naatgaaggcaaggaatgtggaaggggtgaggtcagggaatctgggggctatggatgcattaggtggggtcctgtaggttattgtaaagacccaagcatttacagagatggggagccctaatgagtaggcttccagtcatgccttgaatacctctaagtgataagaaactcactacctcagtggtgaagcagtcttagctcggagtggcctgcagggccatgtgcaacggacttgtccctggaggggcaaggaaggcagtggctggaagtcccaggccatacaaccccagagctggggagggttgctgccccttgatggagaaccccctcccctgcctgcctcaccttcttgtccagcttcctgcccgccaggctcagcgtgatgacccggttatctgacagctcctgagcagcgatctgcaaggccagaggaaagttgggggttgagacctgtctccaagactccctcctccgacctcctttcaggcagggtggacatgggatgccctagcagtcaattctccggggtggggcagggagaggaaaagtagtaccatgtgacttggcataagcctcttgtcttcctaaaacctcagttgccatcttcggggaaagtggggctaaataacttatctggatctgagaatcagaaagtgaccccaacgtagctcaagacaggcatgagatggtgcagggagacgaagcggggatcagacacagggatggtctagagccctggggagaggttctgggtagaggaacagcctgccaggcctcctcatccccccactgctctctcggctaggactccctctcctcccacacctactaggata

SEQ ID NO: 58785 - DNA, 2074 bp, Bovine  19866880656436
  misc_feature (1)..(1): n is a, c, g, or t
ntggcacagagaaggctgagagtggaactggtggggagaaaaagctagcacagggacagtaagaacacgctcacatcagcacaaagaaatacgagcatttcccctgagaaacagagaactgtggtggcatacggaggcagtgagactgggggtacagaggcgggtgggagggaggcttcacagtgtgttccgcttgtcctccctatattgtactgatccttgaatcctgtgtgaatgtcactattcaaaccattgaaaatacatggaaggagtcaggatttgatcctctccatcagggatcacactcagagggaggtgggggtctctggataactctgggggaggcggttactggccagcccctcttcagcagcctccagaatgtgagccttccaagagccttttcctgggggcttgcaggtcctcaggaatcggactgcctgaattccaacccagctgtgagacctcggacaagtctcaacctctctgggcctcagtcgcctcagctgcccagtggagctagcagtggtggcggtctgtcccccacggcggggatcccacagggggaggttttaacctgctcctggcatggagtgttgtgctgcgagcagtgcctgttgagtatttttctagcacctctccctcctctctccctccagatcgtctccagcaagaagatcactcggcctctgctgctgatgaatgacaagcctgcggggaagggcttgattacggtaccagccccgtcccccgctctccatgggcaccctccgccaccgccttccccacccccaaccggcgctgcccattgccctcccccccatcaatgggcctcttcactggcagataataaccagctttgtttggagtaaaaaagcccaacttacaaacttggcaacaggtctcttagcaacgggctcctggctccacatatgatgcgttggggctgccaagctgggggatggagggggactaccaaggggtccccacgggcgtctccccgggctgggccgctcctactcctccctgcatcccctcctggccctgacccttgctgtcctcccttggggggtctttcgggaggtttcaggagctccttgcccctcttagcttggctcatggctgcaatgcgcaatgattcctctgatacgcaaagatttggtgatgcgcaatgatccctacgctgcagagtgattcttgcgatatgcaggccctttgagcagatgagctctttggtcctcagactctgggaaggcagagtctgcttctacagatgagggaacagaagtccagaggaaaaagtgccccggggcggttcagccagtgagcttctctcctggcttatccctcttcagagcctgtgacgccaaggaaactggccgtgctgggaggaggagggctgtacctctgtgtcttcactcatgaagccttacttgcctgctctggaacattcctgcctccccactgcctgtggagccgtgcattctgggctgggagggacccagcaatctcagctgtttttttacccgattcatgaccatgggcctgagttcaggcatactaaattctaagcacgaagtgaaagtgttagtggctcagtcatgtccgactctttgcaaccccatgaactgtatagcccgctaggctcctctgtccatgagattcctggagtgggtagccatttctttccccagggaatcttccccgcccccaactagggatggaatccgggtctcctagactgcaggcagattctttactgtgtgagccaccagggagcacttaccccaggctgttatccactgttctgccactttgaatgtcccctcccagcctcctcccacctcttggggtgcaaaacctccccatttaagtgcctccactggtcagctgtcctccacatggaagccagcccagaaggaccccacccagctggtgtgccctcccccagcatttccagcagctcccctccagacctgggtacccacctcttttgaaataggggtaatgatagggcctaccctacagggttgttgagcaaggtctcatctggaggggaggcaggagcgagggg

SEQ ID NO: 58786 - DNA, 1954 bp, Bovine  19866880757603
  misc_feature (1)..(1): n is a, c, g, or t
naagggaagggagagtaggaatttgcagagtgacttgaagtggtggtgtggcaggtagtgtgttcagggcagagagaagagcctgtgcaaagtctgggagatagagggagcagggtgagttggaggaactgaaagaaggtgggcgtggtgaactctccatggaagatgggcaggatagagagagatgcgtttgaagaggtggggagccaggcatgcagcgagctatgagtgggtctacgtgctgttggcactctgaaggcccactctggctgctgagtgggagctggctggggtgatgctgggcagaatggagggatggagagaaggggcattatccatctctggtgaaaaacaacagaggctcagtgacttgtccaaggacatcttcataacaggaagcctgaatttcagctgggcaggtggactctcaaatctgttctcagaatatgctaccttactgatgagaagcctaggggtgtgagcacagagggctcctaaatctacattatgtctcagccagtgccctctctcacctgccatcctgtaccatgtgctgtttccactgagtattcccctctcgtcccctccagggagggcagttttcagctagaacttcagggagtggctctgtggcatgctggccatcgtgtggcaggggacaggatcctgtggggccaaagctgggcctctgagcagaaacagtgatgccgctggggggagggcaggctggtgcagccaggcccggcatgagctcgttgctaggaaaccagccagctttcaaagaactctggctgaatgagatgttttcttgcgcaaaaagcctccttggaaatgtcatagggcaactctggggagggtgggcgtggccaggccggagtgcccagcggtgccaggagggctgctggggcgaggcatggaaagggcaatgctctcccctcctccccttgctgctggagcaggccaggtctgcctcccaggcccttaccttccctctcagctaacttgccgtgtcctgccacgtgaaacttcctttggtcgttcccacctcagggcctttgcacgtggtcttcccctggcctttggccccctttcactgacttcccatgctagcctcaggtcatttcctctaggaagactacctcaggcccctcctgcctgccctggcatcgtcatccagcactttgtgggcactctgtgctggtttgctcattgtctcagggaggctcaatgctcggggaaggctcttggtttccttcttgctgtgtcgggctccaggcacacacacggtgtgcagtatgtgactgtggacagtaaatttggggtctggtgggctgagcagacagaggtgttggttctctgagtgggaggttggaaggagccagaagaagcatgtgactcagacgtctaccctcaggacctcagtccctgcctggatctgatccaggtgagcacagagaggacccctgtcctgggtagtggtggaaggactgacctttcaggacgagccagagttagtcaggtgaagaaagggattgggccaacggattggcctgtgcaaaaaggtccagggtgggaaagagcagtttatgactcttcccaccttacagatggggaaaactgaggctcagggaggatgatcactgaggtcctttcaacctcctatgtggccccaacccactgccctgccaggaccagagggaatggcctctgaagtaatttgggaccacgggctgtgcccagccaggtggggacaacggaaccgttgatattcagaaggcagtagagtcccagaacaaagctctgtggctggccagtccccaggggcccctaatcggcttgaggtggcctccaagaagcttggtatgtttgttggcatttctcaggcaaaccagggcagcaagtgtgggaaggggcttgggctgccacaggtagcatgaactcttatcccctggat

SEQ ID NO: 58787 - DNA, 877 bp, Bovine  19866880765323
  misc_feature (1)..(1): n is a, c, g, or t
ncatcacccaggagttggacatcctgagaactttctccagtcccaaagaggtcatctcatgctactctgggaggaagacagggtgagggaccctgagggttgtggtttagaaggtaagacctaagtgccatgagctttctgctttgcaaacctctgtgaggataaggacaggagtcagactgagcctgaaccctggcctggagtcttattagctttgtgactgtgagcaaatttacctttctgtggctaaatttcctccactataaaatgcccacagtagcagtacttacatcatagagatataaggattaaatgagaggatgtatgtaaaagtgcctggtacgtgacaggtgctaaataatggtagccgttctgatgatctgattcccccaaattcttaatgaagagtgtgcccttccccacaccatccacccaaaaggccttgcctacgctgccctgtcctccctcccgcctcctgtcccagtgctccccatgatactcactccacttcatccagttgagggccttcccgcagctgggctatgagcacctccacatcatggaccccaagctgacacttctggagcctgaagtgggggtcagagcagagaagctcaaggttagaagctacactatggctcctgtagctctgagtgtggctgctgggagctggaggagccaggaggccagcagacctgggtttaacctcggccctgtgtttcagtagccgagtgaccttagacagggcacctaacctgtctaagacccagttgcctcctctaccaaatggggctaatgtgtactttgcaggttttcaaaacaattaaaatgaggtaatggatataaaatattacaatgtcaagcgcaaagcaaaggg

SEQ ID NO: 58788 - DNA, 753 bp, Bovine  19866880775019
  misc_feature (1)..(1): n is a, c, g, or t
ngggtccctacacggccttgctgccttgccccaccctgtctgctctcagacccggccccaaggactgagggcttttagagactagcaatcaccatcttcatcacagcgacaacacttggttgtttccaaggtgattctgcattcattagcttagcgagcagcacacagccctccgggaagaacagggcagtcactctgttcccattttaaacaagaggttcacagagatgaaggccctgcccagatcagtcagagagtcaggcagacctgggacaaggactcaggtctcttgcccctccccaccatgggttctttttccatcttaataagaaagagctttgccaaggcatccccaggaagcctcaggtgaccgtgaggccagagctggcaaggtggacagcaggattcccacagcccccctcactcacctggatgggtttctccatgtccccatcacacagggacaccaagggcacggtgaatggcttccacacggggtccagtgtgtacttgatcacctgcacgacagtgagggggtagggggtgagctgggacccaggggtggcagtgctctgggatcgggccaacacaatgggacagggggagggcaaggtggagagacccacagccacacttttggggatggacgtgagcacccccgtgatgaggagggagcaagtccttaggggccatcaggggtttccctggacactgtagaatgtgcctgcctggtcccatcctgagctgtcaggg

SEQ ID NO: 58789 - DNA, 1631 bp, Bovine  19866881137735
  misc_feature (1)..(1): n is a, c, g, or t
ngggacttaccgtgtggcttgaggccctttctctagactccgcctcctcttctgggatggagatgagatgggtggcaagctaacacttccggttctcctgctgttctctccccaagcttgagccacaaccagatcggaaacatcggtgcccaggacttagctgctgtcctgccggggctccctgagctcaggaagatagagtgagtggccagccctccagacaggggcccttggcaaccacgctatggtctggggagactgtggcttcctcccctaaccctagtgttcaggcagtggggctggttacctcctggcactactgattcagggaccttgagccagccaagcccctgctcctctctgggtctctctgccacatcagtgggtggtgggggtgctgtgggtggtgggggggcccagcggatgtggtggggtgagggataagggagtcgagagtctgacatctgcccctgttcagcctctcagcaaatggcatcggcccagcaggcggagcgcggttggcagaatctctcaccctttgcaggcacctcgaggagctgatgtgagtgtctgcccgggtgggctgccctctgccctctgtccttgtggcccacctggcgctcgggtcccccactaggcacagggcaggggtctggagcgggccagcctggtgctcaatttactcccctctctttttccaggcttggctgcaatgccctgggagactgcacagccctgggtctggccaaggggctgccccagcacctgagggtcctgcagtgagtggcccctgtctgtggtgtgtgcagggttagcgggaagctctccccacccccgccaggagcactaggggatcaaggccccatcgctgaacggccctgccgtaggagaaactgggatgtgtcctggggctagctgccctacctctgaggccgggaaatcaggggacccagcctaatccagactcagccaccagcctttggccaagcccctgccctttctgcgtctcggtttcctcgtctgtaaaagaacaaggatcccagcttggtgtaccctgtgagccaatctctgagggtaaaggaggaagtgccagcaaagggctatgcaggagcaaagcaccccacagcatggcctcggcactttacagtgtatgtccagggtctcatctgagccctgtgtgaccgcgatttctaccggctccattttccaggcaagggaactaaagccagaggaagtatggaaagcttaccctattaccctattcatacatggaggagccaggccttgaacttgggatctcagatcccaaagccagggccccttgatacccacccatgtcctgtattgggggaggggggttggggtggcagttacccagagagggtctaaggtctagcagtgcagcctgagacaggctgaggctggggggatccagcccctcccaatccccatacctgcccctccaggctgccctcaccccttccctttccccagcctgccatccagccatctgagcccagagggggtgctgagtctgggccaggccctggatggatgcccacacgtggaagagatcaggtgagtaggtgccctggaacctgggcagagggacaggccggggagggtctggg

SEQ ID NO: 58790 - DNA, 1284 bp, Bovine  19866881157450
  misc_feature (1)..(1): n is a, c, g, or t
nagaaagtctcagatcagtgctaactcacccaacacgggtgattgccccttttagccagcagggggcagactacagggtcagcacttccggaaggacccaggttccagttaggagtgaatgccattgtttgccctgttgctatccttgtgactactttctgtttagggtccccaacacaggcttctcattcatagtagtgatagatgtttctgaagatgaatttcttaaagtgaataaaagaggggatagaggactgatttaaagaaaaatgtgaaacaaataataatacaggtggtgcatggatgtggcaaagtcaggagggaggcaggtgcatggtggaagcttagatcctgatgtttccacagtcacgtgtcctgaactctcaggacagccagctcctaagctgtctgggttcctgtgggatgaccagctcgggaatggggttgggggagtagggaggagccctctgtgcctggtacagtcttcagggagggcacacaggtccccatcaggcacctctctggtgcctgcacagcaccccctagccctccccattgccaccttgtctccccctcacggctcttcttctgctgacttttggacccctccctaccctgcaggctgtcctggaatctgctcggggatgaggcagctgctgagctggcccgggtcctgccgcagatgggccggctgaagagaatggagtatgatgggcacatttggggaagccagaaaggagtgagaggaccaaagcgggccctgtgtctggggaaagccaggaggccactgggtcaggcccctgcctccaggaagccctcctggacttcccccccctttgtccattagctctcctgtgtcccagtcttcagccttcccactggactgctgaatgttgagttctctaagcagatgtgtggggagcctgtgtcccccagccttgccccggggaagagacatagagaaggcccctaggccatcccctccccatctcatgtcaatctctttccctttgttgtccatccggaagcctggagaaaaatcagatcacagcttatggagcctggctcctggctgaagggctggcacagggatctggcatccaagtcattcggtaacagggcttgtgggggcagggctggtgggggtggggtgagcacaccagcccttcagtgtaagaggacttcctgtaggaggaggcaggacctgggttgggggttatcaaaggagacttggacccactcatcagggatttggcagcaagcagaccggatcaaaccccagct

SEQ ID NO: 58791 - DNA, 917 bp, Bovine  19866881237315
  misc_feature (1)..(1): n is a, c, g, or t
ncctactccaggctcccttgggtgcggagggtggggctggggctgggattcttgctatggccctgtcctcccagggcccggcccgtgcggctggcagacaggccccggagcactgtctcacagacgggctgaaaagacagcccagcatagcacaagagggccactccctctcacaggacaggggccaccggaggcgtccaggaagggctgacatgtgagctgggtcatacagcattgggagaatttgatctcagaaaaggcagggaagagaatgccaggctgagtgcccagaagcagggatgcttcatcaggcagtgcgtgcttggtgaacaaagatcccttgtggctgaatctgtgtgcacacatgcggtatatgagtggtgtgtgtgatgtgtgcctgttatgtgtggtgtgtacaggggatatgtctggtgtgtgtgcatgagtgtgatgtattatgctgcgtatgtgtgtgtgtgtctgtgtgtggtatgtatatatttggtgtgagggtggtgtgtgtagaggggcgggagaagtgagagagaacacggcaggaagtggcaaccagatcagcctcggcgaagaccaggctaaggatttgaactttatcctcagggcacttgggagctactgcagggctcagagcagtggagtaccacggtcagacgtgcatgctgggaaagtccctctgggggctgcggggggattggaggaggcctggtcagaggcaggggaccaatgcagaggccacgatcacaggtgaagcaagacatgtagagaaactcacccaaggctgagcaagacagagcctgaggctaccagagggggattaaataaaaaatcactgatacagcactcaaataaggcaggtcgtttccaggcacttaaacacatttactcatttaatcctcaca

SEQ ID NO: 58792 - DNA, 505 bp, Bovine  19866881255775
  misc_feature (1)..(1): n is a, c, g, or t
ntcaactgtaacccaaatttccagctttgcatctcaccctgcagatttcagacttgtcagcccccacaaatgcatgcgctgattccttaaaagaaatctctctctatgcagatatcctcctagtggttctgttttctcaggagaactctaatacagttgccatttttcttcctgggtcttctcctctgggaaatggggtgaaggaggaaacttagatctggatgcattcaaggcacattcccacccttaaagctcagtaaacacggccatcagggccagtggggaccaggcatgtggctggccaaccaagggttccggctaccggggtgtcaccacctaagaccagaggctacagactcagaggtctgccgagacacagcaggaactcagcgtgtgaagctggcagggcttttatggggaccaagtatgatgactgcctcattatgccgagagcaggctaaaccacagccatccccgggtgtggtcagccactggggggccatgg

SEQ ID NO: 58793 - DNA, 1383 bp, Bovine  19866881330472
  misc_feature (1)..(1): n is a, c, g, or t
ntgactgggacaaattggcaaaactggaatatgaactgcagtttaggtaacagtagggtatcatgttaaattgcctgaatttcatacttttactggattaggggagagaatgttcttgttcttaggaaattcactgaaatattaggggtcaagaggcatgattatgcaacttactttcaaatggttcagataaagaaagtggaggcggggcggagagaggggaggggtgaggagggaggaagaaaagagcaaacgtgagaaaataaagatggaaggcgaagttcggaaaagggcctccggggcttcttctcagtcttcttgcaaattttctttgagtttgcaattactttgaaataataaaagaaaaagaaagagcacagacaaggcactgctcctcgccacgtggccatgttgatgaccatgcacccgagcatcatctccagggctgtgtggagtcccaggccatgggagggggacacggagctcctttgagcccagggttggagggaacaggaagtatgggggtggggaatgaaaagaggtgttcctgagtgaaagtcttgtccacatacctgaagttcttcagctcagagagggacagcaggaggctttgcagcagcagagagctggcatcgcagaggttcacctgggacaaactgaaaaggtccaagcatattccagaagatttcaggctgaacacacttcagggatcaacatagggatggggaggccaagcgaggggaaaggccccaccaaggagctcccaatggggcaggactcccctctgccaccctggggctctcccccactggcccaacgagagaagcaagaatgccggggttagcatggccccaggctctgttcatccccatcctgccctggccaacctctcacctatggcctgaagcaggcactggggtcgaccagagaactcagggcctcagtgtttcagggtactgacctgagctgccgcagccgggcacatgtctccatcaacttcctggcgaggaggttttgttgggttcccaggtcacagtgagccagcctggaggtggagagggaagcagctgtctgtaaacacctgggtcagtattgaggactcagtccctgcctacaaggagtgtgtctgaaggtggtaaataaacgctaatcaaataaggtcccacaatttgccagtcgaccatgggaagtactgtgaagggagaggtccatatgggggcccggcacggctgtgcaggttgttcactgcacaaggggggtccaaccaaggaagtgagtcggggcttgagatccaggcatggtctatgcctcacagtgtacacatgcagggctgcactcaccccagagaggtgactttttagtttccataaatgtgctatatgg

SEQ ID NO: 58794 - DNA, 2594 bp, Bovine  19866880496041
  misc_feature (1)..(1): n is a, c, g, or t
ntgcgttatggagcatctgccggagtgccctgagcggagagccccggcccgggctgggcgggcgaggggctcccgcgggtggccgtcgagggcacaggggatgctcagtctcgttgcctccttgcagtgcccggctgtggagcgcgcgccgctccttccccccgagaccccgcgctacccaccgcgtagctgggcacgcggtccgcgggtctcctgctccgcgccgcgcccgacagtgaccccacgccctgtgcttcctcccgcagtggccgaccggaagccgcccagccccggcggcaaggccccagacggcctcgggagcttacacggactacccatcccggcctcgacctcctagggctgcgcctccgcgagccgagcccgagctcgagcccggaggcagcggcggagcgcgcacccgaggattcgccgccgccgaggtgcccatcagcctggcctcgctctgccccgcgctcggaggccgcgcgtcctccattctcccggggtttcggcttctctgaacttaggcttcggagtgttacatcctcgtctcgacctttcgaccgacgtggcctccctcgcccgccggcctccagcgtcttttcgacttcgtcccaggcctatcggcaccctgcctccctcccccctcgtgcctgctctcccgcgcctcctttctccctcccttttcaattcttcctatcgaccctcctttcttccctcaccttcgccctctttatgttcctctctctcgtctccttttctccctgcgtcttccccgtctacgtggtccctttttcctgtgtccggccccatcggccacctcgtctcctgggcctttagtcactactccgcctctcttcgttggccctgctccccccagccctatcaccttgccaagagctcccctccccccccccccccaaccacccgctggacaggtgaatagggcagatcctttggtctttagcccccacctctcaggggcccccatgcctactcgaggcgggggctcgaacctgggaattggagaagctgcagcatttatttcacattttatcacaatgaacccaaaacaaagcctcggtgaactgtcccttctcctccctcccccaaggacattatctggaagtattcttgtctggatatcttctcagtgcctaaggactgggtttctctttgcttcctctgaggtgatgtcaccccaaataaggttgagggcaggggggcacctgcggccactggtgttttctgtggttagaaaaccattcctaccctggaagtgtcccctcccactcctccacacccaacaggagggagtccagcacatggtagacatgtctgcactgtttttgtttttgtttttttgttttttatttttgtattcaggagtcagcccatttgttaatttaaaccacaaactgcttctgggtacaaaggtgcaatctgacttctgatttgcaaagggatggggttggaaaaacccagaaagtgtcctctagagcagaacacaagctctgttcactgcttccaagttcaggcactctggaggcaggaccctggacataaaattgcaatctttgtggtcagaaaaatgtcactggtgagagtctgacatcacctgttaaccatggctacctttgaataaaggaaggcatctaaaagtctgctttgtaagggcaagccagtctgtgtccagcctggagtattgtgtaggtatgtctcactgacttagcctatgggtttccagcatcaacagtattaagagggaattgtttttactggtttattccttagcacttgccacctagattgaggtagaagagaaaggaagaggagacaaccgttttcagggatggtccctgaaaactcaaggtagcaaggcagaatggagggaaaaaaaatgggaagaaggcagtaatgactttttcagaacactttaaaaaaagttctaaagctaaagaaaattataagacactatcaaataacccagggatttctcagtgcagagaagtctccgctacttgttttatttttcctccctggttctctaaaactgacagcagagatttttgaattgaaggttttgcttgtaagaggagctgtctgtttggagggaactggtggggaaattattttcaatgcgtcttacttcaatagtacgtgctggaggtattcatcaaaatcaatgaaaagagtatctgccttttttcatatagaggcttttattgctaggtcttcaaagtctcttgcctattacaaaaagttccattttatagacaggagtattaaggattagagacctagtttatttctcgggaccacatgcagcaagctatggatcacaaggtctggacaaggaaactgggtgacattatctcatcagagaaccaagattggggttcgaacttggagcctggggtcctcagccttctgtaccagcattttctgcagagaggctgctcataatggtaacaggaataaagcatttagatgagcttatgtgctcagtcatccaagcatctcacacacccctccttgttgcctggaggactggctgcctcgggccaggaagaaggcacctacctttttgaaga

SEQ ID NO: 58795 - DNA, 1965 bp, Bovine  19866880607061
  misc_feature (1)..(1): n is a, c, g, or t
naaaactgtggcccatcaatgggtttccttcttcctcagcttccacagactggactgtttacagccaccactcaccacctcttcactgcagaccctggctccccagaagcatcccttccccaggaggaaccacgaaaagcacgtggcaaacaaacagaaactcaggaaagtaccttgaagctgtttccttccccagacctgatttaagacagcttggtttataaaacatttctatcagcaaatcacccactgtgtgtgtaacagatgtcctatcaaagagacaaaaaattaaaatgcgtgagtttcataaaaaatacagaaaactaatataaagggaataagggccacagattagccagctgctgctgtgaagcattttccatggtcaggctgcgcatccttattacgaccctatcctggagagactgagagcacaggtctcaggaagtggcagagcctggattccaacctgagacttcagagagaataaaaaggctcgactcagccacactgaacttttctgtagccaggtcctttactgaatctgagatgcatatgcactttggacctttagatgaatcctctttaaggaggacacgtctacagggtgaagtaagtcagaaggagaaaaacaaatatcgtatattaacaatgtatatgtggaatgtagaaatatggtatagatgatcttatgtgcgaagcagaaatagagacatagatgtagagaataaacatatggataccaagggggaaaggacggggtgggatgagttgagagactgggattgatatacatacactactatatacacaatagataatgaatgagaaccttctgtatagttcagggaactctactccatactccatggtgatctaactgggaagagaatccagaaaagaggggatatggatttgtatggccgattcactttgctacccagcaaacacagcagtgtgaagcaactatactccaatgaaaaaaagataaaaatgaagaggtcgtgtccacttccgtgtgctattttcacgatggcactcacacatgtgttctcgctgtggatagcagctcggctcggctcccatctgatcataaattcctccaacctcccagcagcttcaatactactacacaaagagaagctccagaggcacaatgagaacagaagaccctccgatgaaatcccagtctctccgtaatgggggggcagcaggaagccagcctaagaagccaggaggacatgggacccagaggaaattaaaccaccatccacctcacggaccgccacttgttcagactgaagctccgctgtgccctgagccccagccaaccccttccagttaccttatgccccagcttaaagagaaaccaagatgaaagtgccagattcgttctgcccacatcagtcggctgacatggcaaacgcgaacacatgtcccacacatgcaaagaccagcctctcatatcacggcctggcttgtattttgtgagatacaattacagaaggagattagacccagcagagtcttagctcagctggaggtgttattacggaaagtgaaatggacagcacctctatgctgccaggtcacaggggaggcaacctctccctggatggcctgtcaagaggcaatattcccaatgctgagcatttcccagttggaatggatattaattcatgtatccactttgccaacatctcaatgctaagaaaccctgtcaaaacttgttttctcagcacatccatttgaaaggcctgtgtcctgttgccgagttctacatctggtattgccttgggtacaactctctaaaccttaagcttctggttgttgctgagaaatgccgaatcattttgaaggcattctaatttttattgttattattatgattaatttccctgtacctttaaggtattttaaaattaccttagaacataacagaaacagtatcattttattaaaata

SEQ ID NO: 58796 - DNA, 1309 bp, Bovine  19866880881476
  misc_feature (1)..(1): n is a, c, g, or t
nacccgtaatgcctccggttttgatttagtgttttggagtttgtgatctcattgcctggtatggaaaatattagacagggtctgcagattgcatgcaggaaaagacccgcatcaccacagtgggctgagcattcgtccccagtgccccagtgccccaataagccaaaagtgcagccattgaaatcaatgctgagatttgtgccttggatagaggccccctcagccagccctgccgaagcaagccttcttgaagacactgattctccccaaggctgcactttggtcaccaaaggagccttagaatgttctgacacccgggtcccactcatagagattctagctgaatttttcagggagcagactggagtttttaagagctgcccaggtgattccaatgtgcattaaagggttgaaaatctccactttagggaagggatgatgtaattcgatgcttcccgctttgcaactgttttccaggatgtaggactggccggcaactgacctgcctcgcttacctccgcgggtacttttaacatgacacatgaaaacgtgtttaactccatggagcaaacgtctttcctgtgcatttttgcactgtgccactttggcccctctcagaacgggctgaagagggggaaggctgccttctcagacttgctgggcttctgcaggtttgctgtctttaaaagcaagaaccctgtctctctgtgctcatacaggtgatcgcagcctcctgtttaagcgtaaccatctctacagggaactgtggtggggagggatcatggagacagagattgacttaacccttggcccgatgaagagggacttggagacaagtggcaacgaatttaagcactgcccaacggggagctggagaaactgcattgtccaaggaggtgggaaatgaactgccctttttaacagggttagttaactctgcccttttgccatgtaaggtagcagggcaggaataaccctccaggttctggtagcatccaagcctgaatcttcttaagggctcagtgtagcttagtattcttatgactgtttccatttgtcacattatttaatggccacgcacattgtcaggggaaaactttttctgagtggctgctgcagggttgcattttagatcttagagcttcttgcccccctagatggctggcttgttgtgataatgactaaagtgtcaattcgtagagagggtaaggggggaggaaatagaaaaatgtttcacttatcctcttcaaagtctctgaagtcattaaaaggaaactccttctcttcatttttaattagccctgtcttg

SEQ ID NO: 58797 - DNA, 758 bp, Bovine  19866881307726
  misc_feature (1)..(1): n is a, c, g, or t
ncttggaactgggtcgagctggcagtgatggaaagaagtgccatatccctgggggctgacggcgggggtgtccttggaaatgcaaggggagaggagcaaagaaatgtctttttcattttccccaaatgaaatgaacagacaagaatacgatgaatactgtccggtgaataacaaaacagttccccgattccgttcagaggcggagggaaaaaagtcaaaaaaacaagacctgccctgaaatcctcattagaaacacatagagggaaattgaactttgcgaaggaagatctgaggtacttcctaccctaaaatgcaaggatctgccttctacatttataacatttcttttggagtagagacattttaaatgttgcatttgggtgataaaaactaactacaagaagccggtgccccgtgggaaaagatggtttctttgagctttctgaaagagcagcatctctgcgattcttgtatgcaaaatccaggatttccctcctttccctggcaatgggcatgccaaataagtttcaatttccacttaaataaaattatcttagatctatttcatttcattccagcaaccaaaagcctccaaggagttctccaggcactggacaaaattccacctctgcagtgagctctcaaaaaatgtttatatgggcagtgctaagagcctaaacagcactattaaaatggaaatatttgggaaatttaaaatgtccatggggcatatctcctgtactgggtctgggcacttg

SEQ ID NO: 58798 - DNA, 1398 bp, Bovine  19866881749778
  misc_feature (1)..(1): n is a, c, g, or t
naaaacagcaaatttcttttatcactggggtggtttccaagcttcatatccactgttgtagaggtgagctgagtcttttaggagtggttctcttgagctctgtaactttctcgtgaaaacccaaaagtagacttttcagactagcatcccttcacatcctcttgctgtctcaataccacttgacaattatttatttctgtgttatatatttattgagctctacctcactgcttaagtaatcatattatatccatgtatgtgattgtgaatcactaattcttaaatgaatgctattcatgcatctctctttttacataggaaactaataatttaaatatatgtcaaagatgaaattaagacaaatcttcagaacaaggatctaaaactcaggttcaaatagaaattactgttcacccattgccgaattgtagttttgctataactgggatgaaaagttgcttttcagatgagatagtaaaactataaaacaattagagactttgcattagaagagtgggaagaaaatggttaacatataattgtgtgtgcatacctcctccagcctctattctctcaaaaactgtgaaagatttgtaaggttaaaatatcttttttgttgttgttgttatgaaagaagttatacccagattatagaaacagtagggaatatacaaaattccacaatataaaaattattttaaaaaattttatgtaaaaatagtcatagtaatccctatatttgaattttagaattgtagaaattaacaatccataggcaatatttagtttaggagttggcaaactatggcccatgggctaaattcagctggccgcctgtttgtaggtaaggtttgattgaaacacaacacaaatatacaacagtatgtttacagactgtctctggctgcttgggaaccacaccgcagaggtgagtaactgtgacagagaccacatggcatgaagagcctaaaatatttgccacctggctcttttcagaaagcatttgctgactcctgctcttgtccacctgataaagattagattatcgggacagtcgctcttgaacatactgtgatgtgcctgggctttacctcaaggaacttacagtctaattgtgaaagagaaggcgtggacattaatacagttttaagcataagaaaatgactagtgccatagagggtatggcatgctttaggatttccatgggggcactggtaaggcatcaaggagaagatgaaggccaagttcagtttgatggatgggtggcaggtgatggacgatgccaaagtgtctgcacaatattcttgtttaaagaagagaggcaagaaaggttcagagataggaaagccctgtgcacatgtggggacccacaagcagatcacttggggtagtacgagg

SEQ ID NO: 58799 - DNA, 2405 bp, Bovine  19866880098963
  misc_feature (1)..(1): n is a, c, g, or t
ntttgttgtttgtagactttttgatagcagccattctgaccagcatgagatggtacctcattgtggttttgatttgcatttctctgataatgagtgatgttgagcatcttttcatgtgtttgttagccatctgtatgtctttggagaaatttctgtttagttttttggcccattttttgattgggtcatttatttttctagaattgagctgcagaagttgcttgtatatttttgagattaattctttgtcagttgcttcatttgctattattttctcccattctgaaggctgtcttttcaccttcttatagtttccttcgttgtgcaaaagcttttaagtttaattatgtcccatttgtttaattttgcttttatttccattactctgggaggtaggtcatagaggatcctgctgtgatttatgtcggagagtgttttgcctatgttttcctctaggatttttatagtttctggtcttatgtttagatctttaatccattttgagtttatttttgtgtatggtgttagaaagtgttctagtttcactcttttacaagtggttgatcagttttcccagcaccacttgttaaagagattgtcttttcttcgttgtatattcttgcctcctttgtcaaagataaggtgtccataggtatgtggatttatctctattttgttccattgatctatatttctgtctttgtgccagtaccatattgtcttgatgactgtagctttgaagtatagtctgaagtcaggcagcttgattcctccagttccattctttctcaagattgctttggctatttgaggttttttgtatttccatacaaattgtgaaattatttagaggggttttaaaagcagtatttctgtcattattttttgagtcttattttcccaactcacttagaagtaaaatatttcatgagaagtggtgtggggcccagaacaagtgaaccactggttgtcaggcaagatttagaaaatataagcttcctgtagatttaaagctagaaagcccacatgcataaagaaagtcctcttagtccactgagaaatgcttataggtttctgaaaactccctttccctccacaaaagagagaaaatcattaaacatgtttatttatgccccaatccattgctttctatagcaaaaatctgtaattctcttgccaatggaacaaaaattgctttaaatggtaacagtcaaaaaatgcccaaaccaaaatatttgctgcatttttctttctagtgacctcaataatacctaagtggatatatagttatttcttggactaaaggaaacagaggattgtgtttaatgaagtctaagggactttagagtgtaaacatctgaacccctgagaaaaagtggggccatctcctctgctactgaatgtgtaaaacacacaaagggcttccctggtggctcagtggtaaagaatcctcctgacaatgcaagagatgcaagtttgattcctggagaaggaaatggcaacccccctccagtattcttgcctgggaaatcccacggacagaggaatctagcaggctgctgtccatggggtcacaaagagttggacacaacttagctactaaacaacaacaaaaatatacaaagatagacattgtggggaaacccaggaagattagtccataaaaagctatgttcctgtgattcatgtgttaaagactagtggaggaggggataaaaatttaaatggagatcaaatctagcattaaaaaaaggaaaaaaaaaacataaaagctgtggggatgttcaagattcttcccagggatttgaggcaaattttgaatagtgttcagtgaatatctgggtgtctgtgcaataataaggatgatgtcagtttcaaggaagaaagtcctcattgctccattttcataggcatggacaagattaagagttctgctcaaatggacccctaagctctactaaatttaaaacctgacattgtgtttcaacaattatgttgggattatctaaaattcactcaactatgtatttttgatatcgttagcatggcttgctaattgctaatagcttaaagctcaacattcagaaaacgaagatcatggcatccggtcccatcacttcatgggaaatagatggggaaacagtgtcagactttgtctttttgggctccaaaatcactgcagatggtgactgcagccatgaaattaaaagacactccttggaaggaaagttatgaccaacttagatagcatattcaaaagcagagacattactttgccaacaaaggttcgtctagtcaaggctatggtttttccagtggtcatgtatggatgtgagagttggactgtgaagaaggctgagtgccgaagaattgaggcttttgaactgtggtgttggagaagactc

SEQ ID NO: 58800 - DNA, 2178 bp, Bovine  19866880183107
  misc_feature (1)..(1): n is a, c, g, or t
nagatggggaaacagtggaaagagtgtcagactttatttttttgagctccaaaatcactgcagatggtgactgcagccatgaaattaaaagacgcttactccttggaaggaaagttatgaccaaactagatagcatattgaaaagcagagacattactttgccaacaaaggtccgtcagtcaaggctatggtttttccagttgtcatgtatggatgtgagagttggactgtgaagaaattgagtgccgaagaattgatgcttttgaactgtggtgttggagaagactctcaagagtcccttggactgcaaggagatccaaccagtccattctgaaggagatcagccctgagatttctttggaagaaattatgctaaaactgaaacttcagtactttggccgcctcatgcgaagagttgagtcattggcaaagactctaatgctgggagggattgggggcaggaggaaaaggggacgacagaggatgagatggctggatggcatcactgactcaatggacatgagtctgagtgaactccgggagttggtgatggacagggaggcctggcgtgctgcgattcatggggtcagaaagagtcggacacgactgagcgactgaactgaattgaactgaaagtactgtttctctttctggggaatttacttgagaaatcattctagcaaaatcaaaagcaaaacaaaactatatctcagggggacttaaaatgtataaactcatgaatgagtggttaatctggcaaaatttaacagaccagtgtagaagatcatagcctggttcctgaatggggaacttggatatgataaagaaatttatatttctcaaactaatgtttaagcttcttccaattccaaacaaaccctgagaggggcctatttttgaatcatgacaaatttttctagaaaaataagtaaataagactggttaaagaatgtttatcaaaaggccactagaggttggtatttaccttatcaaatgctgaagaattataaatatataagagttaaatcatgttaagtactgagaatagtcaaatcagtgactcagtagtgatactgtggaattagagtttataaaatagaaaacaatataagaacatattttaaagaaattacaaatctaagggtaaggaactgtgttcttaataactaatgtagagaaaagggaacattttgatgactactttattaaaattttgcattacagaatacatatggatagattaaagagaaaaattcaaccgtaaaaaattagggtaggtatagaggttcatgggcttccctggtgactcagatgttatatcatccctttatgaggaaggactccctcaagccagaaagcaatgaaagaaaccacaggaacagataatagattttaccatataaaaatataaaatttctgtggttctaaaaatacatagataaaaggaaaaggcaaatcccaaaccgggaaatatttgtacaacatatacttttgcaaaaaccagggttgccattgcttgtcaaaagaattggttaaatccaattcttagcctagtttatgcctaaacctttatagatgagtgtgcctgcagagaaatacaaaactgtgtgcactggtttactgttaattgctttcaagggagacttttgtcctgttctaaaattgtaatacatttccctaggtcaatcactctgccatgtttcctgacaactgtttagtagcaccttctcatccagcatcttctccccatcttcactctaatttgatgatcttgcttatagcggcaatcagaagaggatttactacatttacaccaccatatcatcccaccgagtagcatctctcctgttggagaagaatcttctgtgctcccattaacaccttcacaagggcactgattcccacccctctcaactattcatggacaagaacctacctccagaaattcccatttctccttttctctagtgaaacactcccttcagccccagccacatattttttcacatcttaataaaagatctcttgtcccacttttccctcaagttattgtaccatttctctttgctttggaacaacccctccagaagaagttatatacacttgatttaacattttcaattccttaacttctgttctctctgaacgaatccattaggtttccatccccacaaactc

SEQ ID NO: 58801 - DNA, 1815 bp, Bovine  19866880406419
  misc_feature (1)..(1): n is a, c, g, or t
ntggaaagacctcttcatgcaaagaacatcagatagggtagggttggcaaacacagcccacaggccaagtccatcccacagattggtttttgaacagcttgtaaaccaagaatgattttatatttttaaaggattgtaaaaaatacaagaagaaaaacatacaacagagaatatatttggcctgcagagcctacaatatttaccatgtatccccttaccaaaacagtttgtcaatcactgacacagtcatgttagtaatggagacaaattagctctgagctaaagactgctctggacccatcctagcaatccttaaaaggatcctacaaattcctggtaatttagctaatggtgaacaaaatctagcactattttatgaaatacaacaaaattcagtgcccccaaacacaaaattcatccaataagaattgctgaggttgtaagaaacaagaaaatattaccctgaattatatttctattgctgtataacaaactacccccaaaacttcgtggcttcaaaccatgatcatttatcctttcttatcatttctctgagccaggaattctgacagaggccatagagaatgcttctttccgcttcacagtgcttgaggcctaaactgcaagatttgaaatctggaggctggaattttctgaaatctcattcagctacatatttggcagttatggtattagccaccttttgtaaaggaagagttaacagagcaggtctggtggcttattccttgcgtatatccaagagaacctggagtcatgaatgacacttggacaaccactgggaatatgtcccttggatgtcagagattactgatttggttatgtacacctagagcaatgagctgtgctatatcagctgtcaagttgctctgcatagatatcaagatgaacgaggtgcacctggtttcattgttagggtcccgggtttcagctgccatggctggttgcatagcaagatatgcttatgtgagcagcacaccagaaaagccttggagcctaggactccaacaggactcactgggtagagacatttcacacatgttcctacagttctctgctagagacaaagcacattctatgtggcctctgaagaaggactctgaagcctgtactgagcctctcaggactctacccaatgaaaatatcttttctgctgctttattctgggcttcccaggtggctcagtggtaaagaatccaccagctaatgcaggagataaaggagatgcaggttccatccctggggcaggaaggttctctggagaaggaaatggcaacccaccccagtattcttacctgggaaatcccatggacagaggagccttgtgggctacagtccatggagtcgcaaagtattggacaggactgagcacacacgcatgctgctttactctgtatttcctgccataataaactttaagtatgtatataaccttctctgagtcttgtgagtacttctaaccaatcactgaaactggggtgccttgggaccctcaaaacaccgtgaaaatatcacccaaaagaaagttagaagatgttagaagttattcattgctatatcacaaattacctcagatgtagtagtttaaagcaacaaacattgactatctcatcacttctgtgaatcaggattctgggggctgttcaagtgggagttcttgttcagggtctcacacagtctagctgccaggcttgcttgggtgtgcaggatctgctctgcatccaggcacacgtacttggtgcttggcaggaggcttcatctccttgccacttggactctccatagggctgctcatga

SEQ ID NO: 58802 - DNA, 2043 bp, Bovine  19866880493320
  misc_feature (1)..(1): n is a, c, g, or t
ncaatgtaggagaccccagttcaattcctgggttgggaagatctgctggagaagggataggccacccactccagtattcttgggcttcccttgtggctcagctggtaaagaatcttcctgcaatgtgggagacctgggttcgatccctgggttgggaagatcccctggagaagggaaaggctatccactccaatattctggtctggagaataccatgggctgtatagttcatagggtggcaaagagacatgactgagtgattttcactttcactttacatggcagaaggggcaagggaatctttctgggatctcttttataagggcactaattctagtcatgagggctctaccctcaagacctaaccaccatggaatgggcctaattccaaatattatcacattgggcattaaattttaacaaatgaattttggagagccacattcaggccacagtggactacacagaacgggcagaggggaagagagctcacgatgggagtgggggatgtgggagacagaggactaaatcctcattttctagggtggaatgacagtaaagaatgtctaaaatgtaaaacccacaaagtaagaattcaaatatgttatttagcaatacggaggcaaattccttaagaatcagctgtttaggtagggaatgactctagactgtgagaaataggatagggaggtaaggaccagggactgttgttttcaaataaatctcgaagaactctgattctttaaattatgtgtatgtataactttagtaaaaataaaatatgaattagaaaaatcaaaccctggaagtgcccaagggtccaattcctaacatgttaattgcatggtgttgggtaggttatttaatttctttgcctgtcagtttctttatatgaaaaatgggaatagcaatggtacctattctgtagggcagctgagatgattaaattgaataaagtttataaaacttaatctagcaccatgcctggtctatgttctggcatttggagggttcccttttgctttacttcttgccaatcatttttattttattcactcagtttttccttggattatcatattgccatcacatttcagatcagattggcttcccagatgttaaacgcactttattttacttggaattctgagtgctatcaaatacattgaatgattataccagtatctcgctaagtgccaaaagcatatacagtgtgattacatgtacatgagaaattcttccacaatatctggcatgcatttaccatgagttatgagcaatccatattttctcctttattgtctttcttccccccagtacaatggacccattccccctctataaagtcaggggaataatagacattttaaaaacaacttttctgtcataaatttataatttcatctgtctttctcatctattatgtgtgaatcttactagtttgactctgtgagagccaaattattcccaagttcctacaggcacctcattgttcctacccaccaaagccatattcacagcctgtttggggcataaattactctagtgtgtgttctctggcttgtttgaaaatcaccagaaaggggcagggtgaacattcaagttcatgttttctcattctaagctaagtattctttctgccatatgaactgactgcccatcaataaatgacttaatctctctggtctcaaattcatgacatgaaggtataaagtagataacctctaagtttctactagccctaacattccatgaattactggggtatttcagtagtttctgactcacaagagttagcctgtatcattaaccatgtttatttcttccatatagggactgtggtttctaccaagtgccaaaaatttgtatgattgtgaagtctaagttacttacgtgcaattttcaatccctgtcttattcataaataccaaggcacaaaatagctttgggttttattttcacattcacaatcacttgggaattttatcaaggctgagcaagagatttggaaactcataatgcatttcccaagaagctgcaagg

SEQ ID NO: 58803 - DNA, 2131 bp, Bovine  19866880924290
  misc_feature (1)..(1): n is a, c, g, or t
natggctaagcataagatttcagttataacttgctaatgcttttgagacttggcagtttaagaaagagtctgactgtgggagatagacaactaaatgcctttattataacaaagcaggagtagagtaaggctggacacttttttccaacctttattggctcaggtggaaaaactagttcttctaagaatggaaagtttcctttagattagaaataatctcagcttgttcatgtaagaattaatgaacatgtatgagtacctgtagagtggaaaaaagggtatttctcatatactacataaaatgagagttgttgtttttcagtagctcagttatatctgactctttgagaccccccctgactgtagcccagcaggctcctctgtccatggggttctccaggcaagaatactggagtgggtcaccatgctctcctccaggggatctttccaacccagggagcaaacccacgcctgtatggacaggtgggttctttacctctgagccaccacggaagcccaaaatgagagttaatttaacttaaatattctgactacctgtcaaaatataagaacaaaacattatattgagagacagaagagtaaagcccaaaatccctgattaaagaaatttgaaatctgctcactctggtgtatggaagtagggcagaagcggttgaatggaaaaggagtgatattatctctcattgatacaaattgctgagtcatagacatatttagcatttatctaagaagtgcatgtgtttatatgcaaagggggctaggaagttgaacaaatacttgaaaaaaattaatttggagagttaatgactataaccccaaaatcagtctgtatgcacacattactaattctgagagttgtgaactgccttcatattagtgacccttaaaaaacctctgagtggatctattttatgactcattgctcatgactttaaagttttctcagtgtttgttaagatcttgtgcagttggttgggaaggtgtgagaggagtcaacatatgaatgtgagacatatggaaagcgagacaatcataggaatatgtagcacaggtttgccttctgtgggtgaagaaaggattcagtgggcttatccattccttacagaacagcatttctcactatccctgaagtatgagccagagatgtgctggaactttctgaagtctgattggccagaaagagccagttttgcacatttctcagctacaccatcagtgaggtctagacccagcaaacactaggaatcaggccttccctctcaccacctctcaccactcagagcctcttggtaaacatttaccagcacaccactgtggcgagctacactaatctctagtaaaacattctgggtgatcttcctttgagctcagggaggggcctgagggttgctttggaaagtatctgcaacaaacactacaaaagattcaaatggtttaccaagtgaaaaacaaagactaggtacttttaccatggggtggaggtgggggaatggctgttggaaattaagctcacatcttgtaagacggataaaacagtttcataaataactatgataggaggcaggaggtggtcagaagcacaaagtgtaaactggagatgattcagaggagggtgaggtcaagcacaccccacgttccagtgcaggcccttaaagcagagaagtggtggattgctcccagctttgaggctcctggtatgccaaaacatgaagaaataccaaaacaaggttattaaaattgtgtgtacatgtgtgcttagtcactcaatcatgtccaactctttgtgactccatggactggagcccacaaggctcctctatccatggaattctccaggcaagaatgctggagtgggtagccattcccttctccaggggatcttcccaacccagggattgaacccaggtctcctgcattgcaggcagattatttattgtctgagccacaagggaagcccatagtagtatattttaaatgtttccactaagcgtcttacaatgtcacaaaattagagtatccataaaaacattatagaagttattaaaatattaattcactgcacactccgggggggatggcttaaattaaaagttgtctgataacatcttca

SEQ ID NO: 58804 - DNA, 824 bp, Bovine  19866881036120
  misc_feature (1)..(1): n is a, c, g, or t
ncaccatcatgtacccagatgggaaatgcctttttttggtgggactggacatatgtgttgctccctcggatttcatgctggttaaagacaagaggctaataactcccagactcgtgcatgataaccacatctctggtggcaacggtactattaatttttccacaagaattttctttctgttacacgcgtacttttaagagtaggtagccacagctgtgaccagtatgacattcctttctatttgtttttaataacgactcaagttagcttgtgaagaagattctcaactgagatttttctttctttctgtcttctaaagtgtttattactaaaagattcaacttttagattctctgaagaaaattctttcctaggaaaggtaagaggttaaagaaaatgtagctaaaattagtttcttttttgactctgcaaaagggattgcagccatggcaatagtcagaagcagtgacttaacgaacggtttcagaaatgagctcttcactgtgatttgaacgagcgctccatgaatcctattttataattactgctcgattcttatggggcacttgaaagcttgagtgactgtctaccaggttcattcctcaggtgaagcttctgcttaactgtgtccaatctgaggcatcacactgaactctcaccctaccgtttgtttgctgatgacaatttaattacacctgctggccttcagaaatctcaatgattaagaattgctttgtttggtttgtactctgtttcattaatcttcctggattccttttcctccgaggaaatcaaagtgtttcttgttaataattttcagtata

SEQ ID NO: 58805 - DNA, 912 bp, Bovine  19866881101553
  misc_feature (1)..(1): n is a, c, g, or t
nattgcttcatatcttaattactggataccagaaaactaagcaagataaaacctacactatctgaaaaaacatactagataccagatgtcagtgatggatgtctgagaaggaaaaatgtgttccataatgtaaaatattattgattacaaaattaagtcaactaagattcaagtctagatataattataatctcaatttaaaaagaaagtagaaattttatttttaaattgcattcctctgagtataatctctctctgtctcatacacacaaaagaatatatcactttgtgggaaggggtgcagggaacataagagttttcacaatggaatagaaaaatcatttatttcaatatccgttgcctgactatcttgaataatagatacctcagagaaggaacaaaattacttcagtgaagccaactgtactgttgaatagttttatcacattttgggtattgaacgtgataaagcatttttgccatatgaaattttgggttaatctttttttactccttaaaaaaataagagaattctaaggaactaacacttatatatttgaggaagaatttcttatatatctacagatgatcagtatattcgactttgggtctgtaaactttgcctttgtcaaaaagaatacaatatacttcctcttttaggtcgtgacacctttttacctaccaaaaatcatcaaggtaaattagaaaaaaatcccccatgggagtaagaattatggttcttattatcaacaaataataatagttgtcatttttgagtttgcatcaggaattttacatatcatctctattttaccataaggaaaataggtacagataaatgaaataacttatccaaggtcatgtaacttagaaataaattgtcaagccaggacccaagcccagaaagaaatc

SEQ ID NO: 58806 - DNA, 662 bp, Bovine  19866881815993
  misc_feature (1)..(1): n is a, c, g, or t
natgtgagagctggactgtaaagaaagctgagcgccgaagaattgatgcttttaaactgtggtgttggagaagactcttgagagtcccttagactgcaaagagatccaaccagtccatcctaaaggagatcaatcctgggtgttcactggaaggactgatgttcaagctgaaactccaatactttggccacctgatgcaaagagctgactcatttgaaaagaccctgatgctgggaaagattgagggcaggagaaggggacgacagagcatgagatggttgtattgcatcaccgacttgacagacatgggtttgggtagacgccgggagttggtgatagacagggagacctggcgtgctgcagttcatggggtcacaaagagtaggacacgactgagtgactaaactgaactgtccatataaaaaaatatcaattaggggcatatgcacacggggaaaaacatttcataaatactgtttactagtgtgaaatactgattatgtattttcatagcaacaatcaaatatagcaatggaatttcaccccagttccttccttcatgaaattaagcttccttcatgaaattaggcattgttttgataaacttgatcaactgaaaatattttctctataccttcaagttggtaaatgtttttagggaa

SEQ ID NO: 58807 - DNA, 1188 bp, Bovine  19866880164571
  misc_feature (1)..(1): n is a, c, g, or t
nactctgtgcgacccctagacggcagcccaccaggctccccagtccctgggattctccaggcaagaacactagagtgagttgccatttccttctccaatgcatgaaagtgaaaagtgaaagtgaagtcactcagtcgtgtctgactcttagcgaccccatggactgcagcctaccaggctcctccgtccatgggattttccaggcaagagtactggagtggggtgccattgccttctccagtatatctcctatgtatttcctattcatatcatatattaatataatatatcagcctggccactccttacccaggctgacctgggaccttgcctcagtccttactggaccccaatactaagatagctttcttagttactataaatattggctaagtaaggtgatgctcctgtcttctactaagaaataatctgctttctaggagctaaaactaaactgaaggtctgtctcaatccagagtctttgcactatctgcttaggtcctatatgtaaatactgtttgtggcccatcttctaattgtataatatattcatcaatacactttaatcatatgaaagagtgtatcaagctagattccagaaaacttttgaggcatgaaaaaaagctaacatataagccagcaagatgtacagagtgaagcagagtttctcattgtagtaaaaagcaaccccccccaaatctatcttttgttataagagtgattaaatgccacctaaaaagaatttagtatccaggggtcagtcccttgttctggttttgacacttcagttttcagcctaattataaattgtctaattggtggcagttgtcttcattaaacaccatcagtacatcaaggtgatgctcattgagcccaacaaagtcaggcattgtgttcttattcatgcctttgtttctgtaactgatcattgggtgtttaataccttgttgagcccagtgaggataattacagaaatcgcttggttgtaaactaatgacaacagatatacaaactcctgatttcctgattgttgacagactttacacagtgggtgtattttcagtgtgaattctgtttcattgtttctatgcatttgagttcaaattccacatagtagacatataaatactgaggttgatgaaggcctattaactacgttgaagctactatactctttttttatttttt

SEQ ID NO: 58808 - DNA, 722 bp, Bovine  19866880373468
  misc_feature (1)..(1): n is a, c, g, or t
nacattttctttcatgtaaacattgtgatgatacttcagtgtaattgttttgaaagggcttgataataaaactctttgcatataaatctaccacatgataaatgtaatataacatggtattttaaatttggaagctgcagtgtcttttatggacaaaagtacatcaaaggaagcattctaattacaaattaaatgcaggctaaaaattaatcctaggttacatctggttgctgtgtgtgagagataaatatttaacacaaattaaactactatttttgaaacaaatatttactttttatttaggatgaccacacacgtacttttctgtactatagctactgaatgtttatgcaaaataccaacagacatagacataataaagtccaatggaaattaaagtcaaaaaagacattgaacttcctttgttcaggaaaaaagtgttttttataggaaacatagcaaagcaagctaatcttaccatgtttaaatgcaaattttattgagacaaatcaaaggcaatgaaaggcaggcatagtagtttgtttctattttaaactactttattggcttcagctgctatctttgaatgatgccagtctctcatactcaattgacaatatccctatgctcaatcttccacttcagaagagaagtttcactaacatgaagaacttttccatcaccttttcttgctaagttagtaaaataataaaaagacatgt

SEQ ID NO: 58809 - DNA, 970 bp, Bovine  19866880403847
  misc_feature (1)..(1): n is a, c, g, or t
ntccttaaagtttaacctataaatattctacttcattaagcataaggaccagctatggacatatgccactggtgtctactttccttcagcgatttaggggatgggaagatgaagggtatgttcaccagatggagcttgtcagattagcaactggagcagagtaaatatcactgtcatattgtttgtcttttttttgaagcataaagaaccccctctttaaagtgcatgtgcatatttaatggttgaaaacaaaacagcagaaggttggctggtggtgtacctctagccaagtggccattgcctgaaggcgggtttctgctttcctcataatagggaacattagcaaccagtggctcgagaaaggcagtcaaataagtctctcggggcccagtcagccacatgaagtgaaagccgttagacacagcaatgagattgctgctccagaaagggcttaccacatatattaccacataggctttgccgggctgccagctcactggacttacaaatgtcaaacgtgatttaaaaggttattatactatcacgaaggaaggaagatgattttccatcactgaaatttctatttcattctgtggcacatactgcatctcacagagtccaatattgctaaataacctgcttttatctttaataagtgttttatggagcttaaattggaagaaccactttcactttatttgtattagaaaatttgatcttttttggtcgaatagcagtgtgataaatttggtatgttcatctatgtattgtacttaggagactgttcttacaaggagagtgaatttgtaatgtgtcagttttgaagaggatacctaggtaagctgtagttttgggcaaatgcatttgtaagcctatagtatttcacactaaaattaagaaatatattccattatttatttctctttggggtttgttacaactggtctttaaatagtctactttcccaatt

SEQ ID NO: 58810 - DNA, 2965 bp, Bovine  19866880407047
  misc_feature (1)..(1): n is a, c, g, or t
nagttggacatgactgagtagactaagctcgcacacacacacacacacacgtacaagcttaaggtaacataaacagagctattaacaataataacacgtgctgacaaagttcatttaattacctaggcaaatttatttttacctatcaccaccctcctctccatctgcatctcaaaaaaaaaaagtgtaatcaatggatttttgttttatacaatctaattttctacatgtgtcaaattcgtgtctaattatgggtaaaataaatccttccagggatccaaattcttgatggggtttaattatgttctgattcttacaaattagtgcaattgcaactggaatatctaagcaactcccttcctcgtccacccaaacacccatttccctacacttgacgattcatgatgggcttgtcaggccattggatgctggtgaacattattttgagtgaatatgctagtgagtattatgatgagtactcaagcagagtctcagggattccacccctagaatactgggaatacagcagaaattttgtacttcaatttctgcatttagcacctgtagggaaagagcaaattagccatgacggcatgttcaggctctctctggccacatgttttacaaataacgactacttaacagctgagctaatatatagcattgcgcatgcgtatcacgaggtactcgcttggtcacaagctactttgtgctgtaggtatatatgagccgcacctaagaaagcagcagcatactgtggcgttacggcttagtcacgagaggagagaatactgctacggctgctgtgtcagccaggagagagtttgtgcagttatcttgtgttatgtctgctgctatggctcctgtgccagccaaaagagaataaacatgtctgaagttcctatagctcctcacatgttcttccagcctcttagttcgcaccttgcctaccctgggttcaacgaacagtgtatcacaaacagaatgaggagcaattcagcacctgtgtatgctcctttttctttgattgaagaattaaatgaagaaagctgtttttaaaatgttttctttgagctgtctatagctgtcttctccacaacccaacccaacacacattaacaatcttacagtgatctctggtttctgaaggttcactggacaggagtaattgctaaatattttggaaaggcatgtttgaggtctctaaatcagcataagtaaattttatttttccaaaacagatgctttctgcctgaaaggatagacacacacattcatctgctttctacattgtattgttatgctataaggttctgaaataatctctcttttgaatttcacttgatcacactccaaccacagtgtataatggttcccagccctctacgctgacacagaaatgcattttccattactgttcacatccctgcctgcctagacagattttcccaggtgcttcagcttttgcagttcaatgcatctctccctgagaagtgaataaaatccagttgttttcttatttcttttgcatctttttccaagaacatttgattcctatttagatactcaagcactgcttattattcaagatgcggcaggaagtcagggtgagaaagagcactgatcattacacatgagaaaaataactttgtttccattaaggctttctgccagggaagggaaaaaaacaaacaaaatgaaacaactagataaaaaagaacacaaaacatactcatcagcagctttttctacaatgaatttgcctatcttgcaggcctactgaacagtttacctcaccaaaaggttacttaagcaataactgtatgatttgaattattagctatcctgaataagaaatctttgaaaaggtaatacagctttatgccagtggtttctgtattgtagcaatattttaaaagtctgtttttctaaagagattatctagatataaaaatttcagtacataataagatactaatgatttaaattatgtgtattacacagaataaagcatggcatatatagagatacactggatagacacatctatttatttatattttaatgtaattttaattttttgttaatgctaaatatttaccaaggtcaagaataaaatctgaaacttataattttgttttcctggttgatatggggtgatctgggtcccacaaaaatgtatgttttaatcactggtaattcagaatatgaccatactggaagtaggtttgtagcagaggtaattaggcaagatgaggaaatattgcagtagggtgaattcttaatccaatattatcagtatacttataaaaagatatgaacatataagattgccatttgaagatggaggcagaaaatgtagttatgtagcgacaagtcaaaagcaccaagaattgagagctactgaccgaagctaggaaaaggaaaggatgcactctactcagtctcagagggaacagagtcctaccaacaccttaacttcaggtgtctacactaaaggactatgaaagaagattgaattctctggtgattttcttttcagaggtaaggggtacattttcgtctggacctctttcctacttttcctcaaatcttgccttaatttcctgcctcatctcccatctgatttaggactaccagcagaaccctccatgtttcttctcacaatagagacatagtatttggtgacagaacgtggaagttaagatttggtactatgaaaagaaaagctaaggttcaaaccttggttctgtcccttgaaagtgcgtgtaagggttctattccttactgagtgactgtggatacggttctaaacccatctaagttcatcttccacatgtatgatccataaaactgtcctaagaattcaacggtaacatgcacaaaagacatttgcaaagtgtttagcatatgtgcattcctgctctgtcacttcagtcatgtccaatcctttgcgaccccaggg

SEQ ID NO: 58811 - DNA, 1964 bp, Bovine  19866880408530
  misc_feature (1)..(1): n is a, c, g, or t
ntgtgatgatcaaagacatgagtcaaactaaactgccccgattttgtcacagggtagctgtgtgtcctcaagcaaggtacttgacctctctgagcctccgtcttctcacttagaaaatgaggaaaataacagtaccgacatcacaggatgatgttacagactgaactaatggcaacccactccagtgttcttgcctggagaatcccagggatgggggagcctggtgggctgctgtctatggggtcgcacagagtcggacacgactgaagcgacttagcagcagcagcagcaatctctatataaagtatttagaacaatgccacaaacagtgccctgatcgtttaaccatgactgatttgactaaagctgtattccttttcactgtgctgcataagtattaggcttaacgtctccatctttcataatcactcctaaatattagtgagttttattagctaagggaataaaaccaataaacatataattacacctgtttttcttttatatttgacatgtattcttgggctagaaattcttaaaatttatgatggattccaaatctaggtgatggtgccagatttccaggtctcttctctaccgtgttccacgtcactatattattttggaagatttaaaatacattgtaatttcaagcatctaatgggaaatacactcaatattctctaaatgacaaaaagataaaataatacattaatatagccgaaatatatacttggaaggcagaaatagcagctgactatgaccttcttattgaaaaaatgacccagaaaatggacaaggagatttcatcacttatttcctgcttcgaaaccaaaatcttagatgcctttaaatccctattggataaagttggctttttggttgtttatgaaataccaagtgattaagggaatgttgagccttttattttctgatttttttcatcagcgtcttaacagaaagcagcacttatatttctttccttaaaatgaacaatagcctttatttttaatccctccatagctaggatttttagaacttactatgctaccgacttcaaaaactagattttggtaattccctcagaatacacgtttgattctggacattaacatacaatagtacctccatgccatgttctgtgttgctgcaaagtttaagttaaattgtatgtactgagtagcatgatgaattaaaaactagattcctacagtatttttcatgttggaatatggacttctcagagtggacactcagagcatgtgttgttcaatgagtaacaaaagacaagataaatgaagctgatacactgtagaaggcaaaaataaccaactcatatgtttgttttgtcatcattgttattcctatggaaaatgtaaatatttcatgtttacaacagagtgaaaatgtgtacatgtattcctacaacaattagaaagtatctactgtgtaaacttacaaactaatctccttgtctttccatcactcagaattgagtggggaagaaagataaaacaggaagacaattaaaatatagatgcaagatctaaggataaggtgaggttactctgggaacgtgaaggtagcactttaatattttgagaagaattaaatctccatttcaccttcgtaaggaggtgtggtgctgggatctctttacaaatgaaatgcagagtgattaaaaaatggactgccatagcctgctgtaatagaatagctttccttcttatcaccaagtaacacctcttatgtatttatttttggttagtcctatctagggccttcctgggtggtgatagtggtaaacaaccccaccaatgcaggaaacataagaaacatgggttcgatctctgggttgggaaggtaccctggaggaggggatggcaacccactccagtatctttgcctagagaatcccatagacagaggagcctggcaggctacagtccataggactgcaaagt

SEQ ID NO: 58812 - DNA, 2742 bp, Bovine  19866880438071
  misc_feature (1)..(1): n is a, c, g, or t
nttggactctgtggaagagggaggggtggggatgatttgggagaatggcactgaaaccttgtataatatcatataagaaacgaatcgccagtccaggttcaatgcaggatacaggaagcttggggctggtgcactgggatgacccagagggatggtatggggagggaggtgggaagggggttcagggatgggaacgcgtgtacacccatggcggactcatgttgatgtatggcaaaaccaaatacactattgtaaagtaattagcctctaattaaaataaataaattaaaaataaaatagttcagatatgaggaaactatgtcgagttttaggcaaatttatcagaaactaaatatttagcaaagctttgcacaggtgtagaaatatcagagctggtaggaatggcgtttgtgacagtgacactgggacctttggctctgcatttgctgagatgaatgtgactgccaccgaattttcagaatataagtgcttaggaaatagaaggccagaatgttatcagtctattaggagtttatgtaagtagaatgtctttttctgaaacccattcatggtctgcaccagataaataccaatggtctttagaaaattaaacatttttaaacagttcattgaggttggagactgttgcattgcatcatcttttgtaaagccaaatgcaattttaaaccacatgaaaatattataaatatgacagtaagaagctaaatttcaaagatatctttctgaaatattgtttttatcactataaggcaaatatgcataacccgtggaaacctctgatttgatggcaaatcactctttaaagaatgccttcaaccatgggaagatgtaacagattgatttgaaacagttttggatgaatgtccaggttaatatattatctcctcactgaattgttggaaaatgaatttataaagtaggaaattattattttttatttctcaggaggaaatcattactctaagcttactggaaacttagagacttgtggtttcaaaatttctcttcagttttatataggtattctcatgtatttaacccctgcttttgattgctttctggttttgtttctaatttacccaaaccagtcctgccttccctctggtgttccgtcatttgggcccacctgctcacaagaggtcagtggctcagtgcactggatgtaggcagccagaaaatgaaatattacaatgagaaattaaaacctttgtaattaaggcactgaataacatgaggcggtaaagacggaatacgtgttccacttttaatattttcagtaatctcttctaagaatacagaaaaacctgaaatacaattgtgaaattcagagaaaacgttttatgaagtcagccttagttaccttatcctgaagtagcaaatattcacactgaataaggaaggagattttaaatatctttgactaagtttctattttaaataattgatgggcagtttacttataagataagtatctatgctttgccagttggtctttggtttaaatgatttatagctctgtgtatttattggctatgtaaataaatttaacagaaatttaagaggaaatggcagctgttacatgaactgctttttaaacataagcttttaaattattgataacctttggagggtgctctaagaacgcattttgacacccactgctttttgatagtggacataacacctatgacaggcaaacctttccaatctctacttatattaaaagtgtgaacattaacctatagtgtgtatcttttaaaatgtgctctgtggtagtaaatttaaattgctacctattatcttttcttatgggtatgtccattatgatgtgacagccataaagagtgtaatcctgctataaaacaatgaacttgtcgcaatttccttttctagttgcctcagttttggggttagaaatggtaccataataaggtcacatccctaatgacacaagggcaaggaaaaaaaaagtgaagcaaagtaaaacaaatgaaaaaaaaacccaataacagaaatctagtacttaagactttagtttatttaaaaaaaatttatttatttggccatgccaggttttagttgtggcatatggaatctttagttgtggaatgtgggatctagttccctaaccagggatagaacccaggcccccctgcattgggagcatggagtcttagccactagaccatcagggaaatgctgagactttttattttagacttttatatcttttgctattttttaaaatttctttttaattggaggataattctttacaatgttgtgttggttcctgccatacaacaccatgaatcagccttgagtgtacgtatagcccctccctattgagcctccctttccccaccctccccctaccccacctctctaggttgtcacccagcagtgcattgagctccctgtgttctacagcagcttccactagctgtttgttttacatacggtaatgtatattttcaatgctactctctccattcctcccatcctctccttcccctgctgtgtcaagtctgttctctttgtcgatgtctctattcctgccctgcaaattggatcactggtactatttttctagattccgtatatatgtgttaatatgcagtatttttttttctctttctgacttactttactctgtgtaacaggttctagtctcaaccacctcagttccactgactcaaattcattattttttatggccga

SEQ ID NO: 58813 - DNA, 1772 bp, Bovine  19866880446473
  misc_feature (1)..(1): n is a, c, g, or t
ntgggagttggtgatggacagggaggcctggcgtgctgtaatttttggggtcacaaagagttggacacgactgagcgactgaactgaactgagaaatatcacagcatatttattttatgtaaatatttagtattatctgtttttaaaatgtttgttattttgataggtttgtgttttatataattatctatcccattgttatctatcaatacatcatggcaaacatctagaagagtttcaagttttatctcatgatctgatcatgtatcctagtactagtgttagttgctcagttgtgtctgactctttgcgaccccgtggactgtaacccaccaggctcctctgtccatgaaaatctccaggcaagaatgctggaaatgggtagccgttctcttttctagaggatctttccaacccagggatcaaaccctgtatatcatcttttatttctgttcccatattcagcattaggtagaggatgatgcaaattcagtatgaatgtgtaagaatattccatcatgataaaggattaatactgtgtcaagattaactcatataataagtaggaaaaacacaagattttgtttaataattttaggaaaatgttctatgcatgtaggttttagtgggccttgggttttcacaatcaaaagcatcaaactagtgagcatcaaaacactcttaaaaactctttaaagttaattgaagtaaatataaaagatgaaaaagtcaagaaaaaatagaaaaataaaaatggatcaataaggtttaaaaataatgcactgtttctattttcagtaaagtaaaaattttactatgataaataaattatagaaaccttaaataattttatgttttgacaaaagaatatctgttgttaaaagatgttatctccctttatacattaatatcattgctttagactcctttaatttggagttcatcaaaattcatttgaatgaattagaaataatattatgaaaaattagattcatgtgctgatttgtattcttgcattcattgggcactttgctttatactcttctagtaattgtaaatgctgaagcagcacagtagaatatgccaacatcggcagactagtcactaaacttaagaagctgtttacctaattgcagtgctaaactgtccaatagcctatatgcgcttgtatggtactggtttgtgaaagcaaaatcaggctagtgtagaataagttaggggattgtcagattcgtatatttgatattttataactcttacttccctactatacctattatatcttttcatgtcaagatagtcgtccccagaaacagacatgagactaagaaggcatttatagctaatatgtatctttctgccctaccaggtgattatgtcttagttatctttgggtcttaagctgtcccagacacaaattttcatgtggtgggcattaagcacacattgtttaaaatgtctttgtgtgtcttcgtaagatagaaggatgactctggaatcaacctgctcgtaagctgctgtgtcacaaaattacagttaattcaatgatattgaaccacgggggttatttaaatagaactgaattttaagccctgggtttaaaagtgattatcttactcttttcctgcaaaacatagctaatgtgtgcctttgaattttcctaacctcccctcattgaattgctccatatttactgctgaagagtgtagctctgcttggacactcacagtgatttgcacctatttttcttgaaagtggcagcctatcattat

SEQ ID NO: 58814 - DNA, 1363 bp, Bovine  19866880509452
  misc_feature (1)..(1): n is a, c, g, or t
nttttagaaataaaatacattcaaccattgaaaacaagaaaggcaagacagactttgaggaccaccagagacgggggagttcagagatttcagaaaagcagtcaaagcttgcactcacctggctgccttctttttgccaaaaaactgctggctgtgggtttcctttagtttcacagggaaatgtcactgttcgaccttgagcaacaatctgatctcttggcctaaccacaaactgtggaggagctataatttaaaaggaaagaaagtgtgtaaatataaactgttgacaaagaaaaatacatcaaagggaaaatctggtacgaggcggactgctcagtgtgagaccgaggctacagatgttgatttatttttaagtatttctcaaaatacaatgggaaaaaaaagagcactctatcaaatgtgaggaaagaagtaaatgtattagtagacacactttaaatgtacattgcaaatcttgcagtccatacacttgcaaagaaaaagtagatttttaatggtaatctaaagtttttaataaataaacatggtatcctcacatggttttgtgttttgaatgaagactgaaaaaaagtcattgcattactcaaatatctacttcctgtggcatcaatcttttgacaaacatgaattgctcttacaatatttgcaagacattgtgcacagggataccagaaggcatagaatatgatattctcaaatgcttagagtgcttatattctagatttgaggagctgaagtgctgaaaacatcaaattgaaggtatgggaattacatacagagataactaacaatatacaaaaacacatgagagtggttgactaattcatttcacttagattaataagcatttggcaattattatgttcctctactgggcactagaaactgaaaagtattcaaaatattgacatatcaataacctcaggtatgcagatgacaccatcctcatggcagaaagcaaaaaggaattagagagcctttaaatgaaggtgaaagaggagagtgaaaaacgggcttaaaactgaacattcaaaaaactaagatcatggcatctggtcccatcacttcatggcaaatagaaggggaaacaatggaaacaatgacagactattttcttgggctccagaatcactgcagatggtgactgcagccaccaaattaaaagacacttgcttcttggataaaaagctatgaccaacctagaccgcatattaaaaagcagagacattactttgccaacaaagttatgtctagtcaaagctatggtttttccagtagtcatgtacggatgtgagagttggaccataaagaaggctgagcgctgaagaattgatgcttttga

SEQ ID NO: 58815 - DNA, 1235 bp, Bovine  19866880522029
  misc_feature (1)..(1): n is a, c, g, or t
ncctccatccatggaattttccaggcaagagtactggagtggggtgccattgccttctccctagggagaaacattaacagcatatagagccacgtactgagatatatatatatatatatatatgtatacactataatgatatatatactatataattgatatatatatatattatatatactatactatttattgtttgcttttggagaaaacaattcaaaagaataatggtcaaagcagaaaaaagaactactgaaaaaacagtttctaatgtatatataaaatgaagtttaatctcattactatttgattcagcaatttcaaatctggaacttattagtaatacttaatagtattacttaatagtaatacttctgtatgtgggcatagattgttttacaccagtagggaaataaatatgtaaattttgattcttgggtacaataaaatataatgcagccattaaaaagattaagctcgatctgtatgatatggaaactttcatgttaaatgaaaaagttgtaaaacagtttattcatcatgattcctttgatagctaattaaaagaaacttttgtgattgtgtgtgaaagagagagtaaatagaaaagcaactgaattcacactaaatgaataaaagattaacatcagcatttctgcagagaacatgggattgggtatgattataaataaactatttcacattttccttcatttttttaaaacttgactgtatttaaaatttaaaataatgctcttgaaaatatttttgcagttatttttcttattcatttaatcttacaaatatgcattaatcatttctctcagatatgtatagttaagttctagatatatgcttttttcatttattagatattgccaatggagaaatgcataaacagttggaatgatcatgcagtgggataccttatttcattaccataatctggagacacatgtatcaatgtagaaaaaagttatttgaattaattgaagtctcatagtataccatttatgaacattttaaaaaataactgattgtatatattgttctggagaaatacatattagtaaatgattaaaatatgcaaggagcaataccacaatctgaagagaatggttaatgctggtgggagatgttaatagttgggctttgtctttatatatttgactgctcaaaacatgtaaagcatatatgatatataacttgcttgctagtaaacatgtttgctatat

SEQ ID NO: 58816 - DNA, 2533 bp, Bovine  19866880551101
  misc_feature (1)..(1): n is a, c, g, or t
natatattacatatatacacaatttatgtatacagtacttttgaagcaccagagtaaaggttgtaagttttctgggatatagtgacatgtcaaggaagaaaatacatcttaggggtcacttctgaaacatcgatgttactataagtaaatctttggcatgcctaagtggaaacagtgtcagactttatttttgggggctccaaaatcactgcagatggtgattgccgcaatgaaattaaaagatacttactccttggaaggaaagttatgaccaacctagatagcatattcaaaagcagagacattactttgccaacaaaggtttgtctagtcaaggctatggtttttcctgtggtcatgtatggatgtgagaattggactgtgaagaaggctgagcgctgaagaactgatgcttttgaactgtggtgttggagaagactcttgagagtcccttggactgtaaggagatccaaccagtccattctgaaggagatcagccctgggatttctttggaaggaatgatgctaaggctgaaactccagtactttggccacctcatgcgaaaagactctgatgctcggagggattgggggcaggaggagaaggggacgacagaggatgagatggctggatggcatcactgactcgatggacgtgagtctgggtgaactctgggagttggtgatagacagggaggcctggcatgctgcggttcatggggtcgcaaagagttggacacgactgagagactgaactgaactgaaatgagaaacctattatcttttgactcaaatttttatgacaaaattctaggaacataatgtgcctgtgtatataatatgtgtgacaggttttaataggaaaaataatagttcacatatttcacccagaaagaaactcaacaaggagctaccatgggaaagtgctcaaacgctgatttaaaactgaagcaaattcacagatgtttggtttctgataagaatgaagtgccagttataatttgcctatggagaccttttaaaataatgtcaagtcccaaagaactaccaccatctgtatggttgctggctccaagacatggatctaaattaggcacagaaagtaaaccaggattattttaaacaatgacaaactgatcttaatttgaaataagcctttgttggctccctggtttagaccttttaccctctctatgtggttcctaattttctgggtaataaaaaacaatggactttacagtaattcttaccacaagcccacttacagaagtataaagagaatgagcccctacccattttctactcccaaattccttctggacagaggtgcttaccaggagaataggacacaagatatatgataggtagctacatgattaatcatttactcataattctagccaagttattagggaaaacaatgggcctcttaggtacctgggaatactttcaagcatgcaagatcaaaagagcccttttgcatataacaaactcttgcctacagcacaaaggtcttcttaaatcctcttaggcattcaacaaaagtaaaactagctagacaatatatggctcaactggtggcactagtgataaagaatctgcctgccaattcaaaagatacaagagactccagttcaatccctgggtcagaaagatcctctggagaaggagatggcaacccattccaatattcttgcctggaaaatcccatgaacagaggatcctgataggctatagtccactgggttgcaaagagtcggaaaacgatttagcaactaaactacaaaaaaatcaattaatatttacttcatttctttgagttgttctcttcataataaagagtaattataatttttcctaaatcattggtcagctatgataagtatcaaaacacaaagccaggagaaaagcatttaattctcccagaggatgttcagaagaggaggatctacaaagagctgactcataaagataggaaagagccagaccctgaaatccccaaatactgaattaagaagtttggacttaaacccgaagttattgcccaagattctgaggacggaaagtgacatgatcaacttaacatttaaggaaaaacttgttcaggtcactaaatagaacatggattggagcagagcaagatcgtgagactaattgggatgctattgaataaatccgggagcagttttatcgaatggaattagcttagtggcagtggatatggataaaacagatattggtggtcaattgagtatgataggtgatcagaatttgaggatgctgggtagaaagctgactgtattgtgttaccattcagtcatcaatggaactaaagaattagctttaaattagctccaatactaagtgtctaggttgaagaaactgctattcttttatagtctgtgtaaccagactcgtaactttgcggttgtgctgcaaatgtgagaaaactggcttgttgtgagggtagtgccaacagtttatctctttattgaaactcactttagctcgtctatacatcttcaaatgtctc

SEQ ID NO: 58817 - DNA, 1090 bp, Bovine  19866880565995
  misc_feature (1)..(1): n is a, c, g, or t
nctcttctggaaagattgactagatccaagattggtggtttcaggtcattataatgatcatcatttgattttaattacctgcttattcttgggaagttcctctacatgaggagcagtattacttcttgctgtcagctgtatacccagagccaagcacggtacttgaagtatctgaaaaatacttgttgacataatgagtaaatggatgactgaatgttacactaaatgaacagatttatttattttttagtatcttccccacaacagtattcaattaaaactttgtcaattaggaattatataatcccaacaaatgacttattcacagttctcagagaagcacctcataattggtggctgaaatagttgtggttctcacctgctctatttattttttttcccctgatgaaactatatagaaaaaaaaagagatattttaaccatgggtcaacatataatccccaaaagtatttaaaaaaaaaatgagagtaagagattctctagaacttggtttatgttcctgttttttagttccatgtcttgagataaatgtatttgaggtttctgccttatataacttgggctgtggatcagtttttaggagactgttgattctgtcctggatttactcatctcctcttgggaaattcgggtgaaattagggattattcagtttgagcatttgatcctccttgctgccaattttcaacattcttgtcagcatcttgtttcctaaatcttgtgacatgattctgctatgatagattttattggtacttgatattgacattgttctcttgtgatttccctttggaaaatctgcaaacaaatctaatagcttgtcaagaggacctgaccagaacctgaggtcagattgagctataattaagaaaaaataaatagattagccctagttatctgtagtagttcaatattccctattattcatagcctattggctttataaattttagctttggtcttatgcttattctgttaatctattacatctgtaaaacctgaagattttatgactctttgctttataactttgcttgcttaaaaaatatccgtttcttattttcatatg

SEQ ID NO: 58818 - DNA, 1142 bp, Bovine  19866880709764
  misc_feature (1)..(1): n is a, c, g, or t
natacatatatatgtgtgtgtattatacatatatatatatgtgtgtatatataaatatataaaaaataaccactgcactattatggtttacttgtccaactgagtctgtgttatttgtgagcttggatttaggttctatgaattctgtgcatttgcttctttacaagtcgcacaaacatatatttctttacactcaaactcagtaagaaggccaccagaaatacttcccatccacatgaccctgagacttctctgggaagttttatttgtgaacctttcttcttcatccaggccttaccttgtattcctggataattccattctgatgatctggaggaggaggatcccaggaaacactaatacttgtgctattgtggcttccgacagtcagcacagtgacagattgtggaggggcacttggggctgcagaagaagtcattagaataaaccctaattgtaagtcttaatgtgcattaatgctgcttatagaatatgaatataaagacaagatgcaagagggtcttgtttctagtagttctgaatgaacagtgaatggttaaaaaaaatcctttaaatataatggatagatttaaagcaaataaaacagctacagtgatatgtcctcaacaataaatttaacagttaacattcgagtttgtgtctcctatatgcctagaactgaggtaagagttaggtttaattttcacagtaaaaataacatctcacaaaaaaaattcacaggaaataaaaaacaacgcatcttagttttacagataaggaaaaggaaagctactataatagacttatctaagtcaaactgagggagaacttgaaccaggtatgtctgattttagaaccttgactcttctgcctctaacaggctcctcttttgtaaaacaaataagcaaaacaacaacaacaaaaacattgctatcaaaagtattctgagaggatgcattccaaaatttgaccagccattatttctgagtagtagcattactatctttttgttttgttttggtttatgtttaatacataaaaacagaaacatagctataaatttcaccaacacagagaaaagacagttttgttctcataatgagaaacataattcactggtgtaaactgattcataatttaag

SEQ ID NO: 58819 - DNA, 1399 bp, Bovine  19866880715841
  misc_feature (1)..(1): n is a, c, g, or t
nattcaggatctctattggtcagacagctaagcactgcatcagaatcactatctgcaattctaacgctgcatgcagttaacagcaagtctgaacatcattttagatatcagttatgaattgtgcaataacatagccaagttttaatttgtattcaacagttcttaactattataaagacatagaaaatgagtcacagggcactacaggtgaatgttcaaatgtttatttttaccgtataagcaagcaagctatacaatagtgaagagacttgtccataactgaatagctggtagaggcagaattagaactccaggcttttcatctaaaatgtattaggcttttgaaaatgctgaagtttaagggaagcatgcacatgacaatgtgactaattgcgaaaccccttctaaaactcattttaacaaaatgagtcaaataaatgactctagtggcaatataaggacttcccaggtggtgcagtggtaaaaaacccacctaccaatgcagaaaatgtgggttcaatccctgggttgggaagatcccctggagaaggaaatggcaacccactccagtgttcttgcctgggaaattccacagaaagaggagcctgatagcctgcagtccatggggttgcaaagggtccaacgcaactaagcatacagccagagacgatcttgttttttcaaagcgagcatcaaaatcacctgggatatttctttaaaatggagattcttggtctctacaagtggaagggtctgagaagctgcagttatagcatgcctactaggagaagtgcatgcacttagacctggctagatgcaagcactccacagaaacatcaaattagtaaactgaacgaacatacatctttgaataatcttctaagcacccaaatttacataatggattatgtctgcttctcagagactctcaaacaatgattttgcaatgattttagtaaaatatttagtaaaaaacaaatttaatagtttattagcactttaaactttgaagaattagaggtgaagtaaaaaatcattcattcatgaatatatttcaaattaattttatttagtaaaaaaccactcatttgcagtgagtgctatagaactatgtcttcagaagtgatttcaattatataataaaataaaggaggacaaagcacttaaaatatttttgattccatttcttgtatttgaaagtaaactgcttctgcctccttattcaattggaatatattatttcttggctctaagctttacttttcattcatacactcagtagctatatctagttaagcaacacttttcaaacttctctgaattttccctccaataaaatttctgtgcagtggctatttttcttacatatattataatgcgtggcaactgtgcctcagat

SEQ ID NO: 58820 - DNA, 2120 bp, Bovine  19866880769765
  misc_feature (1)..(1): n is a, c, g, or t
nggaaaaaaatgttatatgccatattagttatgctgattctggaggtcctttggaagagccaaatgaatgtactgagtagaacatttatgtcttcccctaatctgacaattgggagaggtcagagattttaccaggattccttgaaacacctatttgttctaatgtacagtgtccaaactctctttaattctatttttatgtcagtgagtatatcttcattaatagcaagctatttgcctttactgttttcttttatatccgctggtctgtaactcatgattcagcaaatatattataaaatgaaattttatgaaaagagaagaatttgcaaagataagatttccagccttctggcttattatagtcaagccctgttgtagagaaataagactcgcaaccagtgaccaatttacctagacgctagaaatggtttccacagagagccaaattacccacactagacactgtcagtgagtcataggaatgcaaaccccaggatttgataatattttccttagacactctaaaaatattcagaggcaacatcttcaagttggaatttgcttggatgtgggcagtagataaggtcagggagattggtgaaggatccaaatgtatgcatataaagataggcaatggccctatgctcttgtattcttacactcagcttctagcttctagtattaatatgttccttacatcatgctcgaattactccccatcacagttgagcacaccagaataaaaaatatcattaaatatttatgtatcaataaggaacatctacagaaactagactcattctagttcattggagattaaatttggaaattatcagcaaggaaaacatgtacagtatctcaaatactgtcacagatttgagaaaatatgttaaataataatttataaaatgatatttaccatttaaaatctttaaaacttggacatttgtagttctttgtgtttaaatgttcaacaaacatttaagaaggcatcatcgttcataaagcatgatggtaggcaatgagggtatgataacacaaaatattgatgattgctccaaattgaaatgtgtcaccttttcctactattaagggaactaaattcttcatgttcacaaaattaaatacacacacacacaacaattcaaagaaaaatggaatcattcctctctatgtcagacatgaagagttctgtcattccccttatacctgcaaactgtcctgccaagtttagaaacacagccatatgctacttcacaagtcttttgtttgccatcctctccctctaccaatataatttctccatttttttaaagtctgattttctcttctaaaaagaaaatcattctaagaaaatcattactgaatttttgaaagatccttttatcctagataaaaggttaagcctactctgtggctttaaagggtgtgggtggtgagcaggattttacttgcttagtagacccaaaagttactgtgtcctttaaatattgagtgcagaatggatgttaatttctcaccagagtgggagatagatgtggtcagcatggggaatgtgagactgattttaatcagttgtcattagaaaagaacatagagctcttactatccaaaattagtgatgctgttagagcctactttatcctaagaactgccaataaattaaaacaggaccagcaatttgagtttaattttcttggtaaaacagcaaaatatttgaggtccttgtaaagctttgaaagacagtaccccaagcagctaagtaggggtggaattgacagctccctaaactgttccgacagaactcctatgagagtaagtcataaaaaggacacagcacatactcaccagggcatctctcccttacaagtgacactcccttcccccagtgctgaacaataaacatatagcactacatagaattttgattggattgcaaaatgggttaaagtccaaatctacagatagtaaatagcaaaggcaatcatccctaatagccttcgaataggccaaatgggaagttctttcagagagacctatacagacaattattattttttaaacatttgtgttctgacagaattgtttttatgattgtgtacccaatttcctctaaa

SEQ ID NO: 58821 - DNA, 1426 bp, Bovine  19866880795973
  misc_feature (1)..(1): n is a, c, g, or t
ncaagtgagggctactttttgttccagtgcacacgctcctcagagagggtggcttctcttgttggggaacgtagtctgcaagtgcgtgggcttcagtagttgcccctcctgaactccagagctcaggctcggtagttgtggcgcatgggcttagttgctctgtggcatgtgggtgggatcttcctggaccaggggtctaacctccggcccctgcactggcagctggtttcttatccactgtgccaccagggaaatctagatagcatcaattttctttctaagcctttcttgagccattttccctccacaatattaaatatcagaagttatcaaatcactgcccaaatagaaaataattggttaattcaatactatatcaacagtggtaaatgttctctctcatcaatatgcctctctcagctaggcaaaatgtatcaaaacataattattcttagctataaatataatgtattttaatgcaatcatgggatagtaggaagaattctatagtaattcagtagaaaactgatgctttgttttgctacagcaatcagaaattggcaggcttttctaggtggtgaactttattgtatttttattagtaatttggtgtttgtatctggccttttcacaagttagttcacatgcaacattgatttgttgtcatcctgctcattattcaccaggcaagacagataatatgatgcctcatatttcactgacagtaagtcaaagaacaaaagcttatctaggaaaggttggccaaaagacctttggattggcattagaatcatttgcacagtctttttatcttattgcaagaaaaagttgaatttccatcactcaagtaagatactcatctatgaatgtgaacgaaaccctaaaaacagagctaaaaatgtttggatttcataaacattcatagagtcatctgttactttcttgttcttcttcagaaaccacaggaaacctaagtatcagttgttctggaaggagttaagacatgaatacctcagaggtgatacctagttctccccgttgtatgatttgcaccgtgtcccaaatttctttcatctgttctctcgtgtttttcacctagactttcttgtattccccatccctctctattttccacttcttgcacaaagaatcaggatgaatccctgcttttttcttagttttgcttatgtttcacagggggacagaatttgctcactcctggtctattaatagaatatctttgtagaaaagacttggaacaactgatggtaaatgctcattctagttaaatagaatagcaattagaatattttttagtccttcatgcattatgtaatataattatcagatcagatcagttgctcagtcgtgtccgactctttgcaaccccatgaattgcagcacgccaggccctccctgtccatca

SEQ ID NO: 58822 - DNA, 1981 bp, Bovine  19866880800884
  misc_feature (1)..(1): n is a, c, g, or t
ncatagcacacagtcacattctttaatgcaagtaagtatgttttgaaatatgttgtgcaaaacgtacaatgttttgaaaagtgtgacaggaatgtgtatgtatattaatatgtatattgcatatatatgtatacatgcatagtatataaggtagtatagagtaaaaataggataacgattgttaagttaaaaataccaaagctatatttaatgttgttgaaaaacagtacttaaaaagcatttctggaaagattaaaaataatagatactatgaaaatatgtatcttcatgtctgaatttaaataaggaaagaattcctttataaaatgagtcgcactgcataacatatcggaattccagcatgcatcagtgtacatgagtcctttggaatcaaactgaagaaaaatgatcacccagagtaaacgttacaagataaatgtctttggtcaacactttggatggtgattttttgcctgttgtagaaaacagcttgcaagtttccaaaccttaaaattcaattttgggaactaaacttgaagatactagaagagtgataatttaaactattttttctgttcagacattcaaagacaacacacatttagagcgatctattttgttgattgccagcaaaggtccatctagtcaaagctatggtttttccagtaatcctgtatggatgtgagagctggactataaagaaagctgagcgctgaaggattgatgcttttgaactgtggtattggaagagactcttgagagtcccttggactgcaaggagatccaaccattccatcctaaaggagatcagtcctgaatattcattggaaggacccatactctggccacctgatgtgaagaactgactcatttgaagaccctgatgctgggaaagatggaaggtgggaggagaaagggatgacagaggatcagatggttggatggcatcaccaacgcagtggatgtgagtttgagtaaactccgggagttggtgttggacagggaagcctggtgtgctgcagtcgatggggttgcaaagagtcagacacgactgagtgactgaactgaactgaactggtggttcagcaggtaaagaatccgcctgcaatgcaggagaaacaggacatgtaggctcagtccctgggtggggaagatcccctgaagaaggaaatagcaacccactccagtattcttacctggaaaaccgtgtggacagaggagcctggctgtctatagttcaaagggtcagaaagagttggtcacaactaagtgactaagcacatacaacagaatttagaatttaaatgatatttttgaagaaattctgtccccaaacattcctactgcaaatttctcagaattttttttttttccattagacattcattcctttggtatgatcctgtatgccttcatctttctccagtgaaagtgcatgtgtctggtaagtcatcactaccatttacaatgaacttcaccttaacaaatcaatgcttccctaaagagacagttttatggtctaggggaatggaagtaattgacaaactggaaattcattacggctagtttaaagcaggagtgggtagaaagaaagtaacaattgaatctgtctcacaaatatgactggttttgaagtatcataagacagaaaataaaagagagaccactgaatacctactgtatgtcagctgctttagatgtgtagctcacttaattctcatatgaaataatcaaggaggcaaaattttacagagtatttaaaatgtagagagaacacataacccacccagagtcaaggacacacaagagtgacaggcagggactgaccccagcgtcgtgctctttgttcctaccacgctgacctatctcctgcttcccatgcccccaagcccctagaagcctccagaatcaataaccaaccacagctctgcagtgaatctagaaatgggactgtttacagaatcacctgattttctaattt

SEQ ID NO: 58823 - DNA, 2277 bp, Bovine  19866880808763
  misc_feature (1)..(1): n is a, c, g, or t
ntgtgcaggtactccatcagtgctagttgcctgcttcctgtacatatccgtgaaagcatccacagtatctctagttcatatatgaacactgagactttgccagaaaaataaataaataaataacatagaaaacttccttacattaatctatttagtcaatgaagcaatagatggaatactggatctgataacacaaattagctctcatcctataaacattgtgcactaagtcaaaatcaactgctgcatcttatttcttcagggatgctggtatctaacattatacaggatggagtatatttatttccttctagtcaaaattagatggggatggtcagatcttcaaagactcttcagctagtagcacttaattatatgggcttccctagtggctcagacattaaataatccacctgcaatgcgggagacctgggttgggaagatcccctggataaggacatggcaagccacttcagtattcttgaagaattcccttggacagaggagcttggtgggctacagtccatggggtcacaaggattcggacatgactgagtgattaatcacacacattgtgtcccctgtaacttgaacagtgctttgaagttattggctttcaagaaatatgatatttatttccttctagtcaaaatcagatgggaatgggtcagatcttcaaggaatgttcagctagcagctcttaattatatagaatcccaaattcagaattgatgacattctggaaaaggatggtaagttccattgactagcttagaaatgacactatcaaggttcaatatgatatgattatgatcatccaggaacagactaatgcctgtttatttattgttaccaaatctaagctctgtctgttcactgtaggatgggccaattaacctggggtgcaatggctcggaatatgactttattcagaaagtcggctgacctagaagatggatgagtaatgtctcaaaataaccatcttgtcaggggtctgaatgccatgttctgttatagaatagaggaggggaggacttgaagaagtaaagatcataatcttgcaaatatctcctggaatagccaatatcaggggtgtgtgtgtgtgtgtgtgtgtgtgtgtgtgtgtatgcaggcactcagtcatctctggcactggcagggagattctctaccactgcaccacctggaggagatgtattaatctcatcaagcagaggaggagggttccctgaggcaggccaccattagggaggggatgtgttaatctcttcaggcagaggggtagggctccccaaggcaggtcattatatatgattacaataacaaaagcaaatgaaaaacaaaggttaaagtcaaagaaacagatccatcatggagtcagaattggctcttccctacagcattatgaaggttatgatgcagttttcaactgacaacattcaatagacatcaagatgacatttttcatgtcaggttttgattttgtttttgtttcaagagagtagggggagaagagatggaggggtacttcatatcgaaatttgactgaaaccaaccaagtgcatgtgtctacatagaagacgaggcctcaagttttctcatttcaagcctgagtaatttagatcatctggaaggcacgtggggctgcaaggccacagattctagtcagtgtcagttgcctttgtacaggagacaatcaagcagcagagcacactgtaatttttcttttatgttgcaaagggttctttaaaaagattgtattcttccctcacatttcccttgccacagctggtggctccctcctaaatggtatagtagggccctggagcacttgatgtctatcttctcttacttgactgacacgatgtgtgtcaaaatgtaaatagtctaacacagaaggcgcaagagctcaaggagaaaattataaaactgtttttgaaatgtctctgatgggctgtgctctgagaaatttcagcctacgaccttctctaattctaagcaggtggatttataaatttgtgctaatgaccacactaatctaaagccactgaaaagactgaaatgtcctctctcccctccttgaatacatagcactttctgcagtgatctgaggcagattattcacaactcgctatagagccctactgttccttagagcgaaattaaattaagcccatttcagattcttttactggttattaaggaatagtgcatttcatttttagcaccttgctctcatgagagttctgttgttaaggaatcattaggcatcaataa

SEQ ID NO: 58824 - DNA, 1367 bp, Bovine  19866880811211
  misc_feature (1)..(1): n is a, c, g, or t
ncaatttgattgctcagtagtagctccaattccatagaatttaaatttgaataaaggagagaacaggagtaatactgaaagtcaatataaaaaaatatttcaattatctaattttctcagaatcttccaacattactgccattgttaaagctcagactttcatcatcttttatctatacaaatagaagctgttattttccatccagtgaatggataaatatgttaaaataaaaagaccgtttgctatagcaatattttgccattttctgatctcattaactcaacatttagtattgactagcaactggtgaaaaaaaattcttttctttaaagcgtttttaggaaagagtcaaagagaatcggacttcccaggtggcgctagtgggaaagagcacacctgccaatgcaggagacgtagagatgtggcttcagtccctgggtcaggaagatcccctggaggagggcatggcagctcactccagtattcttgcctggagaatcccacggacagaggactagcagcttacagtccatagggccacagagagtctgacatgactcaaaagacctggcacacacaaagagaatcaagtttgcaaatggacattttagtcctgattctggaaggttgttcccctgtgagcacatctgaccattttacttttttgtgggctttagacaacttctctcatatagagaaaccttaggtggtgcctatatcttgaaaacagggatcgctttcattcattctttcacatattccagcattaatacatgatttggttatcaaataatataaatcctacatgtgaacttggaaaagatgaagggaaacatttttataaacaagggaaaacaagctatcactaattttgcctgtcatctcatagtaagatgtaaaatgatagaggacagcgtagcagatatgtgggggagggggaggttgctcatgatagatttcatttaaggctccagaccatctctgttgataatcaattccacttaccttaattataagtacctatgtttttaagtctcctcaataatgtaatttctttaacagatactaaaaaatctctggcttttctcatgaaatatatttatttctttgctgctcctactgagctataagtcaaaagaaaaaaagaaaaaaacaagaataaattgctaacaactattgaagaaacagctattttgttcgtctttcttttttctttcttcatatgtctatcaagtaaataaaaccagtgaaaaaggatatcagatgtttctgttacaacatgcccttataagtcaaagaactgggcacatatccatggctcgaaagaaaagtttgcagaactgcctggtcaccttgagagactatt

SEQ ID NO: 58825 - DNA, 1252 bp, Bovine  19866880814082
  misc_feature (1)..(1): n is a, c, g, or t
ntacgtgtgtaggttatttttcctgcctttcttatacatacatacacatgcaaaagtatagaaattaagtatattttatataaatgaactcatgctctctttctacttactctttacatacattcaaaactatgtaatgggatatttccatgtcagtttataaatctcttcgagtacactattgatatgtgatgcaaagagtgactgttactatgagaataacaacagcctatatcactgacggcctgctgtgcagagatgaatttagctgagggacaagaggtcaaccgttttgactaaggaattactgacttttaacccatcatgaaaacagctaaattagcctttatttattcttttttttctctgaaaaccttgtctctgctctgtggactttaacctggacactaccacttagtgtccaatgactcatttggacacttaatgagtcacttaacctcttttgatgtctctggctccccaactagtgatcagcaggttctctacctttccaagagagaaagacaaagcccttatgatccaagctaccttagattaaaactctaatgcatagcaaaataagaaggaaaacaattgcatgaaaggaagtgttaaggaatgctaccacaaggacatgaaagcccaggatggaatcctgcaagagattatgaaatgttctccccaaagaggccacacttcacttcatcaaccactgaatattacccttctgggaatcattactattgattactgtgccatttatatgtatcacgctgtatgttaactatctgtttataaatttgtctccctagagtctgggttctttgaaagtagggaccacttaaagcttatcaatgaggaccaagcacttgaacataaagtatatttttatgaagtacttgttgaaatgaattgccatcttaagaaacattctggggcctgaccaaagaaggcatgtccaatccaaactcttgatcttggtcctcaaaagtgcacacagtcaggccacagtggcctttccgccctcccatctgataattctagctcttgtccactcctctccagccactgggtgtttttcagttcttaaataagcaaactgcattttcaactcaggaactttaggcaagtggctccctatcctttatgagagcaatccctcaagtttcagttcacattcttccttctcagcaccgtctaccctgacaaggcttccctgctgttcactactttagcgtgctgttaatttctt

SEQ ID NO: 58826 - DNA, 1779 bp, Bovine  19866880822456
  misc_feature (1)..(1): n is a, c, g, or t
ntgaaactgttatgatttttagatttgacaaatcaaggcctagattctctttttaagaaaaaatggaaagtggagacctgtactgtttcataaggaaaagaggaactaccaccaataataaaagaatatttaaaaaacagagtatactggttttaaagaaatcatagtcagaggcaagattcagataaatattaggggatacagctccaggaacagcaagtgactgaaaattattccatgaaacatgtggagtgggtagggggttgggagtgaaagctgatagaaattcggtttgagttgctcacaataaatgttttagggaggatctggagatctaccaccccattaattgtagcaacgtaaaatctgtgtgagctcagaattatacacagaggagactctatggggatttagctcaggttaataagtgtcaacttcctgggactatgaaataagctggaaataatttgctaagaagtttcctgaatatgaagtggctttaatagatagtttgatgagtaaatgaatcagaaaattgagggctaaattttccttacatttcctacatatttgcagtgatggtaaggtcaaaacatttggattataatttgagaaccatcaactcttgaagtaaagactatctaagccaagtcattgtcaggcactaaaataaaatcatgaatcccactaattcaaacgcaatttgtaggcctagagctcacatttgagaaaggaaaactaggccacactgttctacatactatgcaaatatatagttcagctgcaactgtctgagattgtgaggtgtgcagaaaatcatgtctactaataatcaagtatgcaaaacatttttaagtaaaattgaatgaatttacggttccttttataaaacatcatatacatttttattgaataaaatagggtagcaaggagcactagatatttatacatagtaggaagactctcttatcttcgccaagacactgtgttgttaatgattgctgtgatcacacattattgtagtgctttccttttctgagcatgtgtcttgaatgacaatataagcatatgtccacaggaaggtagtgcccttgtgaatgtcaaccataataggtattatagcagaaaacgatttgacatcatcacgtacagacttttctatggtatttattctcacatccaagtatatggagtatctactctgtcccatgcacttttctgggcaccaggcatacatagtgaacacaaagggtaaggatgggcccttaattttccacctgatcaaatcacccccccacacacaaatgtgcaaaatacatgaagtaacggttttcacaaggatgttgaaaaactcacaaataactttctctttcctccttttaaaaatctatttattgacttacttctctctgatgatgctgtgaagacagatcatcaccgagacaagatactttggagtcgtcattgattctgctgtgtaccttaattgagaaatatagtatttgtttgtcacatgaatctgcatattattatcttcggttttccttccagatggcccttggaatgtgtaaaactaacctcttcaccatttttgtcttttccatgttctagcaaagaatacaatttagaggtttctcatctaaaatccaaggttatgatcagataatcttaccaagaacttactctaaacataacctctgttctgatatagagtcctgccttaactctggcccatttcccttcattcctaaatgcaaatttctactagaggagcatcag

SEQ ID NO: 58827 - DNA, 720 bp, Bovine  19866880837737
  misc_feature (1)..(1): n is a, c, g, or t
natttgcagaatatttgttttaaaaataaactggattctaagacaaggacaagcaaatcatacaatttacaaagatgacagagatttcattactgggactctttaaaaatatgaggaagggcacatttttatctctaaattgaaaacacgcaaaccaaccactctttaaaaatggtaaaagtcacatctttaaattaaagatgacaatatgctcatgcattttaattttgctgtattcatttggggctattgaacctacctgactggtttcctttactaactcctagatcattgaaacccaggctttgcctacaccgcataatgtcatgtttttacaactctgattattcaagtccctgaataaagattgttccgtatgtaaagtgaaagaggaaatgtgaaggttaactttttgttgaggaaactcattttcacttgccatttgattctgtcttgactctgcacttaacactgctaagtctgagctccccactgtggaatcactattaatacgaatctagctaacttatgcttctgagttcagctatattatgcttttgacacatattttaatttttatatcttgtaaatgtttctacaacttcactcatgaattaagttttacttagaatttgcatttatggtattttaaagcattctgtgaacattgatatcctgagtcagcaagctacagccagtgggctgaatttgacccaatac

SEQ ID NO: 58828 - DNA, 1699 bp, Bovine  19866880842812
  misc_feature (1)..(1): n is a, c, g, or t
naccaggtttcatgttaaatggtttatatctccatcttttaaaaaatatttattttcaaaactcaatttaactttcagtaaatagttcactggtctactagtgaatttacctcttaaattactgccacattgcatttttaaatacatatattattttaataaaagctaagtgaaggaacacttttattgtatttttataattttatgagatacagttcatattaatgatcatactttataactgagtttatatataaactttgctttgcccaaataactgaatgcttcaaaaagttataaacatttatttatattttattaaccaaattgtattgctaatttgacacatactaatgtggtggtggtttagttgctaagtcgtgtccaactcttgtgtccccatggattgtagcctaccaggatgccctgtccatgggagtttccaggcaagaatactggacaggttggcatttccttcttgagtggatcttctgacccaggattgaacccgggtttcctgtactgcaggcagattctctactgactgagatatcagggaattccacatactaatacagctctcaaaaaatgtgagagatttgtgaaaggaagtttctatccaattagaatatgcataatattttgaaatattttaggaggattcttttaaaattaaatactaacataactacatcactggttactggatatataaatacattattatagtaaacttactgtttgagcaaacttcaaaactgaaacaaaatatttttatttcctatttaaaatgattcttccttttctattgttactgtgtggaaggaaaggggaataggatatttgcattatctactaaacttaaaattttcccgtgccttattaatatatttttacaataataaagaagttacagaaagtaaatatatttaggttcttttttttttctgaagaagaataaagaatgcacacacacacacacacacacacacaaaattctttggtagatattctggttcactctcatttaaataatataaagctactttcatactctggaaaactctgaaaacattaatttttagtaatattttcacatggaagtctggtagtttttaaaaatccaaaatagttttctgttttattattctctgttttattttctgttttatttttcctcttttgtgaccttttgtttttacacttatgacaaatgatcattttaaaatagatactgaacttggagaaagatgttatccttcaggcttagaatgctttctaccatggtcgttaatttaattttgataatgccaggtgaacatgagtgaattccctgattttaacttaacattttagacttggagatgagggggaaactgataatatctcaccactatagactgtactcttctgttctttttatatcccacctgagaacaccagccccaaaggcgtcagcctatagtgctaacatattgcacgcatggcccattctgggacttggatatgtaggcagccttcagttttatagtctaacactctgaaaaagcaatcacagtgatgtgctaggaaatctagtgaagaaggctttcagaagggcagtggaaaacccacgcataacctcttttatgaatgcagtgtttaaaaattccatttggacaatttgatgtttattggatattttatcagctatccttaa

SEQ ID NO: 58829 - DNA, 1860 bp, Bovine  19866880909348
  misc_feature (1)..(1): n is a, c, g, or t
ntcgtgatttagaggcagacagtcccctcctacttatgactaagtactatcggcataaatcttatttgcctactgaaaccttaacaatgtaacatcaaccccagggttgaaaaagtttgttttagagccaaggtaatttagagatctctgaaattttcagaatttcctagtcatagttggataaagcattaaataatgcttgagggcttgatttagatattaaattccattgtagaataaatgaaaatatttataaatttgtatatcttctgttcttactatgaatttcatattttccataaaaatgaagtaacagggaacatattcagtatcacataatacttttatctttgcatcattagtagcacaaatccatctgtggttgaaaaaaacaaggtgcttttagttttgggtacaaagtttggttattttatatattttatattggttattttataaatatatatatttataatataaatatattttatatttgtgaatttgcttcattggtaaactgtgtgaatatttggaaaggaacttgttcaaatcatgggtccaaaatttattgttctatgtaaggtttgatctagagcaaattacctaatttctctgaaactacagaaaaaggaatatcaatattcaccttatatggttgatgtcaagttaaataacatatatatacaagtgcttaaaaattcctttttttttatccttataacctgaataataagacaaagcacctagtacagtgctttgcaaatggttggtagttgacaaatattgttgaataatatggagcaaggcaaatcttccgagtatagtgtacgtagaggttcttcttccatctcgtcttcccacttctttctctttacctcttgataatcaactcttatctttttgcttatctgattatgtcatagtagactttcccctttaagccttcgctaaatatgctgacctattcttaccccacctaagacttcctgaaacaaaattaaatgttaaagtggagcatcagtccacctaacctatgttgtgcaatcccctttgacaatcctttaatccactcctcttctactttcatgtattctgtcccagaacagttcatttatcgtgcatgtggaaataatgcaatgtggtacaaagaaacacacagtatctcacatcaagcattttagataaatgacaagatttctcatctcttctaaatctgacacaaagccaaaagtacatcatgtttaactttgaataacaaatatgattacttcattgctaatgaggctaataagtttacttatataaataatgttccagagctctagttagaaaacagttatgacctaatgagggtgtggtgctgttttctgtctcaaaattattctaaagctaaagttcagtgcaaaaccaaaagtaagactcaacaaataattaacaaacacattattcattgatttatgacaacaaatatgattgctcatgaaatctactggaaacttacagtttcatagcataatacagtgggacttccttgaattgtgagataaatgcttgcaagtttccttcagctctttgtccccgtcaggagtttcaacatgtaacatccaataacttatttaaaaacagagcaaacactttttcatgcacttattctttctttacacaagttgagaacaagtcacagcacttctccagagcacaacgtacttttaaaaataacaagttccataagtatagcttctgttttctgaaaatagatatatttgtaaggtgcatagttataatgcaaatatgagcagcacagacaaaatagaaatgatattaaatgttataacttatattcccaggcaacttttgatt

SEQ ID NO: 58830 - DNA, 615 bp, Bovine  19866880966207
  misc_feature (1)..(1): n is a, c, g, or t
nctctggggataaagtggaaaaagatgcttttcatccgtgatttgtagactctcttttgccattgcttctgtaaagagctaacaatttcatggattctaagccagaatgaacaactgaaagcattttttcaggagtgaaatacactaaatttctcattcatggttgaagaaaatgggggatagggtgtgtgaagcagggagacgtgaaggacggccggtaggcctgcctgtcaccaaggctgatagcttggcgacggttgtacatcatctacccttcattggctcatgaagcccatctcagctgaaatgcaagcgtgcggcatgacacatttatttttcatcttcagtcctgatagttttgggcttcctgtgcatcattaaattgtttcatttccctatgttcaccacagatgtgctgccaccggttccaggccaaggggataaaacggcaacgatgctctcagatggagccatttatagcagcattgacttcacgaccaaaaccacttacaatagttccagccaaataacacaggctaccccatatgccacgacacagatattgcattccagtagcatacatgaattggctgtcgatctgcctgatccacagtg

SEQ ID NO: 58831 - DNA, 1278 bp, Bovine  19866881126753
  misc_feature (1)..(1): n is a, c, g, or t
nccacagagtccataagttaaaaatgaaatatatctaataatgcagtagcatatataaaatttaaaattacctgcaatacatttaacatgaattaattctgatttatccttattagaattagttatttagtcataatgccagtaaaaatgcaattacattgttctgtggaatgtcatgttcattccctaaataaatatattttaaaaataactgttaaatcagggaaagatggagatttattcaattcatatgctattgaaattaaaataatttttcttaatgtgggggtaaagtcacattatataaaactattcattaaaatagcatggtacatctgattttcattttaatcatagcttatttgaggttggtctaatgttttcttgatgctccctcttcatgataaaaaaaaagagagagagactacttaaacagtgacacaaattgatgttaataaattagtacattcatacaaggactcctaattttactgctaaaagcacaccattatatgcagcattctgtagtttaaaaggcacactgataagtgcctgtattcaaatccgtttttgtgccctttgtgttcttatcttccccgggccagcagacaatccggcttttcactaacctctggcactctaccatcggcgatacactgtgctccttctgagtccctgggctgcttaattagcatcacctgtggtacgttccattccgaacagccccgtgaacgcacacacctgctccggtgcctgcaggtagactaagcctcagtgtctcaggactctgggcagtccatctgtgtgccctaaagcagtaactaaatacctatcatctttagcaagcttgctgcagcctctaaccttggtaattgtgcctcaatgaggtagaagtaaaatgataaacaagatcctgaacagacccacgcatccacactctagtgctccaacaaatgaagtaaaacatttgtcctcgttttcaaaatgaagcatacatgcttttaccccaaaactgagtaagatcgtttatgcccttttcaagaaaaaaaatgtgattgtttttacatttagatttgttctaagttttccttcataagccctagaagttgcaaatatttacatttttattttatcaaaatatgttttcaagcacaaattttgaagtacagcttcaaaaacattcaaggtcatattttcccttaaaatattttaatgatataaagcattttacatatatgttagaagggtaaaattgacacacttaagacatttaaaaca

SEQ ID NO: 58832 - DNA, 1988 bp, Bovine  19866881175519
  misc_feature (1)..(1): n is a, c, g, or t
ntctagaggatttgaggaagacccaattaatcaatgccagagtggataatgatttatgaccagggtaaaaataggagtgcatacgtttcaatgtggtcccttctctctgttgatcagaattttttttctttctattggaatgcctccaaacatcttgctggcaaagagggtgtattttttgagatagcaaagttgtttattgagccactgagttcaataagcatcagtaactcctgcggtacaaggaaaattggaaagaaaaggcttagtgtaaattcttcaaatatggagcaatccattagctggttcagcaagtcacagaatggactttataatgtgaaacatggaatctggagtgtgtgtgtctctgtgttttaaaatatatgggacagtctcttatgcaagcatttttattatgctgccacatttatatccaggtatttggatagcactgctggcatagcactcccagccaaaataaaaaacagatataatttttccttgagttctacttttatccttcaagatgtctggtgcaaatattcaattagattttatcacctttgtttccaaatcataaattgtttgacaaataccatatcattgatgtgtatcatagaataagacaatatcttatttcgttgatgagtgattatagtatactacctttatactgctgagatttatggtactccattcagcaagagctactataggatggtgaaatgaacagtaataaagttggcaggctgaatgctgcaaagtgtgtctaatgtctgaaaaaggagtctgcttttatgcaaatataaattggctgtgacgcttgtaattctggaatccaaacatcgagtttgtgtcctctgtgtgacccactgtgattggaaaggcagaatggagataacgggtggagagggcgaggatcgagaaggaaaatattaatgctctttgtagatagttgttaaaggtcagtgcttattaaagaaaaagacaggaatagactcccaacaaattacaatcttagtaataaaagagtaaaggactgttgttacttttctatagcaacaagggttatctaatatccaacactgcctttggtgttaagtaaataggagatttcattttattaagtgttgtgcatactgtggtggtttagtggctacgttgtgtcctactgttgtgaccccatggattgtagcccaccaagctcctctgtccatgggattctccaagcaaagatactggagtgagttaacatttccttctccagtggatcttcccaagccaggaatcaaacctgggtcttctacattgcaggcagattctttactgactgagctatgaaggaatccctaacagtattccttttgtgaaggaataacaaacaacaggcagggagtggtgcctggtagatcagacctactgaaatccaatggttggtacccaaagtctgttttaaaccataataaagagtcccccatatagcagttaatgtaagaactgagaactctctctttataccactgcactgattactgactgctctgtctgatattctccttcttctaaaagtcttgctatctgttaatggttcttgcagtagtagctatgttttcatgattccatctcctaagcaccatcgttggttcaagggtgagaacctgaccaaagctggtaaaaatagaattccctgatgttgaagtcactggtccaggattgggaattccatcctatcagacgaatcaggataagtctatctctctgagatttgaaaacttaagatggaaaatacagactctattaaaaaccctgttcttctgctctacaaaggaaggccttatagctcttctgtattgagaaaaatgatttgagtagacaaatggcctctaagttggtcctttaagtccccgtttctaggggttcttaagcctcatctgcactcgtaacttcttatacatcagacattcatctctaccttctattccttggag

SEQ ID NO: 58833 - DNA, 1303 bp, Bovine  19866881219720
  misc_feature (1)..(1): n is a, c, g, or t
ncttccatatttaattctgttcataataatcaatctaataaaattaaaatctaggattctttaccttgccaattgcataaaagcataaagcttcacttgtaacagtaaaattaaaaatacagtgtaagaagtagctgatgcaagttaggaacagccagctttaatgaaagtgtctgggacatcaccttaagaatgcatggttgaatcaacaaatctaaagctatagcctctttgtggttaataaaatggctgaggctgaaatctaaccaagcctcaatggaatccattataataaactggcttaagctaacagaactgaaatcacatgcactgtatcctgtgaaataattctttggggggaaggagaggaatctgtacagaatatgcagtaaagtggagtcttgagtaagaattcagtagatttcagtgaaccccaacaaaaatgggggaagagcaaaccatcagaaacattccctgattgaagaaaggaagtttatcacagttcaggtggaagctgtctgaagactcgcttttaccctctgttttgactgcttggatctagtattcaacaaccatcttccccatacataattgtactcacactaataacgcctactactgattattcattctgtgccatacatagatttgcctgagtaaaccatggtcttgttttttttttttttttttatcatatgacaactcaagtaccaataggtattactcattttggagttaggcctaatgaaatacataaccaggtcaaggataacacagtaaggaattgatgggatcaagattcaagcctgaagagttcaattccagaactttaatgatatactctagaacaccatctctggaaaagcatcacaggaagctgaagaccagactagatcaagaagcaacagcaccatggttccacctggacagagtcactggcttacaagccaccaaatctgtgtcatagtcctatagttttaacaaattcaagttggtcacaaacatttcaaacagaaacaaaagcaagaacaaagatatcacctgattgctttttcatcttaaaagttccaggcaatagatgggagtatacattacgagtacaaaatatcacctgattgctttttcatcttaaaagttccaggcaatagatgggaatatacatcacgagtacaaaataaagagattccctcaacactggcatagttatctaaacagcaatgtcaagctaatttctatcgcaggaatgtctcaatctatttcaaagtttttcattataaatacagagaacaaagaatatcaaccg

SEQ ID NO: 58834 - DNA, 2065 bp, Bovine  19866881221947
  misc_feature (1)..(1): n is a, c, g, or t
natgttaaataagattactcacctcttagcagcaaaaataaaaatacatatttgcatgtatcccctgacccaggaagatcccacatgctgcagagcagctaagcccatgcaccacaactatcgggcctgtggtctagagctgggcagctgcaactactgagctcatgtactgttactactgaagcctgtgtaccctagaattcatgcttcacaacaagagaagccgcagcaagagaagccacctcaatgagaagcccatgaaccacagctagagagtagccctggtcactgaaactagagaaaagcccgtgtagcagtgaagatccagcatggccaaaaataaagtaagtaaattcattcaattattaaaaaataaataaaatgcaacttagggaattccctggatcgccaggggttaggactctgtgctgtcactgtcggggatgcaggtttgatccctggtcaaggaagtaaaatcccataggctgtgcagtgtgaccaaaaataagtaaacaaaacttataaaacgcaacttagagaaagaaaggaaatgtctctctctgtataaaaacacagtagttatgctaagacgagattactcagaaggatgtaaatgtcctgttggtgcttgagcctgagactgaaacagttgttctttcctttaatattttctctattctcagagatccaaaatttctccattcatttaagtcaaaactagaccaaagagaaagcttgtcaatcatagataaaatctgaagaaaagaagcaagacaatcaggcaggaatgagggaaaaaaattctttaagggactctgggatgaatgggagaagggtgaataaaaaaggaatttactgtaggggagagactcccaagtgtacttgggaattaagagtaagaaagaatgaagttctgtcacattcaggaagttactggtatgttcactgagtagctgttataagcctcttctcatcccctactcactatgatatcctgtgtggagaaaacttgaaccataagtaaagaacttcttgatatattgctctgattctgggtgcttaattcataggccaacagagccaggggacttgactctataaagaactgtgctcatgtctccttctggtgttaatgacattatataagaaataagatactgcttactccctcaaggacctatagcctactgcagagggacaattcaagcaaacagttgtaactaaataagacaatttcttaaagatgcgtgggccaagtgcactagagggagaagaagcacctaaatcagcctggggtgtcaagttcaatgtcacagagaatacagcatttgagctgagaactttaagatgtaaaaagttgattagactcccaagagaaaggataccaggcagagggaagagtgtgtacaaaggtacagaggagaaaggattgttctggaatctataggcaattcaatattgtggtatttaaaagtaggtaataatatagctaagaaggaccctatatgctctttttgacacagactccccatgtcccatctttgccttttgtttgtagaaaaactttagtctcctagcccttccctgaattccaaatagtaactttcattagagaagttagaaaatgcagaaacaaaggaatacagtcaagcaagataaaatactaataatagtttagccattcaaagaagtcaaagacttttacttccccctcaagggcattggagaagggcgatggcaacccactccagtgttcttgcctggagattcccagggacgggggagcctggtgggctgccgtctatggggttgcacagagtaggacatgactgaagcgacttagcagcagcagcagcagcaagggctataagtaatattctgggccatgtcctttgaactgttttgtagatactgaagcccctaccaagtgggaagaagtatgctgcccacagcacataggtcccagaccagttggaaccagaaggttggatgatgttgactcccagttacttcaccatcagccagtcagaagaatgcccatgtgatcacataccgcacaacccca

SEQ ID NO: 58835 - DNA, 1569 bp, Bovine  19866881240082
  misc_feature (1)..(1): n is a, c, g, or t
ntgttgttctgtgtgtctctgatgtctctcgaccctggaatatcaacactttgaagctaaggttgccttaacatttaagaaatgactgtgaactattttctttgcttcttccttcaagtatgatcgctaatgttcttatgtagacccacttaggaggcagatgagttatcagtgggcttggggtgtgtagcaaggaaggtgaatgaaggtgaacaaatagaggtagagaatctttataatctagcttaatgctaaatagcatcatttttgctctgtaattaagttaaaaagcacagatatagacgtagagatgactaagatagaaatagaaatgaaaggataatttttttgccttcaaaatttaagatttttccaggtgtaaagtgtgctcagctcactgctacattcaaaagtataaagtatgctaatatcaatcacatgtgtacttaaataaatttgaagaaaagactgcattgtctcttcaaatgttaactcctttttgtttgtgtgatactatctttgtgaaggtccatatttctcacctactgccatagacttgaaaatgtcaaatgcagtgaaagagataaccttacaaaatagatacatgccttgctcttactgtactacagggaattctcttatgggctgtgtagagttttcaggaccgcaagtaaacttgagttatagggcttaataattgccacctttgctgccagtttgtgtctcactagggcatacagcatcaaaaaaaattcctgaaaaatagcttgtgtcaatttttttccctccaggcttaaaagtatctgtcagtcctctgagcactaccaaagagctattgcctcttctgccacaaagcctattatatcaaaagaaatatcccagagctttagaaggacctatgtatctaagggaatgaggaagagaaggtgtgagagaagcagatctgtgatgtatgaatgaatgaagcagtgaacgcttcatcttatcctgagctagggtcaaaaaagaaaaaaggaaaaaaaaatctctcacaggcccgaaaaactacagcagacgtttaatggattggattgtatgagtaaacaaaattagtgcccgaagctaagcacaggcaatctgggacagatccaccaaagatgtcattggagatgatgttcagcttcatatgggtcaagagtgcccaaggcagaattacacagcaaagtgtttctttggcctggtctcactttctgctctgcctctgtcctctcaagatttttaatcatacttctttcagccctcactcccagtgctcttatttttctctttaactgcctgtagaatcttgagtataatttaaaatctctgaaatctctaacctaccagtcaaacttccatgcttctgagatagttgacttcatcaatgcattagagaaaagtacctataatcttcatcaagctcatttcaccctaaagtatacgtgtggactggacagtggatattagattccatcttctaaaaataaaaagcttactacatctgaatgaatctttcagtagagtgtctgggacagacattccaatcagagg

SEQ ID NO: 58836 - DNA, 1072 bp, Bovine  19866881366903
  misc_feature (1)..(1): n is a, c, g, or t
nggaatctaccatacctaaaatgaacaaattaagaccaaatggaagagcagatctggattgtagatttgaattttcccaaacagctttttacatagttctatttcttgtactttcaagccctaaaacatgcaatgcattaaatctgatttattttcactgcctttgggtctttgggtttgcccccagacagtcaaagcccagtcgttgttagggctggggtagtggcattttgtgttgggtgaagcagcagtacatcgtataatgagaaataattttctcaaactttaaatatttctcagggatttgttttatctgagaggatattaacactctacagatactggcatttctgaactacatgtgctagtgttgggaaagtgtaatattgatcattgccatccagcgtcatacttaaagctgtactagtaagtgtggtttcgtattatgaaatacactttatggaacttttcagaaccagggtggaatatgagtggtgataaccttcttctttttaaagcggtcttaaaataattataaatatatttctagttcactctgcatttatcagaagtagatgcatttgttgtttgagacagaagaaataaaagaacaaagaaagcatattcttggaatattgggagagagcaatgtagaaaacactggatattaaaaatatgcattatcttctaggtttaggccgctgggaaataaagcttctgtgtgtgtatttgatatataaagacaggcgcaaagaaaaaggcaaacgtgctatggatattctggcagggtacaattatgcagtatgtttcctaacccttttcatgaaaatttgacattactgtacctcagctagaagcagcaggaatcaccagggaaagaacagctggatactttattaggttttatgttgtacataaggagaccatgttttccattgtcagtgtgtaaaagaaaatgaaagctctgggcatcattaaagtctcgggaagcgttggatatgtcagctctgttctcgcaacacctggattgaaagcgcagtgtgaggtcactgtaaaacaaaaacagactgcg

SEQ ID NO: 58837 - DNA, 1708 bp, Bovine  19866881464744
  misc_feature (1)..(1): n is a, c, g, or t
nttcacagtaggcttttctgtgatacaactttttgctgatttctagcacattaaagaatccaggagaattaaatatgtttccacataaagtaagggtcttgctccctcaggaaatacatacccagtgagaatgagaaggatcccttttgtctgatgtcagtcgtttcttctgggatcacttactggttccatctgtaattacttctttttgctaaatgcttgagtattgactcagaaacagcctgcttttgatacaactgaaaaaatgtgaatgcttttgcttaactgttagttctccatgtgtgtgtatgtatttcttatagcctcacattaagcttcattcatccattgatttaacatttaaggaacacctaatgggcagtgaggatattggcaaaactctacattctggaagaaatgaagagataggggtcctatcaaacacaaagaagtcaaagccctgtatccattgtttgggagggacctattctttttggtaccatggataagaaagaccattgaagaagaaactccctttcacttcaaagagtgttttgtgtatatatgagactccctgagggtccaaaaagaaatgagatttggattctagtaatagtgggtgaagttgaatgtaacagagaaaaagtctgatgttaaaaatatcccaacaggaataaacaaacagcatcagctgtatctcattatacagtctgcaaagaatgagagggcagaatggaaagaaaagggtggatccagaaatgaaataaacactgattaatttttagaatgcatgagggatttacaatctaaatagaaacaaaagcatgatctctgtgctgctggttttgggaccagccagaaactggagaatgagctgtcacctcccactgcattggtgactttcagaatgtaagcaagaccattccaaaagtgatgataacattctcatagaccaacaaggtatcacatagcaaattattttcataataatttgcaaataatacataaagtattacattatggagtagcttaaaattgcacccaattattccagagaggcattgcagttgataatttttaaaaaaaaataatctattgtggcagatttaataaataagcataagtggcatacaagaggattataaattaaataattttcctaggaggtaaatattactttatgctcatccttgagaatttgaaatcagtgcttaggtggtatctaaacaagtagaaagatatgtgagaaggagttttaatgtcctccccagcccactttgaactctttaaaaaaaattgtacttaggtattttagcttccatgagaccccatatgttgtctgtcattttaatgtgaaaatcacatttgctttcatatctgaataaagacatgttctatactttagcgtgagatataaagaacagctataaaacttgtttagagttatattcaatccttatattttgcagaagattggatttctactttagctaccatatgtaagtaaaggctgttagacttcggatattttgaaaaaaagcaaattaggaactgatgcagaagcaaagtaaatagagaacattattagcatgtaagaagagaagaagagaacagagagatggcagcaaactcaataaacaaacacataattttggtaagcctcaatgctaccacaactactgaaatttaaccatacacaatttttacc

SEQ ID NO: 58838 - DNA, 1592 bp, Bovine  19866881477882
  misc_feature (1)..(1): n is a, c, g, or t
ntatgagccatactaaattttaactgaaaaaattagggtgtgaaacaatacctagcaaattaacaaaaggagccttgaatttccagaccataacaggctgatgtgttcacttccatccttatcagtgcagtttgcataggaaagacaaattctaactaaccatactgtacacataatctaatagaaatctgctctgaacagaataaggttaaatgtttatatcctgataggcctttaggaagagttcttatcagcaaggaataagagtgattgttagcaattcctccaagttagtagcaattagcaagaaaaatttattggccagttcttatagtcaatttatggatctattttgccaagttctttgtctgatttcatttgaaaactttcattccctaggacactctgttggaggttgttctgtctgttttcaagctttatgcacagtaacctgctctcctgggcttcccaggtagctcagtgggtaaagaatccacctgccaatacaggagatgtgggtttggtccctaggtggggtagataccctggaggaggtaatggcaacccactccagcattcttatctgggaaatcccttggacagaaaacagtggagggtgtttcggggccggggcggtgagtgcgtatgtatgtgtgttacagatgggaaataatccttaatcttacataaaatgattggcccttgtgatgcagtgacctttataagcgaatgaaaccaggatgtggacttcaacttttccctattgagatcaccacatttcatgttcttttttttaacttttgtggatttttaactttttttgctcagaaaaaaatgaaactaaaggagagatattaatcattaaatgatattgtatatatcttttattctcaagaaagatttgaaacactacttctgcttgagaatgaataaaactctttgcttcagtttctcagagcagaaatgactcactctttcctgtcatgtgctataaaatgatattatttgtaaaaggggattctgtcatcaaatacatttgggaactacttgataaaaccaagttaaataggtgtctttactgtatgccttcgtagagcctttcatatgctcatatgcattgaaactatccaaaaagggatattgtatgcaatttttctcaagtattttgcaagctttattctcatttaaaacttattaatagcttgataaacttacattatgcccagcatattttgaaaaatgctactttaatgttgcattcataagtacaaccagtaatctttgatcttatatttcaatcatgattgtgtattctaatacaatgcaatgctatgacctgtgcaaacttctcatttatgtgttatattttcttttccttctgcaattttatagagtcagaaccttgtggatacagtctatttctgattctgaaaaacttctacataggttgatgaccattagtaactaaagtgacataaccttaaaggaactgctgctgctgctgctaagtcgcttcagttgtgtccgactctgtgcgaccccatagacgacaggccaccaggctcccccgtccctgggattctccaggcaag

SEQ ID NO: 58839 - DNA, 941 bp, Bovine  19866881503156
  misc_feature (1)..(1): n is a, c, g, or t
nattcttaaaatgcactggttaaacatgtccttagaataaaacagcaggatagctcacttgagattttaggatatagaagctaaagcaaaaacccaatggagaaaaaagaaactgtctcatacctgaaagcctcaatgatatatgcacttgctggaaggattccaggggtacctggttgccaggacaaggtgacactattcttagtaacatcagtgacctgtggtttggaaggtggtccaggtaggtcatttaaatcataacttttactgattgttgctccagattctatagaggagaaacagaaaaaaattcatttctggttgcataagttgacaatgatgtttaaaagacagaaaataacctattaaagaatttgaatagacagtgagcaattcatcgtcatgaatcaaaagtataaaagtaaatatttgttttttcccctaaatatcagaaaatatttactttcacacatgatcacctgaactgcttgttcttttgtcagagaaaatagtaagattatcaaggacaaatgtatcaaatttcatatatgcaatgctatgtgccaagcagggtagaaatgaaaaagtgacataaagattagtttttacagtcaataaatttaaaatcttgctctctctttaacttgttatctgataatgagctaatcactaaaactggctcaagatttcttctattaaaataattcacaaagaattcacctgtcacatccagcacagcactccaggaagtctccccacttgaacttgtagccacacaagtgtaagtgccagtatcagaaatctagtgtgcatagaagggagagaataaaactgttttaattgatttgtagaatgattactcagtctcaacaaggcactatttgacttctaaaatatatcattaggttgtggaattatacactagagtcaatcatacatac

SEQ ID NO: 58840 - DNA, 1592 bp, Bovine  19866881570185
  misc_feature (1)..(1): n is a, c, g, or t
nttcatgtgaggaagatgtccccatagggctgattttcagtgtgggtattttagatgcttttatcaggtataaggtacctcgataagtaagggttttgcacctcattttttcccctgcagtcagtatatattttttttcaaatttgcggtgaactcagaaaatggagagacacagccaagttttaattcagtaagtgatgttctggcacctctgactataaatcagtgttgcaaaggcattgcagcagcataagtaaatggtgtccaaataaatgcccagccttggcgtgatggttcacaattttgtgcttcatcataagactcacaaggcaatttgcttaatcctgtctgcataagttggacttagaaaagtgcaatttgtaattcagctggctgaataaatggatttctactggccaaaagagtgagaagaatttagagcactctgtgcaagcttgagaaaatttacttggctaacctacttctttgtttgtgtaaagggaagttatatctagctctttaaaatccaaatatattttcctaggtatagagtgatgagggagaagcataggaaaatgcctggaactgagaaattataagcctttttgtttggaatgctagtggtgtgaaattgagtctagagagggacagaggtgagcagcagacataaaatgagagaaaagaagaagaattcacaagaatctgtgcctcagtggctatgaaagaaattgaggggttaaaccctgaaactaagagttttagtattggggaaaaaatgggattatatggtgaaggagagagggatgaggtatgtgataggagacaggcgaagggtccagtttgagagctgcagagtttgaggttatgaatgagcattaaagcaggtccctgaaccaagcatagaactttccttacctggagatactaaactagagatttggttcttgttgtcatagaaacctcagcctatgagagggaatgagtttcccatagaaggctctggagacaagagccaggtctgcagcatctttattgttgttcagccgctaaatcgtatctcactctgctaccccatgggctgcagcaggccaggctcccctgtctttcactatcttccgcagtttgctcagactcatgtccattgagttggtgatgccatccaaacatctcttcctctgtgatccccttctcctcccgccttcaatctttcccagcatcagggtcttttccaatgagttggctctttgcatcaggtggccaaagtattggagcctcaatttcagcaccagtccttccgatgaatagtcagggttgttttcctttagggttgactggtactccttgctgtccaagggattctctggagtcttctccagcaccacaatttaaaagcatcaaatctgcatcaaagcatctcacatgtaagaatgttagagttggactataaagaagactgagcactaatagcaccttaggaggccttaatgattgagacagaagtgatttgatttaattcagatttctagtgtgattgtttacatataaatcaaagatcgtttttctctgtttatagaaattaaacaaaagaacca

SEQ ID NO: 58841 - DNA, 979 bp, Bovine  19866881610884
  misc_feature (1)..(1): n is a, c, g, or t
ngatgtttctttgacttttaaaaacaaccttatcgcttaaattttaaacacactgtgattccccaaaatataaactgctccagtttttcatattttatttttagaatgatgtgcaaaaattgaggtgagaaaatgcattctatgtgtttatttaaaattcagacctgttaatggtttgtgtgtgtatcaagtactataaaggtaaaaacaaaaagttagccactttaaacgttgtcaaagaaccaactagaaatatttttaaaaattaaaactctaaaatgtcagaagcagaataatttattatttgttccataaaggggaaagagaatgaggggccatttaatatagttattgggataatatcttggtacatatttttcacttgatccaatagtcaacctagcaaaacagtattttaattttattttgtatatgtgcacatgtatttggtggtggggggtgagaatttgagaaaacttgggtgaaatagactctcttttttcattttcttggtttccaaaatcactgcggatagagactgcaaccatgaaattaaaagacgcttgctccttggaagaaaagctatgacaaacctagacagtctattaaaaagcagagacatcactttgctgacaaaagtccataaagttaaagctatggttttgccagtagccacgtacgaatgcgagagttcgacagtgaagaaaacagtaccgaagaattgacactttcgaactatggtgctgaagaagactcttgagagtcccttggacagcaaggagatcaagtcagtcaatcctaaagaaaatcaaccctgaatattcattggaagcactgatgctgaagctgaagctcagccacctgattccgagaggtgactcattaggaaagaccctggtgctggggaaagattgaaggcagtaggagaaagcgggtgacaaaggatgcaattggcatgagtttgagcaaactctgggaa

SEQ ID NO: 58842 - DNA, 774 bp, Bovine  19866881691359
  misc_feature (1)..(1): n is a, c, g, or t
ntggtctcttcactacattctcattaattctgcaaccactcttatgtcttctcatcctgctttatacagaaacatagaaagctatggagtccaccagatgggactcctcctttaacagtatgttgaagagtaggactcagcccttcccttctaggatctgagcaatctgctgctctaggggggcccatgttctgacagctaaagaagtgggaggctaagatccaaattacaaatccactgaaaatcacatacctggcaagatggcactaaaaatgcctgctgagcaattgagtcagctgtcagaaaatagtgatgctgttggaaacatgagtgccttacttttaatcatctctatccaccctgctttcagaagaagtaaagactgcactagtatcgctctcagctggtccctcaccccgtccccagcaagtaggcaaaaaaatgtaagggaaaatacagagtattatcacaggttgtaaagcgaggtttgcaggttgaccaggtaatagactaccagaagataaaagactaggaaacactgcttggggcttcccaggtagctctggtggtaaagaatccacctatcaatgcaggagatagaagagatgagggttcggttgctgggttagaaagagcgcctggaggaagcaatggtaacctattccagtattcttgcctggagaatcccatggacagaggagcctagtgggctacagtccacaaggtcacaaagagtcagacacaactaagtacttagcttgcatgcacacagtt

SEQ ID NO: 58843 - DNA, 1000 bp, Bovine  19866881726805
  misc_feature (1)..(1): n is a, c, g, or t
ncattattctgtctacaatagtggcttcagatataagcaacgcgtagattctgcagatacaaagtcagatacgtgattccaatattctaactgattgtttaagctgtctgaattattgctgagaaaaacaatttggtctagtcatggcctgaagccttagaaaattgaaatctctcttgcttctttcatgactgaattcatcattccactttctagtgatgcccttgtactcactgtctatcaataataggcccattataaacatacaaacccacctaaaacatctgtcctttcttagggtaaatcaatattaatttcatttggaactttcatcagatcaaaaagaggagaggaataaagcttctttctttctctctttttgaccttaacttaagcaagcctcaggggggaaaaaagaaatctatttgatttatgtatttatgacacattaaaaaggataaagtgaaactcagtcattcctcttaccaaatgagatagttaaattttagttgtgctctaggacaagagagagtatccttttaatgttcaaaataatattcaataacattgatggacttcacaaatataactgataacaaaaaataagatttgtcacaaattttgaagttgcttaaaggacattgaggcattcagttacagctgggaaatttccctccaagcaacttctatcttcaggcaaaaagctacagctacaattgttatgctgctgctgctgctgctaagtcacttcagttgtgtccgattctgtgcgaccccatagacggcctcctaccaggctcccccgtccccgggatcctccaggcaagaacactggagtgggttgccatttccttctccaatgcatgaaagtcaaaagtgaaagtgatgtcattcagtcatgtccgacttttagtgacctcatggtctgcagtctaccaggctcctccgtccagaaattttctaggcaagggtacggagtcgggtgccatgccttttccaa

SEQ ID NO: 58844 - DNA, 1470 bp, Bovine  19866882026775
  misc_feature (1)..(1): n is a, c, g, or t
nccttgactgttgatgcctgttttgcaaatgaatggtacaccaaaaacttatttttgtttctgttcacatgtgaatttagatatccacaactatatgtgtgataggaactcattaaatatttgtggaatggacagactgataaatgaataaatacacggatctctgtatatatgtatataattctgtcattttggagcaatgcacacacatgcaaatacaaaaggaatgcaggctgcagagaaataatcaggagccactgctaagtatcatttataaactgtattttgctaatgtaattgattacattatcagcaatgatgggaatctgctttgtacctctcccagtcactgttataactatcatgacaataataatagtaataataaaattcactgggaaattggacattttaaatattatgcaaagtctgaataaatgcatctttagaaaattttatcattttaaatcagtaacataactaagtttttaaatgcatctattattccaacatagctttaagtcaagtccgccagtctctctattcaaatcagactgtagctcctaaatttctcctgtaaagtaattctggaaatacccattatttaaagtgttgaggttttaataaaagaagaaaaattgaagcagaaagaaagtaaaagaagttcacatgatttattttaaaagtaaggactgccacctaaacaggaaaataactgggcttaatgtaccacaatttcttcttcttcttaaaaacaatttgttttctttcagcctgctggcatctgtattttctgtagcatagcaaagacagaactaaaaactcaaaagactgatataaaactaacctctttaaaattagggaggagggaagaacaaaacagtgggcttctacattcatgctccttacattgtactaaattgaattagaatgaataaacatttctttaggtccctgcctaaatatttagttaagaatctgaattgtaagctactactgattacttcaatcctgagtggctcctctatagactatattaattctctaaataattttttcttagaaaatactttggaatacataaggcagctttgcaaatgataaaactctaggcagaatcagtagcttaaataagagcaataacaaaaatgtgactctgctactactgtataatatatttaattctgtatcaatttctctttggctgtgaatctgtgctaatctgcaaaagtgattaaggttacagcatatgcactggtgtccatgttgtgtatatatactatatgatgtgtatgacagatttgtatgtttacagaagaatgaggaattctctttttaagtatgcaaatatgatgagtgttatagaaatatttgcatcccatatttatttcatgactgccttttttggtgtcacccaggctcaggatctcgttcttatctcccttcttttacttccatcagtagacagac

SEQ ID NO: 58845 - DNA, 1140 bp, Bovine  19866880446060
  misc_feature (1)..(1): n is a, c, g, or t
ntttcatgagctggagacagctatattatctcttagaatcagatatacctgagtctgatttctggttttgtaacttaattgacttggagccaaatcaggtcaggactgaatttcaactccttaattgatgaaatgtgaatgattttatctaccacttggagctgttgcaaatattaaattacattttaagcaaacttagcaccatgcttctcaaactttaatgtgaaagatggagctctagttaaattgcagattctgattcagctggttaggtttggggtccaaagtccatttctaactggctcccatttgatgctgatactgctggtctttggctcacactgtgagtagtaagaatgtccatgatgctggccacatagtatgaggtaagtgcacttgtagctattagtacaaactcttaatttgttaccctgtaccttttggacagaagagcacaaaattcacacccaccagccaaatggagaaacagaggcatgggcaagcagactgtcaccaagaggatgcccctgggtgtctctgccatgtgttgccttcccttgtaaagatcctgtttttcccttatgtgggctgttgcaactcctactgctactaatgggagttacccagacatgtggaggaaagaacataaattctgtggcgtttctatctgctcagctaataaagcaattttgtattttgctgaagagaaaccactttcttgacagtaagctgttgagaaatttttgctttcaattggcccatcaggtgactagttttttttaaattgaactcatggtgttcacttgaaacatgattgtgactcaaaggcttgggagacctaagtggttgagattgtgcaacacagcactgagttttttaagattagaaggcaacctcttgctgaaaagatctagggattcttacaaaacaggagttggcaacctttcagatgtgggtaggtggtatttcttttatttatacacttcatttaggggagatggtaaattgcttcttctttgaaagggtaaggaaaggacttttccaccttcctttgtcaatggttcaaggaaatacttctctatttaatgtctgccatgggcatcgtcatagtttcccacctcctgggcttcctggcttttt

SEQ ID NO: 58846 - DNA, 854 bp, Bovine  19866880489058
  misc_feature (1)..(1): n is a, c, g, or t
ncatcaccgactcgatggacaagagtttgggtgaactctgggagttggtgatggacagggaggcctagtgtgctgcaattcatggggtcacaaagagttggacacaactgagcaactgaactgaactgactgaatgataaccctaactacaatattacaaattattatttctcactttaaaaggtgcccaaagggtgaatgttccctgccttaggtagagtctaggtcagctaatgaggagatcatgatgggcagaacagagaggccacaggaaattgcactcctggctcttgagtcagctcatgtttaccttccagacttcgcctttctcaggtaggcaaaggatataaaggactcttgttgctaacatcagggaagaaattgcactctcctatatatactactcatataggagagagatatcaacaacctcagatatgcagatgataccactttaatggcagaaagtgaagaggaactaaagagccttttgaagatgaaagaggagcgtgaagaatctggcttaaaactcagcattcaaaaaacaaagatcatggcatctggtcccatcacttcatggcaaatagatggggaaaaaatggaaacagtgacagattttattttcttggactctaaaatcaatgcagacagtaactgcagccatgaaattaaaagatgcttgttccttggaaggaaaggtatgaccaacctagaaaacatattaaaaagcaagtccatacaaaggtccatatagtcaaaggtatggtttttatagtagtcaggtacagatgtgagaattggatcataaagaaggctgagcactgaagaattgatgctttcaaactgtggtgctg

SEQ ID NO: 58847 - DNA, 909 bp, Bovine  19866880511713
  misc_feature (1)..(1): n is a, c, g, or t
ntgatgaatgcttttttcctttaggtgattgctgaggaattatctggtaatgatgactatgttgaacttgccttcaatgcacggaaactggatgacaaggtaaagtgtttggcatcagccttattgaagaaagtaataaagctaacacacaaagcttaataagatttcccctcaaagctattttttccctttcaactcacattattaaacagatcaatgatttcagagaggatggaaagtaagacttcccccctaattgagaatcagttaatgagaagaagggaggactataattaaaacaattttataattaagtttataattaataattataattaatttaatttataattaagacaattttattacactaagacttcatttgttcccaaatgctacaggtcacatggcataggtgaatgtgatttaaacccattgctaggagcttttcaaaggaaaaaagaagatgggaaagggaataaaagtagcattttttaagcatcatatttgcaggcatggggttaagagcttttcaagcatgattacagttaatcattcttatagcatccatgtaacaggtattattaactctgttttacagatgaagtaacaggctcaaagataaagtaattgtctaaagtcactccatgtgttagtccaaataatccaagaaatagacaccaagaaagagttaatgatgcaagcaggattttattaggagaaacgcctgtgtagggaacacaagaaggaaatctaggagagctgacaggccacaatgcaagtctgaatataagtaaagaagagagggaaagaggtggcagtttctgcaacaccacgtagtctaaggaagattctaaagaaggttctaaggaaggaagtctaaggaagccagcaaggagtcctgtgtgt

SEQ ID NO: 58848 - DNA, 947 bp, Bovine  19866880594983
  misc_feature (1)..(1): n is a, c, g, or t
ntgcctggaaaatccctggacagaggagcctggtaggctgcagtccatggggttgctaggaatcggacatgactgagcgacttcactttcacttttcactttcatgcactgcagaaggaaatggcaacccactccagtgttcttgcctggagaatcccagggacgggggagcctggtgggctgccatttctggggtcgcacagagttggacatgactgaagcaacttagcagcaaggtgattatctgggtttacttgcaattactgagccagcctttaagttccattcatcctaagtctttggtgtttagggctgtaaactcaggcattcaggaaaagttagtcatcacttttgctgtggtcagtgtgcactggagccacctgagtgtgtaactggctttgtccttgtctcctccacctctctgtccccattgtctcctgatgtctgacctatggcagcaatacttcatcctgctgatcctgactgatggggtcatcacagacatggctgacacgcgggaggccatcgtccatgcctcccacctccccatgtcagtcatcatcgtgggagtaggcaacgcagacttcagtgacatgcagatgctggacggtgatgatgggattctgagatcacccaagggagagcctgtcctccgtgacatcgtccagttcgtgcccttcaggaacttcaaacacgtacgcatatttggggggcttaccttgggaaagcagaaaccccccattttcccaccagtgttggtagtgaagcaatgccagccatacctgcctgggccaggccacctcccagctaggacatgtaacgcttgactcattggagaaagaagtatgccctgagttatggatggggagtcatgctaactatgtagccaacctttcattggaatttggccttgtctacataatttagggtcttcagtgtacccaagg

SEQ ID NO: 58849 - DNA, 3609 bp, Bovine  19866880597281
  misc_feature (1)..(1): n is a, c, g, or t
nattggttagttttctgtgattgaacattggcgttcctgaatctttttagagttttgtccagatatacacccaggagtgtgatggcaggaatgtatggtaactccatttttagttttttaatgaacctctatactgttctcccagacaaggcaatggcaccccactccagtactcttgcctggaaaatcccatggacggaggagcctggtgggctgcagtccatggggttgctaagagtcggacatgaatgagtgacttcactttcacttttcactttcatgcattggagaaggaaatggcaacccactccagtgttcttgcctggagaatcccagagatggtggagcctggtgggctgccgtctatggggtcacacagagttggacacgactgaagcgacttagcagcagcagcagcagcatactgttctccataatgggtgcaccaaaatacatctccaccaacagtgtaggaaggttcctttttctgcacacccacttcagcatttattatttgtatactttttgatgatgaggctgtcctttttgttaggtttttgagaaaattttgcaggtgctgcaggtaaagccttgattcccacgtcactgcccacagggaggaggttttccttgggtaatccgattctgatatgtcatagtactgcttttgattacagaagaggcccaagaggacttggaccactaataatgaaaaagttaagcaagcttcattagaattgcaaagaggttctgacattcccccaaactccagaatctccagttcaagcctaatttgacaaagagaatattttattttgaattaaactaataaagtttatttgtttttttattttaatataaatttatttattttaattagaggttattactttacaatattgtattggttttgccggagaaaaaacaataactgcttgggttacaaaatcattcctaagtgtcttgggttcagattcaagggcaaaatgaggctaagtatgaattcattaactttgttttggatggaatgtgagcctttgaggttcctctgtcctcctgggcaggtcaggtgagccctcaagtgagctgattatagtgctcagcactctttcctggcatctgcccaccaggagactgaggacatcacgtactctgaagccagttttcagcaacaaatgaatggcaatcattcagacctctctccccataatgagacttgaaccaggaaaactaatagtatggtgaacttgcagacatagttccagtggaatcagaaaagcttgaaatggggaggaagaccaaaggctagctgggttcagccagcattatgcaggtgtcagccctcatgctcctggcttcagcttaagtactcccaaggaggggaattcattcttactgtaaggtatcctcataaggatatggtaacatagactccatttgccctaggccatcttggctcatacctattgtcatggtttaattattaacactgctctctttcattttcaagtgtccaaattaggacaatatattttacagtcccttcatgataataaatcactttcatagctgacatttatcaagtgctgatcatatgccaggcattcatgagcttggtgctgtcaacaccatcatcacagttcatcacagatcatcatcatcatcaccagaccaagatccacacctcctgagtcagagtcaagatgtaataacaggcttctggattcagagtcagagccctaagcttttcctcttttatctctaaaatgcactacctctggacttctgttttatatacctaataataaaaacatcccaaatccctctccagatgtccccaccactgactttctcttaagtgctcagttgagggaggagactgatatctgagggccttgtatatctcaggtgctatgttacctaataaatcaagaactgggctctgagagctcaactaattcatccgcactcaagttgacagcaagttgtgggactaaaattcaaagccaagtagacctgatattgatacttgccttcccagtatatcattttcccatccccattgcattcagtttgcagattggaaaaactggagaataattctccctaaatgtaaactgcagtaactgctcagtgaggtcaggaagaaagccaccctttccatatgttgataaattgacttctgtatctttttcccagctcaggaaaacctatgacatccatctgtgagtgtttatcttcatactcctggaccacagaatctgagcaacttacagtattcaggcctcacccttccctgggcacagacttttgttcagtgtaccaaatatggataacaatcagataaaaatagctgatatatattcatttattcatccattcagtgaataacacattcaatgcaaacaacaataataaaaagctaatatgtatctattcactcattcaaataaatatgtatgtattcattcatttactgagcccttactatatgccagacactcctctagaccctggagcatcagctgtgaataaagggacaaagccctgttatcatggaatttacctgttcctacataaaataataacagtgacagtcctatgaaggaaaaaatcttgacagggtgaggaataaagagtgatgggaagggatgggtgctaatttaaataagggttctgggaggccctttctgagctgagaccagaataaagtatgggcataatccatgcagagaattgtaggaaagcagtccaggcagagagcaaagtgaccagggcacttctgtgcctttgcctgtgggtgacacctaccaggctttcaacacaagatttacaggatgaccaggaagcaacctctgtatagcctgcatcatccatcttattctgcatctggttctgaccttttgttacatatttttgattatagaagtggccctggagggcttggagcactaacaatggataagttaaggaccctcaggggcccgtaaggatgggaagtttaactctccatgtcccaggctcaccaagcaagccacaggcaagcaggaatctttgatctggggccaggcctggaatagatggagtaggaagaacaacacactgggagccttcccttgtgccactcattccctctgccccacagcccacccattatgctttcccaatgcccattgttattcacactgagatcaactcagtgtcttaaatatctttactctctacttctttttccagtctacttccaggaccccagtccaagccagtcaatgactataatcatctttttgtggaaattgattagatgggagagaaaagaagaggaaggagcatttcctaagcatctccatgtgactgatgctgtaattttattggtactcattatgcacatgataataaaccagtggagtggatagtattttcaccatttcacagaagaggaaactgaggcttgaggaggtcaccctgcttgtcctatactgggctcagcatttggagcctcatgtgtgattctttttaaaattaatttatcttcatttttaattgaaatatagttgatttagaatattttgttaacttcaagtgtatagcaaagtgattcattatata

SEQ ID NO: 58850 - DNA, 3099 bp, Bovine  19866880676816
  misc_feature (1)..(1): n is a, c, g, or t
natcccaggcatctcatcctctgtcatccccttctcctcctgcccccaatccctcccagcatcagggacttttccaatgagtcaactcttcgcatgaggtggccaaagtactggagtttcagcttcaacatcagtccttccagtgaatacccaggactgatctccttcagaatggactggttggatcttcttgcagtccaagggactctcaagagtcttctccaacagcacaggtcaaaagcgtcaattcatagtgctcaatacactggtgcttctcaaactccaaagtgcacacaaattatcttgaaatcttgttacaatgtaattgctgactcagatgctcaagtggggcttgacattctaagttcctaggtgaatattgctggtctatggaccaaactttgcataacaaggcacagactgaaactttacaaaaattgctatccagtggtcctgccagacaagtaagaaaagaaagctgagaaaggttttctttttggtgtccaatgtgagcctggcatgtcagtttctctaggtatggagaagggaacaaacacatttggggcaaggctttattctctcccttgatgagcctcagcatgacttaatttccattcttctgcccaagctcagccagggcacatgggaacccacagggatgtaaagtctcatacctgtcatagtcttggcaagtctccacaacagatgtgctaaagtggttataataaaactcaggtactcagtggggttggttggggtggatgcagtataggaagcagctattcctggggtctctgtttgaggcggtggaatctacagctacctggaggagaagataggcaaatgggtggatttaaagtgaatgcatcttataagggaggttggaaaagaccttgatgctggagaagattgaaggtaggagaaggggacagcagaggatgagatggttggatggcgtcactgactcaatggacatgagtttgagcaagctccaggagataggaaaggacaaggaagcctggcatgctgcagtccgtggggttgcaaagagtgggacacaactgaatgactgaactgaactgatgagagaggtacagcccgagtggtgaaaaagcagcatgttaaacatccttccaataagcagaattagagaagaaattcattagctttaaaaactagttattaatttggctgaggccatttctgtagcctgcagtctccctctcccctgatgctccctcttctccacgtccaaaacagaacttgagactgatggaaaggtcagaaaggccagctgcttctgatccataatgccaccacgcagcgaggtaagggtggaatatcatgattcactgagaggcctgtgctctccgggcaggacaattccatctctgaggcctaagtagactccctgaaaacccaattttgtgttaaagacgtggtctgtataacaaagccatttttactttcatcagttgccagtagcagagagatgtgctaaagtggttataataaaatttcttctagaagcagctctgcgtaaggctccattcatgtaaaaactcctgcctacaacaggggtgcatgaatggtatgccgctgtcagcggcaagtggagaagagaaacctgtcttgccaccaatttgtcattatccttgaacttttaaaattatttctgacctccagcatcatcataaatagaagctgactcattcaacacttcttaacaacaacaacatacttaagtctggggggtgctcaaatggggagatgcatatcttctgatttttaacatcatcaccatttaaatgaaagtcaactcagcaaacccttctctaaagaaatgcttaagcttgagggtagagaatggggagatggggattaaaatgaaaaagttgtagggaaagaaaggaatgtttttggtgcaaccaacccagcagaattcatgtattggccctatcttctctcatgatgttttgaacaagaaatgttatttgtacaataattggcaaagttccattataacaaataaccttaaatttctcactggatttagtgtagacagaggaaaggctatgggctctgtgtctgcttctgaaaagctagactctaagagcaatgctggtgggaaaaaaaaggctacaacgtcttatatcgcaagcctgcaaccaagtcaaagtaactagaagagaaaaatcaataggctaacactaacaacttacaactgctcttttttcctttcataaagttacttttttcatcactgaatttttcccttttgtcctcactcctccacaggactaaagtgaagataaatttaagcaggattcacattttatttttcagaattcccagatgttttccacaatgtagaacaaactgataaaatgctggtactaagtgatgtgagaggaaggccacgtgaagaaacactgcacagcatctccccagcccttagacgcccttactgtggacaatgggacggagggaggggccacctttgttaaaaccctactatgcatcagacacctgtgctgactgcttcacaggcattgtgctatttcatttccataaaatccctgtgaggtagagattgttattcctttttattcatggaaagtctgatgcccaaaggtgatgatggtcataaggtcatacgggatgcagctgggtttagacccaagtctgcatggttccaaagactccacttctccactgaaatcattatactcaagagaatggggaaagctgtgtccagcttgcctagatgtctcgtggtgatggtggtgcttcagtcgttaagtcgtatctgactcttgtgaccccataggctagcctgccaggctcctctgtccatggaattctccaggcaagaatactggaatgggttgccatttcctactccagggtgtcttcccaacccaggaatcaaacctgggtctcctgccttgcaggcagattctttaccaactgagccacaagggaagcccagatgtctcgtgggtatgttttattcctataaagaatgagggaatttggcctggaggcagggaagacaaacctgaaggcaattacaataatttaggagagaagatacgc

SEQ ID NO: 58851 - DNA, 1313 bp, Bovine  19866880689678
  misc_feature (1)..(1): n is a, c, g, or t
ngggacccggtttctattcctgggtcaggaagatcccctggagaaggaaatggcaacccactccagtattcttgcctggagaatcccacggacagaggagcctcgcaggctacagtccatggggctcgcaaagaagcagacacgacttgggaactaaagagagagagagagacattcaattcaacactcatcaaagtatcaggaaggtgagttttgtggttatgtattataaaaaataaacttacctaagaaaaagtaaagataattgtgagctgcaatcgtaatggaatcacagtttgaaatgccagctccttgttctcagagtgtggttcaggaccagcagctgtggcaccatctagtagccctgcccaactagaacctgcattgttaacaagatgccctggcagttcaatccatatacacactaaagcttaagaagcactgtgttcatgactttcaccttcaggccttccccaaacaacttatcctcatccaaagtctttctccttatttagcagcaaagtgtatataaaagaaagaaattatttcaaagatgtgtttgtttctttgggagagccctgtgcactgggccctaaagccatctctaaggtctgaataaactaaaggaagtaattagcttgattaacacctactcctccaaaggacctaaactctgaaagagtagcatatgagcaaggggagataaacaaatgaaaacatgtttttctataatgaaactcatttgtagagaaaagcagctaatcactgttcaaagagaagaagggatttaacaaaagcacatgctgccaaatgatttaataaaaatataagtctactgccctccttgctgttcagtttttaagatgtcactcttccttccctcctacctcactgagtaatttcctctaaggcagtttttattttatttgttctcaaagcagaattcacacacacacaccctgttcttttgagagttccaacatatggttatttcctgggttgagccaggtctgagatatttctgtaaaattaccaatattttctttaaagttgtgtgtgtattttacttctgaatccagtacccaggccttttctcttcatgggtctctgaatgatagatagctccctttcaaggttctggccgcccataaaaggctctgtagacttcatccaggttgaaaatgcttgttgactttccttcagaaagtctctttacaaagcagcagaacaggagcctggcataatggatcctgatgcctgcgcttttttgacaacatcagcaagatgtctcagggtaaaagaagacaccataa

SEQ ID NO: 58852 - DNA, 2936 bp, Bovine  19866880820396
  misc_feature (1)..(1): n is a, c, g, or t
ntctggaagttcagggttcacatactgttgaagctcagcttggagaattttgagcattactttgctggcatgtgagttgcgtgcaattgtgcagtagtttgaacattctttggcattgcctttcttagggattggaatgaaaactgatcttttccagtcctgtggccattgctgagttttccaaatttgctggcatattgagtgcagaactttcacagcatcatcttttaggacttgaaatagctctactggaattccatcatctccactagctttgttcgtagtgatgtttcctaaggcccagttgacttcacattccaggtttctggctctagatgagtgatcaccccatcctgattatctgggttgtgaagatcttttttgtacagttcttctgtgtattcttgccacctcttcttaatatcttctgcttttgttaggtccctaccatttctgtcctttattgagcccatctttgggattataagtggaaccccagattgcaatctttgaagtctcacccacagagcagagatgctacctgggacccattcccaattagaactcgactatagatgtgctgtgacatggtatttcccttggctgattaaggtcggatgttggtcaaaaccccaatttggtgatgtatcttctgctctatttttattttcttttaatgttagtatacttaaagtaagctagataattctctgataaatactggcattatttagttgtatacaacgaatggcttattttgttaacaaatcctttgagcctgagatgaaagtgaaaacttttggcaaaacaacaggaagaaagaaatactcttgggtgctgggaatgttctacctctgatctgagaagtggtaacacaagtaacacattaagtcatgcactgaagtttagtacaatttacatactttactgtatatatgctaaacttcaacaattaaacagtgagtctagggagggaatcagaacctgctttagtaaggctgggtgagtctaagagagtctggatctaataagctcccaagcaatgctgatgctgcttgtctgagtctttaggctttcagctggagtcattgtgacttaaagtaaatgtgctacaaatgcttacccagtgcccatctgtgccagatgcagggctgggcccagctggtatgaacaacaggccctggacatgtttccagcatgtactatccttgaagaagtcacagtccaacacttttcatacaagaaattcactcactgaagaaagtcagacagagaaggagaaatatcatagacatcccttatgtgagtaatctaaaaagacataatacaaatgaacttatttacaaaacggaaagacacacagacttagagaacaaatgtatattgccagggaaaaggatgggaggaagtgatagggagtttgggattgacatgtacacactgctatatttaaaatggtaacaaacaaggtcctactatatagccaggcaactttgttcactgttatgtggcagcctggatgggaggacagtttgggagagaatggatacatgtatatggatgtatggctgagtccctttgctgtccacctgaaactatcacaacattattaatcagctatactccattataaataaaaagttaaaaaaaaaactcactaactgaaaaaaaaaaaaaaaaaactcagtgagtctctgccatttcctatgagcaggtgcctgtttcccctccccagagttattagaccagaaaatgctcatcctaaatattcactcatccaaattggcagaagtactataagaccagtgtaaaactgagtttgcagaaataagtccagtgtggctgaaagtcaggagtgatggtcagcagttaagctatgggttcaccgatgcaagcagcggccagagcttgagagccacagtaaggattctagtctttatctgaggagcaatgggaagcctttgaaaggttttaagctgaggggtggcataatcagatttgcatttttaaaaagatcactctaactccagtgtggagaacccttagagcggggcaggagagaagcctaatctagtagaccagaggagaggtaactttaccttggacaaggtgacagctgtagagacagagatggtttaaggatacttatctaggacacgaggaggtcttcatgaaagatgactatgaggctgtcaaagatgagtctgagtcttttcatttgcacaactcttataaaactcggggtgtcatttgcaaaggtggagaacactatgcttattatttacatatttttaaggctttccagagtactcccaatttcatacaaatttattattttccagtaaacatagtttatcagtataagacttttcctagaagtaaacccacaaaatttaaaaaacagcttgacaacaacggcatctcttttccaacggtcacaatagctctttccctatgtaaatatagctctttccacataaccatggatcactgtaatgccaagtccacttacacttcactgtgaatataaagcccccaaaactcaaaaactggatccaaataatccttctctttgtgcatcccttccttcttccctttagctctcataaatcaatagttgactactgtatatgaagacacacatttaggaaactgctcataattgtgtgctcttctgacttgcaatgtgctgaatttacttcccagagtaatgtattttttaacatgtaaaactgtgcagttttttctccagctttattaaggtatacttgacaaataaaagctgtacatttttaaagtatacagcatgcatttttaatgtgcattcagagcccactgcctggatgacagcaggtaccttgcaaagatgatgatgaacatgacctctaggagacaagccacagtcctgggttcattatagtgcatccacttttggt

SEQ ID NO: 58853 - DNA, 1780 bp, Bovine  19866880847493
  misc_feature (1)..(1): n is a, c, g, or t
ntaataggaaaatctgctttatcattttatttttaaaaagccattagcagacacgacagctattagtcactcctcacatatggcatggctgtcacctttatgaatcatgtttttatcttgaaacgattgtcctttattacctttccttttgcacgttccttaggagttgtaaaatcagaaaataggagaagctctgggattctgagtgccaggatcaacatttaaaaataaagcaagcaagaaagtgtgttacagttttaaattatgtacaattttgtgaagctgagtattagcaccttcatttccaagctttagaaagcatgccatctcttctactgtaggactttgcctcaaatgcacatgaaatcttctaagccctaagtattaagtagcagaaatactcagatagctcttatttcagatgaaggacttaaataactgattcaaagtaatgggcatggtattgcatcagtatgtaatacaatatatctgaaaaataaatttgataaataaaggtaaatatacattcacgggaaacatgaagatacacatataaggaagaaggaaagtttgcaattagatacttactttttaaaacagaacaacagaagcaaccaatataaaactaatgaccccagagaatgtgctttaattttctcacttgacctaatcatgcaatttcctgaactgcaactttagccactcttcagcagatcaatccctctacctccagtcctaagattaaaaaaatttcagaagttctaagaactacaagctcttaaaaattaaaaatctagaatgaacaaattctgcttttccagcaggactaggcaatctgtcgctgcaatatgcctcctagccatggagcttaaaggtatcagagtcagaacacagcacaaactgcatagtgctccatgctggtcctgtcctttctacccttctcttcccaaaggttcctacacatgaaagccaagagcaagtgagcaggcctcccctttctcagccctgggctgctcacatcctgcttgaccttagccttcagacctgccaccgtgattaagtgtgggatgggaggaggcagggccattcagctgaaacccagtgctctgagggctgcaattcctgaaaggaaaaccaagatgcagcctggatgcacatgcaaaggctgaggctctgcttacatatcagcagaggcagcctgtcaccctcccaaacgaatgaatgaataaatgatgaccccacagtcaactctgtggagctaagcagatggaaactctggctatctccttgggaaaggagaccataagaactccaggtcctaaaggaaggaacagcataagctttgaatcattagtctgctgccagatcacatgatggagcatgagcctttctcccccatagcacagctcacgtttccccctgagtggaagactaatgccatcacctctccctccctccatcccccaccacatcatccatctaccactcaccaccctttggactgtgatttgggacatctggcacgtacccaaggtcacaccatgagctgcagaacacaaacaatgctccacaaagcaactcgcaacagccattaagcataatttggatgctctcaactcttaaccctccttgtttctctctatataagacactcgatacacagtagcatcagatggtcatgctttttgacattgcctaataactctggctcatgctgaatggacatgactgatgaggattcaagaggctgtagctgtcactttgcagactaggggcaaag

SEQ ID NO: 58854 - DNA, 917 bp, Bovine  19866880955186
  misc_feature (1)..(1): n is a, c, g, or t
ncaccatgtgccccatacttcagcccccgtactgtccattaaaatgcatttattgagctattttattgttgatgtctctaatcattaaaatggcagaagagactatcctgacattttgaaatctggtagctagaaagcttcctatctagtttgtttaatgaaattgtttctgagctaacaaatttcatactgattttttgttttattttcataaaggcactcctctttatgctgctcactttcgcccaggacaatatgtggatgtcacagccaaaacgtaggtccacataacaggttttttccttttgttttccttgtatattaaaaaacagcagagtgagtgaaagaagtgcagtctttcaaagtcagtgaataaaagataagtaatcattattctcattcattattctaatctttaatgtaactgatggtaccagtttttaaattgcactgaattagttgtgcatgaagagtttacgttttaaattgagatgtgtgcttcttcagatgggactaagagaaaggttacaggtgggcccacatctatttgaagacaaaaggctgcgtatattctatcggtaaaagatacaggaagcagttaaattacagatatcttgtactgtagatcatttttggaactgtgttaaaatcctatcagaaactggaagaagaaaacagaatcataccttaggcctcttcagtagcatgacatcatcttcttggcattggaagggacaaaatattttgtcatatgtaaagaagagttcagatttggtagaaatgaacacttaatttgtcactaacagaagatgctgactttgaatcatactttaagttcagcactgactagataacttgcaggaaactttagaacttgtagcaagtagttttttaaaaatcagttgtgacaacctaga

SEQ ID NO: 58855 - DNA, 1481 bp, Bovine  19866881023089
  misc_feature (1)..(1): n is a, c, g, or t
nccacaccaacaccacacatggccattctgccatgaaaaactgaaatgacaacaagagttctctgtatcacactgttgctttgtcgctcagttgtgtctgactctacgactccatggactgtggcccgccaggctcctctgtccatgagattctccaggtaagaatactggagtgggctgccagctcctcctccaggggatcctcctgactcagggacagaacccaagtttcctacgtctcctgcaggcagactcttcactgctaagcccatcagggaagccctctctctgtatcatgtttgtgttagttattcagtcgtgtctgactctgcgaccccacaaactgtagccctccaagctcctgtgttcatgggattctccaggcaagaatactggagtgggttgccattcccttctccaggggatctttccaacccagggatcaaacctgggtcacttgcattgcatgcggattctttaccatctgagccatcagggaagtccctctgtatcatagctgaatacacacacacacacacacacacacacacacaaacatgagcattgtccaaatcacaaaaacacgagcattgtccaaacccccaaaatgaccagagactcctggcaggcccatatgcattagcatctttacctactagacctttagcctcatttccttccttgtacctgattagctgttttaagacaccaaatctaagacttatctcctgtttccaacagtatggaatcctgggcaaagtcccagccctataacctatacacaaactccagccctataactctttccaatattttaacgaaacacctcacaccttcccagtatgtgtgctccctgctacaaagagcaataaacccaacttgttaaaatacaggtttgttcttggtgggctttggctggagggtaaagacaaaaatacagactcagctaaagggctcatacttggaccaggaccctcaattcagcaatattgtgaacatctgggacaccttgtgattccctctgtaggagatgccagggctgataagttcatgtgcaagtgagttcctatagtttgctgaaacactgcagtgttgagtctgttttatttaccggggaataagagctcttagaatttgactgattagtgttctttagtaaaattgtttttagtcttctatttcctgttttcattattgttagtttgcttaataatcagtgttgtgtgtaagaggcacagtccatagggttagaggcttaataagtctgttttggagctgaacctctgagggctggctgagttcagaagttctcctcagatcatgaccttcggaccaattttgcttcgggtcagcatttctaagtcggatgaagacttcttcattcttgtttttgtgtgtctgagagctgttccatttagttttgtctgcctggacccacaactggtaatgactggccattggtcaggttctggggatcagaa

SEQ ID NO: 58856 - DNA, 872 bp, Bovine  19866881114083
  misc_feature (1)..(1): n is a, c, g, or t
natgggatagttcatgggatcgcaaggagttagatacaagtgagcatgcacacatacacacacctcttctagtttccttgcatctttgcatgtcgtatcccttcctgggtggtccttagaaatccaaaatcccccactccagatttattaggtttattgttcagagcaatcttgctacccatccatcttactgcctctcccttaagttgaagtcctatgatgaagagccttcagattccacctacaaagaaacaatcaagattgattcttaattctccatcttaattctccacctcttttgatgtaaaataaaactctccccagcctgaaaagctggctgctttcatttttctgctgtttaaaatggcaatttttctttttgtttcctgattaatatgacatcttccattctctgcacactgagatttagggaagcatttttttattctgttttccaatggaccagttctatgcatacctaaaaatagctgcttgtttctgatgccacaaatattcatttccaggtagaaatcttttacctttcttgatcagtgttattacatattctattctcttgaaattagaaaaaatgagtcccaataatatcagtatcaaaagaaagcagagcttctgcggaattggaatccagaagttatcatttggaatcgggtgccatccctagattgctgaaggtgtgttgagggtggtggatctgactttgcattgtgatctgaagctagaaccagaaaatgataaaattaaagtgtttcttcctttgtaaattggaggatttccagaccctgccatctcaccctcacaatatgagccctgtaaaacacaaaaagcccagcacagaattttctgaaacattt

SEQ ID NO: 58857 - DNA, 798 bp, Bovine  19866881138941
  misc_feature (1)..(1): n is a, c, g, or t
natattcctgaccgtgtgtcaaatagaacttgcttgggtgataaaagtattctgtatctatgctgtccaatgtggtagtcaccagacacatggtgtctctgagcccctgtgatatggctagtgtgaccgaaaaacccactttttaattttaatgaatttaaatttaaataaccacatgtggccctttgctgctgtgttggatggcacagctcccaaagattctcctgccctttgcacatctgtactggtggttctggtgagcaaagactgcttggagtcctcaggttaggaaaaggaaaaaaacatgaaagtagctggcaacaacagtaataacagctgcatttattcaccacctacaagcaccaggcaccgtgctgagctttatataggcccttcctctaatcttccaaagcgtgtatcctttaccccattttacaaacgaaagtctgcgacacagagaggttaagtaaattgccttgagtcacacagcccacagcttctgcctgtctgaaggtctgagttactttgcagagcagaaaacgagaggcaattcacgggttcctggctgtatgaaatgatatcagcacctcatctggtgctttatttatggtatattgaattcagagtagattaatttggataatgaaatagttctcagaatctaatttgaaattcaggaagataagggtgcgtgttgagctcctggtgctctgctctgtggtccacaggaagctaggaccctggggcagagggacagccagcccacccccttcctggccccattaggcacttccttat

SEQ ID NO: 58858 - DNA, 1566 bp, Bovine  19866881166427
  misc_feature (1)..(1): n is a, c, g, or t
ntttgtcttcatgaaaggtccctttaaaaagaataaactttggggacttgcctggtggtccaggggttaactccacacttccagtgcagggggctcaggttccatctctggtcagggagttaagaccccacatgctgtgaaatgtacaaaaagaagggggtggggaagaacaaactttctaaaatatttcttttccatctctggctcagaacatcatatttataactttgtatttcttatgactttgaaaactagatcaatttctccttggaaacatcaggagaaaaatacatttctttcatgttccttctagaagccaccttctcagggttaaggtgtattgactaaaagagcttccttcttcaagagatcctaagtgtctgtagggcacttcattgcgcttagagggatggagggatgaaatcagtctggttgggcgcagcgccccgcgtcccgacccccgcccttccgtgccggtggtcctggagctgaggaggaaggcaggggaaagagttgagttgcgttagcgcaggcggccactagagggcgccggagtacaggcacgcccacctgtagcgcccaggaaagccctctaggctcgggagatggagatgaccccagcagaatcccaaggaggtgtctacagaggagggcttggtgcctgggtgcctgtgactctccggcccaaattacctcgcttcagaggagggacaaggtctgctttcagcagctggggcacttccagcctggcaggctgtctggggtctgactgccctttgtttttcccagaggaaggcctctggacccagaaatacctgccttgacagttttcaagctgcgggcctacacaagggttggcatcgggataacggggctggtgggcgtgagtgtggagcgtgtaaaagtggtggcattttggtgggtgggctgtgctcattcccgtgaccttcctcccccattctttcctcttcctttccgcctgagtctctcatcctctccccacaaccctgccctcagcagaagggtgtcactgttcacgctctatgtcaaaagctgtattaggtgctgggatcaatgtgaagttcccagcttttgaagatgcaggcttgaggggcagacggtgatgtaagttagggtcatgtgatgcaaagtcacatcatgtgatggaaagtcacatcatgcgatggaaagccatcacctgacataaagctgaggcacctgaagtaaagtccagcacctgatgtaaagccagacatgatgtagacagccacctcctgaagacagagatttttatcttggaccagcctattcagggagacttcagaaaccatcacttgccaggaaaaaaaaaaatcttttagcttccaggtacctcgtacctgtccacttgctgtctagtcaagtgataaaatatttttatgagcaatgggaactacagaaagcagtcagtgataaggatccttggtttattatccttggtttatttcctttttcattaggtaatctttaaattcattaagttcatacacttcaccagagttatatcaggatctcctgagttggaat

SEQ ID NO: 58859 - DNA, 2039 bp, Bovine  19866881238674
  misc_feature (1)..(1): n is a, c, g, or t
ngtccgtctagtcaggctatggtttttccagtggtcatgtatggatgtgagagttgaactgtgaagaaagctgagcgcggaaaaattaatgcttttgaactgtggtgttggagaagactcttgagagtcctttggattgcaaggagatccaaccagtccatcctaaaggagatcagtcctgggtgttcattggaaggactgatgctaaagctgaaactccaatactttgatactttggccacctcatgcaaagagttgactcattggaaaagactctgatgctgggagggattgggggcaggaggagaaggggacgacagaggataagatggctggatggcatcaccaactcgatgaacatgagtttgagtgaactccgggagttggtgatggacagggaggcctggcatgctgtgattcatgggtcgcaaagagttggacatgactgagcgactgaactgaactgaactgaacatctctttacaatgaggtcacacttctgttttccccatgactattttttcagcatcctatcaggaaatgcatgccattcaacctcagagggtttggggaaccagtctattatgttttccattctttcagtaactgcaggaggcaggaggtagtgggtgggttgccagattccaccactgggtgaaaaggtttggggaaggagtgaaccgtgctaaaacatcccactgaaccatggctgacatcttggttgtgttcatttggacagaacacaagcttacatgttgagcccaatggtcagtgccaagagtaagccatctagatgactcatcaggcaatgaaaaagtgaattccaaaagactagagaaccagtctgtcaatgttgagaaatagaattaatgagtggactaagggtcttctcctacatggaatctgtaagcccatgggatttgtacactcctaataatgtatttggtggtgggctgggtcttttttaagtgtctgggtgggccaagattgtaaattcacctgcccttgaaaaatttgctctcagtggcttcatattcaaaatcctcctagtttccagtagacatgacctgcaaaaagagaatacccagatgacaaaaaatagatctattaaaacctgtgggaaaatcatgtggatgtaaacaagttgtgcagcatctgtgccccatcttacagaagtgtacttgtgaaactcagccctatttagctccctagacgggctcaatcatgtgaggaaggcaaagaaaatggtttgagcccaaaagagtcaactgaaccaatgtgttcctgagacaaaaggtagtgcaacccaaaggattagagggggctttcgcaaggggatgagataaggcctctccctagatagaggctgggcttttgctataacctacctatgtcctgcctaaacttaggccattgttcatttgccactgaatatttatgggagttaattatagattatggtcatttttttaaagtctaaggttctctaaaggcacacccatagagcaccccacccccatatacacactggcatgtttagaaggtagtaaccatgtgcattgtgggcaaacaccccgacctctgtctgtcctgggcacttggaggtggaggagccagcaatgtcacagaggagacagtgtcccatgatcttaggcaaaaggctggtttcaggaaactattcatagattttcaagtgaaagctctatcgatttgggtctgttttaggttctatagatcccatgcttttggacaactctttagtcaaccttcaggggcttgctttgcccttggagttgggctgcaaagagtcagccccagtgaaaactgaaaatttgagcccagaaggttccagctctacaccctggctcacagaggagaggggaggtcgtgtggtccccctgacccaaggagattattcttctggtgttgctctcccctccttctcacttttttaaaaagtgcttgagtaataagaaattacttgagtaataagaaacccattttttaaaactagttacttgccaattagctttttattt

SEQ ID NO: 58860 - DNA, 809 bp, Bovine  19866881504947
  misc_feature (1)..(1): n is a, c, g, or t
natttgtctgactcttttgaaaagctgaaaactgaaattgggctgaggagggagagtggtcatctttagatacctgagtgtgtacatctgggagtttgctagctgttctcctgttggttgtttcctgtattaaaacaagaaaagttcaatcatttaccttttcccagcttgtttttcaaccaaaaaagataagaggttttgtttgtttctgtttttgtttatccaagagaaaactatatgttttcagagcgaagagttctaatccataccatctttataggaacgcaacagggatcaattcactttagaaaataataaaactaaactgacctgaaaatttctaatctttgggtttctgagagtcactctgcaaataaaagaagagtcagcagggacaatccagatctataaacaccaaatatttgctcttatcatttcaagccagagggagtgattcacatgatatacatttgtactgacttctttgtccacactatttctgaggaagaaacttaccttcctaaatgccaactactacctctaccgtataatatcagcccacctcacacccaacccacgtgctgaaaggaacagttacatcttctttttaaaaaatcaacttcactaaagtatctggatgagttttgacaaatgtgtacacctgtgtgctgctgctgctgctgctaagtctcttcagttgtgtcccgactctgtgtgaccccatagatggcagcccaccaggctcccctgtccctgggattctccaggcaagaacactggagtgggttgccatttccttctccaatgca

SEQ ID NO: 58861 - DNA, 1118 bp, Bovine  19866881637923
  misc_feature (1)..(1): n is a, c, g, or t
ntaaagagtgggaagtcatttctttataaaagaatcctgtttccatgacttactttgaggtgaggtccttgacatcacattcatgttggaaggttcttttgagcagcagcattcaggtttagtcttcagtagaaacaaaggagaaaaaagaaagctgtgaacagtagtttaatacagtatgtcaaggacatgtcagttatggtagccaccagccacaggtagctatttaattttaaaatgaaataaaattaaatattcatttcctcagatgcactaaccccagttcaggtactcatggctgctgtattgtacagtgtagataaagaaaatatccatcatcacatatttctgtggggcagtgcagaactagaggttgtgttttataccctacgaggtagtattttttatactttgtaatctactaacccccttcttctttcccaaaacacacgatactgccctgtgctaactaagcaaaagcctattaatgctaggatgtcattcaaagaagaagcaagtcttaaacgaggtgcaggagcagaacaagacacatcagtagatctattatgatgctttttcaaggaaatttgattctggcttcttatactatctatagtgtcttctggtgaacataaaaataatgttgttcctctttgcttttaaacttagtgacatatatgagactagaaacacacaatccattttgtgagtctccagcttcctgttaatatgacattagtagaagaatccaccctgtgattatattagaaaggaaaataactgaacaaaagaagagtgggatttgatttttctattggctaaatttagttgcctgagaaacaggaggaaattatttcagtaccaaaataataaaacatcatctaaatttgctttttctcttttttttcaggaagctataattgccttggtgtggtgggaaaaggaagggctgttaaaaggaagagacaaccattcatacaatttcctttaacattttgttcatgtttcccttttaaaactttctgtcagcctttataatcatccagttaaatttgtctatctagttctcctaaaactgggtgacatttgagtgctataaaattaatatgaatgtgatg

SEQ ID NO: 58862 - DNA, 1353 bp, Bovine  19866881970093
  misc_feature (1)..(1): n is a, c, g, or t
ntaggtgagaaataactcagagtgtttttaactgtatctctcttataagaagtagaatacattatcaagctttagaattaaccttgcatcctctgatgctccaaagagtaacattcccctaggttcttcaggctatacctttgggagaggtgttcactagggctgaattagtagtagaaaactccttctctccttcctatgcccctattgtctatttctcatttctttctctactactttcccctttatcattatattgtccttgacaacttttaccaatggtctcttttaaggcagaaacaaatctgttaaggaaccagtgaagccagatggaagggcactctgatccctgatcactttagtggacttcagagtttagcatgggaggcagagatgggaaagaaagtaggcagacagtactgagaacattggctgtaagtacacaggacataaccagataattcaagtctggctttggaaagtaaaaaaggccagaacccatagaagtgtgacttttactagcacccaactgaaataagattcaaattatgtgacctgatcctaaagacagaccaaagcaccatatgcacaaaagctgaatcttcaccactaaaaagaggatcgctaacttatacttacaccagttgaaatagctccaggcctcctgtgggtttttgtttgaccatgagtagccggctggcctttaaatccccatcttttcatgacaccttgaaaacctttaccaatactgagcaagataaatcggttacaatttacataatgaagagaggtaaaatatccccaactgcatactttgatagtattttagagtttcagcgaagttccttatctaaataactagaaaaggccatataagtaaaactgcaaatgaacatgcctttatctttctcctgattgcaccccttcctggagtctcattctatataaagatcgtaagacaacagcaagttaagcagaagttctatcatcctaatcctatgtaacgacacagtaaaagtgggacattttagaagttcaaggtacttgcaagagatgccgcaggcaatcattaagctccccacctcctataaagcaactgtactccaataaaagttaaaaaagcaaaacaaacaaaaatcccctaccccccagcatgcatgcccctgtatgatgaatcaccatcccttgagtctgtgtagaccagcaactcacctctaagcaataaactatggcagaagtgataaacatcacctctgactctacattacaaagagactggcttcatctctgtgctctcagctctgaaagaagccaggtgccataacataagctatcctattggagagtcatgca

SEQ ID NO: 58863 - DNA, 758 bp, Bovine  19866882163291
  misc_feature (1)..(1): n is a, c, g, or t
ntggcaatgaagtcccttgaacattcttcactcacctggctggtggctcatgccagctgtataatctacaagtgggctttttacatggtttggggttcttctcagcagggtgactgggcaccaagaataagtgttctgagagacagctaggcagaagttgcaacttctttaatgcctcaggagtcacagagtatcacttctactgtgaagttgacactatgatctgttgaacggtactcagtcaaaaagacatgcctaggtgcaagaaaaagggacaaagattctacctctaatattcatggatctggaaaggtcacatttaaagaaaaacatgtagggtgggagatgttattacagccttcaatggaaaataaaactttccagatgtgaagataaataataggaaatcaggaaatttctgagtcatttttccttgccctaagtcagacattttattaacaggcagttagaatcctactaatgatttacacattaaatactgtatggccagattcagccaggtcttgactagaacttgaaacttgcctgatctgagtctgcctaaaagtaccttgaaagttaatgagatcctttctgttggctgggtaccatctttccacacacaactaaatgatatttaatttaaaaatatgaactttgctgtaaagtactaacttcagagcacagtaattttactgttgtcagcctctgcctggattaaaaaaaaaaaaaaaaaacatagccaactggtcaactaa

SEQ ID NO: 58864 - DNA, 1355 bp, Bovine  19866880340823
  misc_feature (1)..(1): n is a, c, g, or t
ncatctgtcatagaaaagatcactgaaacctgttaccatcactatgtacggtaaactcaactgcccaaactgtaactctgcaattaaacgccgccacccctgtttctcacccttgctaaaatgaaaagtgttcacttctacgaggctttacaacatctgaatatgttgaaacagatgataaaggctgaggggtactgaaaatgtttatgtatgcatgtatgtatgcatagaggtttaaaatactctatgtaaaagatgggcttcaggaattactatataaactcagcttttgtttgtaaaatattctctccttgactcacgttatagagatatttgctctaaattttgcattggttttcatccagtagcagctccaaatattttggcattgtttttttgttctcaaaccccactaccaagaagatattgtttgtaaatgcctaatatggatgaagctcacaattgaatgctacttttaggtaaatgctatcatttgtaatgggatgggaatactttggggtgtttctgtttttcttaagaaacagaggcatgcctgtccacacttcactcatgttgagccctcctaataaagtgttcagtgagaaaatcctatcaaccaaatacattatcaactaaaaaaacaccatatgaaatcctcacatgatgcttattgctccggaagtccaccagcctgggaagtcacactgtttttaagtgagctcctgagcgttactccttgcttgataatgtgcagtccctcatgaaaccccaaaagcagttattgaccctgtcaggatgcctgattaatggacaaacgtagtaattgattagcaaagaagtgtgaattaaaagggggcacagcatcaataaccagcttctaacaaaagtggttgacgtaaaatgtaaaacaagagcccgcggctatatcttatcaaaggcacgcttttcttacaaaggggagagaccgggaaataaacaggcctagtgtcctgagccctgtgagtctttaacccttcctcttggtaagggtactgtgtggagtcaacaagcaggttgggaagtgcctatccatccacttgcagtccaccttcagatacctagcagatgagccacttaactgttcccattgtcccaagacttaagaaaaagcacgtaagaagtcctattctctcttcattttgtttactgcgacctctcttcacttatgtcctcatagaaaaataaattctgcttgctcaggtgtccctggagagacaggcaacattattcactagaatgttgcttccatctgcttctgagcagaaaaataaatttattcaatcagtcagtcagtcatccagcaccggtacaggcca

SEQ ID NO: 58865 - DNA, 1093 bp, Bovine  19866880426803
  misc_feature (1)..(1): n is a, c, g, or t
ntttttgcgactctgtggactgtagcctgccaggctcctccgttcttggaattttccaggcaaggatactggagtgggttgccatttccttctccaggggatcttcccgacccatggatcaaacccaggtctcctgcactgcaggcaaactctttaccgtatgagccaccagggaagttctcttccctgggagtcctcctcaatctccttaattattgccatgagagctgacacctagagcatcagcatttggagtcagtgtcagctgatgtagagcaaaggctggattcagtgagctttttttagaatataaattatttattattttctttatttggctgtgccaggccttagctgtggcattcaggatcttcagtcttcattgcagcatgtcggatctttagttgtagcacgcaggttctttgagttgcggcgtgtgggatctagcttcccaaccgaggattgaacccaagcccctgcgttaagagcacagaatctcaaccactggaccactgtagaagtctcctgcattcagtgagcttttaaatttcattataattctgttttttgtgtattctctttatatatgaaaaacaatctttgattctcattgcctatctgtcagtagaggaaaatagcattgagatttgacaggggatttgaactgacacaatgaaggagtacgtcagtgtgtctgaaaccaggcatttgttgcaagggcgggggcggggagcgggggtggttctccatttcctctatgtccagaagcctttcctggcagaatgtctagcccacgagactcttcgtcttcatcttgcatgaaagctgcgatttggttctgacgcacgggttacaggagcctctgagcgtccgcacaatctgttatgctaaatcacacctggtgtctgcacagagaaggctctggcaagcgtccccaccactgggacccaggcctctgactctgacgccaagacatggcagtgttgcagggggccttccgagagcctggctcaccggcacggcagattaacctgcttgttctcacgttaaatgctttataaaattcaccgggtcagaaagagggaagaaaacc

SEQ ID NO: 58866 - DNA, 859 bp, Bovine  19866880426897
  misc_feature (1)..(1): n is a, c, g, or t
nagaactcttgcaccgtcaagctgagaccccagcctgggccgagtgttgactgtgaccactccagagtggctctgagctgtctgaccctcaacgaatccaaggggcaacgtggtgcatctaggagcaaaccccagagatggagtccaaagtgaccagccactcttgagatggttctagaaagaacatgttctgcaccagaacttttgcaaatctcacagggtttttcttccttctttcttcagttattattttgaatcagttagtctactgaaatgcttcagtgattcagggcatgagatgctggcaggctcctccctccaaaatctttaaccttggatatgtttgcagagtggcttggaattgctttctattcctgctgagacaggaaacggaaaaatgaatggattttcattatgcagactcttttttttttttttttgcatttgaatcagatgtagcaggtgtcaaaatacagtacagaattcacaccattaatgtgaaaatttccactgtcccccaaagccaccagaccccaaagtcacctagattaacaaaatttaaaatgagccgctgactttaaggatgttcttggtgatcttcagggctattctgcggtggttttcctgtttgtcacacgatgctgcctatacttggaaggtcttgttggaaggccatgcgtctcacccttgagagtggcagagcgcgtgggagcggcatctcaatgtcctgggccccaactgagggtctgcatgcagaagacgtgtcagaattctgcttggagggtttccaacctaagctaaacgaccttcatgtagaccccaaaacaagcagagaagcaagttgcgttgggaggtttta

SEQ ID NO: 58867 - DNA, 2013 bp, Bovine  19866880502760
  misc_feature (1)..(1): n is a, c, g, or t
nttggcatctttgaatgcacactgcctcactaaggtcctttcacctggccaaggaagaatgtcactgtggtagttctcccacagctgtaactgctgtaatttttacccgaagcacttactgttgtccaaccctccagcctatggcctcgtgtgtcctaacaccctgcagctgggtagcaggaccagctcacggccaagtatagctgagctcttttggggcatgcccgctgagtgagtgccccaggccctggagttggggatatgccgagggatgtgggcacctcacagtcatggggaccagacgtcagtactctgtgaccacctgattcaagtatccagtgtgtgtctgcatgacttggggatgctgagaaagccaaagggattatcgacatacaaagcttgacacctttgtgcagaagccagctggcatctcacggggacaacctgagctgttccagcatcaggaaagctgggtttggctggatctggctggctcctgctattccaggagcgcggcaggcttggccccaacggagggagggggaagaataccctggggctgatactgggacccatttcttttgtttccgatgaggcagagaggaatagaactgcaaatatgatgacattttaataatcagggcttttctccataaagactttgtacatagcatttatcctccaaaaagtctctcctctttttgtgattttataaacttaaaggaaaaggagaaaaggtctgtggtcctagcacttgccttcatctaaatgaataactctcgaccactgatgattagcaacataaatcctgtttgagttctggactagtactctcagccagaagttttcatatgctttttagaattctgaactggccacagcagcttttaggaaagtaaaggatacaaataaagtttataataatttgactgttcacttctgcatttcaaaatatgtcaattgtagaaatttttttctctgaatctttggaattccctgaatactttgaagccagttgtgaaatgctgctttagaaagagttcatataaatgttcttctttatttaatcataagggagatttagagaaaggatgttttatttttctgtagttttgtttgataagaatatggaattactgttattatgattactaatgataccttacatttgcacagcactttagaatttttacaaatatgattgcacataattcttgaaagagtttgataggaagatattattatcctggttttatagacgaggaatcaataaatgcacatacatgtaacataccgtgtagttccagcattatatttccagaggattctgtgctttaggaaatacatttggtatgtaaaatggctaaaaactacaaatctaggactgaagaatttattttggtttcacatagtagctacaaaagatgacaaaaacaggactaaaatcatgtgataatgtgcagtgcccctttgaatgcacagctatctgaatttttgttgggtgattgctttgttttcatgtgttttgcatctatatcatagcatgctatgttatagcacaatactaaaatataaaaaatagtaaaagtatccctcatatttttaaagataaaaattataatcacaatatcatagcagaatagtgttttcccattaaaggatagtctgatttgtagttgattgtaatttctttcttataaggtctcaaaacagacaaaatatatatactcttaatattttcccctgcttgttaaagactaggtattcagagtatttgttttgagacgtttattgctactgttcagaaacagaactatgttattggtcaggaaaatctgattagtgtttctaagaactattatagcacagcaagacaggcaagcaatccgaagtgcaaggttaaaagcaatttattaaaactaggcaaaagacgttacttgttaaaaaaagaaatacatatttcttaggaaaaattaaaattgtcctaagtgatattcttgactactttttcgt

SEQ ID NO: 58868 - DNA, 840 bp, Bovine  19866880538810
  misc_feature (1)..(1): n is a, c, g, or t
ncagagatctgtagcatcacagtgacccctaaataaaatctagccccacccaaccccccaacccgggtcctgctttaacaatgaaaacaatcatagtctaattaagcccatttcaaagttttcttaagtaatttgacatgccagggttttattggctgaaaagtctgtcatgaaacaaacacacctgtcagcaatttaaaaaggatgaactagggaactgttcaggaaataatatctgtgctaattaaaaccactagttaaaagcttcctgtctcttcctccagttgccctaaggagtgaccttttcctctcctcctttaggttcatttttttcctttgcagtttatgtgctttcgccatccgcgatgacttcaaatcaacctgcctaagagccatgcacatctctactcttccaggtggaggggtagggcctagctgtctctagtcctgggtaacctggtttccagggttgctctagaggaagctgttctgtctaaaccacatatctgtgccggcagcagaagcatcatttcaagtgtagatcgttttctgttgaacacttagggcaaagccaggttctccttggatgcaggatatggtcttttttggttcctttttctcggttccattttcctctgctctgtgtgtgcattttcaaaacctgaagcatccaaacccttcctttcttgctactccttcttagccgctccccagtctttaattaaagcaaagtgtatgagctactcacccactggatttcttcaggaccttcgaccttcgggagcatgaggctggaaggaaggacccgagactgcaggatggcctccaggtcttcttcgg

SEQ ID NO: 58869 - DNA, 1785 bp, Bovine  19866880543113
  misc_feature (1)..(1): n is a, c, g, or t
nccagcgtgtgtgtgtttttaaacagcactccgcagctgagcccttggaggaccggcctattttgacagctccccttagtccatgtatcaccaagcttgttctctgccaatacgtttcacatgattctggggacatgtgtagcacgcctgtgcaacttgcaaacactcatacattattacagtaataattgggttttgatgcaactggaactcagtactaccaagctgccagcatttccttttggctaccagtgctaggcaagaaaattatagtctaactgtcttcctgtttattgataaacaaagtggccagcccagcaatggagcctgattagcagtttgcaccctttgtgaaaggataaacagaaccctactgttttctgtgtttgactgcaatttgcatctttaaagaggttgggttgccctgagatgcatgttcaacttcccggtgcctggatagtctttgatatgttacatgtcagcctccttgttttcctctccttcatcttgaaacaatatttgccagcgcatctctggtcccatctggcctaccataagcttcccgatagtcacctgtctgaaggaggagggggtgggcaggggcaggagaagaaatatgtctccgtttcaccacccttgaattttacattcccagaaggccctttaatgccgactctactgcacttgtgaagagaggatgataggagagtgaacagccaaagacaaaagggaatctgctcactactctctctggcccacaggatcgtttctgggtcccctctctttgtcttatcttcacttaccctccagaaaatgccctccacctttgtaaactgaaacccagtattagccttctaccttgagtttggtacagtgttctgaaatttattctaacctaattagggtcttaaactaaatgataagagaccaagtagttgactctcttgctataattattttcaaatgaaagaaatgaagatcattttaacttgaatttgcatgatggaaaagggagcattaatacatgtaaacatggattaatctgtttaaataaactttccccataatcctcaccatatgtaaacaacatttgttctgccttagagagattgtatgattggacccacgagactcccgttatcccactgtatagtttccttttataacttcaaaaccaatgttacatatttattggaggttgtagggtgttaagtggagttagatacaaattgtacctcagctctttcgttcatgccagtagggattaaattagattttatagctgttgtagaactctatttggtagctaacaagtgggatttttaaatcctggaaaacataatcctattataaaacaggcagctgaattaacattacccaggaaggttctcttcatggattagcattttttgacaataacaaagaaaatcatcacattctatggggatattacatgcctttctcgaaagtcagaacagcgaattggggaaagggaacaagataaatgaccaaacatgctatgacttagactgtttcttttttaagaagagtagtggaggctgggaggtaacgctgagcatggccttgtctgtaattctggcacgtgccctcgaattggaaatgtggccttgctgatttctgtgtcggtgccccagctttggtcgtagacggtatctgcatcagtaattccctgcccctggtttccttgtaggatcactaaagggcacaaagagtccatgaattacaacacaaattgggtgggggaagacatattttgctactttg

SEQ ID NO: 58870 - DNA, 2728 bp, Bovine  19866880546179
  misc_feature (1)..(1): n is a, c, g, or t
ntaggctcttattatctattttatatatagtagtgtgtacatgtcaatcccaatcttccactttattcctccctcatttcccccttggtaaccataagtttttaaccaagaatcttacctgatagaaagtcaaaacccagaatttcatttcattcaaaaagtattttttcaggtcttgccatgtactcagcaccaagaccactgccttttgaaagcaggtaaaggactctctctccctccggaggtttaatttgatatgggggacaggagagggtgcacagaacacagtcacaagcgagcaaagccacaggggtgcaggggaagggcatgagccagccagggtgggcatgggggatcagtaagacttcgcaggggcaaggtgatatttgctctgcaggatttcaccaggtggaaaatggggagaagggccctgcaggcagaagaaacagtctgagcacggcagaaatggggctgcctcattgcagtaagaattttaacgtgactagaggatctggtacaggggtgggaaggaggtaattctggaaaggagatttggagtcagggtgtaaaggacagtgtggccacgtaaggtcttcaggcttcagtgttgggagctactggaacttgtggagagtagagcaatgagctctgaactcagaaagctccttttggaagatggacaggagggaggaggggccagccagaggcaacagcaaggggccacgacagcggcgaggaagagacggcagaagccatggccgagatacggaaaatcagaggggctggctggagtcaagggtaattccaaaggcatcagccacaaagcaaggaaacgtggcttcagagccaaggccttgaggggtggaatggccaggacagcgcctccccacttaccttactcctcagaagggcacctttacctgtggccaaaccaagattcaagctcacccctaagtaggaacttaggggtacaggttctgactcccaggcagacagaaatggtaaaagtgcaccaacactctgttctctgttacttcccctcttcaaacatttttcatgaagatttgagaacatttaacacataaatccttcatcacggtttcaaaattctcccccaccccttatctcctttaataacacataagatttgccaaagaaaggatgacatcgtaaaggtacatctcattgaaatctacttaattgttacatttgtttagcttttttgacacaatttttaagagtgtttatattcttcacagaactgcatttggactatcatgaaaaatgggtgccaattagaagtattttggctaaaaccagttcctgcacatcattgtcttatgctagaagtgagctggcatgaacaacaaagggttgctattaatagtacaacacagaacgcaagcggaaacttgagtgaaattatgttttttaaaacccactgtttagtgcccagaaaagggacagactgtgcagcatctgtgctggggggatatggaactaataaatcattgccatttttactacacacaggcagaatatgatagtctgttcaaagccaaacatgtgctgtccgagaaaaatgatttacgttccaggcctttttttttccacttgatttgaaagtttacgcatttaggcatctgaaatgattttattaatttaactctcctgtaatcattaacaggttttttctttaatttgagaagggttacatttatgaatgaatattactataaacatatatacatccttatgttcaaacataaaacattcattgcaaagtctgatgtaaagccacatcatacttatgactgagctggaaaaaaattggactttgatgcatgactagtttttaggaaaaaaatgactagtttttagaaaactccttgtgaagcaagatggctaactttctactatcaatccaagaaagccgtaagaaaagcctatctttttgcggaattaattttgtcagaatatcaaagcaagtttataaaagccttgaaacactgacgacagtacaatatccttcctcaataagtaactacccaaggctaatttcttaagccttaggcacacttggccatcctatctgctctggaatacattaatgtaataaaaaggcgcttctaaacagtcacacaggcacgccccactaatcagattatcacctgtaatgcactgacagtgagaggagtcacagagaactacactgacagaacgctgtcccagggctcacagagcagtgggcccctcattttggcgttccacaatcatctcaccgacacactctggtcaaattcaggaagcagagcctagaggggctaacatgtatttggagtcttctgaacagtcaacggcattcaggtttttgtcctaggacttgaaaagttaaaggcacggtcctgccaattgtgagatgccctctccaacatggaccacccacaactgcggattttccatctggtgaacaaaacagacagcttccctaattatttttaaaaaggattttttccccctaacatactttctttatttgtctgtgacctggaacttaatggaaaacctggtgcatgccaacttcatttcttataatgaaacatcccatttttattgttttaactagggtttttcaaaggatgtaagatagaaattattacccccagagctaacacaccaagtcaccaagacaattcccagaacaactattttctcgaacagagaatat

SEQ ID NO: 58871 - DNA, 1285 bp, Bovine  19866880554720
  misc_feature (1)..(1): n is a, c, g, or t
nctgatgttctatgaaagagtcttttaaggagtaagatttttttttcccctgcatcattgacacagaagagattttaagcattgccattaaaaagaaaagaacccaaccctcatgtgattacattttccgattttagatttcagcagcaaagagaaagcgtattctcctcgcttctcttctccacaggaaaggcaggaacgtggtgtaaaagtaccgcaaggaaggtgctaaatggtcacttgtaaacaccccttgttgggcacaggacgacagcctaggagtgacagtcctgccgtccgtcgtattggggtcgtaaactctggagttgtgactccttcttgttcaatgcgctgacagcccctgtctacaaggaatcacaacagacaacttttccacagcagctgagggtgcagaaggctttatgttccttttcacactgtgatgcttaaagacatggctggtcctggcttttggcgttttatggatggcctttcgaccaaggtttccacgaacccagctgtgtatttgccacagtaatacactttatgcctcaagaatcaacactgtaatactcctcttttcagtgtgaaggtatttctgggatcctgtcaatatattctcttgtctctgagcacagcacgaaggaacttgaaaacaagtgatttactgttcgttacggggaagttggatcttttttcccaccctgattgtcaagattcctttgttgatgtcagtttcagagcgcgtattttcccttctgagtgcacaggacgttgacactgcttccgtgatgctgcggaggatgatgtaagacagccataggcccgtgtctgttgtcacttcagctcagcgtggagcaagcgtagaggtgtttcagtgacagccgcgggtgcccttggtggggggaggtggggctcggaaaccaaatttccaaatgatctctgtgaccataagtagctagaggtcgtgtgaatactcatggcagcaatactgatagcagccttttatggagcatttagtgcacatggggaatcctcaccagttcacatagagtgtctcatttaattccaacaacataacagcagctgtgtaagattatccccattgtatcaaaggagtgaagcaggactcagtcatacctctggtaaatagcagccaacacttgaaaccaggcctgctagattttaaagccactttcacattcattcagcaactacctattggttctctcttatgtgttaggcagtgttttcatcacatctgtcttttaaatttgctttttta

SEQ ID NO: 58872 - DNA, 2633 bp, Bovine  19866880566705
  misc_feature (1)..(1): n is a, c, g, or t
ncccaggctcctctgtccatgggttctccaggcaagaatactgggagtgggtagccattcccttttccaggggatcttccatagccaggaatcaaacctgggtctcctgcattgcaggtaggttctttactgtctgagccaccagggaagttttattgagatatcattcaaataccataaaattcaccctcttaacatgtatgattcaaagtttttcagtctattcacaaagttgtacaatgatcagtggtgcttaatcccagaatgttttcctggcggagaagaaactccacacccatcagctgtcacattcccctcttcccttccctgagaatccctgggtccactttcccaatctttagatttgcctattctggacacttcatataattgtaattatatggttgtgcctttttgtgtccggctgctttctctcttggagaaggaaatggcaacccactccagtgttcttgcctggagaatcccagggacgggatgtcgtctctggggtcgcacagactcggacacgactgaagcgacttagcagcagcagcagcagcagctttctctctatcgtaatgttttcaaggttcatctctgttgtggggcttccctagtggctcagacagtaaagaatctgcctgcaatgtaggagaccttccctgagttaggaagatcccctggagaaggaagtagcaatccactccagtattcttgcctggagaattccatggacagaggagcctggcgggctacagtccaaggggtcacaactctgacacgactgagcgactaacactactacattccctgttgtagcagagattgatatttcattactttttatgatgtctcattgcaagaatatactgcagtttatccattcatgcatcataaacatgtgggtcatttccacttcttggctattacgcataatgccactgtgaacattctcatacattgtggacatatgttttcatatctcttgggcagaactaggagtaaaaatgctgggtcatatgataactctgtttaacatgttgaagagctagaatgcatggcattttgtgcctatgttatgaaacttgttaggaagcagcttaacagtcagatatcatcaggcctgcatcttccactggcttttaagtttcttgagacaagggttgttgctgttcatccttgaaccccactcctcccagtccagtacccaccacgggacccagtaggttctcagaaagtttttgagattgaagctgaccagtgaaatccccagcacccctgagacgcacacacttactctgtctcttccctgtaacaagtgacagcttgtcaggaatggaagcagctccctaccgtccgtcaagctttccagctggttactgaccctccttatatctgctgggggcctcaccagggtcttgcgcttcctccaggctgcctcagccgcacagcagcagtggggacccactctggcttacgcagatgctttgaaagaaagattattttaagcaccactgaggtgcaagcagaggccgggctggtagaaccttgccattcaggggcccacgcctgtctgacacgacccattcatctactttatgaggatttggacaaggaggccctccagtgcctgcccaggctttgacttggcagcttgtgcccggagtttaagaaagcttattttaagactttctcagaaggtcagagcagcgtctttataattcatcctgctaccttttgtccagagccagctcttcctaataacatctatttcaggttggatttaagagacagagccaacctctgctgaacgggctacctttgatgttccagtgcctaccgaggaggggagggacggatggaaccaaagttgtaattgcccaaatttacaatagcttctcagcagaagccagcacaaaagaaatgttaatgcaataaactgtaaatggaaggaagctgagcgggatttatggtgggcgcaacctgcaccaggcctctgggacctccttctttcccctgggagacatttcaacagtcagaggagaactgggcccttggaaagccagtggctgctctgcaccctccctcccttatcactctccctgcccagacagattcctgcaaagacccggggaacctgattaaacagttgaggaagggggaaagtaatcagtcactgagggctcaaacctgaaatcctggccgtgccaagagcccacatcattggcaagcatgtgtgttccagctgcaactgaagcgtgtttctcttcttctcctctgagttggggatctctgcacatacaacagatggccggagtgttcgtgtgtctcagccaggaagtgagagggcggcgtgtcgttcaccagctgggcacgtccccatccttcagggccactgctgtaaagggctgtttttcaccttcgggttcctgcggctctcgctccactcaggctcacacgtacctttacctgggttgtaacgtgtggagtgtgcactgcttccttgtccagattgctggcccgtttgggttttttaattagctgaggagtaccaactaaatggaaaattgctttctgagatcccagtggctccggttccatgctgggaggggctccctgtaattaaacacatt

SEQ ID NO: 58873 - DNA, 1312 bp, Bovine  19866880577562
  misc_feature (1)..(1): n is a, c, g, or t
ntacaccaaccaacaagcatgtggattttttttttctttttggtattttaatggtgaaatatgttactttgctagcaaacacacccatgccatctgttgggtgagaggaaggcagtttctaagaacaattaggtttagttctgggtgttcagctagagagagccacagtccaccagttgtgaaaagaaagaaattctgtccgcgctattctctctccctttctaacacggaccttacctcttgctaccggctctcttacatctctttcatctccatcacctcactccctttacgctttcatcctctttccctctctttttcctgtttgttcctgaccatccttccaagttccatctcattagggggattagtaagacttggcctggcagacaccaccttctcagaagggctatatggatgatctgctgagattactgggaggtaagtggtccctggagaaaggaggaaaaggaaatgaaggcaaaaaaaggccactaagaaatgaaatttttggcaggctgagggcctgggggcaagggtggagggggtcttacattctgttaacaaaacagtcttccaaaataaggtttagtaggagctgcattctaaatgtgtgaacactacaggacggccttggtcagcatttctcaatgtaggataaactcgtccttctaagacctgacaacctgaaaagagggaataatgaatttaaggccttgctcaacaattacattagatttttgcagagacttaattagcatcgtgtgtttggagtaggtctgattccagaggtagggtctgcaaaggtcacagagcaagttggcacaggtcagaatgttcacaggccccgggtctaaaaggtgatgttaccaaagttcccacatttcaatcgatatttcgtgccatgggctgctcagtgcagtggaccaggggctaataaacttgtccttatacataagccgacggatcatgtgactctgtctgggccgggaaccaaggcgtgctatgatttcagagaccgggttcttatcacctggggaagagagacacgctctgctgacgtaagaaagcgaataaatcaaccatccccgagacctgcagactccaaaatgaaaggagaaaatatgcgtgcagttggttcacttggcacccattagagctaataactaatcatcctcgcaagtttcgagctcagaatgatcaaatctgcaaagaaaacaacatccgtccacttttacactccagtggaagaaggtggtccctcgcggcagggcggcacagtctcgccatctggagaataaatcgagtgtga

SEQ ID NO: 58874 - DNA, 773 bp, Bovine  19866880651052
  misc_feature (1)..(1): n is a, c, g, or t
nccctgcaacaaacaagtccagcttggttgggtttgttgttgttgtttgtttgtttgttttctaagggggggggaaagcccaaatatcttaattaaattaattaaatgtaccaacaccatagggtttcatactaaataaatagggctaattagacctggtggcaagtctgagtcgagggtttgtctcaagctcagcattgtctcaggttaggatgcggtccaagggctcccacttattactttactgatagtgatggtgactgatcgaatctaatgtatcgtccgcacgacttcagggttcgcgtacatgtcctcgtcgtcagactcggaagtggttccgttgctcgaaggggcgtgcaggtggctgggggccccgccggcctggcatacgtaccactcattgaggttggtcacctgaggggacagagtgctcgagcgactcctggtggggtctagcacaggggacaaggggtcgcccaccggagtccccactgatgagtagcccagggctcctggagaaggtggcggggacttgcagtgaatcttcatgtgtttcctcagggagctcgggtgggtgtaggacttgtcacagccccggaccttgcagtagtagggcttatcgctggtgtggacgtgggaatgtttcttccgatcgctgctgttggcaaacttcctgtcacagccatcaaattcacatttgaaaggcttttcccctgcaagaaagcacagtggaggttaacaggggctcttcagagtcctctgaacttgagaga

SEQ ID NO: 58875 - DNA, 2934 bp, Bovine  19866880665821
  misc_feature (1)..(1): n is a, c, g, or t
nctggaagggacagaggagcctggtaggctacagtccatggggtggcaaagagttggacacaactgagcaacttcactttcaccaggtcttggttgaggcaggcgagatctttagttgcagcacgagaactcttagttgaggcatgtggtatccagttccccaaccaaatattgaacccaggccccctgcattgggagtgtggagtcatagccactggaccaagtccctctcccaatttttcatttcagtgtttgaaagaaaccttgcctttgggataaaggaacatctaggagtcttaattcctatgctctgaattcagtctctgtttcggactctaagacctaggtaaattccttactttttcaatgggtttgccagcccttgaaccaggacttgcagtaacccataatatctaaatgctgaggaggtggaaagggtaatttaagagctagtgtcagaattcttcaaggagaaaatggtcttttaaaatttttttattttgatcattgccttagataaagttggtatagaaaggctaagggtagaaagaactatttgtgtttgtttaaaaacaagcaaaaaaaaaaaaacaactggttaggccatttgctagtggaaagaaccctcagggcaaggcggggatgaactaggaatgagagaggaaaacccaatttctctgcaaaataaaatgagaatggagaggaagcaaggagggagtaggaaaggtggggtgattttggtccataacaatggcctatggagttttctgtgataggaaattttgtgctgtgatgtgattcccaggggctggcggaccagggggcggcaaagtggccatcatctagtttcaggttaagaaatactgaacgctgactgtaggccaggcactaggttatgctgtcaacgtgcatgctttttttttttttttttctggccataccactctgcatgtgagatcttagttcccctaccaggggtcaaacctgcatcccctgcactggcagcatgaagtcttaaccaccggactgccagggaagtcctgacatgcatgttctgatttaatcttcaacctactccgtgataagcccagggcttccctggtggctcagcagtaaagaacccccctgccaaagcaggagacgcaggttcgattcctgggttgggaagatctcctgaatggaggaactggcaactcactccagtattcttgtctgggaaattccatggacagaggaccctggcgggctacagtccttggtgctgcaaagagtcagacacgactgagtgactgaagagcaacaacaaatccccattctacagaggaggacttggagggttgccgagaggcagatactcagtaagtcagagtccaatctgagtttgactgattctaaaatccatcctgtttattagtcactggagcatactctcctcgtgaacactgaagactacagcactaagctatggagcagagattatttgcagtttactaattaagggtgataaaagcatcccagaaatggcaagcactgaataagtactagtatcactgtcttggagcgtgaccactgacatcggaaggaagcactgtcatctaaaacggaaacatgacaagccaacaagggcttattaatgtcacaggaaaatgatacagttaaatactcatgtttgcattccactggatatttacattctgaaaaccatgctctcaggcactgggctcttcattaaagtcagtcaggatcgtttgcaaatgcagtggaaaataccgccatatgacttcatttttttttccctgggacaataagaaggaaagcggtgcaccattttgacgcagatctgtaaagcagaaatcgtggtgcctttaccactcttgcttcaaagagaagaaattatagtctttcgttctcctagcagcatgtaactaaggtttagatgagtgaacagatgcatgcaaaaatcagccacgcgcatagaaaacattcattttcacaatctggtaaatctgctaggtacacatgaaacagagccaaattgatttcagcagaatgcagtgtcacagccctggcacgacagggatcctcctcagccgcgctccttgccaggccgttgccatcccagatcctgggtgtatcgatcacccagcaccaaggatgtataagcggttccgtacaccgtggcacgctttgcccagccccagctgactggctgtgttatttccatccctaggaatggaccggaataggcacctctgtccttgctttccccacttcgaggccttatctgagcttcttgctacccagcccctcgtccctcctgtaggtagctcacagaattatggaatgtaaaaacccaaagtgtccttagggaccatcttgtccacgtctttcactttatggatgaaatccagggaggagaaaagtcttgcccaaggccacatgggtcattaataatggcccaggcaccttctgactcccaaacccatgcttttttcaccgcatgcagtctccattgaaatttggactcagactatggaagaggaaatttccacaattccatcaaccccaaacatctctatggctattaaatatttatagcgcaaagggctctatttagtctgccctcaggtttcctaattgtccactagaccacaagtcctcaaacccacatcaatgcaagtttaccatcacaggttagaaagcctgggagacaaaggtattttagaatgaagaatcttttgggaaaggcaaaaggttacacaggcagcttatcttatgtcaccccacccagacctggagcaaaatgtagaactagtcacacacagtggatggagtcgaccagttgccccacgtcagtttagggcaggttttgttcccaagtgaaatcaactgaaaacttaattttttggctttcagagctcttggattttaaat

SEQ ID NO: 58876 - DNA, 1887 bp, Bovine  19866880724038
  misc_feature (1)..(1): n is a, c, g, or t
ngctgcctagactactttggggcttgttgctcatgaccagcccaactcgcagacctcagtttatggagttccataaatgtggccagaatctgactgcccgataaatcatgaagtgactatttacctacggaaaaccgttggctggaggcagtgtttccacgtacggccaggaacctttccctccaggtgtcttacttgggtgcagaaagctgtattggaaattagtgggagccagcacagtgaagagcagggagtgagaagggggatgtgaatctgtttcatacagtggaaacttatgtcctaacaaataattaagaaaaaaatccgaggttgtttcctcagctgatcatcaccagcagagccaactttggattaaatacttctgctcagtggttttgacattctcagtcaggcatatcttgatgaaattagagatgcagaaaatattttttgatggagtgcagggggaaaaaatgctagaagggaagccaattctatgtgcaaacttgtgcagaccgagataaagagaaagtaggagaataagaagtgtgtgtgtgtgtgtgtgtgtgagtgtgtgtgtataaaataaatgaaggaagatgaaagcaagtgacagaagaggaaaaggggaagctggggtgatgctaattaattaaactttaagatcttggcagcaagaggtgtgtttataaacaatcttcactaaaacatacctttccaactattaactgttttatttgccagaaatagtctctaattattctgtgcttgtttcaatccaaaagtggagaaagaaatgttagtaagtgaacatagccactcttatgctataaaatatacctctgcacagaggttaatgtttcaaaaatgctcaattaatgaaatgtagctgattcaaactattttacaaaaaaattaagtggagggggctattagtttgaaggccttcgaaacagtggaaaagaaaaactagaccaaagatacaaaaaataatagaaggttaaccatttaggaatctctaaataacatgcttatactaggccaacagcaagtcaacttgttttcctcttgggatttaagtctagaaaagtctgatttgtgaggatagaataaagacttgcagacatgtcaaatgtttttaaaagattctctctcatgtatcctatctgaggtagttaataaaggatataccattaaaataagagaataaaccaagaaagaaaaagacacaagatccagtaaacagaatattcaactcatatattaagtcaaagaacttcccaggaagggagggaaggtcccaaataacaatctagtgaggcaccagctcaagactggagcagtagatggtgactctgttggagagttttggattcaactaggtgagagaaatgtagaaaataaagcaaattccgtaggtgaagggataaactgtcatacactcatacagtggaatactattcagcaatgaaaagaaaagccattaaaccacaaaaagacatgaaggaaacttaaatgcatattgttaagtgaaaaaagccagtctaattccaactatatgacattctggagaaggcagaattctgaagacaggaaacagatcagtgactcccagggattccctgggaacaggtggaatagagcagaggggactttttagggcaataaaataggattgccccccccctaaccctaactggatggatctggtaaacagaatattcaactcagaaattgagccaaagaacttcccagataggaagggaaattcccagataacaatctagtgagcaaccggctcaagactggagaatagatggtaactctgttgagaatttgggattgtattaggaaagagataggtagaaaataaagcaaattccatag

SEQ ID NO: 58877 - DNA, 1670 bp, Bovine  19866880738911
  misc_feature (1)..(1): n is a, c, g, or t
ntgagatgcaaaaattctttaattaaaccatcgtgggtattccctgattgaaatatctgcctttatcttcatagttaatccttcatgattcatgtaacaactcaatcagggattgagtaaattaagggctccttgaaaagaacaaatcaattgtatgaaattgattgaaattatttctggagcagtcttcattggacctatttgtattgatcacagcctatttttggtgcattttctatttagtgggcttgtagagtaagagagaaagctgtttttcagcctgcaggggacagatttatgcctatggtatggtaaatagggcagacaattgttagagaaatttgtctgagaaaaggaacaaatataagtgtatcttggccattgagaaacccagtgttggtgacttggatggtccctacaattaaccaggaaggaagatggtaagcaagttggtccacacccatgagtggccccgagctacaccttgctggatactcatcaacttgtattagtgtccacaggccaaagggccgagttcttttgtatttttttattgaagtattgttgatttacaatgttgtgttagtttctggtgtacagcaaagtgatttggttttatgtgtgtgtgtgtgtgtgtgtgtgtgtgtgtatgtatacacatatattccttttcagattcttttccattttaagttattacaagataccaaatatagctccttgtgctatacagtaaacccttgttgtttattttgtatatagtggtgtgtatctattaattataatctatatagatatctatatctataatctacagaattatactcctaatttatcccccctcccctttggtaaccatatatttgttttctgtgtctgtgagtctgtttctgttttgtcaataagtttgtttgtataattatttaaagattctacatgtaagtgatatcatacatttgtctctgactgacttcacttagtatgtgatctctaggtccatccattttggtgcaaatggcattgtttcattcttttttatggctgagtagtattccattgtggagaaggtaatggcaacccactccagtactctcgcctggaaaatcccatagacagaggagcccagtaggctgcagtccatggggtcgctaagagttggacatgacttcactttcacgcattggagaaggaaatggcaacccactccagtattcttgcctggagaatcccagggacacaggagcctgctgggctgccgtctatggggtcgcacagagttggacgtgactgatgcgacttagcagcagcagcagcagcagcattccattgtatatatgtaccacatcttctttatccattcatctgttgatggacacttaggttgcttccatgtcttggctatcgtaaacattgctccagtgaacattgggatgcctatacctttttgaattagagttttctccaggtatatgttccaggagtgggattgctggatcgtatggtggctctatctttagttttttaaggaacctccgtactgttctccatagtggctgcaccagtttgcattccaccaactgtggaggagtgttcccttttctgcacaccctccccagcattcgttacctgtagattttttgatgatagccattctgacctgtgtgaagtga

SEQ ID NO: 58878 - DNA, 1470 bp, Bovine  19866880810137
  misc_feature (1)..(1): n is a, c, g, or t
ntaaggaattggtttttcacttttataaaaccaaaaggggtggtgagaaagggaaaagtttaggggcatggagaggaatgaagaacagaggttttattacctggagtctcgtgttcatttccaagaaataaaaattcttctttgagtccacaaggaattctacggttccagcagaagaataactcactgctttggcaagggctacggcttgttctcccattgctcttcgcgtctcagaatctagaaaaatgctgcaaatatacacagagtgaccacctacattttgaacaaaaattaagtaatcttttgtgtgcattaattttctttaagtttactcagatatgatcatctatgttgacttaagatttcaaggtatatgctttatatatgcttagaatatatgcttactgttaattaagcataacagtttgaaataaaccaacttcaaatttttatataaaactaacatctgaaccagtcaatcctaaaagaaatcagtcctgaatattcactggaaggactgatgctgaagctgaaactccaatactttggccacctaatgcaaagaactgactcactggaaaagaccctgatgctgggcaagattgaaggcaggaggagaagggtacaaaagaggatgagttgattccatggcatcaccggctcagtggacatgagtttgagcaaactccaggagttgatgatggacagggaagcctggcgtgctgcagtccatggggtcgcaaagagtaggataccactaagcaactaaactgaactgaatgatgaaaaattggagtttgtgcatgtgtatatgtgtgttcttgtttttatttgtttgtttgttttacctttaaagcagtggattttattttaattatgttggctacaatatgtaaatctctaaatgaaaagtaaaaatttgattagtgcctccaaatatctttacacttgataatgtattgactcaataactgaatactaagatgaaacgtttttcttttatatatattttgaaaggttgtagactttgaaagaaacagtactgaatgttctgtaatccatttgccctacttgttttaattattatttttaaactttttattttgtattggggtatagctgattaacaatgttgtgatagttttgggtgaacagtgaaagggatgaaaataaccatcccaactccctaactatttctccccccttttcccccccagcaaccataaatttattctttaggtctgcgagtctgtttctattttgtaagtaatttcattcgtatcatctctttttatattccacatataaggggtgtcatatgatattttccctcctctgtatgacttacctcactcagtgtgacatctctgagcccatccatgttgctgcaaatggcattatttcattccttttaatggctgagtgatgttcttttgtatatatgtaccacatcttctttatccattc

SEQ ID NO: 58879 - DNA, 1006 bp, Bovine  19866881225140
  misc_feature (1)..(1): n is a, c, g, or t
ntcaacatgcagatccacagcactcacatccacatcaccgccaccaacgcttgtgaatgtatttttctgttagctgggtttacatgtgatgttttagtgcttttgcaagttcaatttgttagttcctgtatgaaagattgtggggagggggggaagtaaacgtcgtgccgttagctttttccgtaataacacccttccttctgtaaatacccgttaccatatttatccatttgtaattaaattatggtattaacttgctacagaggaaacaatatttataaagaatgtttcttaactataaatatgtacaattgtgggcataaactgtttcagatttttttatttgaaggttttaagtggtttgatcatttcttgtgatatgttttgagagtaatgcatacagaaatataataaaatgtgttgaaactgcacgaacatacttttttttttcctagcaaagttactcaaggaaatgggcaggagtaagcagagggctgataggggtctgggtcagctgcctcattgaatgggaggcaccacctcgaattcagggggaaggtgtatgcctagaaactgggccaaactgcctctctggcagaaagtctccaaattattttgtatgtcctttgtttctgtagctgagagtgaattacatttttggacagccactgcaaggacccgcctgcaggaaccttccgagcttctaatggctccattatctgaggcggtgcctttctttcggctgtttggactggactgaagagcactaaccatttccttattctttgtttcctctcttccctgccccctttcctctccctccctctgaaaagcagaggtacagttatttttaattgcaggtttaaaactgagctgagtcctttgtttttgaacttggttcaatgatgatagtttaagggcccctttctactaaaagttttttttttttttttccttccttgaaattttaaacagcttgctcaaggcatcctgcttatctgcccag

SEQ ID NO: 58880 - DNA, 924 bp, Bovine  19866881233586
  misc_feature (1)..(1): n is a, c, g, or t
nggatccatcactaagttttttgtaactcctgatattgtcttaaaaaaataggttttaaaaaagaccactggtgattttcaggcatttattcaaatatttccctacttctgaaatacatggaaaagtgatacgactgctttcttaaaggatttaccccggattactgtcttcaagcaaagggatcctgaattcagtccggttgtcagtttgattaagaaggaagtagctcatcttagtataaatattcgtgaacggtgctgtgtgacagtctggcccagagcacccagtgggggaagccttcaaactacagttggaaatattctaaataatttattttagaattagcggtggtaggtttgaagaaaagacttctctgtgggcttgtgattttcttggagagcagagtgaagtccccacatcttggggctctgggctggtgacagcgtgtggatgcccccgtggctcctggatcatcttacttacattccttactttatcctacgtgacctcccggtcaggaacactacacttacatatttaagaaacaggcacttacagttcctaatggggtagcagcaatttctttcctctcagaactaagacatttttgaaatgatgtattgacaagaaagttaagggtaagggatgtgtctagattcggtggttcaggcaagaaaggaggaagaaagttttgaagatgttagaaactgtcgttgccatttcaggctgtcagcttggctaactggaagaaaggaggcaagatagtttctttctcttaatggaaatgcgaggtgggctagaagaatatttaagaattaggggattaacatttgggggaagtgcagcagacgtggccaaattttgttgaagtcattcagatgaaaatctgaatcagaaattaaatctaagtgaatggcatgctt

SEQ ID NO: 58881 - DNA, 1603 bp, Bovine  19866881349004
  misc_feature (1)..(1): n is a, c, g, or t
nccacaatataatccttagttgccatatggattactaaaattggagaaggtttaatttagcatagccttttacctcaaagacaatggcttaacagtgaaagttaagtagtcgttcaagtgtatctataaatttaaaagcttgtagcagtaaaactgtgctgggagagattttttttttttaaaggaatttaagacaacttctgcattgcaggaccttatgatctggcaaaggagagtgtataaattttaacagatgtaatctgtaaagcagtcaaagtgacattactgggcaggaggcgatgaaatgttaaattttgtaccaggtactatcgaagctcagatcacaggagattcatctgaagactctggtagaagtgaaacttgaaacactgagtagcacctggagggagataaaggcacagaataagtgtggatttaactttaaaaactatccccacctgatttatgcattcttttaaaaggattgttcagtattcaatttctttcttatagagaaaacccacaaccacaactacagcaactaaattgctattaatagggagtgacctgggcagaaggcagtagaagagtggacattctggtctgagaggagaagagcaagttgaagttggcagtaagcaaggcatacaggagagacttgctttgagtttgggaatctttaggattcttttgtgagcccggctgcctttcctcggatattactagagaaactgaactgtgtagatttgagtatttgatgttaagatactgatctataaatcccttgagtagtaagtatttttaacctttcaatacactatacagttttttgcatagtttgaaaatatttaattgaattgataaagataactctgaactttcttcaagatgacttgggtgggttgtttttggtgttttttctttttttggtctcatttaaaaccaagtgcttctttaaaacctactttacagctggggaatataacttagcaatacccaaatgtattttccaccttagactttttggaagagggtaatacatgcccaggtatatggatgtgttccagtttttaatgactgccttgtaaaataaatttaaatacagttccttaacctggaaaactgttaggaaaagccatttcaaaaacattatgaatccctttcatcattttaaaagaatagattgctttcagaagtaagtaacttactctactctatgttgaatgccttgcgtttcttaagcaaaaataggtttgaaacactgtggacggaatagtcttaaaaatggagcacatattcttaaatttggagttgatgtagaacttaatgcatgtattggttcttttaggaagaaaggttaaaatggatgaggatcgaatgtgagactgtttaaacgattctcaaggttttctggcgcgtgtgtggtggtattgaactcttcagtcctgagcttcagtttgtccctggtgctgacctgatgctgagcaggaacactcaccccatcccttcactctgttcctctaattatctccacttcctggggagcttgcttagaactgggcaggagtgcttgttattagtatattaggctaccctggctaca

SEQ ID NO: 58882 - DNA, 750 bp, Bovine  19866881403686
  misc_feature (1)..(1): n is a, c, g, or t
nctgcattgagtattaaccctgaaccaacatactctgcagagcatctgaacttctttctttcgtggaggagacaaaagcatttctagacgggattgagcacagactcaaagggagcaggctaagaaagggagagggctccaggaggtgcccagtcatctccgaacagtttcctttctacaattccgcagccaaaaataacccaactcaagtgaaacgtggctgcgccaagtactttaggtatcagtgaaatttcctccccttctttatgaatttgcattatttataagacacttgacacatgtttaaacacttaacatagctcctctgtttcaggaaatatggcttgttcagctgaggggaggaaaaaagcatataatgagggagttaacaagggctgatattttttttacaacattctttaaaaactgcaaaacctctttaaacaccaggaacagcttaaataattcactctaggcctgcggggcccatgcggacggttccctctctggccacgttctcccccgggtttcggcctggacggtggccccgatggcagcccggagcggacattgtgtggccttgagacctcctggccgccttgcccccgtccccccgacccccggtgttgagggcccacggttgctcaggactccatggagagatcggaccccggaagatgggcccgcgccctttgaccttggacgcacagcacgccgggagcaggcggaagtgggccgcgagcggccagt

SEQ ID NO: 58883 - DNA, 681 bp, Bovine  19866881505154
  misc_feature (1)..(1): n is a, c, g, or t
ncatacactaattacatagacatcacgaagtcctatttgtcctcagtacctccccagacagcagggaaataataccaagggtaggcatgctaagtgatgattcccccccaccttactgtcaatcatcccagagcgctcacaggggcaccccactcaatctcattaccgaatcctaagggtaggactacaatactcaccaggaaccacagttcaaacagcaggctgcctggccaacatgtgagtcataatgactccttccctgattttaggttttggtgttaatgcaataaatatcaggtatttctcatttaaatccaatgttacaatacacagacaaagcaacaaaacattggtaagttcaatttaggaatctagataagaaatacagtcaaaggttgaagttcagagtcatttaatcccatttaaaaacaaaacctcacagccctaacttcatgtttaaaacaaatataacaatattttgctgtttcttaggggaaggtttactagtcttttcacctgaaaacatacatacatacataattatcataaaagtaaattaagttatctaacatgaattttgagaagtacaaacacaacaatctctaaattctcataattatttgttcccactattcaccaaactactgaagcaagatctgacttcccatttaaaaagtctgg

SEQ ID NO: 58884 - DNA, 904 bp, Bovine  19866881715752
  misc_feature (1)..(1): n is a, c, g, or t
nagtgtgcatgtgtagacagcggggctgtttacttagtctggcccttcagggcttctcaggtggcactcggggtaaagaacctgcctgctgatgctggggacataagagacatggattcgatccctgggtggggaagatttccctagagaagggcatggcaacacactcaacaattctggaaattgttgcctggataattccacggacaaaagaacctggtgggctctagtccattgagtcgcaaagaggcgaacatgactgaagcaacttagcgcgtcaggtgcagccgcaacaattgcttagtgtcgaaacagcctctttaaggtttctcacgtggctccccctcctccttggagtggggacacctgtgactacatagtttgcttctggcagacccaacccaacctttgggatcgtcctttttaaacttgttttgttcagaaacttttgggtttttgttgttgttgtttatattagggcagaaaagctacagttgttggacagtagggttgggagtgctggaatgagccacagtggagcaaggaaataaggggtagggagccataggacagagcgtttgtaggtgtaggtagaccagggtgcagttctgggctgaccactagatggcactcacacattggcattaggactggtccatgccatgtttccactttgggcttttgtaaaatctctctagggactagcccaagctttgtatctgccatctccacccaaccatccacccattcacccctctagcctctcttggtcttctacagataggtagatgcgcctgtcggtctttctaaaaacttgccaaaaatatgttgaaagcctcccgcatttttagccacagtgctgtatttttactggtctcttagcacatatttacatggcagtaaa

SEQ ID NO: 58885 - DNA, 1277 bp, Bovine  19866880586633
  misc_feature (1)..(1): n is a, c, g, or t
naattactcagggaacacatcttcctggagacagggcggttgatgggagaagatggggcggaaggaaggtgggctgaggttagctaataggtgattcgttgcaaagaagctctctgcaagctagtgcacaaacatgatgcaggtgggaaagcacccaagtgtgtgacatggcctcgcattacttgaggtgatgccttgagtgggtatctcagagcgagtcaagcagagggcgatgatatttgcttgataaaccctggggccagttattccaccaagtggatttttctgtaagtggttaagtaaaccttgcatgtttttttccccaagggtatttcggcattcaggaaaaaaagactattggaaactttagactctggtaggagaaggcaaatacaaactttgctgtttgttttcgaagagagaagcacatatttcaatcttgtcttcactcagccataagattcttgaagactaatgtattcctacgttctctaagctgacttgatgttggatcttaggcagtaaatacgctttgtttcggggtatgaggggcagaggcttttgtgttaagaagaagctcatatggaagttcaaacatggtgtgatgaagggggataacagtttccaacattttattagaaacatttcaaacatgcagcaaagttgaaacggttttggttaacacttgtttcgacactgcctagattctatcactaacattagattgtacttgcttcgttatttatctgctatctacctattatctatttatctgtcatttattatctattaatacctgtcatctattatttatctatcctctatttgtttcatctccattcattaattcaacttacattttagtacacttgccttgcatgcatagacatgtgtatctttccgtagagttcagtatttattaactgatttttctttttctataaaacttagtctttgaaatgcacagtaccaagggtgtgcattctgagctttggtatgtgattacacctatgttgtcgaaccttcatcaacccatagaacattaccactgttaacccaggaagttttcttatgcatcttccaagttaacttcagctttcctcatgcccagagggaactatgactctgatttttttcaagggagagtctggtaaacacttatttctcttttgttaaatgtaccctaaaatacgattcacagattatatctactgcctatgttttagaaaaaaatagctatgccttggcaaagaatggcaatgccctctgacccacag

SEQ ID NO: 58886 - DNA, 824 bp, Bovine  19866880595480
  misc_feature (1)..(1): n is a, c, g, or t
naattcgtttgctgtggattcacagggcacctgaaaacatgattgctctttatgaagcaaaagaaaaactacctttccactgtaccatgtaggtgaaatgttaattctggacttcataagacctgatgaagcttaaacaagctaataatatttcaccaaagagaagctaataccaggttgatgaataaggccaataggaaagcattttcaattctgcatgacacactcttgtcccttgtactataaataagagagttggggacagtcacattgctgcaggctggaattgtttaccatctgaggtcactaaagcttattctggatcacaggttaatgacccaacttttttcttctagaaggaatgagccgtcggtgagtgtgtgtgtgttaactatgtcagcagctaattcagttcctctgttcactaggtctgggtctattttgagcaaatgatatcaataaagttgatagaaggaccacatgaggtcatcacccgtgatgcctgcatgtgagcggccacttggggttttctataccaagcaaagattttgtctttggtgatgagagatgcataaagacaaaaagcaagagaaagaaacccaaatactaggcaccaataacctaaaaagaggcaaaggaaggcttattcttgttcagttactaagttgtgtcctactctttgcgactccctgaactgcagcatgccaggcttccctgttcttcacatctcccagaatttgctcaaactcatgtccattaagtcggccatggaaccatctcatcctgtgtctcccccttctcctcctgccctcagtctttcccag

SEQ ID NO: 58887 - DNA, 2815 bp, Bovine  19866880571614
  misc_feature (1)..(1): n is a, c, g, or t
ntgctttagaatcctgtactggagcatacagcttggattgttaaatagttatacagtataacaaaggaatactaagaaagaagaaataagaaacctacagacatattaacaacttttatgtaactttaaagtgtgaatgtttatatgtgtgaatgtcacattctcacattctgtttgaggactagggataatttgactgagcccaaggctgtgtgtagaatgtatttccatttcggaatagacagaattctggacagttggcaatactcttcaatatacttcataccagcatccatatttagaaaggagtatagaacacagcatctctgctaatttttaagcagtcacaattatattacatccataaagaacagaaaaactctaggacctaagtgatatttctactgaattattcaaactaaaattttaaaattgtatgacatggcctctcctacttaaaaccttctgataatatctcattttgtatcaaataagttacaagctcattttcttgacacgcaagggctttttaaaagtttgacagttgtatttccctttacttttgctgtacttgttcagtaagtcctccctatcattttgtttaactttcaggtagttgatctcactcatctttgtatcattttcaggcaactttagtaataatagaaatagtcctcttaatagctgcctgtctccataaactgtccctgaaatggatttcttgtgaaagtgatatattaggaagtgtttctgaagaaccagtcgcagtgtgtaaaagtagtcatgggatggaaggaaaactaacaagggtgagactcaggaaaaccccacaagggtggagggtgacatggctcaatcttgcaggagagtccttgagacagtgtgagacctctcatggagtttccaggttaggaagtgaagagactgtctttttcccttttactcctcggcaaagggctgaggcagaaggtggtattgactctggtgctcggcactctccatggtgtaagtagacgacgttctggcagctctgcaggcagccttgcaacagggagcaatggatgctgatgatggggatgagagtgcattggagatggtgtgcagaaagctggtaaagggatccagggagatatggacaggggtaccatgttcttttaacttctgtgctcagttactttctggattagaaattccttgaaagcaactatgttatttcttttttatcactaacctgcaaccccttatccaaaatattttaaaaagagtgtctttaacaatatttattcagtggctgaatggatgagtcagggttttttgtttttttgttttttcttttttctctttcttcaaatgcttctttatatctctgctaggcctatgtatcaagctgcagaatatatatatatatatatacacacacacacacacacacactgggaatgcgattggatgtgatcagaactctctttggtacttattacagaataccctcctgggctctgtcgaatagcagggatggcaggaatccagattagctgttattttgggagctgacttgcaatgtctgagggcataaaggactaaatcatgctctcctacataactgggaaggaccagaagaccgctgctgacatcaggacttgcaagttgccaaattgttgttgttgttattttttttctgagctgagggccaaagtgggtctataagttaatgtcaccaacagagaccaccattgtgaattgagacagtgaaaagtcaaagggcttcgtacctgtgcttagcgcgagaaatgacttttcactgcttagttgctattactcctccttgcatgaaccacacccattgtattttagtagaagcacctctttccaagggttcatgtcaaatatctctggtgtctttcaggtctttattatccatacacgttgccatagaaagccccttaaggaattttgggtatgtagggtagatgcggtgttccaaataaattttgggggccaagaaagaaacaagtcaaatgtgtgcttttaacagcattaattacataaaaataaaaagttgccacatcttttgggagctgtagaatcataacaccaggcattctgtaaatcagtatcatcatcacattgaatattatcactgatcccccctagaataaagccatgactaattcatagcccacattttcttatactgtgcaccatacagtacaacaaatgaaattacatattttaatgcaggcagcaatttgttgataagtttcctacaactgattcatttttctcatggggagaaggatttctactgtaacaatgagaatttagtaatttcccctatgaagaaacatcctatttcaccttaagcttacataccgtgaaaggatatgtgccaaagtttaggaaaaggcaatgccctttctatacataaatcatgaatctacagtagaaaaactcagtggtatcttcaacctgtaggtaaaggacatagtaaaaaaaaaatctgagtaagaattgctcaatatttctcaagttcaatggtcacaaagaagaaaaaacctataggaaatgtaataataataataaagaaagcacagagttagacctgacatttcactcattcatcccgcagacaggtattatgtggtaatgaaatcttggttgttgcattatcagataaatagaaacaaagcactatgttagaaacactagccttttcattgtatttatgaaaacataaggaaaaatatacatgcaagtgataagttgcacttatgtactggagtaataataaaaagaatattcagtagagaaaaat

SEQ ID NO: 58888 - DNA, 2350 bp, Bovine  19866880856868
  misc_feature (1)..(1): n is a, c, g, or t
nggagttatagcaactttcaagaaatatttatgtactttcaaaaaatattacctatgcctcactgagtgaagaatcaggaacaacctggtgacaattttggaagggctataacatctacgaggccgtaaaaaaattgagtttgcttggtgtgaggttacagccatcactgtgaataggatttggaagaacagtttgttcatgattttcatggatttgagatggtggatgaggagtccaaagaggtcttcagcaacttagtgacctcagcaagaagctggaactagattctgcaagaggatgacttcactgaactccttgctgtgcaatacatggagcttattaatgaagacctgatggaattggaggctcagagaaaggaagagaagcaagaggaagaagtaactgaagaatcaaagagattcacagtgcaggaaatggcaagaagattttctttatttaaggaggcactgatagtttttgaggtgtgggacctgaactcaacggtatatgaaggttgtggcagccattcagaatccagcccagtgctactgtgtcatctgtgacaagaaagaaagagctactacccagacatcactggatgattttttcaagaggatggacagatttgaatccagcaaggagccaagaacatgcgccatcagtgtcagacatgagtgagattgtagcttgtcctccgtcccctattgctgacgatccttcagctctaccatctcccacctcctctccttcctccagtcagtaactcttcattcctgttcactcgatgccagcccctgtgtgccagctattgtacggtactcctgtacttttcaaggtactggactataagattaaaaatgttttcttggggacttccttggaagtcccatgtttaaaatttcaccttcttgtacagagggtgccagttcaatcccctttgggggcactaaaattctagatgccccgtggctgaaaaacaaacaaaaacataagtgatattgctagaaattcattaaaggacaatttaaaaattgtccacatcaaaaaagtccttaaaaaacattttctttattttttgtattttttaatgtattatttacgtgaaaagtattataaacctgttacagtacagcactatataggcgattgtgttagttgcataccgaggctaactttgttgaacttacaaacaaattggacttaaggaacacactcttggaatggatcttgttcttatgtaggggactaactataaaaaagttttcttggacagaatgttttttccctaaaagcatataatttgaagtgctgttgttagtcaactttagtgtaaatgaaaagaattaccaggtatgattttgccgatttccatcaaagtcacattaagggataacaggactgtgagcaagaaaagggcgcagtagggacctctaatagtgtgctgagagggctggggctagggatttcattctgaagaatgaatcagaaaaatagaaacaagtttgtgtgtatgaagaacggtttcgtctcttctgaccactgaatgggaaaccaaggagggcagaggagacgcaatatagtgtgtgaaatgaaatgaggccatttacagtgaaaccccatgtagcgtaactcgtgtcataatttggattcctcagtagggaactagcttggctttaactctataaagagatattaggaaaccgattgcacagaaaatacattatctttctttcttaaggaactgtttctggagtctgttttgtgttttttatgcccatttaaaaatgtttcctatttgtacatttcatatataatgcttctctgtggtaataaaaaagtattgcagttcaaaacatgaaacactattaggatagttctctagtgactaatatgacagaaatatgacattgatgttttattctataaaccactatcatgatatacaaaaacatagacatatgagattatgcatagactttctgtcacacgcaagggagctggagtgaccaggatacttttagatatattcatagattgttaataaggctttgtgcttaaattcattgatattatggctattattattcataatatttttaagatttaatatttgggggtgttgtttagtctctaagtagtgtcagaccctttgtgaccccatggactgtagcctgccatgcttctcggtccatgggaatttccagacatggatattggagtggttgccatttctttttccaaaggatcttcctgatccagggatcaggatccacgtctcctgcattcaattcagttcagttcagttcaatcactcagtcgtgtccgactctttgcgacctcatgaattgg

SEQ ID NO: 58889 - DNA, 1750 bp, Bovine  19866881269245
  misc_feature (1)..(1): n is a, c, g, or t
nctaacttcttctttacagctttcgcagtttgtgaaagagtttctgctgtttttcttcagtgtttggttgaatcaaaaagtactttatgcaaatgttgaaaaaacactcagatatctcagatatttctcagtgaaaaatcagctctaatctggaggagcatagtttattttagtttgaaaagacagctttgctttcaagtaaggaaattctagaccgcccacatttttgtacctcagactcctatatgatgcaaagcctatgtgtcataaacttctgaaagaaagtacaaatttacactgaacagattaacacttgaaaatgccattcttgccatttgctctatgaagtactgctaacttggaacaggtgcaactaacaattagattagtacacgtgtgtgtagctgcgtggagaagcaggtttgaaacaattaagaatgatcatttgctttctactgcatagttgctaagcttttcggagttacacatttatggagaaggccttgagtgcttagatggactaaatataaacaattttatcataattatggagtacttcagtggcgtcaatcgtgattttatgccagtgtttatagttacaagttctttagttacttaaaacaaaataaagcattgacatgaagtgacttgaaaagtgcaggtagaatcttctgattttcctaggtacatatgataaatttgaaagttctctgaaagtgtagaatgttatctgtcacaactttctctctctccgggaatttaaaattttagagttaaatgccattggtaataaaatcttgaggtcattaactgatctgattcatggagaagactaacaatatccacataacatttcagaaacttatgatggaagaatacgttgagagtttgctaggttgtaaaataacaataaatttctttcttttaaatgttttctgtgtttaccccctgacatcatcatgtgtgtctctctctttaattcactcttccattgttattgagcatcactctgctctaacattgactaggaaaaaaaaaaaaaaaaagatgtagaaacttctcccagtgcccagctctgtttcttggttcacagaccaagggcagcttcttttctcatacacccaaagttgcatagaaccgatctctgcagagctgttttgccttctttctcaaataaaggcttgcatgggaagcatcccgtgcacaggatgccagagtcatctggctgggggcccatatgtgggcaatggcccagatatgcagatgggcattccaccagctttttcctctgatgctgctttggtttggggtcagatcctctacttgcccagtcaagaatttcagagtggcagccaggggcttcttaaaacaggaggtctgtatttcttggtctgtttcttttctgtgcatatgtgtacttgacagaaataaaatctgagacataaacacgttttaacacttctgtgtttatactaaaaatagcaaatattaaaattgtggtatcattaaatacttttctgtaagttgaaccttggtatttgcaggaaattggtcccaggaccccgcctctccatggatcttgcctctgaccctccagtgccttgtgtgaaatgagagccagctgtccattacctgtgggtttcactaaaatttcaaggatttatggtcagttatttagtagaatttcaagtaactcagtgtaatttttccaaaaatagatttgaaattactggtgctaataattgcttcc

SEQ ID NO: 58890 - DNA, 1120 bp, Bovine  19866881456706
  misc_feature (1)..(1): n is a, c, g, or t
ncatcagaccaagatatagtactgtacaatagtcgacttttgctaagatcatcattttacgtgtgtgtgtgtgtgtgtgtgtgtgtgtataaaattagatccttttatctttttacatattactgagaagtccttacaagagctgtccctggtggcctcatagtctgaaatatgttactgattagcaaatgagaaataatttttctgtttaagaattgaaacaaaaaacccgagcatattggaatagattgttcatttaccctaaatcagtgcaataggagttgccaaaataatgactaatataaatagaaaagtacattttatcacaaagatttaataactaattcaaaaccagtgatgagtgttttcctgcatatagttctagagaaagaagaattcctttaagagcatgataaaataagattaaaataagtattgtaaaagtatgtgtccctggagtaaagttctgaattatactaatgagatactgtttagggatttcatagtctaagatatattctttgatttttcactgtgacacaagaatgaattttgccctggagctcagtattattttctgccatgtgttaattttttgcatgaatgccttatttgccatcgtttagcctatgctgcaggtggattgttagccatacttattgcggatatttttgttggctgaagctgaaggacagctcagggtcttgcctagctcgagggttttgtgactgtgaaggcaattttcaagtgtgatttgtcatcgtagaaaaagactggcttcttaaatattatcctatgggccatggtttagattaacaaactttctcagtaggttcagaacatttggtgtgtgttttaaaaggccctgctttttatttaagacttcactgtaaccacgactgtgttcattcctacaggtatgcttatttacataacaatggagaattgagtcaaatactcttactaaaccattgttaggttttagctgctatgttataaaagctctttctttctctcttaaagcagcccagtcatttcatgttattcagtcccttacagaatttacggccataaagtttacaatgtggtttgctttaattcaaatgcatttactttggta

SEQ ID NO: 58891 - DNA, 1312 bp, Bovine  19866881562332
  misc_feature (1)..(1): n is a, c, g, or t
ntgtatataggtaaatgacatcactatactttgattatatcttctgcatgttcccagtatctgatatatcaagaaaatatataggtctaacttcggaatcctatcctgaaatctgactgtattcttgatagttcatggtaagcagaacaaaattcaacagaatcctagccaattaccatgaagtgattggggctaagtttgaaagtgataaataaatgatatgatagctgccagagtcaactttctttttccctggtagatagaaacaccatgggccactcttaactaattccacagagaagaggctctgctaaactttgacactgaatattacaaaaacatatcatcagactgcggaaccttgatatttttcatcatttaatatttaatatttcttcaggtaactaaataaaatatgttccctcttatttttgaaggcatttaaaaatgaaaagcacttgtctcatttgtaaaaaaattaagttcggagtcatgacttttccatctatgttccaatttcagcttcaaggaacaaaagccaataattaataaagatctaatatggcaggggtttcgtgaaagacgtcagtagcattgtttcacattagctgttcgaacagccatcagaggataatgactttcagtcactatcaatccataaattattcagttgcaatttcccatagtcattgctattactagcagtcatcaagtctcctttgtttcttgaaattaaacttgaacaaaacagtatgactaattatcagttcatcttcaaaagatcccagcaataatttgccactttggacatttagattttattagtaatagatgaaggctctgtatatttttaagttgtggtgaactgctaagtaattgcacgcatttcattcaccttactatcagtgaagagcattatgctgcctagatgaagctagattaagccaattaaaaagatgagacagttttgtttatcatgtatttttataatttatctgacagctgtttcctgaataccactgaagaatgcatataaagcagatataacccctcggaataaagtgatgcttctttaaatctcattttggaatgtattatccccaaacggggttgttaaattaatcttcaatcataagattcaaaatgacactaaaaacttcctgatcttccagattctatactagtagttaattaggattaaccacatgactggaaacagtgctatttcaatatctgttttagcaaggccaaactttttagaatgatatttaatatgaaaatagtaagtgcaacatattaatatctacactat

SEQ ID NO: 58892 - DNA, 646 bp, Bovine  19866881596909
  misc_feature (1)..(1): n is a, c, g, or t
nttttgtatatctcctatggctagaagagggtcatatgaattccctaccatggaacatggcagatacaaccctgaccagccatcatttgacacatagctgtcagttaaaggatttgaaatgcctccttgttctgttgtccaattagcactttacggaggtacacaaagacttctgttagcaggagagatttgattcctccattccaaaccaagacccatttgttttcaaagaatacagcattgttggggggttttaaatgcatgactgttttcgagtgtatgcactgatcagaaaacaaaagtcagtatgaggactcttcaccacccggcctgcaaacatttagggcatgatgctggaagagggagtgtggttttagctgtaggatatggttttagctgtaggatactcctcctcagccatggcttctaaaagaaagtgcttctgcagaggtgctctcccaggcattctcaagctccagacatccttgaaactgcccacctggcatcctcctggcagcaacaccaggtggatttgactgaatttcaaagttaagggctgtgattttagttaccaaaatataacttcaagcagaacaaataaaacatattaaaaaaaaaaaaaaggcaagcagctgaaagcaaaggt

SEQ ID NO: 58893 - DNA, 1868 bp, Bovine  19866880378913
  misc_feature (1)..(1): n is a, c, g, or t
nccctgaaggcatcttttgttgatcttgctgtttaaagacagaattatcccggaacaaaactttttctatttttaggtacattgttgattgtgaaactggagtctccaatgttcatttcgtgaacataccagagactgtctccagagacaaatggactggagttctggccaagggcagtttgatggggagttcaaagggaccttgaagtcccagacatctaagggattgggggtttgtaggcacagagtcggacatgactgaagcgacttagcagcagcagcagcagggggagaggagggctatgtagaactaacctgggaacctgtgggctcttgggtgttcctgctttatactttcagctctttagggaaatgatgggctgctgtcaggacaaattgtgaacaccttctttatacagatggagagggccaatagacagggctctggtgtcatggccaaccccctgcccccatccacaccactggatccaggtcctctctgcacttcctgcctccaggcgtcctggtggaggccaaaactgccggaccagccaccctggtctccctgccaaaaggagaggccggcaagatgatactttgaactaaaagagaacaggacagacacaatcggcctctccagctctctaattcgtgtctctcttaaaaatgtctttaatcttcagcttcatttattccatcctggcccagcctgtttgtttccatgattcaggagaagcagcaaagagcttgtctgccgtccaagcacgggccgggctgcggtggctctgggaagaagccccagctagtctcctgctctgcgggggccctggctctgagcccaagcctgtcgtggccactctgtccccttgccagcccctgcaagttcagactttgttgtagtttacaggcaaatctccggcctccttctccacatcttaaaactcaaacttgatttccccgaaagttcatgtaccaggataagggagctgaaaccacagaaagactccaacctggaatattcagccctcacccagacatcccaacaccacatgcatgaggagaagaagcagaaatgtccactggtcctgaaatcctctctctttagccaccaccccatgtggcaggaatgggttaaactatccagacgaccaggactgccagacgactgtcgagaaaacagtactctaactggctaaagaacaaacaaggacatactgtctagcacagggaactcagtattttttaataacctataagggaaaagcggagaaggcaatggcacccccactcgagtactcttgcctggaaaatcccatggatggaggagcctggtgggctgctgtccatgggatcgcgaagagtcggacatgactgagcgacttcactttcacttttcactttcatgcattggagaaggacatggcaacccactccagtgttcttgcctggagaatcccagggacgggggagcctggtgggctgccgtctctggggtggcacagaattggacacgactgaagcgacttagcagcagcagcagcagcataagggaaaagagggcttcctaggtggtgctagcggtaaagaacctgcctgtcaacgtaagagacatgaaagacgtgggttggatgcctgggttgggaagatcccctgaaggagggcatggcaacccacttcagtattcttgcctagagaatcccttgaacagaggatcctggtgggctacagtccttggaatcacagagaggtggacaagactaagtgactaagcacagaagatatgaatgtataactttgctgtagacctgaaagcaacacaatattgtaaattaactatacttcagttaaaaaaaaagaagatcacaggg

SEQ ID NO: 58894 - DNA, 1417 bp, Bovine  19866880402891
  misc_feature (1)..(1): n is a, c, g, or t
nggtccttctttctggaacttacagccctgtcctgctttttggaacctgttctcttagccggatgcagttcacatttgttctgcagaaccataaaacaagtgtgaactgcacctggctaggagaactggtctgccgtgggaggtcagcttcctgctatggggtcagggaagattctggaagcaggatgctggagctggcctaacgtgtgagcagttacttaagcacaggggctggggtgaggcagtgaggaggggaaagagatcccacagaggcgacttctgggcatgggcaaaggcctgcagtgggagggaacaggtgcatctgagggtctgaaaagaggccccaggggcttgaccagaggaccctggggacctgagagggcagaggaagtgctagttgctcagtcgtgtccaattctctgcgacccccatggactgtagcccaccaggctcctctgtctgtgggattctccaggcaagaatactggagtgggttgccatttccttctctgggggaatcttcctgacccaggaattgaacctgggactcctgcactgcaaattctttaccatctttgcctttctttggacagcctgctggatacgcacagtgcacttcatgggcctgcgtgccacccaaccccacccctcctccagcccctagaagttaatgcagcacctgacactgtgtccctctctaccatcacagcctggcaatttaaaaactctcactgtcctggttctgtccactccctggctcagccctttggcctgactccactgcccgggtcaaaagtgtggcctcagtgcccaagacaggagctgcagtgcccagaggctgtgcccgcatcacctcgctctcccgctttccccttctccacttcctcctccaaaaccagcccttcctctgcaaagataaggctctcttctcaatttttgcatccccttcccttgattcccatttccctttcttcctaatgcaggcggccctttgtgaagggagggggcgtgggttttgcacaaatatttaatcttttctaatctgccctctgcactgcctgtcagttcccggggctgaaaccgctctgtttgctttagctggtaacaggatactgttttgaaaactgatgcagaagtccgattacttatgaatcctggctttattttgcatgaatgcttttcaaggccaactatagatttattttttcttccctgccaagaattatgctgccagtgggggcgtggtagtgggtgggtggggcagcctagagatgcctttaacttttcaccctgtgggctggaaatccagcagcgcggcgcagacctggtgaaacaaactcggcctctgtgttgctggcgggttccgtcagagaagatctccccctctccctccaggaaatgcattgtttcacccaaa

SEQ ID NO: 58895 - DNA, 826 bp, Bovine  19866880522546
  misc_feature (1)..(1): n is a, c, g, or t
nactgcagcatggccaggcttccctgtccttcaccatctcccggagtttgctcaaactcatgtccatcgagttggtgatgccatccaaccatctcatcctctgctgtccccttctcctcttgccttcagtcttccccagcatcagggtcttttttaatgaattgtctctttgcaccaggtggccaaattactggagcttcaactttagcatcagtccttccaataaatattcagggttgatttcctttaggattgactggtttgatctccttattgtccaagggactctcaagagtcttttgcaacaccacatttagaaagataactgtgatcaaatgatacaaaggccacgatggaacaaagtctaagactatctgctaccccatcacccactgggtgatccttccaaggatgggctttgtaagccatgagtgaacctgaaattctagctgacctgtctttgagaaacttcccatctacgtgattggaatggagtcttgacatggtaatgaaatcattaatggagaaacgtaatctcagacatcagaacagtaagccttttagttcattttctcacctgaaagagaacttggaacaccttgttgtgctcagttctcttcaactgttatataagggatggagaaaacaatagtaagaagttcgatttttcagagtatagttgccatggctgacagaaatcaaatttacagcaccaggaaagtctggttttaattcctgccatcttcctgggatagtgggtggcttagttaataaagctgatctcctacttctgggaattggattgggctctcaagctgaaacaggt

SEQ ID NO: 58896 - DNA, 1894 bp, Bovine  19866880534988
  misc_feature (1)..(1): n is a, c, g, or t
ntagactgtaaagctggcatttctgtcaactttacagggacctcattagcttgctcgtttcaacttgaaatggtcaggccaaggagtgttttgtcatttctgttttctcttcccatctcctcttccgtattttctagagatgcacagcacatcagatatgaatccaaagcacgctgagtttagctctaagccctggggagagtgaagaggcggaggggggttctctggccaggagtcttcaggacaatgccctccacccacctcttcagccagaggcagggccaccaatgtctcaaagcgtttgggaggagctagctttcttctattaatttgctgtgaatatgtaatggttttcgaaagaaatatattttttaaaagacaggctaatgcactttaactgttcttaccttactaaagagaatgacaaactggagagaaaaaaaaaagtgctaacacacaaaggtcatgcgacatgcacagaaacatttgctccagggtctaaaaatgttacctcttggttagaattcaaactctggtgtctctctaagttcatctgaaaggcagacaaaatcaattagcaagcctttcaccctctggcaaaaaaaggaatttctacaagaatgccttccagaagctcttcgttgcttgactcttggctgtgtttggctgatgtgaaggcagagacacaactttggggcttccccaggggacaggcgctggctccatcctgtctctcctctacctttgtcggctcagctctccgcccccagggggaggaccatgagcacgtcctgatccggggtcagctgtcaggagacagatctgtttaatatttagctttgaagggaactggctgaaaaaaaagatgaaagggatcagctccaagggatggggaaaaacaaaaacaagcctcgattatttcagtatttccagagaaaaataaaaagataaagtcaatgcaggtaagagagaaagaatgagacagtgaaagagatggaaggatggggagggagggagaaagaaatagagggagagaggcagaaaagaggaaggaaggagagagagcactccaaaagcccctgcgaagtagttccctaactcatgtgcattggccagtttggctctggtgcacacataccatcaagaaatacaggtaactgtccactctcaatgacagttctagaataaagaataaaatctgcaaaatgcagattctgagttagtagatctggggtgaaacctgccattctgcatttctacacaagacctacagttctactgactggcactctgtccccagggtatagagtctagaacacatcagcttgcttgcacagggaaggcactgggcaaccacagcttgtggactgctgcctgttctcaagccatccctataaagagaggaggaagtatcacataaagctgcatatgcctgtgtgctaagtcagttcagtcgtatctgactctttgtgaccctatggaccgtagcccgccagctcctctgtccatgggattctccaggcaagactactggagtgggttgccatgccctcctccaagggatcttcccaactaaggattgaacccacatctcctctgtcgcttgcattggcagttgggttctctaacactagcatcacctgtaaagtcccataaagctacatacgtgggaacaattaaatgagaaagaaaaggttaaagaagatatttacatattgttttttttttttaatagaagcttagtggaaggaataggaacaaattcagcatgattttgactcatcccaaatacccatttttcaggttggggcatttctgttataaaatgaagtcagtacagattttacggggatgctcaccatcccccaccatgacaagagcaaagcatgagcat

SEQ ID NO: 58897 - DNA, 923 bp, Bovine  19866880543283
  misc_feature (1)..(1): n is a, c, g, or t
natatatatataattatcaagcaaaaatctccttgtgcctttcaagcatctataaatgtgatgctcggtgaatggctgcctggggtgctgactcatccatgtcagttccctgctctgaacccccaaagtactgccagtagggaaagtcaggctatatataaatatatgtgtaaatgaatgcatgggtaaatgtcatactcctatttatgtctaccagatggctgagttaattagtcaattgagtgaattagatctaaagacactggattttcccagtctgaactttctcaacaggagaagccttttggattgctaggcacattcttttattatttcattgttcattcagcatgtattgattgattacctgtcgagcatatgcctggctccaggctaagtgctaaagcggtggtgtgaatctagatggacatggtccttgcctgggggaggcttactcaggccaggaggaaagccacactagaaacatcattacttgggttgttaatcactggggtgacagtgctgatcatggaaatgtacaagattcagtgagaacacggaacaggagctctaattacggaggtcagcttccctgtaaaagagacactgaaatcaatagctcactgggcagagggaaagaaaggtgtgggcagagtggtgtgggaggcaggagttagacatcgcttggcactaaaagatgctgacagccggggtcaagggagaggggaacaggattgtcaaggaccttatggaatattttaaagatttagagttttatgctaatgatattagggagtcataacggtttcaagaaatggtggcatgtgatcggatatggatttttaacagatggttcaactgtcctgcggaggctgagcggaaggaaggagaaggacacacagcgtcaggaggccccccgaaat

SEQ ID NO: 58898 - DNA, 2785 bp, Bovine  19866880643625
  misc_feature (1)..(1): n is a, c, g, or t
nttattcttgggtatgctgtctcatgagtatgttcaagagaggagcccagcgcaattttcaatattcccctagagaactcccacgaaagtttagaataacataaaggtcttaaattcatccgtgtctgttcattattataaagaatgctggacattttatatttcccatcctaattgaagaataatgtggatatcgcccccctcccccattaagggcacttagtgtgatgtaccataaatagtatcataaaatctggtattttatgtatcattttcccagtaagtaaaataatctgacttccaaccccaataaattattaaaatattcttttagagcaaatgctaatgttcctttgatattcagagtcaaaggaaaaaaaaggcaacttgaactagtttccattctctgcagtgattctttctccacttggtcatgtctgtctccccccaagtgctatattcccactgggcagaaagtcaatccaccttcaggtatttacttaatgtccattaaaaatcacattatgcacattataccctgttagcctgtcccatttattgtgaatttctcatatttcctgtcattcttctggtgattttttcctttatagcttctattttccccccattaatccttcaaaacccctgggaggtaagattgtgcatataatttcctctgtattctaaaatactgtttagagttttgctttgaaattgcttttaaggctggatgtttgactttcttaagtgaacctgtaataaacagtgttgaattctctccaaattacctcgaagaattacctgcttatctggaagaaccatcagtgtaattttaagggattttgtttttattcagtggctctgggtctttgaacttctctgcctcaattttttcagtctttccacaggaagagttctgctgagaaccagcactttgactcaaatgcagaagagagtgtttttgtttctactttggtacttgtgattctagctctaaaggaagcgagatttccaagattaggatagtttagtctggaaagaagactagttaaagggggcatgatgaaaaccttagggatttgagaatgcttgtgaaaactaaatgattcattttttaaaacctttcacaaaactcaacgaggaaatactccatgaactagaggaaatgataggcttaagcccagtgataaattccttgcacaacttctaggtataggtaccgttattagccctgttttccagggaaggaaactgagatgcagaaaaactctatgacctgatgagagagagtcgcagagtaagcagtggagtagagatcgtgtatatatctggattccagagcccaggctttccattattgtgctctatttctgtgatgtgatggttgctcttaaaaaccagcttgcagctaccatgattgaggcttccctcacagctcagttggtaaagaatttgcctacagtgcaggagtctgcctgcaaagcaggagacctgggttcgattcctgggttgggaagatcccctggagaaggaaatggcaacccactccagtattcttgcctgggaagtctcacggacagaggagagaggcggactacatacagtccatgggtggcaaagagtttgacatgacttagcgactaagcaacaaggataaagaacaaagcgggagccgccgagggctttcaagtcggggagagctatgatgcggcttgcattttgacaggatcgctccagctgagaggcagaaaatgaaaccagagtggaagcggcatgctggttggggggtctctagcagtcggccaggtgggcagaaacgatgggcggatttgtgagctgtttaggaaaacagacatgggaatgtcttgagggggcgtgttgagagtctggactctgggtcagagtctcagagggaaatggatgacccactcgaacggggtcttttttaatggggactttaaaaaaatgatttgtttgactgcgtcaggttttaattgtatcatacaacatctttgttgtggcacaagggccctcctagttgtggcccacggaccctccagttgtggcccatgggctcaggagttgtgacgagcgagcttagtctctcctgcccatgtggatcttaattccctgaccagggatcaaacccgtgtcccctgtattgcaaggcagattcttcactgctggaccacaagggaagtccctcacacggggtcttgatgagcgttttgctgtccaccctttctaagtccttcctagcctaaatgttcatcagaagcataaaggatgggcaggacttcgggtctgagaatacaaggacaccctcctgcccttttagccaggaggtcggggagggactggttcctgggacccaggctgtgcagtcaggactgactcatggagaccctgcagggaggccgctgggaccatagacacctgacttgccctcttcctgtcctgtagccccagctgggccttcaaggatgaacccagctagaggtcagagggcaaggagtctagtgacggtgtttctacagctcagcctgggggcacagagcagggggcagtgatcagggggacagagcacactgcggggaagggatgggtcattctaacaagggggatgccgtgtggtgcagcggacatttggggggtctcccgcttctgtgctctcatcagccattggaggtttcctggggcctctggcctctgggcaagtggaccgctcatgtccaagggcataagcttttgcctaccgctgcagagcgtgcccatctaaacacag

SEQ ID NO: 58899 - DNA, 1910 bp, Bovine  19866880704289
  misc_feature (1)..(1): n is a, c, g, or t
nacttctaatccacatgttgcctactaatttacccttcattcatcatgaatattattttgtaagagctttttgatgtctgagaagctaaatgaatctcttaagccctttcctgctttgtaccacgaaattgtgtgcttccagcagttggggaacaggagccagaaaagctgggggctatgcttgcagcccttgcagggaggagcacacccttggaaacagtccccgcccagcctgaaggccagtgcaattataccttgtgacaagaaggcacacctcttttctagacatttttctttgggtcctgcctctagggagggtccctgctgctgctgctgctaagtcgcttcagtcgtgtccgactctgtgcaaccccatagacgacagcccaccaggctcccccgtcgctgggattctccaaccaagaacactggagtgggttgccatttccttctccaatgcatgaaagcgaaaaaataaaagtgaagtcactcagtcgtgtccgactcccagagaccccatggactgcagcctaccagactcccccgtccgtaagactttccaggcaagagtactggagtgggttgccatagccttctccaagggagggtcccactcactggaaattcagtatttcattccattcatctactccctccttgacccattgtttaatgaacactccccaatggcagtggacagtgggctggtgttggacatccaaattatgcacaatgctcagttcttgtccttgaagaacttacatcctattgggggcagataattagggtgtttgggatggacacatacacactgttgtattcaaaacggaaaaccaacaaggacctactgtacagcacagggaactctgctcaatgttatgtggcagcctggatgggagaggagtttgggggagaatggatgcatgtgaatgtatggctgagtccctttgctgtccacctgaaactatcacaacacagttcatcagctatactccaatacaaaataaaacatttaataaaaataaataaataaatctaagttggcttaaaaaaattgcaaaaaaaaaaaaaccccaccccaaaacagtcaagagagccaactggccctctctgccatgaggacacagcaggaagatggctgtttatgaagcagcaaatggaggctttcatcagatactgtatctgttgctgacttaattttggactttccagcctctgaaattgtgagaaataaatatttgtggtttaagcaaccccatctatggtaatttattacagcactaagacacttttcctctttcttgactttccctcccaattttctgaaacccatccccacaaccactcctgccctccactccctcacttctctcatccccaggagcccaggactgtctcttaactctgaggccctgccctcctccatgctgctccatgttccaaaatcagcctcttcacctactgctgaaacttttattcctctgttctcatggtctaaaccagaggaaaggcaggctaataaaaatgttctataatcagttagtagctcatgttactggcctttaatcatcctaattggcagttgaaaaatatgcttataaatgaattcatactgatggactggctggggaggtatcttgaacagaacttcctgataggttggtggtgctggaatgtggacaggacctgggatctcacaactgatgtaaccgagcaggactcactgctgatgtaacccgagtgaggccttttcaggacagacccggctcccacatgctctcagaagtacccagataataggagctcatgcctgagtttttcagatgctaaaaaaccaccaccatgcatgcatgcttaagttgcttcagtcatgctggactctttgcgaccccatggactgtagcccaaca

SEQ ID NO: 58900 - DNA, 2206 bp, Bovine  19866880743424
  misc_feature (1)..(1): n is a, c, g, or t
ntgaagaggcagaaggaagcctcaagttactgagcagaggtttttttttttttttttttttttttggggagagtttcaaataagtacctttcattaatgttgatgtgaactgtactgccttacaccaactcgttagcaagttgagtaaatactcttatgggtctgaaacagtcctcactctttatatttataaaagaaagagaaagaaagaaaggagaattcaacggcaggatccagactcgccacacgatcttctccataaacaacacgttttgcttaagagataaggtggactctgggcatctgttaatagtctttctccggaagataaatgctgcaacatttgtagaaaatgaaactcgcagagaagccaagacttttcttgtcaaaacaaggggattattttctagcaaccaaggtcagtctttttgaccttgcctgccatacgggtgaatgagataataaaagagggagctggagctgggctgagatagctcatgtgtgaagggcctgggaaagagactcagagatttgtggagaactccactttatccaatggcttttcctaaaaagatgcctcctccacctctgtcaaccgtgtggcaatgacagggcaaggaggggtggaatcatgtggagatggtgaccattacatcacacacggctcctgagtctgccagccatggactccggttcaaggactgcagacgcggctgtgcctgatggaagggggcagccctgggacagccgcagacctttctcagacgtgccggcagcgcggggccccagctcgccttgtaaaagtagctccagagcaaatcattagcacatctaacctcaatattttgaaatccaaaaacaacattgagtcatgccggtcgtactgtaaagttttactgcactaaaaaaaaaaaaaaaaaaaaaacagtcaaaaacaagcagggatcatgtgaattatctctttacatgtgtcaagcccaggaatttgacacatggctcacgatggtggaatgagctgggtagtcaccaggaatatgtcgttaagaggaaacttgtcccacctggggctgtgtggcatctcctcgggcagcttctctatggtctgaaccacatacctggcatggggtgtctgatcactgaaaaaacagggctataaatacccttcatcctgtactaaaaatagattcagttaaagcaaaaaatccactgaggggagtactgaccactgcagacatcagtttatgtctcctagcaactgtgttgtcctggtcatgctctctgtgagcctgtggagtcaggtatcttataatttttaggagaaaaatgaatgaatgaatgaatgaatcctcttctggggaaagctcagtatgtgttgagggaaactacccatccacgcttcctagaggctttcatgaatctccaggtcaatcttccctggaaacagtccaccgattccacctcaagggtcaactttgtaaaaatactcaattggaggagcatcccagaacagttccttagcctacagcatccaaggccatgggagcagaccactctccaaggttcccaggcgacttagggggaacttaactaagctgaccataattcaaacttgagaaacactaaacagatgagaaaatccaataaagaatttcagaagacaaatgagcagacttacagtgccaggcaatgtaatagattatagagctacggtaattaaacatatgtgcactagcaccagggtggataaagaaatcagcagactgagaatcggatgtctagaaacagatgccaaagtttaatagtatatgatgaaggcagtgtgtccattttataagggacacatgattatcactaggttgtacaaggataattgtacatgttaagagatttacctcctggcctattccaaatggattaaaaagagaagtattgaacacaaaattataaaacaagacaatgttactgacatttatgcagttgttttttgagaagggaaggacttcctaagcatgatacaagtagaaactcagaaagcctataaacaacaaatgctggagaaagtgtggagaaaagggaacccccctacactgttgatgagaatgtaagttcatgcagccactatggaaaacagtatggtgggcagttcctcagaaaactaaaaatagaattaccatagcatcctgcaatcctatttctgggcatatat

SEQ ID NO: 58901 - DNA, 985 bp, Bovine  19866880777398
  misc_feature (1)..(1): n is a, c, g, or t
ngatcttattatagggtggattctgattcaggaggcttgagctggggtctgagattgtgcattgctgaagagctcttggatgatgctagtgacaaggacaagcccttaaaagcttccttctttttgggatccatgccccagactaatcctgtaccagtggattgtcaacttaaaaaataatcataacctaaaagcggagagttatgttttactcagtgggaatttttaagacttcaagcccaggagatagcatctcaagtgacctccagagaactgctctgaggatggtggggatggcggtggggagccaggttatgtagaaatttgcagtgaagggcaggtagtctgaatgtcaaaagtatttttgtggattaaagaaaaccagatacaccaagttgaggaatttagcgcttttctatgtatgagaagatgcatgagagtctgggctcattgaaatcattcctttcatatgcagatatcttgggccagtatactgcatttttttcacatcctgagctcccttggggttcaccatagggagtggctgcagtctgatggctgttagatcgcaggtattcttctccttcctgaatgcccttagggtccaccagctcttattggaaggctgcaattgctggtgatgactgtgacatccttgcttactgatatggcaggaaatagttcatttctcaggatacaacccagatgtttctggaagggatgtgcttcttattactgatgacccagaaagacaatgaactcaccctgggctctttggatgggagggtctttttagatcttaatggttttcaatgttttgtctgagtgctttcccattacccagaaaatatttcccatttgactgatgttctgttttaatagaggcatagctacctcaaaggaacgccctgtctctaagttgagcagaagacttttctggggctttgtggtttgcttatttcatgtctctgcatgtgggttacag

SEQ ID NO: 58902 - DNA, 889 bp, Bovine  19866880863308
  misc_feature (1)..(1): n is a, c, g, or t
nctctacttacattgccatagcctgcctggattctacctttgtggtctggaaagtgcctctgggcagaaagtcacagcaatcccaaggctcacctcatctggtttctatccctcaaagattctgcattcattccctattgtctagctgtctagctgttacagtaggagagaaaatctctagtgcatcatggccaagcttgactttatgtgcagtttactaactgaatattgtccaatgaacaattattgaaatgtgggctaaatttatatttatttgcaagacaacagtggattctcagaaattaaaatgttagatggcttatagttagaggtgaaggatcagtcatatctgttttctcataaaaagagcttgggatttttagggaaagctttaaaatagaaaacaggatgttggttttatatcctaatcaccctccatgactgtcttcccccagcctcaggcccgagaggctataattagggacaatgtcattctgtcccatagattacagaagtagggctattcgtcatggaaacctggaaacaagctagcattggggtgtgtgtgcaacgtaggtggcatctcatgtgtgtacaaaatacacgcacttcatgcccatctactgaagctagtcctcctctcaatcccagaccagaccatgtgcctcaaattactgtcaaccttccccaaattatttggacatagtattttttatatagagatataaatatatctatgtatacacacacacatgcatataataatataatagccatttttgtttccctccaataacttagtccttattaaaatagactttaaggaagcagtcattgccttctatacctagtatagcccacctatattaatctctgtttctcctaccag

SEQ ID NO: 58903 - DNA, 1500 bp, Bovine  19866880877534
  misc_feature (1)..(1): n is a, c, g, or t
nataatgtctgcagggcacttgaaagtgtgcctggcacaacacaacagtttaataaatgcaacctggtttgattgtcagaagttggagaacccactaacttcctgttacagggcccctggactcagagtccacgatcctaccagcatgtgctgttcccaggctgctagtggtcccacctgagattccgtttttttacaaagcactttcaagagtgcattaaaaatgatctctgtggtggcaatagaaccagaaaattatacagctggtggtaacacagaagcaaacacagaatagaaccagacgtccaatctttccagtggtcagccaatggcagaggggggacacgaaactcatctgggtcctgcctggaacctgaaggcttcctgtgtgattcagatgatggcctttgctttctgattattcaaacatcatcaggcgccccacagagaactaagaaaaagaggtcaccagggttgaggaatagggactggagagaagagacataatagtttcttatcaacatgccttgcctgggcagccagaaaatttgtttgagccatgaaataatatttattctgcatgccactgaccaagctcagcctttgatctatttctctactggagattttttttttttttcaaatttcaactccttctgcttagagggtaacaaacatgtaatgaactcagtggtgaattcagaaaggaatcagaacattaattatgcccactggactctgaatcccttcatgctggtcccagggtctcccctgtggattcacttgtccatcatttggacagaaagattgcatctcactgggtgccagtgaggctccttccaagccagtatggttttgtatcaaacaccgaactgagggcagtctggctaaatccaaatagtgattgcattcttaaacatttttaatgatatatcatatttaacccaaatgtatccaaaatattatgttttcatataatcagtatgattattatcaatgatatattaatgatatgttgctcctgataatatattcaagatactatttacatttgttgttgttgttcagttattcagtcgtgtccgactctttgcaacctcatggaccgcagcacgccaggcttccttgtcctccactgctcaagttcatgcccattgagtcagtgatgctatctaaccatcttatctggtattttcatttgaaagtgagagtaagtcgctcagtcgtgtctgactctgcaaccccatggactgtagactaccattcccctccatccatgggattttccaggcaagagtactggagtggggtgccatttatctttaaagtccagtgtgtattttatgggcttctctggtggttcagacagtaagaaatctgcccgaaatgcaggggacttggattccacctctgggtcaggaagatcccctggagaaaggaatggctatccactccagtgttcttgcctggaaaatctcatgcacagaggagcccggtggg

SEQ ID NO: 58904 - DNA, 949 bp, Bovine  19866880893371
  misc_feature (1)..(1): n is a, c, g, or t
ntgcctttgatctcaacacagaaagctccagcccattataaactcgtttacactctaaagacaaaaatacagacaaaagcaattagagatgaacattaaatggcttagcccggctccccagcagaaccgggtagggcgggcagtggggttgagtcaaccagcttgaacagcagaggtttgcttcagatggtccaggacgtggccttgctgtccccaaggtctttcctctgtagaaaatacctcaccggcagccacttcaacagaactgtgaaatctcccctttaaaacaggaattcccaagaattctccaaagctcttgcccctgtttcaggtgttcagtgaacaccaggcttcttctccctcccctctctgatttcaagaatgaactctggtatcagtcatgtacattttagtgagaattcttttctaacaattttctcggagcctagggtagactggacaatcactcttagcatcagcacaaaggagaaagagagtgtacaccgaagccactgccaactgtctcgctgggaaaactagaaaatctatgtcctggaaaacatgaagcatcaatttcacttacacactagaaggcatgtaattggtttctgtctgcagacacaccgtggatctaatgtgctctaacaggaaggctgcagtcctggctgagctccttgtacacaataacctgttattttgtgattggtataatattttcctagggctctgtgagattttatgtttaaactggaaagaaatattgaaagcaaaggtttttttcctccccacccccttttttttttaaaataatcaaatatgccactattacccatgatcccaatctgagtcgctctcagttcccaggaaagagatgaagttgtctgtaccaactttgcagctctctgctctgcagcctgaaccacgaccaaggccaagcacacaggcggcg

SEQ ID NO: 58905 - DNA, 1131 bp, Bovine  19866880901272
  misc_feature (1)..(1): n is a, c, g, or t
natgcaattatctgtgccaagaaaattgttaaagaaacggatggcatgaactactggtaagagtctttctttgggagacaagctgacatgggtgaaaccctttgtgtgtgtgttcatcaaaggtgcaggagatgggaacaagttcccctctgcagagtggtccagcaatttccacttgacctcatctatgtcatcctccattgctgtgtgggtatgcagtgaacatgggattagtatggggagtagagggttagggagtcagaattatttgcaattgcttttcatatcaagatgttccaaacaatgaagagagggttgttttctcatgtgaactggagagcatcagtgaagacaatacaccagaagaaaaagctcgagcttgctctaaatttggataagattcgggaagtcagtggcagtgagaggaaaataaccatgtcggttacatgagaaattgacaggaaacttccccaggttgtgtgtgagctatggcttagccagtgcccactggctctctgtggctgtgttttcttgtgaacgttgctgattgggtcactcacttgcagaacccaaattttaagagatgcggatgtttaactaaatgccccatccttataaaagttgtttgcttgttgctgaggctcatatagactaggagaaaaccagggagagggaagtcttaaggcaaaaaagatggagtctttagatcaggacttggatcaggaccagaaacaaatggcactaaacgctgggcactgctggttaagtgggttacttgtctatggtttttgagcctcagagcatttgggctgtcacactttgctctgttgttccttcttccctctcctccccaggcaaggctggaagaagaactgtgagggcagagacctgtctgagtggaaaaagggatgtgaggtttcatgaactggacagtaccaaggatgcttcatgacaggccctagtgagagtggtcatgtcatcttctcctccatcctcctgatggtccttctcaaagttggagagcgaaagttaagctatatttttaaggaaataaatatttccatttaaatgtcttgacttcaccctgactcagtttcaatgatgtcataatagcacaaggttaagacttga

SEQ ID NO: 58906 - DNA, 889 bp, Bovine  19866880953675
  misc_feature (1)..(1): n is a, c, g, or t
naccctacaaagaaaggaaaacaaaaacatttcaaaaagaaaacaaggccaagaaaaccaaaagaagccaagaggcaagggcaggagaggacaacctcgtccctctgtccgtggtccacatcctctgggaccctctagagccagggttctcaaacgtgcatgtacagagggatccccttgggtctccacatcagggtgcaagaaagaagtaaacttccagtggagatggtgagcccaaggaccaagaaggagactgaagggcctgtacctgagatgctttcaatctcagaatctggtttgtccaaagacaaagggaaaacctcagtcacaagataataaaacttcagaatatagcatcaggaggaaaacaaaacaatatatcggtttcaatgcactcatgataacttgggggaaaaaaaaaagagcaaatccacagtcaggccaggatccagactaagtgacaggttgaagtttaattaaactagtcaagcctatataaaagcagaaagaatttcaaaggagaaggggacactgggaaaatcaatacagtttcattgcagcaggaagaggcacccaaactcaaggtcagacccagggggcttgtccagtctctccaacgctctttccatccttctaaagcatttcttactggtggaaaataaactgtcactgaacttgcagatgattatctctacgcaaaaactctgacaagactttgtcagtaattctagaccagttgcatctggagaggagactatggcagagaaaggcagacttttatctgaaggcttcaaaagactcgggtttaacaagaggtacagtggaggtgcccataggaaaagggatatttcagtgagttgtggtcacatgttacagtcatcctttggta

SEQ ID NO: 58907 - DNA, 1321 bp, Bovine  19866881001837
  misc_feature (1)..(1): n is a, c, g, or t
ntgtgtgcactttcccaggcctcccagggcatggctttgtttctgtcctgcattttccttctcacttcctgtgcttcccaccccaccctttttttttttttttttttttaccttcttgatttttatttgttgggatgtagttgacataccagcttcaggtgtacaacataacgattcaatatttgtgtctgttacgaaatgaccacaataaatctagtcaacatccatcaccacgcataatgacacatttcttgtgttcagcactgttgaaatttactctcttagcctctttcaactaatccttcctccccttctgtgatggtgcttcctgagaaatagattctttctcatttgtttgttttaacccacacttcgcaggccctgctgcctttatcgtcagccagtcctgtttgaccgtcatttgcattggggataatcatgacatatgttatatgcactattacagtttttattttgaggcttgtaactaaaatgattcttggaatggaaccttggaaacaccagtcttgaaactggtctggtgagggcatttgaaagacttgaacttcgggggaaaggttttgaggtttattttggctttcctttcccatggcagcaccttggaagtcactgaaacatgaacttgtgttttgataactttttccttgaaaatggacattgtacatacacagaacagaattaatgtttgcttttttttccccccccttcaaattatacttttgaaagacctttaaaggaagttgagtttgtgctgggtggccagtctgtttctgtgtaaatcctgaaagattggtcatcttgagtctgtgctgttccagagggtcatgtcgggtacttcctagctatgatcctgcatctgtgaaaatacacaggagaggaggtccggggagatccttcacagattcaccccgatttgggactctttatttttctctccaaagcttcggtcacaaagaggcatcctcagggtcaggatgaagcaggctggctgttgggaggcagtggaacaggatgccttggaacaggtctgcaggaggagtttctggggttcggctcctgctcagtggtgatccccatgaattctggagccctcgcttcttgctctccactttttttttttaattctgcaaaacaaagggaaaggatgcttctctatgccaaaatgaagtttgcatatagatcttcctaattaaaaaggagcccagttttcttgccctggtagacaggggagcctgcttaaagcattggggtaggagcttacattcctacagactcatccagagcaaaggatctttgtttc

SEQ ID NO: 58908 - DNA, 1593 bp, Bovine  19866881007682
  misc_feature (1)..(1): n is a, c, g, or t
nattgccggagaaataccaataacctcagacatgcagatgacaccacccttatggtagaaagtgaagaggaactaaagagcctcttgatgaaagtgaaagagagtgaaaaagctggcttaaaaatcaacattcagaaaactaagatcatggcatctggtcccatcacttcatgacaagtagattgggaatgagttgaaacagtgacagcctttattttggggggctccaaaatcactgcagatggtaactgcagccatgaaattaaaagatgcttactccttggaagaacgctatgaccaacctagacagcatattaaaaagcagagacgttactttgccaacaaaggtccatctagtcaaggctatggtttttccagtagtcatgtatagatgtgagagttggaccataaagaaggctgagcactgaagaattgatgcttttgaactgtggtgttagagaagactcttgagagtcccttggactgcaaggagatccaaccagtccatcgtaaaggaaatcagtcctgaatattcattggaaggactgatgctgaagctgaaactcctatactttggccacctgatgcaaagaactgactcattggaaaggaccctgatcttgggaaagattgagggtgggaggaaaggggtcaacagaggctgagatagttggatggtacccccgacttgatggacatgagttcgagcaggctccaggagttggtgatggacaggtaagcctggcatgctgcagtccatggggtggcaaagagttggacacgactaactgaactgaactgaacggggagcttagcctggtgctcagtgatgatctacctagggggtgggattaggcattggatggggcaggagactcaagagggaggagaaatatgtatacatataactgattcacttcattgtacagcaaaaactaacacattgtaaatgaattatactccaatttaaaaaaaaaacaacaacactcattttaaagatgatgttgaagactagaggtaggaagcagcctgcccaaggtcagctgactttttggaagcagacctgagggtcccgacttccaattcccaatttgagatcttcccactaattgtactctgatctgtggaaagtttatgcagacagacagcagaaatgtacactccttctgtgaggtgtagcttgagcaaagtggcaacaatcccactcaaggccctaaagaaactcttacttctcattgtcaagattaaaaaacaaaaggagcaaaatgcttccatattcccatcacaatatagtccagagaaacatagatgaggccaaaatcgaattatgtctttgctcagtcctacagagtacttggcatttctatttcagcatgttctggtattcccatatggaattaaacacatagggcacatttaatttcagacttagaacaaatcagatgtgccaaaccacatagctccacctcaagataatttcccccagtgggagaaaatgtaatacagcagcagccaaagggtgttcctgggctgaaaacacccacattcctaacctaggtcttacgacactatcatctgtgcatctccccacct

SEQ ID NO: 58909 - DNA, 1245 bp, Bovine  19866881019864
  misc_feature (1)..(1): n is a, c, g, or t
nttcatggaagacaatttttcccatgaacccacatctggtgggtggggctccttcccacatctggagtggttggatggtttcaggtggttctcaaaagtaacatgcaacctagatccctgccatgagcagttcacagtggggtccatgctcctatgagaatcgaatgaagccactgatctgacaggaggcggagcttaggtggtaatgcaaaggatggggagtggctgtaaatacagatgaagcttcacttgttcacccaccagtctgtggcccaagggttggggccactgctgctagtccattctccagagggatcctgacagcatgcttcccacacctggtgggtggggcttctctccctgtcttacctggagcaggtatctcactttttctgcccttttgtacattattcacttccaaccctttcatggtgttaagcttccagtattcggatctagtatgaaaattccttatctctcttgcatcattcccttgtgatttaatggtgtgtttttaggctattttctatgatttctaaagctcagagagtacatcatctttttttacagatgggtccttagtccttttaggggagggaggagcatcatttgagttagggttccaaactaactataaaagtcatttttttaaaaatccaggtgctctcctgttaccagccttacttccagactccctactgtccatttcctgccactgagcagctcacacacttatacattagattcattgtctggcatcttctttatcagagaatgctccccagcgttggaattttcctgaccagcggtttccttcagagtcatggtcaccaagaggactttctgggtctttaggaccaggcatctggaagcctggaccaagggccccactcagccagcatctgagatctccttcaggtccttaagaagcctcagtttccccatctgaaaaagtagggcaagaccatcagtcccagccaggaccaaaactctgtgattttcgtatgctcttccagatggcttctatctgccagtaatgtttgtaactgttcttcctccaaaaatgtccttctttccagaaagacatacagaaacaattaacagaatattttaaatacacattagatttgctcatttattcccctcaaggactttatcttttgaagtaaataggaggtaaattgaagggccagaagaggtagcttctacctgaaaacaacagtgatgacgaattccgacctaaat

SEQ ID NO: 58910 - DNA, 1987 bp, Bovine  19866881126462
  misc_feature (1)..(1): n is a, c, g, or t
nacaccagccctcccatccccaagctgcaactcgaggctggtgctgggagtctagttctgtggtccatttttggtagttctggatacattttaaagttccagaccaatctaggacgccacaaatttagctggagtcaaccgccttgttctttgccttagcccctctgagggcttctgtgcctgatcagccagcaactggtggggtcagaagatgggccaagatagggttcagaaagctgatggaaaagaagcaagcagaggctgagaggtgggttctgaataaatactggatggatggatggatggatggatggcgtgagactgcataggtggatgaatgggtggtggaataagtgagggagaggcactgagggggattggcaccaatgcctgtcagtgagaggatgctgaataagtatttgccaagttgatgttgaagaaatttgagagagaaaaaaatgagatggaagaatataaagagaaaatagagcagggtggaaaatgactgagaaagaaatacaaagaaagaaaacagtagacaaggaaaaagtgacaataggaaggaaggataagagggagagagggagggaaccatgagaggtggatgtgacagacaacagactgagacacaggtgaaaggggggagtgtcctgcctatagttcttccatatcctttgctagagctgcctgaagttccaacactggaattagaaactttgtgtacatgtggtgtgtgtgtgtgtgtgtgtgcgcgcatgtgatgtgtgttaaggcactgacctctactaaaatccagaatttcctgaactagtacaaaaccggaaattattatcaggtcattccttcttaaagccaacctgacagcagtgtttggattcagttgccttgaaaagataagtaagtaagcccaggccaggtccgtgggctgcatttccagggcagtgatgggaaaggtaaacagcagagaaccaggtcctgcaacagggagttcagttcattcactcagttgtattcgactctttgcgaccccatggactgcagcacgccaggcttccctgcccatcaccaactcccaggagcctactcaaactcatgtccaccgagtcggtgatgtcattcaacaatctcatcctctgtcatccccttctcctcctgccttcaatctttcccagcatcagggtcttttccagtcagtcaggtcttctcatcaggtggacaaaatattagagcttcagtttcagtgttagtccttttttcaattaggagcagaaaatctcatctcacttttcttctttgaaaaaataagcctttaattttctattgaggaaaatctcttttccctacaaaacatttgttttgccttgtggtcccaaatgccagatatcaaccccatccccaccccagcccatccatcagtagatttaatacagaaatttcttgctgaggcaggaaatattcaatccagcagagctggctggtcttgccatggggctgttagagccaactagtgttctgtacctcgggtgaacccacaaaaccaagctgatttagagcagttcctcccctgcactggcttgaaacctgcctctttttgccacatgcttcctgctggcgtgtggcttaggagtttacaagtggctgactagtatacatagaaagaaatcgaatcaggcaacaacgagaggacagagagggagatctttattttccaggcaatttaggtgaaagccaacatcctaaccaccatcaccatgcaagcttcaacagcattttccatggtgttggggttgtgaacacagtatgtggatggatttgaaagttgtccacagtatcctgctggtctgtttatccccacatgttgtagacattctctgtgttctgctgcattttcggagcagttgtagagtgtagtaaggacagctgtcttgcttattccaccttgggagcagccttttatcacacgagtgtttgtgtagtcattcattca

SEQ ID NO: 58911 - DNA, 1467 bp, Bovine  19866881191138
  misc_feature (1)..(1): n is a, c, g, or t
natgccccaaggcagctgtagatagtattgtttttgttcagctttggctgggctggtgtgttacattattagctcatgttccaagtctgtcaccagaagaatgtagtgagactcttgtttccatcttttgtttctcacttctgccccttccttaaccagagcctagcatctacacagccatgatcgccaagacttgaaaacagcagttttgaataaaacctatcaggctctccacatgattcataagaaaaaatggttggtgctgattccacttgccccagacacgcatttgcaggctcttttttcctcttaccccaaaggtagttactgttcagttttagaacctgtggggccatcctttctggagtatctccaagtctccactgaagctggagctgggagagagagagcaccagccatgatggcatgcttgactttgtaattcatcttggtcacctctgcctagtaaagctcaagctgcacgacttcaccgtgatccagtggttaggacttcaccttccagtgcagggggtacaggttcgatccctggttgggaagctaagatcccacatgcctgaggaccaaaaaaccaaaacatgtaacagaagcaatgttgtaacaaattcaacaagactttaaaaatggtctacatcaaaaagaaaaggaaaaaggtcaagctggaatccagggaccacaaagccctttcccatccacaaccatctttcttcatctctcactaaacactgtattttaaacctgtctggaggtcagttttgtcatctgtgaaatggggaccggggtacttgccattgtggcagcaggatcacaggaaggcaggtggagtaaggcactttgtaaattagaaagcgctccacagtgtccagttgggggcagtgaagatgaaacgggatgtcgaaagctccgtgtctgcagttaaaggctgcatctgtggaaagtgatggggttagtcatctatgctcagcgctgggtggggacttgctttccagatacaaggaggtgcggaaggatgtgggagaggatgaggtgactccctctggaccctctgtgggccggaccccaatacctctttagctgaggcttcatttcttaggccctttgaggcctctgtggttggtggatgcctgaaatgctcccactgtgaactctgcatccggagggtgggggggaggaattttcaaaagacagatgacagatgggtgtacccggcacaacccagcttctcctggagaccccaagaagaagggtcacatggcacagccctgtgttctcagacatcagactcgctgcctgacccacggctataaagacatggcagctaaccctgcagacggcactctggacccttccctgaccatggccttcccagagatgagtccataggctatgggacagtaaggcaggaaagacatcccctttggcccacatggcccctgatcctagctggtg

SEQ ID NO: 58912 - DNA, 2530 bp, Bovine  19866881266032
  misc_feature (1)..(1): n is a, c, g, or t
nttaagaagataataagggggatttttcctgtctagagatgaggcccctgggtctttgcagatggtgctattttctcagattcagaaataactgcaggagaagagcctcagctggttcctaagtcagtacaactgggtcagtacacagaccctcctgggacaggaccaagctttcatgccttgagctttgtcaaaggctcaagtcttcacagatccgtgggactccctcgcagcacccagagtccttggcaggctgggctcttcctgagcctctcgtggctcgcccagcctctcttccctgttagatttgcctgattacttgaaatgtgattgtctctggaactgaaaattttaagtggattttcattctctgctgtctcagttggtaaggaatctgcctgcaatgcaggagacctgggttcaatccctgggtcaggaagatcccctggaggaggggatggcaacccactccagtgttcttgcctggagaatcccatggacagaggagcctggcaggttactgtccatggggtcgcaaagagtcagacatgactgagtagctaacacttcccactgaggtagaaggtaattactttgggtggtgcccctactgtcgatatgtaatttctcttttaataaatgttttgacaccttaagttgactagcgttgaacctgagtaatgaaagacaaggtattttgccctattctgtattttgttattcctatcatttctcctattaaggttcattttaggtctgagaagatcaaatattttcactatctgaaaaaaaatgtctgaatttttatacttgttagcatactttatttgttttggtcacaaagggtccagaagtaagtagaaccacaagagttaggttgatggctcaggagccttcgtttctcaagatgcccctggtctcttcccagagcatcacccttctcctgactgcaccatagccccggtttctgatttgcaagcttactcatcacaacacatgcagtgaaatggattcactcatcaaacatctactgagtgtctgtgtcactacgtgctgcagagagaggaataagcaagtccaggtctaaaaaaaattattgactagtcttgaaatttcgccttcagagacatctgttcaggaatttgtatgtggaaaagaagaagcaatgggtggataaccaagcaaaaaggatacagaatgaggacccatggaggaaatctagtccctctctctgtatcatagaccccaagcccagtgacatcacgtgaatgatgattatgaatgaaccccgggaacagagccccagtaaatggagctgtcgctgagtcatctagggctctagctgaatgccgtgagttttctagatgaaggagatccggcttacagagactgcagcctacccaggtatgaccacagtcatggaagaaaggaaggtgaaggccccagtctgcatccccaggccttgggggaagggcccccactccagcaggtctgctctcagaggaggcctgcctgggttagaaccctgctccccagccccgtctgtgcaatgcagcgaggactggctttggagctggaagggcagctttcatcactccctcgaagaggaggagggaagcatcatcacactggttgggcgggaagagaagccattccccgccccccgccgcctgcctcggggttctcaagagtcccgtttcctattccctggccgtcacccgatctctgatcagtgtccagtaaacagaaaagagcctgctttatgccatcacagattaagtgacaccagctaagggctccatctttcactctttctttgaaatgaatcctcgctcccgtcactgctttgtgtcccacgggaggaatgcggtggtggttggcagggggaccggggaccgagctttttcacatccaaacactgagaagtggcagtgctttggttgccaggggttgggaggactggaaaaactaaagccatgcttaattttagggcattttcatctttatcgtcgttttagcagtggaaagagcatcccagagggaagcagcagcctcccgagagagtggtcccagcgagatgagacgcaggatgtgggcagaaccctctccagcaaagggaggggatgcctttgctgtatttcacatcctgaggccatgccctccagtcacagctcgcctttgccatccctgatttctaaaatagcctatctaggtagttgttaagaccacaacgttaatttttctagtttgggaatagaagatgaaaaacccaccacagctgcttttcagtgtagtggagagacagcaggaagccctgggaggaagcctagaaccttcgagcttggcatggctctgagcactgccactgggtggagcatggggaagcaatttttatttgtgttggcagctagagccccagttactgaacctgataatgatacattgaacccatctatacagagcaataatttccaattaatgtactgcttcaccttacggaaacttcagtttgctcacagttttcccagtt

SEQ ID NO: 58913 - DNA, 1171 bp, Bovine  19866881356042
  misc_feature (1)..(1): n is a, c, g, or t
nacaatgagtcatccccactgtgcttggtggcagcatctgaactgcctcttgttttgcatgtgaaccctctggggcagtagcaagttggaagcctggtccagcacctcggtcagctggcctggaaagcctgctgtaagtctggacctgtttcagccaacatactttctaccaggcaaagaatctataccagacactgtcttggaaaacccagtcttgagaagtagtttattgatctggcagatgattaaaagacaacagagatgagctcaagtgatgcttgggtttttccatcctgaaagggaatctgaaatttccttggggggttgtcagcccgtcctgctgttgcaggaggcagatggctcctccattcagtcaaagatcatgcgaatgtccccgtctcgggctttcttctgttctcggcaagattccctggacagtgacagggtccaccctggatgcaggcagtcagaatcttgttcccgattgtgcctatgcccaaaaggagctggcgcatggtccatcacccaggctcttgccctggcccctctgcttatgggatgggggtggggtgcagttactggaatggtaaaactgcaaagttttagggctgctccaggaggaaaggagggaaaaactgacgtgctcacattgcaaagagctgacccagatccaggagtccagagaaggcatggaatttgggctggtgtgtatgaagtcacctggagttgtcatctgaaacagacattgctgaggccaaaccttgggtgacctcacgtcctgtgctgctaagcagagaggccgtggctcggggagaaattacaggagcgtcaatgctcagccagaagattatttacagcctgttcctaatgcgagggcttttacagcagtggttttgtggacaaaaatacatattaaaaggctaatgtgatcgctcatgttggcagtgacatataaccaggttgggtttcacagaacacctagagcagtgaagcgtgcttcaatctgatgacacagaaagcagttctgtgctggaacaaattgcaccctgcccaggccagcaacaggagagcctgacaacgaatttcttcaaagcaaacttttctctccttctcttacacactttccaaccctgttgttcgaattgtacgtgtacgcttttatacaccagct

SEQ ID NO: 58914 - DNA, 970 bp, Bovine  19866881507387
  misc_feature (1)..(1): n is a, c, g, or t
nacacatgcaacccatccagcagaaaagaaagagcagtagtaagttacctttcagcgaaaacttcctctttgtgacattctccaagtccaccttctcttcaaagagctgcctctccttccagtctgggcttgcctgcatggtgctctttggggtggaaaattccttcaggtcatcaccaagctgggcgatgggaggatgggcgagctccaggcttcctttcctcggaagggcatagatggcctctttatggttgtctccctcccggactctgctgaggacggggtaggacagctctgcttcctcgaaggacccatactttgtaaccccgccatctccacctgtcaagcctcccttgcgttctgtctcttcaaattctctcaacattgctttgctcccagcaccctcgaccgagggctgccagccttgggatttcaggatgcttctaactggggagtcggagttttctagcgaagaagcaaacttctgctcagtggcaccaaagctgtcatctggaagtggctttgtccgaagatttcctgcatacatgggggggacggtagatgccacggtggacacggaagtgttaatggtgggagagaaagccatgagcttgccactctgcacctgggaggagacagttcaaaaataaaagctgatttaaaaacaccgcttgggtaaatccccgtggatggactgacatggatggaggcactacatttggggcagttttcctgcttctgttggtgagaaaccaaacctagatgtagttgcacaaatgcgtctcgataatccaatcatctgggtgaaaggcaggttgtgcattctgtttttctcccctcgatggactcaacttcagatgatttcagccataatgtgaacaagagaagagaaacatccttggcatggttatcctccttaagaatgaagttatgaccaagtagcgacaggtaacacagagtacaagtagag

SEQ ID NO: 58915 - DNA, 1462 bp, Bovine  19866880011971
  misc_feature (1)..(1): n is a, c, g, or t
ncatataagttaaataagcagggtgacaatatacagccttgacgtactccttttccaatttggaaccagtctgttcttccatgtccagttctaactgttgcttggtactaaataaatgtctataaatttcttcctttaaacttcagaaaaattctatggtacagatccttattttacaggtgagaaagttgagatacagccagattaaggaacttctctagctgttacatcatggagccaagacttgaatctaggtcttccaaatccagtgtttttctaccttacaatattgagatgaaaccacttaagtctaaataccttttgaaacagaggtggttcttttccatacctaatattagtaatttgtagctgaacaaaaaatccccatgcccaccccttgtgggcaccagtccaaaaaaataaacccatgaataggatagacagccaccttttacctgatctataatgtcagatatgaaacatgattaacaaatagaagcaggacaagccaatgcttaataacagggggaagaattgacctatacaaaactcaaaatgcaaagacaaattacaaaagtataaaacctatcttactgccttttcacaccccacatggtcccctcagcacaatgtcatcccaacatgagtcccacacaaaggtattccaattagtaagagaccttagccatctcaacatgtaaaacagcattcaaaaggaatgtagttacataacatgtcatatcccccactcgtcaaggctgtatattgtcaccctgcttatttaaattatatgcagagtacatcatgagaaacgctgggctggaggaagcacaagctggaatcaaggttgcttggaaaatatcaataacatcagatatgcagatgataccacccttatggtaaaaaatgaagaagaactaaagagactcttgatgaaagtgaaagaggagagtgagaaagttggcttcaagctcaacattcagaaaattaagatcatggcatctgggcccatcacttcatgggaaatagatagggaaacaatggaaacagtgtcagactttatttttctgggctccaaaatcactgcagatggtgactgcagccatgaaattaaaagatgcttactccttggaaggaaagttatgaccaacctagacagcatactgaaaagcaaagacattactttgccaacaaaggcccatctagtgaaggctatggtttttccagtggtcgtgtatggatgtgagagttggactgtgaagaaagctgagcaccgaagaattgatgcttttgaactgtggtgttggagaagactcttgagagtcccttagactgcaaggagatccaaccagtccatcctaaaggagatcagtcctgggtgttcgttggtaagactgatgttgaagctgaaactccagtactttggccacctgatgtgaagagctgactcattggaaaagac

SEQ ID NO: 58916 - DNA, 1209 bp, Bovine  19866880350385
  misc_feature (1)..(1): n is a, c, g, or t
naccccatggactgcagcctaccaggctcctctgtccgtgggattttccaggcaagagtactggagtggggtgccattgccttctccaagtagttgtgctacaactggtaattttcttttgttcacttatttgtttagaatttcttccactctttagagactttcttccttataccttatcgtgacatccaattgaaagcgtgatgatttcttgttgatttttctttcctacctagtcaataacctatcgctttttgtaagacattttataatcccttcatctactttcttggtcttctgacacatgttctcgttggttcccttctgtgcttgatgtttgccttcagctcctctagattcatttgtccccacactttctactctgcttggctttaatggactatatcagtggcctccattctgtcttgcttctgggtgaatttgaccaatagataatgcaaaaaacagtgagtatgaaggatttattcctcagctcccttcttatggggtcaccaggaccagttgcagcaggttaggtagacctttccacacagctcttgtctcctcattcagattaatacctgctctctccttcccatcagacctgagggtagctcctcactgttagtaggtcaagatctttataaatatctcccttttaaactcttctctaattacccaatttgagcatgctctctctatccagctgggctgcagagaaggatatactacctctgcactgggattctaccactcttgatctgatttctctatattcatatgagcacctatcttatatctacaatgtttgaaatttataagaaaatcaaagcacatttaaataatacatatgtcagtattgatcactctggtttccaggtttcactgttctaattattaggtgcctgagtgggtgagtttctaatctttaaacacatttttcatggcttaaagtgaactgagaacctggctaacaagataatacataatttagaatgtaatacacaatggtttcctttcaagagctcttgtttggaaagtagtagctggttgtcaatgggcttcacaaataagaagctctgacatatgggccttcaggataaaattataaggaagtttcatgttctaagcgtatttgttttgttatacagttatatcactaaccaaaacattagacaaaatgatagtttattttaggaaattctaaat

SEQ ID NO: 58917 - DNA, 3276 bp, Bovine  19866880423871
  misc_feature (1)..(1): n is a, c, g, or t
ntatatgccatgcattattctaaatgctataggtctattagtatatctgggccatcacagtaatcctataaggtatataattttcttattcccaatatataaatcaggaaactgagacccaggtagattatcttgcacaggaccatagtcaataaatcaagagcctggatgcactgccaggaaatctggtagtagagctctctctcttttttttaattagttacctatttatttttatttttgtctatgctgggtcttcgttgctgtgagagggctttctctggttgtggtgagaggaggctactctctagttatgatgtacaaccttctcattgtggtggtttttcttgttgcaaagcacagactttagggtgtgtgggcttcagtagctgcaggcagcaggctcagctgctctgcagcatgtagaatcttccctaaccaggcatcgaacccatgtctcctgcattggcaggggattcctaaccactgaaccaccagggaagtctgagccccactcttaaccattctactctgctgcctcttacctagatgataaccctttaatagctgcaccattataactcttgctatgtttcaggtagtcttcaaaatgttttagaaatattactatacttgattatggcaacaaacctacaaggatggactatttttttctctctgttctgcagataaagaaactgaggcacggagagttttactaacttgcccaaggtcgaatagaaaggactgggccagaattggatccttctagtttatagcctgtgttcttaaatattaattgcttcaactcttcacatggtacgaaagttataaatttactagttatatgtaattttgaagtgttttatcacatatacacagttatacaatatgtgttttccaagggctctatgaagattattaaatcactgatatattaaacaattttgaaaagtacagagtaagaatgtggacttggatgtaacttggttgcaatctcggcaccccttctttctaattaggtgaccttggatagtgaagtatctagtcaaacctttgaggtctcaatttttctagtgatagtgcttactttactttttatatatttctctctattttgtttttctggttccataacttcaaataccatgtgtatattcctgaatcttagtgtataatttttgtctggaccttccttctgaacttcaaacacatatctaaagtagcaactcaacatctctgtttgggtgcctactggtcacctcaaactgaacacttctaataccgagcttttgatcaaatccatcttattaatcacttattgctcctccctttcaccatctaatacctgtttctttcccagtcttcaccatttaataaatggtacttccatctattcagttgtttaggccaaaatatctagaaattcatttttgactcctcgtttcccttatccctgggtactttaacttaccttgaacgtacacaattgtgttcagaaaccaccatctccagtatttccattcttgtccaagtcaccatcctcttgcacctaggctactcatttctttagcctttctatcatgactactgatcctttgaaaatgacaactgagggtcaggttttccgctcacacttggactagactccttacctacatagccttacgtgatctgaaccctctctctttgacctcacctatgactccctgccttgctcactctgctctggccacactgatctctttgtttttgctcagacatcaagtttgtttagtttttatggattttcatctttcgttttctttcactcaagattcccagggctagtttcttaatttcatttctgtgtatgctcaaatgtcactacctcagataaattcaccctgaaattctcactttctcagaggccctaagcttcccatccattatcttcaagttttgttcttagtactaacaaccactgaacattattatacatgtttatttttctattatctgtctcctgcatcagaaaataagccttccgagggtggaaactttgtcttattcattgttgtataccagctagaacatagtcaggatatatttgttaatttattaatatatcactttcttgtaagacttagtatgatagtttaatgtattttgccgctggtgattgaatagcttataggttgtctaggaaaaatgctatttcatacatccaaaagcattattttgcttacttttatatattctgtactaatttctggtcagtgattctgtgttctacttatggattgactatcgttctagtctctagctctgttttctagtttccattgctatctgttcatttgtatgtggcatcaatatggctgataaaaacctccttaccggatgtagcccagacctcctacctggagtattgactgctctcacaggcagcaactgctagaatttcctggccttctgcatactgtgaattgctaattatttgacttcttgtatagagatggtccaataaatcttagtcttattctttttcttgattaggaaagttttttaaacgtctttctaagaggtggataaaactagcagtctttaattgcttcctacctgaagtctctttttgcctgaattctctcttttaaccaatccttgcattgctgagaataaactatggtattttatcaggttctttaatccaacagcatgtgtattctggaattagtctgctacctttccctggtatcaggatgactgtctttattgctgtttcgaagtatatgtgactttgagcagatgacttaatttcagttttcttatctgcaaaatgaaagatatttgtaaaggtcatgggctgtgaagttaaaaagactcaggttttgatgcagtttctgcctctttctagctgtatggctactaatacttagttttataagtatgctaatggccaattcaatttgagagttgaataagaaaatttatatatagtaccaacatgatcatcaaaatttagctttcaccccatatgtccatgctcagtcgtttttctcattttcattttggtgccctgagaaacctccccagacaacttactagacccttactgttcttcttcccagaaagttagactttgctcatgtatctccagccaactctttggatctttttaaaattcaattatcctgggctgcctcgtttcttagtaagaattttctctgtccttaaacccctacttttgactcctttcacagtgctgaactcatatgtcattgttcactcagttca

SEQ ID NO: 58918 - DNA, 2103 bp, Bovine  19866880513478
  misc_feature (1)..(1): n is a, c, g, or t
ngagatcttcccaacccagggatcaaacccttatctcttatcaactggagtgggttgccatgcccttccccaggggatcttcccaacccaaggatcaaacccttatcactcctgcattggcaggtggattctttaccattagcacaacctgggagtttcctacgctcatctgagctgttgcaaattcttaacttgattctggagcatattattcttgattggaggtctcagaaaggtattttggccctaatagcatttttaaaatgttcccagcaagggttaggttctcctatttcactatgttactgatatcacatcagagtttttaaatttttactataaaaataaacttctttagaagctataggattattcaggtcaactacttcaatttaggtgggttttggtagttggcgctttttgagaaatttgtctgtttcactaagttgttcctccttggaagagaagctatgaccaatgtagacagcatattaaaaagcagagacattaccaacaaaggtccatctagtcaaggctatggtttttccagtggtcatgtatggatgtgagagttggactctaaagaaagctgagcaccgaagaattgatgcttttgaactgtggtgttggagaagactcttgagagtcccttaggctgcaaggagatcaacctgtcaatcctaaagaaatcagtcctgaatattcattggaaggactgatgttgaagctgaaactccaatacgttggccacctgatgcaaagaactgactcactggaaaagaccctgatgcttggaaagattgaaggcgggaggagaaggggacaacagaggatgagatggttggatggcatcaccaacacgatggacatgagtttgagtaggctctgggagttggtgatggacaggtaagccaggtatgctgcggtccatggggttgcagagtcggatatgacagtgaccgaaatgaactgaattgaactgaactaagttgttgaaattatgcatttattgtggtaatgtttttttaatctatctctttatgtatcaaatattcaaaatatttcttaaatctttatatttgtgtgttttagtaaatacattttcattggcctaatagattattgactctggacaaagtagggcagggatttctgctgttaatattttgccaggatccctttacggtgtgttcccttcctctagatcagtggaacttatatttcctatataaactcatagaaggaaaagtaataatgtgtcacttagagaaaatatacttctctaggctaaaaagaattttgacacagaaaccccataagggtcagcaaatatgggctctaacatatggtatctttggcagactgaaagtgtatcaccttgaattgtggctttgtcattatacttctcaatgacccatatcagatctactatatcacaaagtcaggggaagggtaggggcctgagaatccttatatttaatacatttattttaatgcctagctagattaaggaccactggtgaaagtaacatgcctccttgggaagacagctggattttgttcctggagatattatagaaaaagtgttaaaccagaggttagatgatttggaatctgttaaagaaactcttgctaccattctagagaagaagttacctaatttagtttagctttagttttctgatttttaaatgattagtaaagaaaccactatttgatcttgaaggaacagttattcttttctatcatgaagtctcttcaactaataaaaatgtatttgacttactccattgttgcagctcagcttggaaagtacaaagaattatctacataaatactgcttctaatatgctttgagtctcatgtggtttcctataaagttgcaatttgagtaaggaagtactgcttatcagaacttgcccaattatggaaggaggcattctcaatcctgatgggaacaaaggggattcagtagagtaaaagtcccaaaacaagcaggtttattatgtagattcagtggcattagctgcgtccctgcttttctcttatcatgtaatattttgaaacactgcataatcttttcacaatgctcacatatatgat

SEQ ID NO: 58919 - DNA, 1682 bp, Bovine  19866880522185
  misc_feature (1)..(1): n is a, c, g, or t
ntcgggcactcagccttctttacagtccaactctcacatccatacatgaccactggaaaaaccatagccttgactagatggacctttttggcaaaataatgtctctgcttttcaatatgctatctaggttggtcataactttccttccaaggagtaagtgtcttttaatttcatggctgcagtcaccatctgaagtgattttggagcccagaaaaataaagtctgacactgtttccacatctatttcccatgaagcgatggggccagatgccatgatcttcgttttctgaatgttgagcttaaagccaatattttcactctcctctttcactttcatcaaaaggctttttagttcctcttcactctctgccataagggtggtgtcatctgcatatttgaggttattgatatttctcctggaaatcttgattccagcttgtgcttcttccagcccaacatttctcatgatgtactctgcatataaattaaataagcaaggtgacaatatagagccttgacatgctccttttcctatttggaacaaccagtctgttgttccatgtccagttctaactgttgcttcctgccctgcatataggtttctcaagaggcaggtcaggtgggctggtattcccatctctttcagaattttccacagtttattgtgatccacactgccaaaggctttggcataaattactcgctagcaaatgaggataaggaataatctctctttcctcttctctcgttataatagaaagtatttttgcttctccatgggatattttctttctcaattcaaagtacatatgaagctaaactctctgcaacactagaaatgcaatttttaaaaaggttaagttttactcctttgactatttatatttaaaatttttgttctcttcattatttaaaaagttttattttttaaacagctattaatttataagccagttgaagttcatatatttttaaattttagtacagtttgtgtatactttcttctgagtccataatgtttttcctagttgttcaggatctttatatatgttcttaatatatatatatatatttgtatatataaagaatttaagcaagaatatgaacctttatgtgtcatagttcttgaaaataatttgttcagtttgcttttcctgttaattcagtttggatttggaagttcaaaagtttcaaactgtggtaaagttatatctatatatctttccctttactatttcctttcatgttgagaaatctgaaaaatatccacaaaaattatcttctagttgttcatggttgacgtttttacatttgatgttttgttccacttggacatagtttcataaatggcttgagatcaaaatctgaatggatttttatccaaataaccaactgattgccccagctctgtttattgaataagcttttcctctctggacagatttgttatgcctctttatcatccatggtccatgactgggctacttgccagtcatctaggaaccatatttaaaagaagatggaacagtgattgcaagatacagaaaaaatgtgtatgcacatgcctatgtcttatagtgtttagagttttctggggaagactgacctgctccagatttccttatagctttttgtcggttttatcagcatcacctcagctatgtacataatgcaattccatt

SEQ ID NO: 58920 - DNA, 3996 bp, Bovine  19866880522397
  misc_feature (1)..(1): n is a, c, g, or t
natcagtggtcacatgactggaaagattctgttcttatttcaatcccaaagaaccaaagtgccaaaaaatgttcaaacactacaaaattatgcttatttcacatgctagtaaggtaatgttcaaaatcgttcaagctagtcttcagcaatgcgagaactgagaacttcaagatatacaaggtggatttagaaaaggcagaggaatcagagatcaaattgccaacatccactggaccatagaaaaagcaagagaattccagaataaacaaccacttctgcctcattgactactctaaagcctttgactgtgtggatcacaacacattgtggaaaattcttcaagagatgggaatcccggaccactttacctgccttctgaaaaagttggatgcaagttaagaagcaatagttagaaccagacatgaaaaaatggactgattcaaaattgagaaaggagtacatcacgggagtatattgtcaccctgcttatttaactgctatgcagagaacatcaggcaaaatgccaggctggatgaagcacaagctggaatcaagattgctgggagaaatatcagtaacctcagatatgcagatgaaaataccctaatggcagaaaggaaagaggaacaaaagaccctcttgatgaaggtgatagaggagaatgaaaaaactgcttaaaactcaacattcaaaaaatgaagatcatagaatccatctctttattgcaaatagatggggaaaaattggaaacaatggtagattttattttcttgggctccaaaatcactgtggacagtggctacacccatgaaattagactctggctcattggaagaaaagttatgacaaacttagcgtattaaacagcagagatatcactttgccaacaaagatccatatagtcaaagctatgatttttccagtagtcacatacggatgtgagagttggaccataaaagaaggctgagcactgaagaattgaagcttttgaactgtggtgttggagaaggctcttgagagtcccttgaactgcaaagagataaaaccagtcaatcccaaagaaatcaaccctgcatatttattggaagaactgatactcaggctctaatactttggccatcagatgcagagtcgattcattggaaaagaccctgattctgggaaatattgagtgcaggtggagaagagggtgacagatgatgagatggttggatggcatcacctgctcaatggacataagtttaagtaaaccctgagagatagtaaaggataagggagcctggtgtgctgcagtccatagaatcacaaaaatcagacacaacttagcaactgaacaacaacaaatgaatcaccaatgtcagagaaacttaaatgtattcccttatatatttttgatgtatatattattctcttcagtctgaattcttatatttaaagatgttagtattactcttgcaaaattgggctggcattttttactaacagttacatatactatagccacaaaagatgcttatacaaaaagctaaagtgtttaattctgaaggaattataactgatatcaacaactagtctatagcatagctatctggctatagattggcaatagttgctctaaataattcttagaattttcacactgatccataaacaaaatagaactataactatttctaaaattatcactgtattcttgcagggagtaccattctttctactatatcactagtctgaacactagtgctagtaaacctagagtaatctatctgaggaattttacaaagtagatccccagatctcatcttcagagaatctgattctatagatcctcttggacactgtattttcattttaaatgttctctggtgatttgaggtgtactaacacttagaactactattataatagtgtatactttatctagattgagcataaatacacacatattttcttaatgtatcagtaaaatgtctaataacacattttgaaatttctattacagattgctctttgggtgactccaaaatatcatttgagtatattttcttcttaattttgcaactctgaatacattttttaaccttggatgagtgagcagaagaggaagctgaagcggcaaaaaaaaaaggcacttgggactttgtagaattaccatattctataacagctttctcaggaaagataacatgtgctgttgatacactgatgaattagttcatggctttgctgctgatgcctagaaattaaatgaagagttctaagttctggggacactttttggatggaacacgttggtcttccatggaaaatgccatcatctaaagcttgtatttcctaaattattgtgcaaatttattgttgtggaaaaaaatacttaatcaggtatttatttatggtgcttccctggtggctcagatggtagagaatctgtttgcaatgcgggagacccaggttcaatccctaggtcaggaagataccctggagaaggaaatggcaatccactccagcattcttgcctggagaattccatggacagaagaacctagcaggctatagtccatggggttgcaaagagtcaaacatgactgactgactaacacttccacttatgaggaaacagaaaaattaatgaactttttctttgcaaaagtaaggaattccacctgaacaagaatcaaggtaagtctggatcattacactaaaggtattttttccctataaattcaattttcttataaattctcatgaatttagcacaaggtgtatttctagatgttatgttctaaatgaattcttcaaagagtatcactgaattttattatcagaaagaagagaagattatgttatctacaaaaatctttactttattggcaaataaacagaggtttaaacaacctattttattcatagtcataactctagttgttgacattgaaagcagatcatttattgcctggaggaattttatttctaccacttcacttttcctaaactatgttcttaaaaaacacgggtgtctcaaaatatgtcactaagtatttgggaatggggaaggtataaaaatgtgagtaaatttgttttgaatttccataaaaggtaacagtggacagtctttcttaagtgtttaactacatacaattctagtcataatgagtattaaaattttacagaaattcataaaacactttgggaaatcatctttattctttgtggctgaattctgccagcatttctgtgtaattgtccccgtggaggctttggtgttaaatcatgctaacttggtgtaggttttttcctgttactgtttggacagtaatatccaaaacttcactagtgaatagacaagatattgtactagagttcaaagatgtaacactctgccctaaagggctttagtaagtcagaggttcttgggggaatatttttgtagtttcaatttctacacttgattttctgttgcagtctgcaggagctgttacatttgtgtatgagatcaggaactaagcagttacattattgttactactttggaaatttttgaccttggtctatatagaatatgcctacacttgctttaactgtgctaccattacttccatttcctctatttctatttttcatttaatgtgccttaaactacacagataaaaggattatcagaagtccaaagtgttgtattattattacaagcataaaatctcttcagttcatcagtggaagtttgatccattgaccaaaatggtctaaattttttgaagtatgctaccaacatatatctgaggacttataaaaattttgaaggacatatagagaagtgtattctgtcttttgaatgctcaaatgtcagtttctaggattatatgtttagtttctctaaagatattttgaatatagctttcccccttatctcctgagatggataggtttaattatgtctatcaggcttctctctaacagtagtcagacaaatagttaaagttgcttgtttcaaagaca

SEQ ID NO: 58921 - DNA, 2702 bp, Bovine  19866880617601
  misc_feature (1)..(1): n is a, c, g, or t
nacaagtgattgtagcgttttgctaattttggcctacagacatgaaagtgttttcctccttgttcacttatatacagatgttttgatgatgaagttcaccattcgtgctgaagaaaggagagtgcgagaattttcccaagtgtttggtgttaaaaattttcttgtgcagagtctttcaatttcttagtgagatcattccagtgttattaaaaatattaatctaccatgatctttcatgtcttccacaggaatttaaaaaactaattctgttcttcaaaatgtcagaacattggatgctataactcttacttaaatcttcactttaaaacttaaggaattgaaaaatcatttcataagctattttttaaaactcatttccccacatgaatatctttattttccataatattctttccttttatggactaacttctgccaacacactatttgctttcattgtgtataccatgctgtttgagaattttgagcaattgtagatagctatttatgagaattcctacatccttcaccctcaattcattgagggtttcacaatgtcactgctttaccatcctaaaattacattatggcaattcacaagggtcaggagggaggataatgtaatgggtaagaaaatggaccttgaggtttaaaagaccttgagggttagaaatgttggacatcttaggcaaattatttaatgtctctctttcttccttttgtcatctgtaaaaaacaaaaataatgataataatcaatcccattgccatgagattaagtgagatttataagtaaagaatatcacacaggtcagaattcactaaatataagatattaataagatttggtttgtcactaaaaaggtgctagagattttatgcaaaactagattttttttttctgtttgacacgttattttgctttcctagtgtaatttattattttataactaccattataagttattccacaattagtcctcatttctgatgttgtcgctttccagttgcaatgtagaaatagcagtttatcacagtgaaattgttagtcactcatttgtgtccgactcgtttgtgaccccatggattatagcccaccaggctcctctgtccatggaatttcccaagcaagactactagggtaggttgccatttccttctgctgtttctgtcccaacccaggggttgaacctgcatctcctgcattggcaggtgccttccttaccattgagccaccacatgtacaccacatgtgtacatatatacttatctattctttttcatattcttttcccatataggttattacagaatatttagtagagttctttgtgaatatttataggtccttgttggttatctattttatatatagtagggtgtgtatattcggagaaggcaatggcaccccactccagtactcttgcttggagaattccatggacggaggagcctggtgggccgcagtccgtggggtcgctaagagtcggacacgactgagcaacttcactttcacttttcactttcctgcattggaggaggaaatggcaacccactccagtgttcttgcctggagaaccccagggacaggggagcctggtgggctgccgtctttggggtcgcacaaagtcagacacaactgaagcgacttagcagcagcagcaaaattataaattattttcatgggctttcagggtctcttgaaaattattgaaactgtgaatgttaaatccacaatactttcacgacccttatctcagctctaccctttctatgaatctggacaggttacttacctgagtctgttgaactatctgaaaatggccatgtcagcagtacctaccttacggggtaccttactgggcagctgggttgattagataaggaatacgcacagaaagcttagaacagtgtctgaggcacagtgagtgctcaataaatgtcagttaatatcatttgagcctcatgactcagaggtatttcaattcccgtggtttgcaggtacagcatatgccatatagtagaaagaacaatgaacttggaacccaggatctgggttcaggctctggttcatactgactgagcctcgtgagccacctgtcttcgggggccttggtttaatccgtaagatgaggacaatgatgctatttctgtcaacctacattcctgctgtaaactaaagagatcacatacttaaaaaagattctaagtataaaacacaatacaaattaatgtactgtgactatctactgggaggcagcttagagcaatggttacagatgctgagcatagacgcagactgcctgaattcaaatcctgcctctctagaggccagtgaccttgatccaatgacctttcttcattttcctcatgggtaaaactaggataaacagtactggcatcatttaactgctgatggacgaaatgagtggatacatggaaagcacttagaacagtgcccagggtatttgcagtgttcagcacacatcggatgactgatgacatcactactgtggttttggccatcatccccctggtagcagccccactgcctcccggcctgccccttggagagcaggctctttgccttacccgctgccccgcggcccgcccttttcggtgccaatcctccacgagggccaccgcctcctcaccgctctcagggggggcgggcctggacccaggcctgggcctcctggggca

SEQ ID NO: 58922 - DNA, 1366 bp, Bovine  19866880633158
  misc_feature (1)..(1): n is a, c, g, or t
nttctaaattactttttagagtgctggctattaatattttaggtagctttgatgttttactttatagtcttcaattttattttacatttcacaggttctagttgcaaataatcctacaggcaattttctcacactgcaactattccttgaaagatatgctaatgcagcacgacacttgcaatactggggggttaagttaatcacccaaaatgagttgtattactgtcagcagtgtataaagacatcccatagtgaattacaaggaaggctagctttaaagctgcatttcaaaaaacacccaaagctggagatgaacaaaaataagcatttatttcaaagtccattgagctaaagaatcaaacatttgttatttctggtctcaaagttacccaggataaataaagcgattcatagccttttcaaaatttaattaccaggaaaaccctcataaatagcatactccatttctgggcaagacaaacactgcagagcagcttctgtcttcagatttgtctgcagagaaagaaagaaatcactattttcctctgtgtttagctgaaccacacgccagttctaaaatcttggggagcaaattgtgatccgttcctccatcagtgaaagtgatactcatgacaacaccacagtctaaagattactttgccaaaaatcaggaggcagtacattgttgcatgtattcatcaatttctttccactgttcagtttttacttgtgcttttaatgtagtttaaataggagatttaaagacctgccaaatatatgaccctttcaaatctctgaaatccaagccacttgtaatgctattttgtatcaacctcataacagagaaggcacatccagccacttgaatttctcgtctgcaatattccttactttattcttaggagaggttaacaataccttgctcccatgcccagatgcccaatcacactgcatctttattttctatatgccttcatacatacaaaggcaagaacagccatcaccatcaggcttgattctgattggcagcatcgtacgcactgccacagcacttttccatatgggcagcagattaaggactttcaggaagctttaatcctttttgtcagagggtacttttcagttgactggctgctcagaggccaactgaggtagagttgcaagctgcattttaaagcagcagcaagtctgcacttacactgatctagatttctcttttctctcttgcaaaaatattgaaataagatttagttgcagtgttgtgatatgcatttttatgagagaagaaatatattgtgaaaagagcattacttcacttgaaaagatcaagagagcggggaaagaataaaggtttaccaggaacata

SEQ ID NO: 58923 - DNA, 1547 bp, Bovine  19866880711263
  misc_feature (1)..(1): n is a, c, g, or t
ntcaggaaacaattttggctctgaagtatggtttattaaagttgtatgatagtgttaaaattgatggaacttaggacctagccttttccaaaggcctaaagagaagagtaaaacaatgaggcagtttattcttacagatatatcaatgggccagtcaaaacaatcatactctcttaatagagaaaacacctcacaaacttccctaaaaggtaaatagttaatcatttaagtgatttattcaaagaataagcagaaggtatcagggtaaaatcttgatcacatgctttgtgatagatattttgttaagtacttcatttatatcatatctatactccaaagcaatcaggatgttcatttcaagacacgaaatatggaactttatggcaaacagtctctattttcttgagtatttttctgcttatcaagcttagaacatagccaaatgtctcagataaccatctggtaatcattcattgaaaaccctgttttctgtcttggcagaagtagatgtgtgagtaattctcaatcactgtatctcttggacacattccctgtcaattgagataaccccacatgtagcagcagatcttcactagatgaagaaagttaaatcctcaccagaaatttagccatattagtaatctttttttttcaggcaatattctggaattcaaaggaaatcaggtcaatagctgttggtgttaaataacgccaagcttaagaaaaagccaaaagatgtctgagtataccaacttctgtagttcagccattgcagaaatcaagccaggttgcagggcccggggaagggggcagaggggaacatttttttttttctgatataaattctcactaaagtttcagcatgttttgttggcaaatatggcctaaagaactaacttgggagctggattctgaaacaattcttaggtcagaatatgcaatggaattgttacaggttaggataccagaaaaaaatattgtagatatgtactgaagatgatgcaatcacttggtcacatgtgctaacaactatgacatgtattaagcagactttctattttttaaccattataagatgatttttctcctctatggaaaaatgttgatggtatggctgtgtgtacatgcaggctctttttcttctctgctttcctcattagagcttcaaagttaagtaattatgatataagagataatggttaagagcacttatatatgggaacagaaagacaaaggtttgcatccctgttccttggtggctcaaatggtaaagaatctgcctgccaatgcaggagacccaggtttcatccctgggttgggaagataccctagagaagggaatggctaacaactccagtgttcttgcctggagaattccgtggacagaagagtctgatgagctacatacagttcattggggatcacaaagagtaagacacaaatgagcaactaatattttcacactttcacttttttccatctcttaatggctctgtgactttatcaaattgtttcatatttctaacttaatttaccttatttataaa

SEQ ID NO: 58924 - DNA, 1725 bp, Bovine  19866880859507
  misc_feature (1)..(1): n is a, c, g, or t
ncttccatagctggaggtcaataactaatgactaagtctgaagttaagcaataaagtgactatctctgggaagaaaaagcaaggattgtggtgagggaggacaggaaattgatctttttcaaaacaagccttgtggaaatatctgactcttaaacctatgtgatgtgttagtttgatagactcatattaaataggaatctgtttttgaatactgaatcatttccagcctgataccattgtgattttgagattagatgctccatttgttattatttttcagtcgctaagtggtattcaactcttttccaatcacatggactgtaacccagcaggctcgtctgtccatgtgaattctgaggcaagaatattgggtgggttgccatttcctcctccaggggatcttcccccagccaaggatcaaacccaggtctcctgcattacagacagattctttacccctaagcgaccaggaaaacccatcctgttaaatatgtctgttttttaatattaaatagtttcctgcctgataccattgtaatttggagattagttgcacactttgatatttcttattgacacacattcagcaaatgctgtaaatcagcatatcattagtatttatattagcatttctgtgtaggaaattccatgaagaggctgtaaatttcttaattagtctattgcaaaatgaagatttcactgataaagtagtatatttgtgtttggagttgccaaatatgcaactctcttagaggtaacatttcaagaaaaacacagctttcaatgtgagagatcagttttcaagaatagttggcaaatgatctgtaggtcagttttctttaaaagaagattttatggatgcatctaagcatgacaagtaaaatgatgaaggtgtgaaatagctcctattagtaatgggaaaaacacataccctgttttatgtgctaacagttctaatgatctcattgagattcaggaaactatccaataagactatacctttgcaagctatttaatttttttttgcaatctcattggttttccataacttttcttcccacattccagttatgcagcaatggtgcttctagtaccttgtaggaatacaatactgaagctttattttagggttccctgctattgaaataccacattccggtttttaccacattgtagtactacagtctctctacttccacagaacattggaggcctgtaagggctacaaggtgggcattaccattaatcttgatatccaaggctaacctctctctggagtgttgttcattccattctttttccctaaaacttctactgttttccattttgactcttcaactttttcctgtccttaaaggtcaagctcaatactcttttcacccataaatagtaattcactattccagttataaatatcttactattactttgtaaattatttaaaaattgttttgagacttctcatgtcatagtgttgaatgttaattcatgtaatatttcattttcatttctatttgtacttatctactaaaccaaaaggtaagctctttgagggtaaggtgtattcccaacatatttttatatgaccctgtggttcctgcatactgtcaacactggataattttaaaaatttatttagcttcattatttattaatatatgtgccagacacaatctagggacatagtgtgaataaaagagacaaaactaatgctgatgggcattg

SEQ ID NO: 58925 - DNA, 846 bp, Bovine  19866880870879
  misc_feature (1)..(1): n is a, c, g, or t
ncagcaccgtcatttcacaaacatacctacatgagatgggaagaaccaccgctgggttgattattccaaaacatagactctgaatactcaaggctgcttctgtactattttcaggatcagtgatttcaatattatgtgatctgaaattccttcctgccggaatctaactttccctttcagaagattctgtttctccacccacactaaatgacatttccttccttcaccaagagctgtacagctgttacgggctgtcatgttagatgtcatgggcctctagcatttgcctcccacccttcctgcggttacctggtgaatgtggagaacaacataattctcttagtctttcataaaggctcaagtgacaaatgaatttttctattcctgctgctctctaaactttgggaagtatcaagtgaaccattagccatttcatgatattcaacttgggtaaccagactgggagcagttgcaatttaatgccgttttaaatgtatagttataggttacactgtttctagttatattacagttttctaccatagtttcatttcattgtgctgttaataaatcattttatattaatcacattataataacttttacatttccattattgttttttatttctttttataatggttgtaaaattaatgagatctttgacactgtcttgggaagtcagtaaggttcccgaatggccctctgcaaacttgtcattatgcataccttgcccaagtcatatttgaacatttcctgaacacgtaagagtggacaatgggttactcagtcacttcaacatgtttttttatctgtaaattatatagaatatataaatctagcaat

SEQ ID NO: 58926 - DNA, 1126 bp, Bovine  19866880881218
  misc_feature (1)..(1): n is a, c, g, or t
ntgcctctttattgtgaatgtcaccttacagttgaaacgagtttatgggacactgcttttccctggtgttcttcactcagtggagaactggagaacctctttctcagacactgtgaatccactagctttcatcagtttgaaatgcatttaaaatcaacatcagtctggttgcaaaatttatagtaactccagctgtccatatattaactctatatgtccaagactcatagtcctgtgagtacatatgccaattacatatgataaaacaagaaatgaacaaaaacaattatttcttgataactatgtttgagaaaagagatgaagatgcagaattaaaataattctaatcagtgtcatagagtaaaacaactgggtatattatcatgaatgtaaagaaagtatatacatatagaagctttatgttgctgcacatgccaaagtgaaactattaaattttgatatcttccctgaagaatgctgaaaatctttcattttcttgtgtttgatatttctgaaaccatcttttctcacatctgagtttggttagttactatttcaaacattattatactgaaactgttattatactgaaaattcaaataaaatgattttgctttggtctcagattgcacacaagattctccaattattaatgaagaagactcgattttttccatattgaagccagtctctttaatgcttcaggactaagccacaaatattttctggttttaattgcatgttactaatgtcatcaaagacggtatatttttggtttttcattatttccctgattggcaattacttgcccggaagtggtaagtacttcatgacgtagtgcttataaaccatctgcatgaatgtataattttgctgaatatggttttgctacattggcagatgggaacacaacttgatggcctaataatgtcctttcccttgttggcattgctggagaaagttgtagacaattttggttgtgctgaaagatgctttaatattgtctaaattagagggagaatcaagtgctggttgtaaccataaaagggaatgaagagagagcaaaaataaataaataaataaattgggagaaacaagaaaagggagatgtgctatcacacatctc

SEQ ID NO: 58927 - DNA, 1102 bp, Bovine  19866880924548
  misc_feature (1)..(1): n is a, c, g, or t
ncctgcagtgattttggagccccccaaaaaaatctgtcctgtttccattgtttccctatctatttgccacgaagtgatgggaccggatgccatgatcttcgttttctgaatgttgagctttaagccaactttttcactctcctttttcactttcatcaagaggctctttagttcttcttcactttctgccataagggtggtgtcatctgcatatctgaaattattgatatttctcccagcaatcttgattccagcttgtgcttcatccagtccagcatttctcatgatgtattctgcatataagttaaataagcagggtgacaatatacaggctttgccatactcctttcccaatttggaaccagtctgttgtcctatgtccagttctaactgttgcttcttgacctgcatacaggtttctcaagaggcaagtatggtggtctggtattcccatctctctctttcttaagtcaagaagtcacgacaaaaatcttgctttaagatttaagaaaaattgataatggtctgcttattgctacaggataagaacttttcaatattcatttcattgagcaccatattttctcattaagcagagaaaatacttctcaattttagttttatctgaattatatatatatatatatatatatatatatgcattttattcaacaggaagaagtcatagctcttgctcttttttcttcatataaaaattttgaattttagagagaaaactttaccatttatactgccatctctgtcaaagatatcacttgtctactaaaagaacacatacaagatggaggaatctcttctgtaagaccaaatgataacttaagtactattgtctctgcctttgacgatctgtatgtgtggaacaaatgagggctttaggaactgctcactctacttttgttcagttacagctgattttagggttgtctaaatcctgagagatttgcttttctcatatatcacaaagtactgtcaattcatataaatatacatctttgttgggggacctggtggctcaaatggtaaaagcatctgcctacaatgcaggagacctgggttcaatccctgggtggaaatatccctg

SEQ ID NO: 58928 - DNA, 2612 bp, Bovine  19866880926264
  misc_feature (1)..(1): n is a, c, g, or t
ncccagttgcactctgggcatcaaacaatagctattatgaaaaacataactagcacacatacaagagctcaaatttcacaaaacccacactttggatacttttatgaatcaaatctataaatatttagaggcttccctggcactaatcaccatcaatgctttcattgcaaggcaatacacaccaggaattttcatgagaggtatcatgaataggacagatgcctttgttcataaatcaggtagtgacctcaatcattaataaacaaatcagagccagagcagcaagagactgtaaagagtaatttggtaaggaattgaataaatttattcaacacaaatagtcaaaacaaagaatttatccttaatcctgccatgctaatggcttctgttaaaatgaaaatgattaaatcaaatttggctttaatttgttgtggctagattcagtttttcccaatgtgataaattactgtgagagcaagtcaaataatgtgaaatttactatcagcctgctcttgcatgaaagtgaaatgaaacaagaaacaattgaagagttatttagcatatagttcactgaattcaagaaggaaaacatattcttaaaacctaacatacctttactcttatttctctgttgttaaagaaagaattacttttacatcaagatgggtaatcttccatgccatggcttgctgggagcttcttggagcaaaccatatctgtgatctggacaatctttcaacttcacagcatcacagaatacttcttctgtgagacatgccaaaaatagtttgtgccaaccttctcagtttgtaaaccaggaaaatgaggccctgaaaaatccaacaacctcttcaacttccacttgggtcagagccagaagttgctttatgttctgtctggtccacatgggaaaactgtgtgtgtcagtcacttagtcacgtccaattctttgtgaccctatggactacagcccgcctggctcctcagttcatggtattctccaggcaagaatatcggagtgggtagccattcctttctctaggggatcttcctgacccacgaatcgaacctagtctcctgcattgcaggcagattctttactgtctgagccaccagggaagccccaaatgggaaagagagatagaaaacaggtggagagagtaagtagagaagagctgggttatctaaagttctcttctctctagttaagtaggtattaacttagtcttcagctacctaaagactctgtactaacttctatttcttcattattttaaaagttgtactaggatagaataatttggacttatgaactttatatatttttgaagaaattatttcaatgagtttgtctgtttttgccctttcaaactttcaaagaaattagtgggcaacatctgtctctttccatcaggaacagcaacaacaaaaaagtgggagtgtaattgaaaattgtgggaagagaaagctgaagtacctgtgagcatagcagaaggaaaggccacagcgggtgatgaagtgtcacagtagaaaggaggagaaagataatcagaatgactcagaaattttcacttggtatcgaaacagaatgtggtaaatttcatccgtcataaggaagcaggcctactagacactggcaaaaggtatttaaggagtcactctccaaagaaaactatttttataagtagaaatcaatgggtgcattccccccaccaataccgcctgccactgaatttgtggttttgcatttcacctgaagtggctgattaaatcactgacacttggagcagaatagggacttgtaatctttacagtgcgctgccctaatcaagtcagcaactgtgcaagggacagcaagacccgaatatctgtgctgacagcactaagtggagtagaaagagatgtattctatatctgaagctactctggtgccaggtaagggttatgtcagcctaagagtaaagtcaatacgagaaggcttgtcaaaggtcagggctttaatcgtgagaagtaaagatgatttgctcatactcactgtgccaacccttgccaagagcccttttttcccagctcttactcaaaatatgaactaaaaagaactgagggaaaggctagaagaggaaataaagagtctagattgacagcttagtgtcctggatagtgtaagctttgctcaaatgtatgagctggtgatacaggaagagccaataacagagcatgggtcctgtgtcttcatcgggggcccttctgattatggcagaagctctaatctttgcattggacatgtaagcttaattcttacatgtccatgtgcgtctttcttgaactcatccagaaaatccgtattaggttaaactcacagttaagaaatctccaaacaatagtttgtagaaactgggtgaacaggcttatcaacagcatgtgcacagctttcttcatctgaaatagtttagctccccagatattctcagttcttgaaacctgctcaaaactcactgtccatcacattcattttgacagtaacatatctttacattattcagtgtcaagcaacatgaatacatctttccttctctctctctttctttctttctactggtggttacaaggaa

SEQ ID NO: 58929 - DNA, 1850 bp, Bovine  19866880945405
  misc_feature (1)..(1): n is a, c, g, or t
ncaataaagagaccttgaggtttgagcagggaagtgaccattatctgagatatgtttcaggatgattacatcgaacagcagggtgctagatggattagaccagaggagacactgaagagagatccaaaaagacagtgaatcacacaagacatcaacgcatgaagaaaaatcaggatgagagaataaaacacttttgagtcacatccttagggattatagtcgaaggcttgcaaaggatgagtccactaaaaggaacagtggtagatccttaaagaaaattttcatttagaaaaattaatgggtaaagagaagccagagaaaagagaaggaagcaaccgccaaaagtaggtgtagtaataagagatgatatcaagtggacttttgctgtcctctttggggttgtcattgtgaattctagatttaatttttgatactcctgaaggttctagaagaacagggacgcatcctagagcaatggctacataagttgattttttttctccacccagtaaacattgcttttaaaacagtactgctttgctattcacaggtggtaaacttcagatcaagcaactgacagagctctgattaagatattttgtctttatcttttgccagctcccatcctctatcaagcttctgggaaggaggcagttgtggataagcagttttggtgtcgtccagagctttggtctaaatgtttatgatgtgctgctatagaagaggaagtgaaaagaacagctggctttattcagttgagattgaaaaggcttttaatgaaaagtttaaattactcttccatcttttaaaaaatgctttgtcagtagccctacaaatgatgaactcagtagcattttggattatgtaaaatataattctttaagttttaagaaacatattttcaagtaacttttttctcttgtgccaaacctgttttctggaattgtatcaattccatgctatattaaataaatcaccattgtctaaaaggcaacaagttttcatataaagtgatgttaaaaatattaatcatatttatcaacaataagcaaatgtttaacactgcaagtaaagaaacaaaagataatcaggggagatggggaagcaacctgtatcacacatggaattctctaattatttttccatttgctaccacctaaatttgatacattatatgctatgattaaggctaagcttgtaaacagaacctaggaaaaaaaggaagcttctattttgatgtcactttctcccttatcctttctggtaatttgaaaagtatagttgccaaaaagatttttgtatatatacccactagaaattggaacatgatcaataattctcataagacctaaacatcttattcactgcattgttcagacgctcagttgattgtatttgatgatgagtgaatatttatttttctatcaatgtgaatagttttgttaatcaagtaattttataggttaattatatcctgaaaattaggaaatcacaaaaatggttgacattacaattgcaagagtgactcagtgtagaaaaaatttaaatccattctttattctggatatgcagcaaggtaaaatgaacatcatttaaataaatgtggcaatattccttttttaacatagagtgccttgcaatctttcttgcttgcttactctcatacattcaaccaatatttattaagcaactactttatcccaggcatgcttatagatactggagaatacaaagcttaattataatacaatttcctctctccatgtgattagataatccatcaagggaagcaaacatttatacaactaactccaatacaatgtgataagtattgcaataacttacatctg

SEQ ID NO: 58930 - DNA, 1774 bp, Bovine  19866880962402
  misc_feature (1)..(1): n is a, c, g, or t
naagtatggaacaaaaaaagcataaagtagattttaagacttaattcaggtatttaaagtactaatcagaataaccgattccccatagctgagaatgataagctactgtactccagaaaataccaagctttctgtttccacagtctttgtcattgggcaacaggtttgtatattctatatcttttaaagaacgatgttgacgttatgtttagaatgagagctatatttgagttcctcacttaatgtttgtagctatgaagacttagataataattttccttatttttaccgcatttttcttattattaataatatatccacaaatatctaaatggcaaaatgtcacataaagttatcaaaatgaatatattattgtctggctcctagagttttattttttactttctaatacattttaattgcttctataatatcttgcattcatttacaggaaatagcgaccataaaatgtacaaaaattaatcttagatcagacaactttttggcatgcaaaaaatgtaattgacagattttagaattgtgaaattaagtaaattattctgataatgaaaatatgtagtctaattatctatctcaaaactgatagagaagaaatcatcttaagtctttcatagagaatagccattttagcttgtgtgtaacttcaacggacatttaaaaaatatgcttagaatctagaggatactgttttctcaaattaatactgttttctcaaattaaaactttctttttaaaggtgaaatttcagttttcaattatttgtagatcaaatagagtttttagtatgcaatggaaaacagtttcaagttgtcctctcatatgcggttctcaaattattgctaatcagaaggatcctatgcttgtcagtatcttattttaagattttattgtgtatcttaggagatcgactgagagaaaatgaagtgacaaatattaaccttgttataacatatttgtgttatatgtgtttaacactactaacatatgctattacatataacatatataataacatatatgtgtatatatatatgtatatcctattgcttttccaaaggtaatggagtctgaaacaaattccaaatttctcaaattttatgtccaatcatttctttccatactatcattgtactaagtgtgtgtttttaaaattctatcaagtcatattgctatttggttttcatgtccttgttataatttacatattgatcagacatctaaaattcttcaaaattaaaggtgaaaattaagagactataatacaggatttataattttccaacagaaaatatgggctagtaataggattattgcagaattatttgacttttaagtataaggcaacttaggctattttgaggaaaactacttttcactattatttccttcattatacaaactgaataatctgaacaaagagttaaagcacatggccattgaattttaaactggattaaatcttattattggttataaaatagtaaagcttttgaaagatagcaaccttgctatctataatatgcccgtgattttaaaaaaattgacaaataaaatgttaattataaaacttggttgtagtagatacgttaattattatgacatgaattggataccagcaggagctgggataattgatgtcagatgaatgtggaaactccctagaatgagctcagtcccagaagaagtgacgattggaaaaatagaaaagctgttgtgatgcatgtacttgtcccttgatgaaagccgattaatt

SEQ ID NO: 58931 - DNA, 1503 bp, Bovine  19866880967990
  misc_feature (1)..(1): n is a, c, g, or t
ncagcataaagaatttaaggctgcatgtcattcatgcagaaaaggtgtgatggatcctaggatgcttccaaacagataaaatgatagaacaaaatgcttaaagttcaaaagcaataacaacaaccaacaaaacaactttggaaactgattggcccaattagcatagctatattgattaaattcactcagtaattccaaataacctgattatacacagtagcaagcatttgtagacaaacatcttaaaaactcaaaaggttaaaatagagttttcaaagagggaggaatggtaagtatctatccaacatatcagaaatattccccataagagaatggtttctaactgtggtctaacctgtttaagagaataaaatcagccacagctattctcattttaaaagacacgagcttagttgcttaatgctcattactctatatagaaatccatttctctctttgctgtctctttaggaaaccttttttaataatgctcagtaaattaggcctccatagacttggctttatcccaccctgccagtttcttttcctttttgtatctctgtaaaatatctgcttagagtctctgatttgaaatgttaattaaggtgggcctggcctcaggttacagtgtacatccctttttacatgcaaaggagatatgctaactaggttactaagaatctgggggccaagagggagtcatccagaagacaacaaaagtccaagaagaatggggcacttcccagcatctctcaggaagcaatcggtaagagagtgttggctgaaatcagttatctggcacacaggagggtctgatgttgatttgggccattcttttttcttttgtgatctcttaatgttgagtttatatccagttaatacagatatagtatgattatatatgtgagttatcttatctactgattttaaacagataaataacattaaatctacttgaattcaagacaaagatcccaagattttaaggtttctgagtgggatattcatttcaaattttctggccacctgaaaacctaaacatgatgcctactttgcactgaaaagagaatatctgttttcctgtgtgtgttgtgagagtgagcgtgtgggcatgaatgagtatgtgagaaaatagtgtgtatgggagtgtgaatgcctttcatatacagctcttccagcaagtgagagttagaaaggcaaaatctacatttgaaagcaaggacactgtagatgttaactttaaatcatctaagatgtaacacaaagaaataaattaatattgttgtgtaaaaagtaccctaaattagcctccagagacatgaattgcaaaataaatgcaaaagttacacctttaattactgtggtggaacctttgagattttgagacatttatttgtataaatcaatttcatagttattatggaaagtttttcaaactcttttgattataatgttgcagatgagaaatgttagtttcattattctcacacttgagatatataa

SEQ ID NO: 58932 - DNA, 1165 bp, Bovine  19866881001392
  misc_feature (1)..(1): n is a, c, g, or t
ntgtccccacaaatgaattactatgatttattgttcccatgagaattttaaaagcactgctcaatattttttataaatgcttaaaatgctctcgacaaaatgaatattattatgttgccttgagattaactgtagataaaaatgcatatctagttcttttaggttataatacaatttagtttctgaacttatcaagtcaaagaatagtagatactctatacaagatttagactcttgtcttccttttggtaaatagtaccagtgaagttataatttcaaaaaaagcaaagtacacccaattttgatattattttaagacattctttgaaagtaagttccaaaggttttcttttttcaagctgttccctgaaattgggcactgattttaggattgactagaataaattatgaaagtggtattttagatacataaatacaaaaaaatcattaaatttctttccactatctttttttctgagaaatatatttaagatatttttaaattctgtgtattggtcaataatgtgcacctttacaaaaaaaaaaaaaatacgagagagagagagagaaggaatgggaaaagggaggaagacgttgtcttcagggaaagcttaagttttaccctgcttctaaacctccaatgcagctgattcaattgtcttgtctccaaacactgaagcatcttgcaggagttctaatttttaacttaaatgtttatgtataaacactacatctatatagtcatcaattccttttttacagattaatcacaataagttttgcatgtaattaataatgacataatttttaaacagttacaaccttaaaaccaggaagaggtaataatctgggaaaaccaggtataaaaaggaagcatctgaggagtggttttctggggcagctctttggtttcttgctggagtaaatggaagtgtatgattaatgaaatcttagatttttaaaacaaagtgactagctagataactgtcttaagtcttttacccaaaggggtaaacttaccaataggttctctttacactgtcagagaatacctccattctcaaatgtattaatatgtgggcataattttaaaattttatggattaatgcaaacagggacaataaattaagcaaacttaaaagtgaaatacttccttttatccct

SEQ ID NO: 58933 - DNA, 1435 bp, Bovine  19866881078313
  misc_feature (1)..(1): n is a, c, g, or t
ntcacctataacaggtggtccccaagtggccgtccatcttcccttgtggtctctactgtgaattgtaaatcatgtcaggaagtgacagcctgttaggcaatgtgatctatcatcattgcgagacaccagtcacaacatgcatagacttgatccatcctatgtgcaagtaatggatttggtcaaaagactgccatttcacattttggaaaacatgaactgatgtgagttcataaatgaaatattttaacctgtgatttcatgtagatgtcactgtgtcatcacccctggaattcagctgccaaaataaggatgaaaaagtagttcatgtcagtttggatggcagtgccccataaatactgactctgaatccctagtatctatagatatattcattcattattccacaaatattttgaggatttacttagtgtcaaacactaggtctaaagaaaccaaaagtaataataatggtaaactcagagtctaagaaggggtgtgtgtgtgctcagtcactgagtcatatttgacactttgagaccccatggactgtagcccaccaggctcctctgtccatgggattttccaggcaggagtactggagtgggttgccatttcttccttcaagggatcttcctcacacaggaaaagaagcaatctcataaataaatagctatataaatgtatgttgttcagtaattaggaggtattatatgagtattagagaataattttctgagtttagggagttggaaggatagcatggaaatcaaggtacgtttctttgcagataggtgaatgcatgcctggtatgggagttagtgaggagtggcatttcatgtataggaggaaatgagcaaaggcttaggctcaagaaacagcctaaaaggtgaaaggaactatcagcagtaccacaatgagatactaggagagaggcaggcaagagacaagagtaaagaatatcctgtgaataacatataggaacctagactagatcctgaggtcaggatattctccagagtttcttgttgaattttgtatttttttagatagttttccattttttttttaatttctcaagtgactttgttttatcttcttcaaaaaaaattcaccatattcctttttattttatgctttttctttaactataatttttttttaaggttcagagtaaacttaaagaaggctgagtctcaaagaattgttgcttttgaactgtggaggtggagaaaactcttgagagtcccttggactgcaaggatatcagaccagtcaatcctaaaggaaatcaaccctgaatattcattgggaggacttatgctaaagctgaagctccagtactttggccacctgatgtgaagagccaacccattggaaaagaccctgatgctgggaaagatagaagggaggagaaggggatgtcagaggactagat

SEQ ID NO: 58934 - DNA, 1525 bp, Bovine  19866881101153
  misc_feature (1)..(1): n is a, c, g, or t
ntactggaatttcagcttcatcatcagtccttccaatgattattcaagactgatttcccttagaatggactggttaggtaactcaggcctaagcaatcactgcatgactttccatggttccagggagaaatggaggctaaagggatggttcaaaacccaagactttctccttgcatgttagcactggggcactctttctgaaggatatggttacagaagcctgaactgctccagccattttgctatcatgaaagaagtgatcctgcagatgcagctggcacattacagagggcagaagtgagagaattacacaaaaatagtaccaaagcctcttctaactatggtttctacagtgataacatgtattacaaatatcatttgaacgtaggattttttatttctatcctctattaaaccaagttaaaaaaaaattttttaacaggattactaagaagataaatgaagatgttgtagatgcagaaaaacttttggcaaagcctctcacaaaacttaaaattcctttggaaacatacggtttgaatgaataatcaactaaatgccagtctccaatgccatgtcacaaggtacctggatgttcagcattcatacaatcaactggagagaagaaatagaaagtaggcttagtgaatctctaaatttgagagcagtagataatatgtttgatgagtaaatcataattttacatgatctctatggtctagaatgaataaaaaagataaatttacacatatgaatattttcacattaaaagttgtttaaataacaatggagaagactcttgagagtcccttggactgcaaggagatccaaccagtctattctgaagatcagccctgggatttctttggaaggaatgctgctaaagctgaaactccagtactttggccacctcatgcgaagagttgactcattggaaaagactctgatgctgggagggattgggggcaggaggagaaggggacgacagaggatgagatggctggatggcatcactgactcgatggacatgagtctgggtgaactccagaagttggtgatggacagagaggcctggtatgctgcgattcatggggtaacaaagagtcggacacaactgagtgactgaactgaactgaagtaacagtggatgggtggggagaaagactaagtcaatgaaaaagtcttggggttaagttggctaccaactttatagaaactcataaagtaatatgatatcgatattttaaaacctaagacattttaaagttttgattaacagaagcataatgcctacagcaagaaaacaaagatcaattctgctttttctgtggttagataatataggaagaggcttcaaaggtgtctcagtggtaaagaatccacctaccaattcaggagactcaggttctatccctgagttggtaagatttcttagagaaggaaatggcaactgactccagtattcctgcctgggaaatcccatagacagaggagacggtggctacagtctaggggagcaaaagag

SEQ ID NO: 58935 - DNA, 580 bp, Bovine  19866881171511
  misc_feature (1)..(1): n is a, c, g, or t
natgtatctgtgtacactaatggaatacctgacaatgcaagcaattcattctcaaatcactctttgaaagggcagaagccacagatttgaaaccaaatgagtctgtcacattctttcttttttgaatttttattttatattgtagtatagttgatgaacaatgttgtatttgtttcaggtgtatagagtcacattactattttgtttggctttatctaccaaaaactggataattctaataaaaagtattcaccttagggcctaaaattatactcttaaaattaacaggataattacccactttgtatttctgttttactccaaagacacaacctttgtcttccaattcccacaaagaaatgctaagaatttgatagagaaaaaatgtatcaggttgaaagctccctacattcccatgggtcccagcatctaaaagccagattgagaaccaggggtccggctctgcaaaagccatttaatgcctcttttcattggtgattcatatacacttacataagagtgctattagacatgaagttttaacctgacggttgatgtaaatctgtagaattagtttagt

SEQ ID NO: 58936 - DNA, 718 bp, Bovine  19866881224846
  misc_feature (1)..(1): n is a, c, g, or t
ntatagtataaaattgtataaaagtattacggtattacaccactacctacatcaataaaatgccagtttgacatattataaagaaaaatcagttacacttcaataagcccaactctctaggaagaaaaggaagagagaggtatatagtatggctcatccacaacaagtcatcagagaccatagaaccacataattctactctgccacagcagtctttatttcaaaaggagtggtttccagcacaaggaaacatgcttccttagatgctacacttcaacagtgtgctgagacaggtaactctaagaaaaaagtagtgaaattaaaatgagaccatgtctttcatataattttcttctcctatcccaatcttgtctgcccatacatctgaaatcttacttatatttaaatattcataataagcttttgcttagataataaaaacagccttttttgggaagcctctgtgactgccaacatttgatcattaaataactaaaatgcggggtctttccatcttgatttacagtatctgaagtgcatgcagagatgccaactgcaaatttaatattcatcaaggccctggaagaataacgagataaaaataatcagacaactgtatataaactataaatctgcttcctgctttctctctttctattggaagtttcataagagaacccaggatcttgtgggggcatatctctgaccttttgaagtt

SEQ ID NO: 58937 - DNA, 1435 bp, Bovine  19866881258604
  misc_feature (1)..(1): n is a, c, g, or t
nacctcttgaaatcctaacgtggagaatacttccacacaaatggccttgctattatttttaaaaatcccctgtaatatcaaccaaaatccagaagaagaaattttgcaatctatagccaattcacacttgccctggatagtaattatagaaaacttatgacttttcccatttgtaaaggctgaagcttttgaggaaataagtagattccaaatgtcaagcactcaacagagccttctcctccactaaagaggcagctgcagctgtgtctaaggatgggaaagtttctgatattagaaaagggatttactctgtccaagcttgaattgacttagggggcaaagagtcatttgttcagtgtccttctctgaaagaaagagaacattttgaccatatttctgccaaacttttttattctctagtctgaccctgtttctggacactcagctaaagaaaagcaagttgataaagacattaattgtatttttcctatttttttgactcataagtgtaatgaaaatcattctctagaaaaatatcttcttcactaaaggcatcacagaggtttgaaaaaaatatcatgctaatctgatgatcataatactaaattaaccagtattgacaatgcaaacactaagtgaattcacctctcctcccctctttacttgccttgtttctcctttctttgccttcctttttcattttcctttctcttctctttcctctgcccttctgtctatcttcctcctaataaaggaacattacatgattcaagttaaaactcatcatcatcatcataaattgattcaacatcattaagtacaatcatgtggcattatcatcatcattatctcgggcggtggagatgccaaagcatgttcctcccctcctctctttctttcccacagcttccaagataagaggatctttattctcaccatcaaactccctatttctgaacacaagcaaaaagattattttctctttccttctccctttccccaatactatacactgccaatgtaatttctatagtttcttccctttatttgttttaccagtaattatttagagctctttaactgaggagaaattggcaagaaaatttggcattggaccgcattttagatttcactcaatggtgtaaagatgtggaaatgagttcctgtgaagtaccaatgaactgcatttttctattaactatttaagcaagcatgcaagattattacttcaaagcttcatctactgcaattacgtctaagtatgccttcactgggaagatcctagatgtgatgtccaagggtcatttccaagttacaatcatgcctcactttccatagcaaaataaaatacagtcacagctcactgaaggagaggatgtgtccatcgcagggttacagtgcaagtcgagagatcttctttcagacaaatagctta

SEQ ID NO: 58938 - DNA, 1978 bp, Bovine  19866881292750
  misc_feature (1)..(1): n is a, c, g, or t
ntatggtgtccatggctatttctgaatctacccttcatttttgagacagggaaccttgtagactggccaaaagaaagctcatatagatacacagacctacttcctgccatgcacccttcccttaccctaaaattagaaaagcgagcaagagtggtgtctgtatcatgtctgctatactgacataagggaagtctgcaacatcatacacaaatactttcttataacttttaatctctctcctttcaggtaattaagataaagcttatatattcaaatactcatacctgaaaattgatactacatctttttattaagtacaaattgacaattatatttataaaatatgagagtatgattgaccacatattcatttttgaacaggaataagtcagctatatcaattagcacatgtccacaagtttgaagcattaaagaaatactgaagctttgaaaatgcaaggcagttacaaaatgctaactctgactcaggacacctaacttaaagaaaccatggctttggaatcagacagttccctcttctgccgttttctctctttgtgacgtcaaataaatcactaaattgtctggtctatagtttcattattggaaataatgaaatattggaaataaaggaaatagcaaccactccagtatttttgccaggataatcccatggatagaggagcctggcaggccacaacctatggggtcacaaagagttggacttgactaagcactcacacgtagattcattatcatcaacagaagagtattgtattaatttcaaatgtatggcaaagtgtttcagttatacacacacacacaaataaatatatatatatattctttttaaaattcttttccattataggttattacaaaatattgaatatggttgtctgtgctatgcagaaaatctttattgtttacaaagttggctttaaaacagacaaacaaaaacacaactacaacaataacaaactttggttaagatcaagcccaccccaaatctttagggtattatcacactcatcctttagttcttctaatatcacctgaatagaagctataataaactccagtcacaaactcctatcattagaagtctctcatctcctcacttctaatgaagtctgttcttcagtctcattattacccctcccctccccatcccttgatagctcactattgtctcagttcatcaatccctttcctggcctcatttgcttgcctaaccagccttgacactagggtcagccactttattagattttcacactctcttgccccagagctgccattccaatccccaggaatgggtaaatgccatcatttgccttctcagctcccagtcccaggctgccaaatattgcctaagaaaatcacaaagccaggttgactggttccactacagttccaagctctcaaagtaagttgggcctgcactgctgtttgatggtactggttctcgtcaatgatttacagtcctctgtattctctgtagtgtcaattccaagatttcttatgtaatttcttctagttctcttggtttctagagaaattcaaggtcaaagcttgattcctcctctttccttctctccactaaaaatctcaacttttcatgctgatctcataaggaagtactcccatctcccatattaactttttccctaagactttatcatatcattcatctacatatccccataacgaggggcttccctggtggctcagtggtaaggaatccacctgcaatgcaggagacaaggatttggtccctggatcaggaagatcccctggagaagggaatggcaacccatgcccatattcttgcctggagaatcccatggacagaggagcctggtgggctacagtccatagggttgcaaagtcaaacacaactgaagcaactttacatgcatgcaggcccccaaacaagttttttcctggcctaagcatttccttgattttttatttt

SEQ ID NO: 58939 - DNA, 742 bp, Bovine  19866881310137
  misc_feature (1)..(1): n is a, c, g, or t
nacacacttttgttttaaacacacatgaaaatttgtggtaaaatgcattttaattagtgacaaagacaagtacttaccaatatgcaacctgaaagaccatgtaaatcaaatgaaatactttaatggcttaaagaacaatttaatacagtttgccttacctttttggttaatatgtgtattatgtatgtgtttcctaaaatgtatgattaaaggagaaagtctaaggagacttcattttcatacacatagtgaataggaacaagagaaaattttcaggcaatgtatttggaaagtgtcttgctttttcaaatagaaactattggtttagaatatctctgtagcattctcaattgatttattcatttgtagggaattttggaaaaatacattttcttttaaggaaaaccagttctaccaaaacatccaaatgtattcactgatcttacaaataaagttaagacagaaataaaacagtaatttgagaaagggctattgataatttggaaataagatcagtataagtattgaggatagagtaaaacatttagaagccaaatggtactttaagagattctttgaaaagttaaacaaatacctcttttacaaactttaaatatataatttacatagagatgagagctatcacttgctttcctctggatgcctcttcttaattcatatagaattaaactaaagcctcaagttcagtttaatactagtctaaataaaacataacagaaat

SEQ ID NO: 58940 - DNA, 1355 bp, Bovine  19866881310766
  misc_feature (1)..(1): n is a, c, g, or t
ngatatgttctctgtgcctttataattcaaataatagagggtatagataaaaaaagattagaaatcagaattattggtaattatctttatttgatttacagcatctatgttcagagttcagaaatataataccaggtctcatttaatgtaaaagttaacatcttggagttttagaaattcctataacgacacaactttggaaaagattcctcatgacaccctgaaaacaaaaagtgaaatagagcagaataaattaatgagacaaatcttcatccttttaaagggtcaattctatttcatagaaagttgacaggctttagaatatgcttttatttttagtcatttcgtttatgaaatagatcttattggtcaacagaacaataacaataagaatcagtaaatgaaaaagaaacctattcttttcttaatgttatcttagggcaatcagctattttcagggactggttttgtagtaacagctactacttataccagtgatgagacagtgaaaacccaaatttagaacattcacattgaagttcagtgatgagacagtacctgtccaatataattttcatacctatgcacccagacagggatttgctttttttagtttttatgctatagaacaatggtgaaactgttataaaaagctcctgctcctacttctgaggtagctgtgctgaagttaaaaagttagctttagaactctaagggagttttgaaatttagttctgacactattaacagtttggcattgagaaaggcatttaaccatttaattcctgttatgttatttgtaaaatgagaaacttttggaaagagaaactaaaatttaataagaatgtctttttttctggacacaatatcaggaattcttcatacatcattatatgcaatttacacagtaatccaagagttatgtgtgattattctcaacttacagatttagaaattagtacttccagaagttaagaaccaagtttaaggtggtattgctactaagagtttacatccaaggtgtagtctatctctaaaactatgctcttttctctgtgtctattgtcattatttcagcaactaaaactatatggtgttcaaaatgctgtaatctgtcttcaaatatattttctgataaaatggtgtataacatcagatcagatcagtcactcagtcgtgtccgactctttgcgaccccatgaatcgcagcacgccaggcctccctgtccagcaccaactcctggagttcactcagactcatgtccatcgagtcagtgatgccatccagccatctcatcctctggcgtccccttctcctcctgcccccaatccttcccagcatcagaatcttttcc

SEQ ID NO: 58941 - DNA, 1277 bp, Bovine  19866881490075
  misc_feature (1)..(1): n is a, c, g, or t
ncactacttgcgtaagaagctagcaaaatatcaaatgctatttttgcccatgttggagcacatattcttgaaaaaacacaaaatcccactataaggcacatattcatttataatttggaacacaagtgatgatgtacactactgagaggttttctaatttatgtatagaaaaatatttctttttcaagggacaaaattaagagaattctacacgagagatgatgaaggagatgaatagtgagggagactggttgagaaagacatgaacttctaagtaaattgaggatctcaacacacctgaacatttccttcttttagaatgtcctttaacttatacgatgagaccaaatataatgaccaaaaaataaaagtcaaagaaagaagcctcaaagtctcaatgatagagttgctttccactgaatataaagtaaggtaagtgaaaataatttcctaaaactatttgaaatgtagcatatatgagatgtcttgttccagctgagtggctaaaatgaaaaccatacagagcagaataacaaaacaatcaaggaaaaaaaggatcgatatgctatcccaaattaaaaatatatgacacattaattgcaattacactagtcatagtcccttctttataagatttcattgccttactaaattcccctagtatattgtgtaatgagggaaaatacaaaacacttttaaattataaagaagaggttaatttttgtttctagaactgtggacagcatacatttgaaatatttagaatgatttacaactgcttaattattctcctaatatcccatggagtactgggattgtaggttgaaactgagaaagggaaatttaaggcacttcctgacataggaacatttcaggttacaagaatagtcttgcagaaaaagtgagtgatagaagcttagtcaccagggacatacaaaagccaacagtactaaaatattagaaggtttattttgggaagcagttttcccctgttggggtggatatgtggactggattgcttacttgatctttcctcatctctattgtctattttcatgccttcatttgagtacataaggcaacatccttaacatttgagattgcatctgatgctgcccaactgtagcaattacatttttccactcctccaaaatgaaaaaaaaaaataaattaatgctgcactcttctgtcttgatagctgtccagttaccatcatttacctgatgctcaaagcccttaaaattacaaaataatttataattctctgatcaaacaca

SEQ ID NO: 58942 - DNA, 1310 bp, Bovine  19866881510135
  misc_feature (1)..(1): n is a, c, g, or t
nttgaaagttctctcttggtccctttctaatgtcttttaaaagcagagtggttatttgagactgtaagcgaccatgacacttacagtataatttcattccttctttccattttttagctgtagatatgaagagttttcaagttcaaataacagataactaggtgattagatgctatctgtaattcatgtacatttcttcatgaatgttcagtacgtaaaagtatgtttctgtatggtactacaaataaaaaaatgttcaagatataataaatgcacctaatgagcatgaaataattcctaagaaaacaaaataagctgtcatgatgtgtttgtccccagtgattcttatacattatcagatgttgtcacctctgctatagtgcacagcatatgaataagttattcttgcttgagtaactgcaactacttttctataaacagtctcactagtgaaataagatgtcataacaactccagaattttcctctctgaggaacatcttctcagattaaggaattaaggaaaacagagaacataggttgaaggtatatgagtaataagagcacttaaaatctgtgaatttttagtgtaaacaaaaaaggcaaccaagcaatagtgttacagattgaaaagttagagaaacagaaagaaaggttgggtcacaaacaggcactgtgctagcacatgggaatcgaaaaaagtgatatatatcaggctaagtaaaaagctgcagagctttgcatacgtagaacatgggtcatttgtcatgggcagagtttctggaagattggatatgatctagttctaaggaaaagggctaaaatttccaacagcaaatggcataaaccagagagtaaaaactatgtgttttcaatcagagaatatgttcgaatcgaaaaatatgctgaagacctttaactatagcaatgttagcaaggcctctacactacttaacacataaaacaaattataatgatatcaataagattaccccacaaataatggtactatataaaaacacataaaaacaaaatagacatataacccagacttggaggatatactgtttggtgacgaagctcaagatacatgtcttctagccatttgagactgaagaagaaaacaatagacaaacttcttcctttaccctgggtacagggttataatgacctcaactaaggagtggaaggagtcaaggagagcagggttatgatggaacaacaaacctctttttgatagctttttttttttttcctaaaaataagaaggaatgattcttttattgaaaactataaacacacatacccaga

SEQ ID NO: 58943 - DNA, 839 bp, Bovine  19866881557888
  misc_feature (1)..(1): n is a, c, g, or t
ncaggaggtaccataagtgtaataaacaactgttagaaaggagaaatactaatctagccactggacataaggaaagtatgaatggcctcgaagtggcatctaaaatcttctaaaattttgttcagaactgctttatatgtgtttagcatatttttctggttagactatccacagcttttatcagtctcagagggttaaagaaccactgtctataacaaaaagaatccttttcctttgttattcttgaatcagattaacacaagacaacactgttcattcaaatagtgactgattctctgatttgtcacttcatataaacatagctcgtgtgcataatttatatataatgctatttggtggaggctgaaaaatatgagaagcattagatttttttcagaaaggaagacataaattagccaattggatttttagttctgcaccattttcagaaatacagagtggttcaattttctttccaatactcaataaaataatcatatgaacaatgtagaaaaaatctttggaatggtacaggattcataaagttatatcactgaaatttggaagactaagcctaacacacttatcatagtgtctaccattctgagtttatctctgaaaactccatcccagccccccaatctcacccatgccacaatggttccatttattctacattctatcaataaaggaaatatccatctctctagaatgaaaacttacatttctctgtgcttccaaacatactatttataccattaactcttcaatgacagtagtctctcctctttcagttgttggcatatgtctggcatatgtctcattacccaatacctgct

SEQ ID NO: 58944 - DNA, 1200 bp, Bovine  19866881602828
  misc_feature (1)..(1): n is a, c, g, or t
natattttatatgacttcaatacttttaaattttcttaagattgttttatggtctagtatatgattgaccttacagaatattccatatatgcttgagaaaaatgtatattctgctgttgttgggtgtaatgttctagaggtgtctattaagtctacttgttctatccaaactcctactgaatagggattctattcaatatccccaataataagggtatcaaagtcttttactattatattttaattgtctgtttctcccttcaattctgtcagttattccttcttgtattttaggactctgttgattggaatctatttctcgtgtggtgtatagcctgtaatgttacttctcagagggtgcagcttggggcatgcacagttaccttaactccctcccttcaccccaaggagaataaggattttatctgagccctttgacaaagtctttccctgatctctcttatcttcttgtaagtttctggctggtctctatattgatatcacaccccaatgttactcctcactaactgctggctgtttgttctcttattatctacaacaatgccttagagcataaatcattccacagtctgatcagattaatgtctgattgccttgtgaggcttgcttagatctcagggggatttctcttaagtaaaatcatcattgtttggacagtgttaggctcaacttcccatgttttgttccaaataaagttagatctcttagaatatcccattttctggtctgtacttgccctgaataagacttccatcaccctgagctagacaaacaaaggaagctgggcatggcttgacttccataaactgtcactattcctacaaagatttaatagattttttggaataaataaacctccatttgcataaggcaatttccagagacttcatttggtgtgtttgtttttaatttttaggtattacagttgtctttctggggggaaattttgtagtgctccttatgccactatttttgaaatgcttctcctccctaggaagtatttaatagattcactgatgttgttcatattatttaatgcaattatatggaaaatactttttatcatataatttttgtcttccacaaatgttctggtcacatcaggctgtgagattgctccagtcagcagcccaatgacctcaaaccccagagaagctctggagctggaataaagataag

SEQ ID NO: 58945 - DNA, 1554 bp, Bovine  19866881606910
  misc_feature (1)..(1): n is a, c, g, or t
nttcctgttaagactgcctgagaagttttccgaagtatacaggacttcaaatctcacgtttccaagccatacagataaattcacccccaattctgcccttagcatcatccaaagggattatgtggaaaatcatgtcctgttccagtctccccttcaactgagggaaattttgaggtcgacaagccctatctttgcctaaacaaacaatattctgactcttctactgctctcacatgtctgtatccctttcagagatacaagtaagtcttctctgcttcagatctttcactctctcttatatcccccctcctatgaagcattgattcctaaagaacctaagcttcagtctctttcctgcccaacctatcatttactctagcctctgactgtccactttaagaactctttcttacaagcagtggatacttcttttacatcatagcctaagtcctatccaccaaaggttcaaaacaaattcctatgttcagacctgctgaaatatggactctaggactgttaattcataattctcctgtgttggatttccctgctttattgatcctatgacttctttttaaaaagtttatcctatcactgtacctaaacatcctttaatatatttctaagaaagaatacaaggaaaaacaatttgtttctgagaatttccaggtatgaaaagtctttatttcaaccctcatgtttgattgttagcttgtttccgtttatataggatggaccctttttttcctttggtatatgaaaataattgttacattgttttctaactcaatgtgctgctaataagaaatcaaataatattttcccctaatcttttatatgtaactagttgctgatggtttacttttctgtttctccctttgagcttctaggtcccttttccatctctggatgtgatagaggctgctagtttctcaccaatatacagtcttcctttcttccttttgtaatagaatctctcagattgaacaaaacacatggcagtccaaactaaagactataatttccagcttcctttggagctggggtgactatctttgggccaactgaatgggagtagaaattaagtatagcttctggaatggaccgtgaatagaaacagagatagtctcactttttatttctcctcttcctgctggtggtaacacagatgtgatgtcaagaactcaagcagcaatcttcaactaatagaggaagtcacattttaaggatgacagagcaatgaaataaaaggagcttgggttctcagaatcatgaagcaatcatgcagcttgtgcttggactgatataaaaaagagaattaaattttcatctgtttcagccactatatttttgtcttttgatttacttaggtttttccttcccttttctattttccatctctgttttttgttccaattccagaaagatgccctcaactttatctttaaaacctattgacttttttattttaactgttatatatctaaagcccctttgcttttcttttattgtttgatttttgttttcagaaccctattttactgtatagataca

SEQ ID NO: 58946 - DNA, 1055 bp, Bovine  19866881763818
  misc_feature (1)..(1): n is a, c, g, or t
nacaatagcctaaactttagggtaatgaacaatttaataattaatttagctcagttttctaacacattatctgtcatcatttcaagctcatctttgcaagttataaatggctacaaagacaatgtataattgtcatcctgttactatgtttagtgtagtgtcacttgaagttctaaagtgtcccattaaagttattaattaaagtaattaaaattataatctgggtgaaatgaacaagaagggaaagtctccttttttagcccatttatttatgatccaaagttacaatcatgctaatggtttcttccatcttcctgtggaaattctgtagaccttctagatcactatacaaggtgatttgctttagcttgggattcaccagtaagcactgcccattccaggtatccaggagtcacatcactactgacagaccatgcagacttgaaacaatgggacaccttatactgcctttactagaagctagaatggttcttctcaacctcttgtgcatttggtcaaactcatgaccaactatgtcccaagactttgacctaagactttgctcagtatccacttgtctaactagtggtcatctggaagaagaagttcctgggtggtaccagcttatgatacctcctgtgctggcacagaggtaaagtgcgtcttactacacagtttacagtattgtgaggaagatgcacatgacttcaattatagaactgcatgtctttgcaaattttagtgtagtaaaaatgtgaaacctaaatattatcaagtatggtgacacttttcttagttttaaacttcttgagtaatgctttggataagagtgaccaggaaagctctattctttaattctttagcctaggacacatcccttctttggtttattcatcttcttctggagactctgtatttccttatgaagtcgtctgttctcttcttggaatccttcctgtagtagtcgggactgttcctaaaaagatacaaatggaaattgaatagtgtatatcattaagtaaatctctaactactatctagtttccacattcaag

SEQ ID NO: 58947 - DNA, 1329 bp, Bovine  19866881512039
  misc_feature (1)..(1): n is a, c, g, or t
naatggagggcctctttgagcatcagggtgtatttctgatatagtggggcagcaccctgaaggtagaattagaagtaatgtttgagtaattagatagtagctgaaaaaatctgcattagatcttaagttctcgtcttactctcaggtacaataaccctttggggttagattcaaagaattgcgaatagtattttggaattgctgtatatgagtcttgctcatttgtaacattctttctaaggcggatagaacttgtgcagcacatcacaagttcccttatgatctggaactagtaactgtataatcaaagtgtgcatgtatgtgtgtacgtgggtgttgtgagtatctggctttgcctgtcacctgaccttatcccatcccttgcaacttggtacactaaattaattgccttgtggctgctgatgaggtcaatagccttggggatagttgctgctcggagagtggagagtggggtatgagacgttcccagaggacttgcattagtatctgtcaagttcacttcacaggattctggttgctggtttctcctaatgaggttcctgtctgtcctcgactcctggtctacacctgccttgaactctggggttccccagctcttgctactgtaactcctgacctcccgcctcttctgacctctggtaactgcttacttcttgtaccttctttgatgtgcatgaatgtctaatctatggtgctttcttcctgtttatctatattgtttaaaattgtaattttttatgtatcctagatgtatacaggtttttaagtaaaaaaaaaatgggattgcattatgcatattattctgcaactttctgtcattcctcttactagcctgtcttagaaactgtttccatgcctatccatggaaatctactttactctttccaacttaaacatagaatttccatggtatataatacaataccaagtaggggtagaccatactttatttaagcaattctattatggctgtactttgagttgcttccagttgttattacaaatgatgctactgtcatccttattgttaatacatattattgtgcattagtttgggtatagcataggaataaattcttttattgggtcaaagaattattgggtcaaaggatttgtacttttgaaattgatggacactacaatttgagccttcaaaatggcttgtaaagtttataaatcccaccaacagtgagtgtgagtttgtttatccatacacttaacagcaatgggtattctctcttcataatagtcagatggtcattaattcagtttgcatttttctgataactagtgaggctgtgtgtgtca

SEQ ID NO: 58948 - DNA, 1100 bp, Bovine  19866880348395
  misc_feature (1)..(1): n is a, c, g, or t
nccgcagtccccctctgtcttctttcaggattctgtgattagattgtgcccacctggatgcacctggatactctctcctgtagttaaggtccctaacatgaattacatttgcaaagcccctctgccatgtagggtgatattcacaggttccagagattgggatatggacatttggaggggtgttattttgccaacctggcatctctcacctggcccaatatatgcccagctcccagggcctgtaatacatcctcctttctgtcgcccggataacaccagtcctctgctcaaaatcctcagtgatgaaaccactcactgaacaccaaatggcttagcctggcgttcctgtcgaataactgaaaacagtcccttatcaactgaataaaggaataaaagcagtgtactataagggagacctgaaaaagatgagcgtgaggcagaggcaatggatggggggcggtgagcatgacctggagttgagtccagtgtggctgagaggcatgctggggcttcaggcagctgtgattatcttatgtcttccctttgagcctcaattacctggtctactaaaacggggatacaaacagtatcttcttcactgggttgttgtagaggttaatgaaatagacataggtaaatacatggcaagcacttatcacacagtaggctctccataaatgttactttcctctcctttcccaatataagaacaaataaagcaaccgaattatagtgaatgattcatgagaaccatccaagacatagaggtattaaatgtttggcttagttcaagataattcctctttccacgtgagtaaaaaatgtcatattgctcctctttatgatgtgtgaccatatttctatagagaaataatgaaaaaatgttatcagcaatgaatacttcattgaaaaattataatctggagaaacagagcctaaatggaagcgattagaacaaaaacaaagttctcaaatatgtgtatgtggtatgtatactatcatcactaaaaaccaaatgtattcataatgactgagcattagaaaattcatgaattattcatttagtcattcatacaaaaatactcatgggagcactggga

SEQ ID NO: 58949 - DNA, 2919 bp, Bovine  19866880446332
  misc_feature (1)..(1): n is a, c, g, or t
ngaggatcaattatcccatcatatttcagtggacttatgcttctctgagtaaaaataaataaattcctagctcataatgtctataaattacccacctttcttcactcatcagacctcattttctataatcagggacctcaaagggaacagagttcataccacatggttcaaatggacaggtgattattaaatgattccttacggaggtatgggcagggctgaagaaagaatgtacagttagacacggaaaaataacaacagtgggcagccattactgttcctaggtctgcaggggaaaggggaagactggagccagagcaactgcatcttcataggtgcgggcatcagcaggaagaaaggaaagaagtacactgccttttctcctcctgtctgctgatcttcagatgctactttctgttgcttgggatatcctgaggtcaaaggagcctgggtgattaatatagtgtgatgtgggagaacaggagggatctaactcccaggacacatagcacatgctagaaggcagtgcacatatctggaggggtggaagattaatcagctacgtgcctatctcattcataactatccctcctccttattgctctctaaacttcatacttggtgtgtgcgtttaacaggaatttgcacaggttttttctttctacaggtaccctccctcttcctcttgatatggctagctcttcatcctccttcaagtcttaaatatctttatcaccctatcaagaagcaggtacctccttcttctccttggaatacaagggcagtggtgatgtgtctagcagatacctggtacctagcaggtactcagtaaatactaacggagtgaatggtggccaaatcatatagcaaaatcttaagagtgtgtctacagacaataggtttatataaatatctgcatgaattctaaactgaggcagcatttagaaaaagctacttaatctttatttttctatggttttagctaaaaaaagaagatttgtgtaaagtaaaaatctacaatgatagatgctcaatttcttattcacttaaaaagagaatgtctattatggcaccaacagtctaaaagaaaataattgaatcatttaaaagcaaggtttatactcatttcttttactgctgtttctatagcaatagcacaaaatcacctgttttggtctgttatgttcttggtactagaatattagtcatttcaacatctttttcttttaattgaagggaacaaaggaacagagagtagttttaaatgtaggaacatttgtagataacatttttttagatgtgctaagttggcaactgcaaagcacaatctacagtggtgacaacacttccgtattattgtatatttaaagattcaagtgcttctcttacctcctctgaaagagcagcatcagctgatcctaaatttcagagcattttaaccttcattatgaatgacaagggcctatttgcttttgcagaaacaatctgtaaagagtaacctttggcttcacttatacagcattttatttttaaaggcaactgcatttataatgggcaatctctacttcagattcattcaaccaagtgcccctcaacatctaagcagttaactgagattaaaagtaattttgactcttggcagcagagggaaagtcaggaaatactctaattccagaaggaggtgaaagtggaagtaaaactaggagaggaaaaagaggagggtcaaggaaaaacggagggctaaaaattggatgagaaagaatgctgccaagacactgggtcgctgctagcagcaggtctgatagcatcaccatcctggctgaaggagcaagagcagagcacaggctgagaagagttgagctgtccatgctattagaaccattaacatcttcacctggcatcctgaaagaccaactggagtgaccacaggccacagacacataccaagttggctttaaatccgggtcctaccacttactatctgtgagacttcagcaagtaagtagttgtaggaatattagttttttcatctgcaaaatggggctaatatctaaattaccaggctactgtgaaaacagcaggcttgcagttttaaaaccatttgctcctatgcttgaccaaacccttgctgcccttcctttgtttgatacttaaattagacaacattacccaaaccaaactcaacattcaaaaagctaagaccatggcatccagtcccatcacttcatggcaaacagaaggataaaaagtggaaatagtgacagattttattttctcgggctccaaaatcactgtggatggtgactgcagccatgaaattacacttgctccttggaagaaaagctatgacaaatcttgacactgtattaaaaagcagagacatcactttgcccaacaaggctatggttttccagtagtaatgacagatgtgagagctggatcataaagaaggctgagcgctgaagaatttatgcttttgaattgtggtgctggataagactcttgaaagtcccgtgggcagcaaggagatcaaaccagtcaatcctaaagaaaatcagccctgaataatcactggaaggactgatgctgaacctgaagctccaatactttggccacttgatgggaagaaccgacttactgaaaagaccctgatgctgggaaagattgaaggaaggaggaaaaggggatgacagaggatgagatggctggatggcataactgacacaatggacacgagtttgagcaaattccaggagatagtgaaggaaagggaagcctggtgtgctatagttcatagggtctcgaagagtcagacatgactcagcgactgaacaagaggacagggtgcagagatgtccacacagctctgttctgaagtgagtagggagagaccaaaaagaggacacaaggcagcttctt

SEQ ID NO: 58950 - DNA, 900 bp, Bovine  19866880471188
  misc_feature (1)..(1): n is a, c, g, or t
nccccagtgtcaaaataccactcagtcctgtctgactctttgcgaccccatggactatacagtccatggaattctccaggccagaatactggagtgggtagcctttcccttctccaggggatcttcccaacccagggatcaaacccaggtctcccgcattgcaggtggaatctttaccaactgagctatgagggaaactcaaaataccacaccaattcccaaagaatataaatggtatgattctatttgtggaaaaaataattgttacatcatacagacaatctctgaaggtactcacagaaaaactattaaaaacagttacctctggagaatgattctccagattttcttattatgggcatataatgtatgcccataaataacataattattaataaattatatgtaatttataaattaaagagttttagttcataaggacaaaacaatgattagtggttaactatctgaaataaaataaatattctatgcaagcagtaataaaaaaatgttaaaaaatgctttacttctgggtacttcaaaaaagacattaagcaacattttacaactatcacaagggaattgtcgctagggttgttctgctaggcccagactagtgtggggaatcaacagactatcctttgaagtaagagcacaacaatttacttatagtggtttattgagtgcttagttcaatacaagtggacattttgtcaataccattctaatgggtgctatagatgacagttcaatgctataatatacaagctagaaggccatataataaaatctatatgcccctggagtcaagggatgatcatttgcagaagacctaaagaaaaacaccaagacatctctctgtgcagggcctatagtgctcgaagtaaaaaagcaaacaga

SEQ ID NO: 58951 - DNA, 885 bp, Bovine  19866880732316
  misc_feature (1)..(1): n is a, c, g, or t
ngatactggaagggaggatgagaatggaatcaggaagccagttgggaggttttgtaggcaaggaccaatggtgcttgagctagaataggagatagagaaccaaatagattcagtacagaactgatagacttgcagagaggacctgtgaatcgagggtgactcttaactttctggtttgagcttctagggagtggtaagtatggggaatttagactcttttcttaataaggtccatttgaaatgtctgtgaaatatgtaggaaaagattcaagcaggcagtttgaagttcaggaaatgagtcagggctagaaatgtagattgaactgtcaacatagggataacatttagaaccagacataggaatggaaatagtcaccaaggtaaaaaaatgttttaggaaaaaaaaaaaacaactgaagaaaatccaaagagctccctgattgaaagtcttcaggagctgtttgaatgcacatgttagttcctctcaaatattactaaaataatatgaaaatcagctttagataaaaaaagaattaaaatgatgaatgcttcagaaataaaatatgaaagttctgtgtttatacttctccttataaaataaacttaatatctaagtggttatattttttaaaagaacagtagtcttttgccttctaggaacattgctttactcctgctgtgaacattggcacacatatattaacatctcatgtatccactttagtcttgtgctagaaacttgtcagttgaccggagaactgaatgagttaatttctctcctcatctcaagctcttatttctgaccaacaggattatgctcaggtggtgaattctgcatactgtctaacctaactgggaaatgtgtttacaatgataagcttctag

SEQ ID NO: 58952 - DNA, 1858 bp, Bovine  19866880752019
  misc_feature (1)..(1): n is a, c, g, or t
ngagttttgtgtatttacttctatcttactattgaggtatactttccttccttttaatttttttaatgtctttgataggcttagtgggaaagaatagaattaaaatgtcttactctattatctttaactgaaagactattgttttggagatatgaccttgatatagagtcaaatacatggaaacagattatagtaattagttatagtatatatccctttgtgttctaaaaatacactttatattcataacatatcactaggagtattcatcctagtcgtaactgaagttatgggctgagtagaatgtatgtaatgtatgtgattgtgaaatgtttacaaagggcatgaattaactaaatgaattagcaaagaaatcaataaggatcatttcattttgaaggaacatagaaacacttaagtctctgtggcctttattgcattgtggttaaggacccatgccactaacaagacatcctgtggttaagagtgaaatgtccttttattctgatccaatagcctttcataaaaatttccccattgaagactttacagggaattttctttcttagctggagaaaatataagaattgccaggcagggaacactttgatcccaaagattagaggttactaggataggactggattaaccacagtaacaataaaaagacaatccctgtctgtgtaggatggttgacgcctgctgtctgggcttctgggtctgaggttggcctgttcccggacttattcatttccctagcttgtgttaccattcccctgcccattgttctctgccatcttccatgtcctgagatggagcgttgatattttagcaatggtggtttatcccttagtatatgcaggatggaggaggccagcaataaataatagtgataagcctgtatgccagctcttccttgcacacaccaagaaatggattaaggaaacttcttttggtggagtggaaaggaaaacacagaaaagaaatacagtggtgtacatagctgtcatacctgtgtcagaaatctagacaagaaatgtaaatgtcagtggctcaaagactttccaggggagaacaaggtggctatagtacgtcaagcagctgacccaggagtggagcttgacaagtcattttgatgctggtctggaaaactccttggaaagaaacacattgttcaaagaggacaaacccccaaatcaatacagagaagagagctgagggaaaaagtaaaagtcagtgagtgaagggaaatgactgcccctgccccctctcctggtcataaccaggatcccagcaagtagagatgtttgatttttcagttgccagactgagtggtgcaggagaaatgcagcctgaagagtcaagcagacctgagatcaaacttaactacttggacttgggctcttgggcaagtgatttctctctgctcatagagaaattctcagctggctctgttctgtggcactattctgagtttgggtttatctgtagtttacagataattgtatcttccctgtgatgtcatttgcagattgaatgagatagtgcctgtgaagtgctagtccatagaaagtgtttagtgaatgctcatttctaattctctggagcctgtcctctgtcccaaagctcttggaagtacagccttaccccaacctcctgactcctcctctttctcctcttcttccttctttttctgttctgtaaggaaggtgaagccctgagctggcagataaattgggctccagctcgggtgaagcagagagacttcttgatggatttgtcccgcacctgaggaaggaaactgtgcttgtgctcctggtttccattactgagctggtcatattttatcttcccttaa

SEQ ID NO: 58953 - DNA, 1001 bp, Bovine  19866880899897
  misc_feature (1)..(1): n is a, c, g, or t
nttatgattaaaatatccttatcttgagtcctgcattttttagcaccttttgaaatttgtaactgtagagtgccttgtttgcctgactccaatcatggctctggacccaagacaaacttcctcccttttaaagagaagctgacaatctagatcttgttgtgaagtctcatattttaaatgtgttggctaattattcaaaaattttaaaaacatattgttggcaaccagagcagtagaagttctaacataaagcatcctagtaagtccactgaactagccatcggaagacttgaattctagtcttagttttatcctaaccacatggcactttacctttcctgagccttattttgtcattattaaaagtacacttctatgacccagtgtcagacatgatgattagaattttatgaaatactcagttcagttcagtcgctcagtcgtgtccgactctgtgcgaccccatggactgcagcacgccaggcctccctgtctatcaccaactcccggagtttactcaaactcatgtccattgagtcggtgatgccatccaaccatctcatcctctagcacttattaaatacaatgttagatggaaccatatgaaattactaataactggccattttgggtctacaaaaacattaatttcaggtggttccacctacagttttgtttcactgttgagtctgagagcatgatgaatgaatcaggcagtgctgtgccaagccatagtacagcctgaggaaaaaggaaaaatgtgttccgctagattgtagagcaagatcagggatttggcgagaaacctctaatcagaggacaagggcatgatggacaagcaagcataatgacttgctttttttcctactatcagatcagatcagtcgctcagtcgtgtccgactctttgcgacccgagctcctgttcctaggggttctctctcagtcactcattctctctacaggcctccaagggcttatatagagtccatttaagggttt

SEQ ID NO: 58954 - DNA, 1297 bp, Bovine  19866880910828
  misc_feature (1)..(1): n is a, c, g, or t
nacattatttctaatcatatctttcttttcacaatttcacttagcctgtaagcttgctttctatgtatcttccaaattaatagcagaaaaataaacttttaaagatgaaaacaaagcttgcttttggcctcataggaacataaaatattggtctgagaaatgacttggctaccatcctggtgtatctcaaggggaaattcctttttctttttttatttgttaatggcagtataaaaaggattgattataaggctgaattttaagtatccagccttggagatctagccagtaatgactgtaggaacttttaggcaaagatgttggtaattagttaaaaaaacagatgcctacaggtccttcgcctatttaaaaaattggattgtttgttttggatattgagttgtttgagttttaaaatgtttcagatagttacccttattcgacatataatttgcaaatatattctcccattctgtaggttgccaatttgttttgctgatgatttccttcactgtgcaaaaaggtttaagtttgattcagttccatttgtttatttttgtttttgttccccttgcctggggagacagattaaaaaaaaaatactctaagaccaatatcaacgcacatactggctatgatttctttaggggttttatggtttcaggtcttacatttaggtatgtaatctattttgagtttgtgtatatggtgtgagaaaatgttatgattttgttttttataagtaactgtccaattttaccagcaccaattttattaaagagactgttttcccattacgtattcttgcctcctttgttataaaattaaaagatgcttttaatgaaattaaaagacagttgctccttggacgaaaaactatgaccaacctggatagcatattaaaaagcaaagacattactttgccaacaaaggtccatctagtcaaagctatggtttttccagtagtcatgtatggatgtgagagttggaccataaagaatgctgagtgccaaagaattgatgcttttgaactgtggtgttggagaagactcttgagagtcccctggacttcagggagatccaaccagtccatcctaaaggaaatcagtcctgaatattcattggaaggactgatgctgaagctgaagctctaatacttgagctacctgatgcaaataactgactcactgggaaagaccctgatgctgggaaagattgaaaggcaggaggagaaggggatgatagaggataagatgattggatggcatcagcaacttgatggacatgagtgagtaag

SEQ ID NO: 58955 - DNA, 832 bp, Bovine  19866881071399
  misc_feature (1)..(1): n is a, c, g, or t
ntaaaactaatgaagatatttctactgtggacgaggcttctctcttttttcatgctgtgcagattttcagctctgcagttgaaatctgaatccttcccacctaaatcctgatgtaccttcccaactaaacccacatgagctggaattgcatttctcaaccatgtcacaaaagaaaaagacacaagggtcagtgaaaccctgaaatggttaatttagaatgttgttcacaaagtgcacggctctgaagctttaaaaatttccctggagatttcagacaggagtttcagcaagtctggcatttcgcttcattctcagcctctttctcagctcctagtcctgggggttggccaggaacccattgagctgaaagagagatgagggaaaaaatggcagaatgtttctgagattcatgtagagggccttctcgactctcagaaatgtcattagagtcccccaggagactcaggtggtatctccatctaattattcttttatgattttataatcacagagacatttcttaaccgtgttgtacagcaatttcttgaaatgtcttctctccctgtgcttacatgaatgaatttctttcacatagtgtaggagattttttttttttaatgttctttgtttctttcctaagtccaacgtgcagtaaattattgggtaacagctttgcttagtaaaggaaaaaacaaacaaataaacttgaaacttctagcttttatgcccaaaatagacacctaacaaatcacaactgcattgtgtctcctgggatggtaactcagatgtaacaaatgtagcattaggaacaagtcagtattataatcactaa

SEQ ID NO: 58956 - DNA, 927 bp, Bovine  19866881099264
  misc_feature (1)..(1): n is a, c, g, or t
nttgacatgagaacctcgatgactagaaggaatcagtcttctgaaaatctagaggcctcacaggaggaacagatgatacacaagccctcaggctggaaagagtttggcgcatttcagaaaagtaagacagccagtcagcttgaagcacagtagatgggaagagggacaaaatgaagaggcaggcaggggcaaggtcacaccatgcctcatggttaagagtttggattttgctctaaactagggagttacatggtttgattttgagagtgaattacggggagaagcagggagactgctggctgctgtaggctacccagatgagagaaaacgctgctttgcaccagagagatgagtggagatgaagaaaggataatgaatgtgagatgtccttggaacttgaagtcaacaggactcaatgaattgatgtaagaggtgaagagcaaagagaggaatcaaggataacttgaggactttgggcttgatggggctgtcagtcaccagcactggcttctgtaaatgctcatgggagttagaattcacatagtgctcactacatgtttgccaggcattcatttaatcttcaagatgatcctataaaatagatactgtctccacattagaaataaggggggaaaagtaaagatattgaggaacttgacaagatcacccagctggtgccctgtggagtgaagataatggactccagtctccaagtgttgtaacaactcacctacactgtctcattagcctcatgcatgtgaattacagacccatatatccaacgtcttaatctccagatggctcacaggaacctaaaactcaaagtactttaagttgagcttaccttcctccctacctttctccttataagcttcaataaattatatcaccatccaccaagctgatcaagttagaaacgatgccatt

SEQ ID NO: 58957 - DNA, 2437 bp, Bovine  19866881104682
  misc_feature (1)..(1): n is a, c, g, or t
ncaagtgcttaatacatactggttatgactgactgactacctgactgaaggaacgagaggatttattattttatgtcactaaatggttccttaattatgtgatgctgtctgaaatttatctccaaccgaaagtaaaaaatgcccacctcttaattcaaagctcatcaccttcactccagcttgctgaatgcattgttaaaattctcagaaaagcactttaaaaagaaagaaaagcagaattcattttctgcagagcttttcactttgtatccctgatcttgccacgacctcatcttgctttcggaaagggcggttccctcgcagtgctttcatcaatctttggtccctggacccctgctgttggagaccgcaggaaaagcaagcacaacatcacctttaattagcaggagaggagcctgcctgatatacacagacagcaccttagaaacaaggaacagaaaaatgtaacacaggaccaggttcttgggaaagccatgaaatgaaaaagagtaattatcctgctttaacataatgttgttaatctgtattgcccattatcatctagagtgtcttgcccattgaagtatgtgagctgtggcactggtctttgctccagcagtgtagctaacgttagggcctggctccccatccatcataataattagtttgtcataattttctgcccttcttggctctgcagtaaaaagatagaagaggcatttaaagttactcaggaattgttcaccaaatttcctccctgttctttaggggaatggatagctgtatttctgccctatttattttatgtttggcctgtgataatgaagcatatttcatctggaagtatatagctttaattttcatgttctacttggaaacatctcatggtttcattttgttttagccatacagtatataaagagagcccacacttctttctgaactcacccatcacccaccagagttaattctagtttcaagaccaacattatggttttatgagctgactacataacaacacacactggttctatagtcctttagagtctgcaaagtgctctccttgttttatcccttaattctcacaactgcccggggatgtagaaaaggcaggatttatccacatgttccttttgtagaatgaggagctgaaaggtcaactgacttgaccagtggccaaggcttgaatttaggttctctcattgtaagttatgggtctttgctattactctagcaatatctccttttgctttagtctatgcttctgctgaaatggagatggggaaattttcagttattctttctttccctcagcatcatgagcacaataagctttccttgtctggtagaaaaaagggaaagaatgtttgcatagaaatgtagagctttaaaggaattattttttggcttagggcagaggttctcaaagtgtggtccccagaccagtagcctcagcagttgtaggaagcttgttaaaagcataaatttccagatatactagaatatacatcctagatatactagtcagaaactctaaggtgaggctcagcagtctgtgctcaaagaagcccttcaggcaattctgatgtaggctcaagtttgagaatcactagagaaggcaatggcactccactgcagtactcttgcctggaaaatcttatggacggaggagcctggtagggtgcagtccatgggttcgcaaagaatcagacacgactgtgcaacttcactttcacttttcactttcatgcattggagaaggcaatggcaacccactccagtgttcttgcctggagaatcccagggacagcagagcctggtgggctgccgtctatggggtcgtacagagtcggacatgactgaagtgatttagcagcagcagcagcagcagcctagaaaaaagatgggtagacacaggaaggacagagaagagaaaaatagcattgtgtgctttggagaggaaaactctcttaggtttattatcagggttgtgtagattaaactaacacaggtagagtaatggaataaaaagcacataatttttatttgatgtacattgtcatttgtgtgtgtatgttgggggtctcatagaaagaacatgaaaacccaaagaaacagtagggcctgagagcttatgcactgtttaaacaaaggagccatacatttgtgaagaagtgataagccaaaggaaaagagtttggatttctggggcagtaaggtgtgagaaagtaaatatatgggggaaactaatggaagatgagatgtcagtgataattgtttatgcaatattcaagtagaaactgcctccagtagtaaaagttgtctcctgttcctggtgtgggagaaggaaggggacacatcttcacaaagggaagtttatgccctgcttttagacagggagagtagagtgctttccccacatctgttactcagtcac

SEQ ID NO: 58958 - DNA, 1566 bp, Bovine  19866881128933
  misc_feature (1)..(1): n is a, c, g, or t
nctgtgtatcaggatgctttgttgcaaaagatactaatagagccctttatatccaccaatccaatctaattcaacggtttttgaaagctgcttcttgtttctcaccacagtcttttgacacgcgccaagtctctcaggcttctttctcacccccacctggaaaatgacccccaccctctcacacacacacacacacacacacacacacacactccctcactgctccatcccaggtttaggcagcctgaccatcttaaatgttgacaatccacccaggggacattctatatattcattttatttccaataataaagctgttctacttgtaatgtgaagaaataacatacaggaagaaccagtaatgtgtagaaattctagcctttcagtcctgtagaagcttagatatgacttaggcaatagaccttcacctcgatgtggagactaatgtcgtctcggcacatatactatccactaatctcttcagtgatgttctgatctttaaatagggttttcttctttgtttgtcagtctattgcccgcaaacatgtcagatatttcccctgcatacaatggacattttatatatgactgatcactttatttttacttctcaggcaaagcaagcttttcatatactaaattgtttggcagatataaaagagggtgctatttttattctatatcatattcttaatacaatcaacaagcacagtgactaattctaatttaatttataaaggttacaatggtctgttgggccccctccctcaagattcaaggagcttactaataataatgcagagttgttgaaccataatatctcttggtctgtaacactaaagacattttaacatttgcagggctccagtctgctgcaattaattctgatcagatgtccacagtccagagtcattattagttgcagagtgtcagaatgtgctggccattttgaaggtgaatcttcaacgaatgccctttgttgttgccaaacaatgaggaattaacattcaagtttatataaaagataggaatggataggaaaaagtgtttcagcaattagtcattttttgctgttctggatttatttaggagttgaaacccaacttgcttatataattcatatatatcaaatagcataagtgttttcaagctataactgagttggctaaaaaggagcccttcagttatttggggaaggagaatgtataagtagagaggtgaatgtgcttaaatctctctttaaccaggacattagcatcatgactggcatcagaagtgagatgtcagtgttccagatttcatacagatcttctccctgatgtctccgggacaggtggagcccaaagtccttagggagttcaagtccaaggaccaagtttgaagtggggccagacaatgtcacacaggtaaggggaagcaagcaagccactggatatgattaggccaacagatctgatcattttgaagacttctgataaagttttattagtcacttacaagaggagaaggtcagcaacacagaagtcacaaaatgccatgaaaaattaccagccctattctgtaca

SEQ ID NO: 58959 - DNA, 885 bp, Bovine  19866881498907
  misc_feature (1)..(1): n is a, c, g, or t
nactgttatgtctcagatagaggaatccttatctaaaaaagaaagaaaagaaacgctgtttcttttctctaaggaaaaactcccttgcaactcccaaagccaattttttgagtaaatagatcaattcaatttctattttttcctttcccaatataatgggttctttaactgccctgagtcaacaccgcctaatcatctcattgaggcacctggttaccaccctcagggcttccccatttctcttactggataactgagcgatatgatgatagtgacaaggtccctgggcctcaggatgaccttcgttgccatatgttgattgagtgttcatcgtaaagacttctaaatatcctaaacagcagtgcaaaggccagcaacatttatttctcagagaaatggttatctttatcctgctttgggcaaaaacatcccctgaactgaggttacacaccctgaataaattaaatcccagagatacataaaggttaaatgaaaaaaagtcaaaataagtaggtgatcctagtaagtagatcagtttgagaaacatatgggaagtgagggtaagaagtaggtccttgtcctcagccgcagtgtagacttctgttctccctggacacagccattaatcaaataggctatttttagaatatcctagaaatgaaagtgcccttctggattgttactgtcctctcataggtcaatgaaacatgacagacatatcatgaagtcagttaagaaagaaaaaaatctgtgatattctttatgtcttaaagcaaagaaatttgaaccagctgaggtctataatttgtcacgattcctttgcaaacctcttgatggaatgccttattttgatgtttcatattgtgtccattttgatgtgacacg

SEQ ID NO: 58960 - DNA, 1530 bp, Bovine  19866881501044
  misc_feature (1)..(1): n is a, c, g, or t
nattacaacggctggcattttatctgttgcatttatcaacaccagtgaaagtatgcacgcttgttacaactccaagtagcagaagaacaaacacctgcacaaattcaatattctagatgcttaccaggaaaggcagggcaaaccagatgctacttcccttcttgcccaaatattttccaaatattaagctatttttgttactgcaaagaggtaacaaaattcacagaactaagcatttaacaattggctactatatttatgacagatggctacatttacaattactaacagtcatactactgtttgaatataaaaaccaaaaaacctacataaattacatgctcagttgccttacttctaatttaacttaagggaacaagaattaatttgatctaactattttcaatatttgccaacaggattaactcaatgacgtatggaaggataatactgtattcaccatcttccacttcttaccactaaacaatgtatcagcttgcttttctactaaaattgcataaaatagataggacagctaatttaaacagttgtttgcacattcaatatttataacctgaatcttgcatgactgactgaaagcagtgagttagaaggtttagctcagctcctgcctggagtgatggatggcctcgaagaatttcttgttcactgaccagatcaatcacataacagaattaaaaaaaaaaaaatcagccttaaactagattcccaacatttccatctgtatgcaagtgttacaggaagaaatatatcataaaacacaatgtgaaactacttaaaaataacaaaaatccaccaaaaatgctgtagaatgcaaatacagaagacaaggcaactgaatgacagtccccattttaactgaatattaattcaaactttgttacataaacaaacatgttacatataacccaaaaggtactataatttataatgatatcttgaaacagctcagactcgtaagtaaaagggtttgataaaccgaaagagctgcaattttgaaagtatttagagttgattttatttaattaaactaaaaggccgtgttgtggcaattattatatactgtgccatttttaattattccaatggctgtcccaaaaaatgaatgttaaagagtaaacaaaaaactgatggttcaacttagagtaattcgttcattaatggttaactcccaaacatctacagtgatgagggaatgagctgtactgtatacggaccatggctagcaaggccctcctcagtgtgtgctacaacaggtttgactggtttgtgagaggctcctgtaagcttctttcccagctctgcattcagtaatgtcaacttggtagcttgaaagtggtcatagtaggagtatatttgtactacagatattttgttgttgttcagtcactcagtcgtgtctgactctttgtgaccacatggactgcagcacaccagacttccccttccttcactaactctcaaagtttgctcagactcatgtccatcgagtcaatgatgccatccaat

SEQ ID NO: 58961 - DNA, 1416 bp, Bovine  19866881598051
  misc_feature (1)..(1): n is a, c, g, or t
ncaggctcccctgtccttagggttctccaggcaagaacactggagtgggttgccatttccttctccaatgcatgaaagtgaaaagtgaagtgaagtcgctcagtcgtgtccgactcctagcaaccccacggacttcagcctaccaggctcctccgtccatggggttttccaggcaagagtgagtggggtgccattgccttctctgtataaggtctatactaaggtctatatagtgtgattacttgaaattcagaaagctgtttactctcaattttagccatagaatgctgctggggttctgcaatctcttctccagttactttaatgatgaatttctaaggagaaacctgtactcatgtcatcatcctttcctatctttccatcataaaaacaaacaaacaaaacaacaaaccaaaaactgttttcctaggttactacagggaaggaagaactacagaaagaacaacagagaagaagcacacacaaacacacatataccagctttaaaccgcagaccttacttttacacataattctaagtcaagggattttgctttcttaaagcatgcactctcctggcttacaggcctttttctgcctgcttctgagaatcattacagatggtcgagactggaagtatgatggctgggtaagtgggacattacttgatcttctatcattctgataagaattctatgaggcagagaaaaggcatatgccattatcctcattatttttttaaatagagaaactgcagcacacaaggaaagtttagtaacttgcccaaggcaccaagcaaattagttttagagaattcaggtctttaaaatctttactcttctcctcatcagataacaaccttgtctccccccttcttggtctttctcacacataatttattcaagtatgatatatatctaaatcgtattttatgtgctgcatttccagacacctcaaccaaatcatcaaattataatttcctattatgttttctttgaaatgttagcttttaaaacgatacccataaatctttcacacatgaaattattagtaggaagaggagagaaagattggaagcaaaaaataaacacagtttcaatgacttgagtaaataaccaaaagataaaaaaaaaccaaaaataccctggggttagggggagaaggttctgactgacagtattttgcctctttgcttctctatacagtaggtggagctatagtactattcattagggttacaagaggctgtgagtggaaaacaatccaattcatttctaggatatccattttcttttgcactttcaaatggtcgttttctgtttttgaaacatttttcctccattccccaagaaccttcagcctacactgcctacattcctttttctttttcggaaggcagaggactagacctcactg

SEQ ID NO: 58962 - DNA, 1680 bp, Bovine  19866880392619
  misc_feature (1)..(1): n is a, c, g, or t
ncctcaatttacttatctggaaacaagatggtaatgtctacagggttattgtgaggactggagagcattgctacaaaacttgatagggtttggtaggtgaaccttcccatccttccctatccattatctttcctcatcttattatcaggtatcacttttctaacccgttcttgtctccagtcaaaatgactggcttgtttgttcagcaagcatgaacaagtcactatcattttcatctccgcagctctgagaggtgatgccattaagcttgtataagaggctattggctcagagagagcttaagagctagaaggctactaggtggtagagccaggatttgatgccaggtctttaagaactatgggagccctagtctgctggtttccatcaaccatttctctgcctagaatatccttccacctcctttcctttctggattccatttgtcattcagggtctcattccctccatctcctccaggataccttctgaatcattgaggacaccttttattgcaagtgatagaaaattccattccaaagaggcttaagcaaagaaatggaagtttgggggcacaagtaacccaaaagtccagtgagtgaggttggatttagagctcaaataatgtcatcagtattttccgtattttctttcttcctaaatcttggttttgccttcttttctgaaggctgaagtttcaggctccatatggtagcaaaaaggcacagcagtctagcttttacattctcacgagtttcagacatagtggaaagagtaagtcaatttctccatacctcaaacttagtctgaaattaagacatgttttctctgatcagtgtgacatgggtcaagagctcattctgagatcagtcaatatgtttcgggggctggagtccctgggttagcttagacctgaatcacctgtaccttcagaggtgcagaggagtaagcttcacttgcctctagagggaaattgaggtaacttatcagggggcaggcacctggatatggatagtgaaataagtccacaagctattgatactttcccccttttgtgaattcctgcattcctgctgttctggtgggcgtctctgctaggcagtaaactccttgaagataaggactctgtgtgaccttgaggtctttgtaaagacctggaaaagaatgggtgccaatgacatgcttttcaatcaactaaagtaactattctgaactcagttcatccaacctagaatagaaacactctagctattccaaagaggagtgatttatgactggatattattttcacctcagagaatccatgttttgaaagacttaatctgagaggaaatagttaagggaacagatttggacccacagtatccgggctcagacgcttgcatgtgagcctgagtaagttgcttcacctctgtgtgcctggggatcttttgtcttaatagatccacctcataagactgatgtaaggattaagagaaattattcacataaagctcttgacagtgtctggtgtgtgtttctgctctaattcttagtgattaactcaaagcagccttatcacagataggattttctgttaagccttccccctcctgacttcttcttttggaaaatctcaacctgcagaaaagatgaaaggatcagtacaatgagcatctctctacttttcacctgaatttt

SEQ ID NO: 58963 - DNA, 779 bp, Bovine  19866880496715
  misc_feature (1)..(1): n is a, c, g, or t
nggtcagtgcttttggtgggaggtctagacagactggcgtcaaaagctttagtaaacttgctgcataaattgagaccaccactgtataccagacatttctttgcaaatatatccgtttctcatcttcggttccttctgttcttaagagatcgctgataacagtttgtataataattcctttatactacaaaaagtaattacttttcctcatgccctgttagttcttgcaagtgcacatgtactaatgttcctccttttttccctttggcagaggagattgaagtggatgttgaaagcacagagttctcccatggagaagtggacaatatcagtaccaccagcatcagtgacattgatgaccacagcagcctgcagagtattgggagtgacgagggttactccagtgccagtgtcaaactttcgttcacttcctagaacccagcatgacatgacagtgcagggcaaagtattcactgggccaattcaatccaaacaatctcttaaattgggttcatgatgcagtctcctctttaaagctaagcaaaactatacttgaacaagagtcaagagacctctatttaagcaaatacttagcaaaaagtggggcagagcctcccctgcagaacaaatattcatatttgaaaatcacagtttctaatggcagcagaaaatgtgtgtgaaattttctcaatttgatttagttgatttgaaagaggacactggagattacatcctctttttctagtttgctcctatcatattgattgagtagacacatt

SEQ ID NO: 58964 - DNA, 1412 bp, Bovine  19866880497626
  misc_feature (1)..(1): n is a, c, g, or t
ntctttcttattaactataaccttcatagaggcatcagaccttgtcttaaaaaaaaaaaactccacctgcataatgctgtgcagttccaaagccacatctccttggcctccttgaggtcagttttaatccccttaaaaatcccatcagtaaatgtgctgtgttcacccaacccaatgaaaaattccaagaagtctattggaaaagcaaaatataaaacacaaagtcataatgtgtccatggagaagctcacacgtacacttataaatcttccaggactttcaatgtgaaagaacgtttaatctgtttcactccaaaagctctcattcacttcaatattgttcatagggaaagaaaagcctgtgaggtttgtaaagttggcttttgcaatattcattttttcaggctccatgtaaaaatgtcccagagttgattcaaatctacttttacagggcagagactggaaaatcatttaggagtttacacgtgttagttcattaaagaacctggcaggcctccctgtagaaaagaccaaataaaaatcctagcatccgaatctcgagaactttgttccaggagttctttgcaaagaagtcattatattttataaagctttagagtaccataattgccctggtctacctgggaatgaaaggttttgccaaagtgtcttttggaatagctttaaaatctcatttctaggttgagtttattggctcttcattgggaacattttgttttggggggacaaaggtgccatctgcttgcacttaaatttgttctgacctgagttgttaatgacatcccttcctgagaatatgtgaagaccacgatttatcaagattaactatgcagttgactgatcttagctcaaatactatataagcaacctgtgtacaagcaaagaaagccctgggttgttcatttaattccaaacaaagggaagatacatttaatgaattcacttggccacatcaatgaaacttttactgaataggcacagctttcttctatgtttaggtagaagccatttcaagccctaagagagttgaactcttggaggaaagagaagaacacactgtgctgtggaggagagatcaggagtcaagtctcctgcagaattcttgtctgtaattgcagaagctaataactcaggtcagacaccacggcaattatttcagcccagttcctgcaggaacttggtgccctctgacattaattcatacccaaatcctatactattcaccacccagggatctagagagctgttgatgggaaccacaaatatgaggagggagaaaaacagcgaaagacaaaaaggaggagcctaaaagccagaagctcttcttggcaatgtgttaagatactctcctcttctacaacctgagggcagaaagagcaaaggatcgggcat

SEQ ID NO: 58965 - DNA, 1332 bp, Bovine  19866880533085
  misc_feature (1)..(1): n is a, c, g, or t
ncttgataagccaggcccatgttgaagaaactcacttttgcaaatagatgaacatgagtgcaaatgagaattcccaaagtaaatactgcttagatgtagttgactcaaaattaaaacccataagggcaagactccaagtccacatatgttttccagactcttggaaactcttgcattttgttgttgtccttagccttctgcgatccctaacttcctcctgaagttattgaagaaatagatacttggatgattagaatgtgatctagctggcattcatttaaaggcacatgtctgtttttacaccccaaccgagtttgatcagaaaaaagaaactgtgtgggagttggcaccggggctcacttaggatgcttcgctccagagtttgagaaaaagcaatgactgggctttaagaacatcaatccaagcctctattttgggcccaaggtcactcttcaccattctctggctcttagatttctcacctatagtgtctctcctacccctgaatctttttgatgtaaggaacttggttctgctggaagcctttattttttaattattattttttagaagtatttttatttgtttatttggctgtgctgggtcttaattgtggtacacaggatctttttagttgtggcatgcgatctcttagttgcagcacgtgggatctagctccctgaccaaggattgaacccaggccccctgcataggagcgaggagtcttagccactgggccaccagggaaatccttctgctgggtacctctaaacaacacatggaagtttattttatgtatcagctgactaggctatgctgtccagttgtttggtcaaacactagtctagatattgctgtcaagatagatgtgtttaacatttacaatcagttcgctttaagtaaggcttcccaggtggcgctagtggtaaagaacccatttgccagtgtaggagatgtaagaaacacggattcagtccctgggttgggaagattccctgggggagggcatggcaaataagcgaataccctttataatatggggtgggtctcatctaatcagttgaagactttaagagcaaaaactcaggtttcttggataagaaggaattctgtctcaagactatgatagagaaattttgcctgaattgaaactttattgaccagccacacatatttagtactcaagcctgcaacactggctcttacttgaatttccagccttctggctctctctatagatttttggagttgccagcccctacaaatgcatgaatcaatttctgaaaataaacctctctatctcctctttctcttgatatgaattatttccta

SEQ ID NO: 58966 - DNA, 1329 bp, Bovine  19866880584591
  misc_feature (1)..(1): n is a, c, g, or t
ntgggggtggattgtgggcaggaagggatcgacctaccactataaatgaatactaccaagagtttaaatttagataccctgattgataatatgaggtcatttacgagaggtaggacaaaaggggtagggttgagttttactgtgcccaggctatctggtcatctccaaggccgcctcatccaacactcagtctttgggcattaattaaattctttagtggcaagctaggcaagtgtgtggcaggatatccatcctttctaactgaaactgctctgtctacaaaccctgctcagggagtctgaggtaggcaggtctctgaacttaagaggaaactgactggtgccagggtggacacctgacccaagggcagcccacccatagactgacaagtgaccaatgaggtgatgtggtgacatggactctgaccaataggatagcagtaattaaatctaggaaccgtgtttctttcaggagtggtaagggattcaaaagtggcacctggggttaacatgcttatgagcttatgtgcagaggatagcttgggctttgagagagatggaaagagcaacttctggttctgacagcatttatttcccagcttgtcattcattcactccttcattcaaccaatacttattgaacacctactataaatcaggccctgcactagatccctcttgaaattcaatataatctttgttctcctggtgcttcttatctgaagacaaacattaataaaatataattacagataaatgagtatttcttaggcttcgataaaatgtgaagaaaagctataggtaggaagctatgagagactgaatgggaatgtctgacctagtttggaagtctgagaagtcttgctgggagaggtgacatttgagctgaaacgtgaaggacaagtaggagttatttaattgaagggtgaatttaggggagaaatgtgttccaggcagaagagccagtgtgaacaaaagaggcaggagggagcatgacttattgaaaggactgtcataaaaccactgtggttggagtagagtgcagctggacattaaatgccatttgtatctatacacaaaatgtctttttttttttttttttaatgtggcctgaggagactgtcttccttggacacaaaagttcaatggcaaaagcacttgctgtatatcccaggtgctgagaggggtgcgagatcaataaaatagcttcatcctgggctctgccatttactagctatgggacctagggcaggttacctagtatctctgaggatcagtttatgcatctgaaaatagagacaataaaagcatttgtacagggaattccctg

SEQ ID NO: 58967 - DNA, 994 bp, Bovine  19866880656675
  misc_feature (1)..(1): n is a, c, g, or t
nctatgtatgaggctcttattggaatatcttatttacagtagttgtttattagttttttgtgtattacagttatttgtttagccattgtgtgttagcagttatttgtttagccatgatgactccctggtagctcagtcggtaaagaatctgcctgcaattcaggagaccagggttcgatccctgggtctggaagatcccctggagaaggaaatgggaacccactccagtattcttgcctggaaaatctcatggacagaggagcctggcaggttacagtccatgaggtctcaagggtcagacacaacttagtgactaatcgcatgataatcttaaaagactcatcaagtggagaatgaataaatgacaataaataccttttggggaaaaagggaagactctgagggtgatattttataaacgttacagagatgtatcaggcctggttacttaagcagttgtataagaaactgtcaggcatttaactgaggcaattcctttaaaataaaccatatggtcacatagtactattaaaatatgttgatacatccttgagtatcactctgattatgtctccctggggagtggggaactcattagcatgagttccatgtcagtccttccccctctgttccccgaatactttccacactctcttggcacaaaggggtgatcaaaatgtatgtagcatggccaagtttccaaatgaatggttcatctaaccccacggacagaatacatgacattaagaagtatgaaaagactgttgcgcttctctgagtttacttttctgtctgagagctttaaaaatgtgaattttgggggaaatgatggtggagggctctctatacaaattcttagctcttcattttacagatgctatttcccagcccaagggaaaagcatcaaagctgagaagttgttaaactgggagcagcagggtgcatacgtgtgtgtgtgtgtgtgtgtgtgtgtggcacgcacatacaggaagag

SEQ ID NO: 58968 - DNA, 992 bp, Bovine  19866880671054
  misc_feature (1)..(1): n is a, c, g, or t
ncctgtgaagaaccactgaaaattgttgaggtgtgatctcaggaagtaaccgtggtagacagtaactcggaggaggagttttcatgcctgtgagtggcaatataatgcctgcttccaaaaaataactgacatttttttgactggggagataacagatagtatctgtcatttttttggtgccttctgtgttatcaaaaactatgctaaatgcttttcatgtaatacctcctctggcctttccaacatcctaagaaagtagatgatattatcctcattttgtagataaagactaaggcttgcagacaacaaaaaggaggtgctagtgtttcactttgatatacaaatttttacgattctactgctgtgtgtgtgccaggtcctgagtgtacgcttcctgggggagtagtagcttacttagtgtgaactcttaagtccacccatcctgaattcatgttttgatataagacgggctgtagatttgggataaaacattaacttttgatttagaagacttaagtttaccccaagaattaagaaattgatgaatgcctgaaaagtgggaacaacctgtggtaattcagtcctttaggataaagaatcagctcttgaaccttcatcatgacacccagaagacaagatatctatacttttgcataagatgcaaaaaagagttgggcagaagctctttatcttggcttaaaaaaattttttttccaaagttgggagcacggagagacattctaaggaaagttatttttaaaacctggaaagactgtttagttatagaagtatttttaaagataaataaactgtaacaacttaaatcttatttaaatggacatacttgggagatgatcttccttggagaaaaatgctagaatatatgctggagatcagaacaagaagccagcctttgggagttttcagagatttcatttctaagagatgaccattagggggcaatcctgggtctaaatttagttttagttgat

SEQ ID NO: 58969 - DNA, 1802 bp, Bovine  19866880681779
  misc_feature (1)..(1): n is a, c, g, or t
nacgactgagcgacttcactttccttttcctttcatgcattggagaaggaaatggcaacccactccagtgttcttgcctggagaatcccagggacgggggagcctggtggctgccgtctgtggggtcgcacagagttggacacgactgaagtgacttagcagcagcagcagcagcatacttcaattaaaaaaagcattttagtgtgtagttgaaaaaatataattagcatatgagaccatgtattataaaaattatttcttaagagagagttgatttcaatagactgttgattcaaagatcatctaaagaagagtcttaagtaaataagggtccagcgagtaggcaacccaggtaagccctgtgcagatggtgtgagagtgtctgaagtttgggaaacactactctatatctgcctcccccaccatattttatagttaaggagacctgaggcccagggatttatcaaaggtcaagtgatagtgatagtgatgcccttgactgaacccctgctgggtggtgctaagcagctgacatgtacccctctcattttcactgaggcctggggcaggagtccatgccgccttagttgagactttttgattgtcctactctgggcctctggctgccaagtggcctttggcaaagccagcaatatcctgtctcctccactaagcaggggccatgctgggaggagtccaggcctggccttctagcccggttttcccattgcacccctgtcactatcacgctgtgtgatggagttcctcagagctttgcttcctttggggtcatgcctgcctttgtttcacgaggggcaggtatgcaagagagagagaacaagcagtgtggagagagggaagctccatgcaggcgcaaggtgatacaaaattactccctgctccctgtaacacagggctggattctgacttgttctcagttgggaaggctcttccccagccctttaagacctgactttaatggtagctgatgcctgagcatgaggtgggaaggaacaggagccccccccacctcatgggtcacatgcatccccagacagtgggaaaggcctcctttgtgcagccaggaaggggttatttccgtcaagctttgatccgttcgtgaaccctgaccatgaccacggaggtttgaaaagcagcatcttgctgctggctggcagccagctgtctcagagagctgagcgggtggggggaaagacgagaaatagcttgtttgatgtactttatctttttggatgagctcaagcccctttctccagcccagagtcaccacccaaaaagggcaggtctttgggccccaggggacagcagggagggtctgagtgggagctctctgcgatctgtctaaagtgaggagtcctggctggaggggtgatcttggtctggggtgcgtgagtcccacagtaccgcctcccgccccaggatcatcgctgctgtatgccttacacccccatctgcatcgccaaagctgtgaagaattctgctgaatcagaaggcatgaggcgagctcatgtgagtaaagcagcctgtgcagaagaggggtgtgtgctggtcagaaggcccgactcccttacctgctttgtggctttgactgtggtgcaggtgggaatgtctctgagccttccagagttaatgagagaatgaaataaatactggaggggtcatgggaatcgcttgcatggaaagccctgactgctggtggtgtgtggtcctctgtgttagggctgggccttggatctgcccatctgattttcagtcacaactttaaaaaatgtctctcttat

SEQ ID NO: 58970 - DNA, 2996 bp, Bovine  19866880681786
  misc_feature (1)..(1): n is a, c, g, or t
ncagtctattgaaatcactctctcttaagaaataatttttataatacatggtctcatatgctaattatattttttcaactacacactaaaatgctttttttaattgaagtatgctgctgctgctgctgctaagtcacttcagtcgtgtccaactctgtgcgaccccacagacggcagccaccaggctcccccgtccctgggattctccaggcaagaacactggagtgggttgccatttccttctccaatgcatgaaagtgaaaagtgaaagtgaagtcgctcagtcgtgtctgactcttcgcgaccccatggactgctgcctaccaggctcctctgcccatgggattttccaggcaagagtactggagtggggtgccattgccttctcctacacaatatattatatgtcttagatgtataatagagtgattcacaatttttaaaggttaaactccatttaaagttattacaaatatcggttaaattccctgtgctatataatatatccttgtagcttctttttttatacatagcagtctgtacctctgaatctggtaccccaatcttgccccacctcctttccctctccacattggtaaccactgattcattctttaaatctgttaaaatgctttaaaaatagatacatttaaataaacctaagtatgaatgtgcaccacctaaaatcatctctcatgccacatcttggaaaacacgggactcactgggttccaagagcccaaagggctcattgcggggatgacacctctgatatgacacccagtcctgggaacctgcctgaacaaccaacctctctctgcttcagagagaagccgcacgatgccaggacttggaagggcctggtagccagagtggcaggttttgatcggctctggggctaccaaccttggggatggcctcgctcacagcatagctggccttgtcactgacccacaccttctcccttggggaaaggctggcacacaggatcttgagctcgctcaggatggacttgtacggaagcacctggattctgtactcggcttccaggcccaagtcaagcagtaggtgttccttcacaatgggggcgtctatgcggtcaccatcaatgaagagcctgcagaggggccagaggagaggtgagaggaaaggtgggcgcaggaatcagaggacaagaacacagacccacactcaagagacaggctctaccttccagcatcccaaatgagcagcttctcttccctccatgcccttcccaaacctgtgctccctgccccatgcctgctaccttccaccctgtcccccaagccaggacctgggcactgtcctccttgatgccctctttccctccttcatggagatctttgaacttacgtcctaagcacccctcaaacctctcctgctttcactgtagccttgcccacttgctgcccaggtcagggttagggttaaccactaccaactcccatggatcagtgccatggcctcctaactggtctccctgccactagtcttccctatccaccctattttccaatcatcataatccaccccataatttcactccaatcataaattctctatgatttacaagcctgaccatgtggtttcctgtggaaactcacagcatcctcaggacaagggcccaagctcctgaacctgactcacaaggccttgcttatgtggccctgactacctgccggtctcccgctccaggtttcaaccacactggaccactctgggtccttcacctgcactgcactctctcctgcccagtctctgagaatgctgctccccagcttagatcacctgtttctcttcctcctcattccctcctcaccgagctaactcccaagtaccctgaatctctgtctcaatattactgtctcctctgatcaggtcaggcccctccaataacatccatacctgccccactgacaagtgagtgccaactatgcatcggaatccccaactctaacccaggaccctgtctgcctcattcatcccaacacctagtggagactctagcgcataataggcactcaataaacatgcctgaatgcagaaagccactcaaacaagaagagcaatggcaggaaggccgcaagcagcagtttaaaagacaattcaacaaggcacgactcaggggtgtttcctgcatcacttctgactttctgaatggtgaggtctatttgcattgtggacccaggactgtgtataacaaagcccatatccctctctgccttggctgcaaggagtccaatgtgctgcctaaacaagtctctgcagcaggaattctgtgaactaagcttactctctctggttttgttctaatgtcctcgacacttatttttttatcttctagcactaccaataattttcaggattattagagaggcaggatataaattaataagtattgttaaggaaggcagaagggaaagggaggcaggaaagggcaggagaaaagcaggaccctggcgcacatcaggcggagaccagtgggcccgggccagggtggtggactggggctccaaggagctggggaagactttcaggtgcggggccagcactcacatgatcgtctctagtcctaagattgcataggagaaaaatacaggattgtgctctacgtctgatcctcggagattgaatagccctggaaaaaaaaaattcctgtcacccgcctgactgcgagttaaggggcagctgggaggatgcagggagcgcttccactggccgggaagggcagggtagacctctcagagaggccaggagcctcccttccctgtctcgcctctgagctgcagttgcacatatccaccagatgagggcaccagaactgtgtctttcgctgccacatcaccatcccgggaagggaacggaaagagttattagtcagaacacccgagaattgccctccagacaaagagttgaaatggtccaccccagcgggtgacccgccaggcctggccttgccgcagaaaaacctctgg

SEQ ID NO: 58971 - DNA, 1670 bp, Bovine  19866880705012
  misc_feature (1)..(1): n is a, c, g, or t
ncctttttgaccctggcgagtccctcccctctcttacttttcatttcattttattgctttttattgtttctcggcttccctttctcccctcccaggcctttctagctccatttggagctgacagtctttagtcttctcactctttttcacctctctcccgcgccgggatcatcccctggactggtcgtgggccagagctggggcacctaacacggtctcccgggggcgggcggcaggttggccggcgagccaggacctaggagaggggccacagggtgcttgtgaaggggactgcggtgcatttggtttgagaccctccagtagctgctttaccagtctgcacgttacacctgctgggggagatgactttgctagtgggtgggtgatttactgtcaaattacagagtattgatttctgtatcacttcctgtgattgctgccgccttttatttgagtccgttttaacctcaagtgtatggaaggcttatcctgtagggaagagacgacgaggactcagcccagccagctctgggaggtcgccttgagatgtaacatagctggcattcagaactcaggtgcggtgagctgagagcgtgagggcgctgttttagaaccgtgcaacgtgtggagttttacatcttccagatcgggagattccagagattcaggggcagctcccacctcgattagcacctcttgcaggctgtctgtccccagttgattcctgttagggagacaccagaggcagaagatctttctcttgcacccagcctcagcccccaggagatggagagtgccctctaaactctgcagagctttcacacagagcccctgatttatttgtcttcctgataccctttttggtctcttcttagctgtgagtacagggaaagcttctgcctctccagcagcatgaaagatatcttccaggaaaccccttctggtcctacctctggtcttcagccctctccaaggggccgtgcaagccatttgaaagttattgccacaggaagtaggcagctctgtagactcacatctcaagtaaaaatgattttttttaaatttttaatgaaagtaacatgctgtacaatgaaaagtggatcttctgcacaccctagaacccagttccactccccagaggcaacagtcaactatttcttgttcatctttagataaattaattttccatgagtatcttttaaaaatagaattattttgtgtatttcctgttcctgcctctttcacctaactagattttgagagacttgtccatatcagagcatacatgtcctattcactttttaaactcatcccctgatgatagccagtaagtagattgcttcatgccttagaatttgaagcagtgtgggagagtatggcatcactgactcgatggacgtgagtctgggtgaactccgggagttggtgatggacagggaggcctggcatgcttcatggggtcgcaaagagtcggacacaactgagtgactgaactgggagagtatatctctgtccaaatgcttttgtgtgtgcactatcttctggtaaaattatgagaatcgccaggtcacagtttatgtctgttttaaatttcagtagaaattgtttgatacttagccttacaacaatgctgaacttttaagttgttgccaaagaaaataatttcttca

SEQ ID NO: 58972 - DNA, 1339 bp, Bovine  19866880736344
  misc_feature (1)..(1): n is a, c, g, or t
ntctctccctagccccaacaccttgtttctcgattcattggcctgttgtgcagtgagcagagcgagcttggactcggtaacagcacaacaagatctttagacagtttcaatctattacatttattttttattacttaacacccacatgattccaattccacctaacttcaaagaaaggaagaaagacctggttggtgatgaggtcatatgattgaatactttgttttcctctctctgttgacgagcagttcctcctatgctcctacttcctgaagccactccatggcttctttgtgccagagagctgggggccgccagggggacgggctgttttcacagctgtgctgaactcccacccgagctgtccatcccactgctcacacacttgggctaccccagtgaagaggggaaggatgtaaatcatgctctcccacatgtgttcctggctcatttgtctctgagcctcacccaggggcctcttaagttctgactattaagtggtgagccaaaactgccaggaaaggtgagtctttagcataacagtggggcccaccccgcgggcaagtcgaccctggagtctacaggtgcgcctcgctgtacacaataggggcattgatggaaccctagactgagggaccacacacgaatcggggccaccgcctcttctgagggaggaggaaactgctttccctgtaaagcagggatggtcttctcaggttttggcagttgtgattttacgaagatgtatcgatatcagttttttaaaatgcactgtgggagttcaccagtaataacagtaccaacactgcttgtgttctttccgggctccagacacagtgcaaagtgcttgtctggagcccagagcgttcttttgtttagtcttcggaatcgcctttagggtcctgcgtattcttttccctgggtcaccagttagcaattgattagaagagaggagagtgctgcattgcagagcaaactagatggcactttctggaaatgagcaaagcccagcgcctcaaacctagggggtgggggggtggtgaagggccccagctcacgagatggcctgctgttcccaagagtttctcttgctctgaggctacataccatctccatttctctttgaaatctgtggcggccttgcagcatctgctgcttattttatgaactgaggcaaaaaggaggccccgaagcccccccacccccgactctgcttctcccagcactctggtgttcccgttttgattgtcggctcccctgaaaagtcctgcaaagatctcagctgcccaccagtatttggctggctgtctggtgtgcatcttttctcttaaccagggtc

SEQ ID NO: 58973 - DNA, 1204 bp, Bovine  19866880768104
  misc_feature (1)..(1): n is a, c, g, or t
ntatcgacccccatggactgcagcctaccaggctcctccggcccatgggatttgccaggcaagagtactggactgggttgccattgccttctctggcaaaatactagttcctggctaatctctataccttaaaatcaatagcattgattttattaatccagtttgtatgttcacaggaaaattatttttctaagaaatcattcaggctctcaccttttgaatcggactggattctgcctgtggaatgtgtacctctctaaataaacttgcttttaaacacacaaaagtaataataaattcctaagaaatgattctaaaatgtttaatatgcttttaaaataatagacaagcaattagtaaaaaatattgtaagagtccgtattacatattatttcaaactcttatagacaagatttttcctcattgtttgtccctttatattcgactttcactccaaagggtcagtagaatgagccctgtggaaggaccaatttggagtgttaattattggatgtcttagaccaaagaatgtcctattgggctgatatttagacttgagatttttcaagaaaaaaaaaaaaaaaagttttccaaagcagtaatatcctaacagacggggatggaaatgaggaagtggtgtggttataagaggcagactgttctgtggatttcccactggtcctcttgacttaaatgatattttctgggttaagaaaaaaaaccctgacagtcccagcctggacctcggactgcggtgctgccagacgctttccagtgagttgccagactagcgtgtgtccttacttcatgtacgggcactttgttttataagcaggatctaaactaattgttttttccaagagcaatagcttcagaagattcttactgagcaggagctatggaggaagtcgttgcagtactctataactcacccctttcctgttgagtaatgctctgggggctggatttcagcagtggctggttgggcagactttgactttagagtaggtgacctcctcagttttatgagagaacatgtagatacagccaacttgctggcaggcacaggcttactcttccaaaggtgtttactggactaacaaggttaaacattacttcttaccctgatttctattttggaaatgttggcttcaattgtttcaactgaatgaaggtcattttggggctattaagacaaaccaaa

SEQ ID NO: 58974 - DNA, 1045 bp, Bovine  19866880785986
  misc_feature (1)..(1): n is a, c, g, or t
naaaatacagaacttggccagacttactgagaaggcaaagatttatccagtcccatggataaatccttcagagagagatggagagtagcaacactggaggatgtatggccttctctccatgtgtatttatatatcacctcatcccataaatgaattgtggtatgtttaatattcattactcaagggttattctttttttaaagtcactggggcaatggaagcaaagaaaaatacagttggaaaattttaatggaaaccaggtggagtcaatacccaaaacatatgccataaagtcctataaaattgccagaggtaggctaaacatttgggtctgaacagcctggtggcctgagcaaggagggaaacaggggcagtcaccagctatggggttgggaagataaaccaccaccaactcatgcggccttccagggtgctgagacctggcgtgctttttccctgggtcctcacacgaaggagcgcaatgggtacacggggctccggtgagcacactggtgtgagctgctcttacacttcctgcccctaggtcaggtcgggctcaggagccagggtagacctgaggggctcaccctcagaatcagctggcaaacagcttagagaatgaacatttctattctcccagacacatctcctcttggagcactgcggcagaccaacagaggtgttgcttcaaaacctggggatgaaggaactggaccacaccagctttaattccgcatctggcaccggaagcccgtgtaaagttggctttggcaaaaatggaagggtaattaataaggagactggtaagggagtgagagttacagaaccatccccagctgtggggcttcacttggcttacccgccagtgactcacgggcttatgagcaatcctcatatgcctgatttagaggacttactcacccttcagagaaagaccttaatgcaataaagcaaatgtcagcaagtgggacgcggcttaaccgtatcaccccagcctgcacccagcttccccctccctgcctctccctgcctgaggcccctccag

SEQ ID NO: 58975 - DNA, 1213 bp, Bovine  19866880840474
  misc_feature (1)..(1): n is a, c, g, or t
nccaaacgatccatttaatatcttttgacatgtttatcaccccatgttacaaagaatgtattccaagttgaaaacatctttctctcatctatgaatagagagataaatagatcttgtggctaaaaacaaagtcactcttggttaagtcccacatcttttcaaaggaaaaagtttccagagcaaactattaggaaaaattactggcaattgtttttggacacatgtaaaatgttcaatataaagttagttgtcacataataagcagttagaaaagtgttgagcaggacggggtagtgaaggggagaactggggctatgagaaaagaacatgcaagtatcacagatttcttaagaatctgtgtcactgagtaactacccttaccccacctcttatcaacaaaggcatcaaaagattttgcaaccaaaggaactcttgaggaaaccattggaaactgttaataacctagtgtttccttataacactgaccacaggaatctaaacaactttctaataaagacatggctctggaaagaagcaaagtaatctaattataattccatcttcccactagtatagccactgtccaaacagtccctttggaagctgaagaaaacccatcacgagttctccatttgttctagatatatgatgagggtacctctgaggaagatcggctataaagtaacttcatcaagtacacttgggagggattggagataaggatcttatatcttaaatctatgccagtggttttaagttcaatacttccgtgaatctattcagtgttgactagatgaaaaatctgatttgtccatttcccactgcctctgttaactcttggcaccctaaaccatgaagttcatttttcactttctatcccaaatctggagttatttaacaaaaaaattccatttctttccaaagcataaggaaaggtattcccctatttctaaaaattatatctactactgtttgtgaagggggaaaccctcaacttcagctgagctgtaatcttcaaattagttttaattctcaatataaaaagaggtcaagactaactttttaaatccttagtagttcttacttgcactctcttgctttttataaatattaaagtataagtatatataagcacataaaaaagtgttagttactcagttgtgtccaactctgagacttggtaaactgtagcccgccaggctcctctgtccat

SEQ ID NO: 58976 - DNA, 3037 bp, Bovine  19866880902418
  misc_feature (1)..(1): n is a, c, g, or t
nttcacgggaaatagatggggaaccagtggaaatagtgtcagactttatttttgggggctccaaaatcattgcagatggtgagtgcagccatgaaattaaaagacgcttgctccttggaagaaaagctatgaaaaacctagatagcatattaaaaagcagagacgttactttgccaacaaaagtccatctagtcaaaagctatggtttgtagtcatgtatggatgtgagagttggactataaagaaagctgagtgccaaagaattggtacttttgaactgtggtgttggagaagactcttgagagtcccttggactgcaaggagatccaaccagtcaatcctaaaggaaataagtcctgaatattcattggaaggactgatgttgaagctgaagctgcaatactttggccacctagtgcaagagctgactcactagaaaagaccctgatgctgggaaagactgaaggcaaggagaaggagaaggggatgacagaggatgagatggttggatggcatcacctacatgatggacatgagtttgagtaggctctgggagttggacagggaagcctggcgtgctacagtccattgggtcacaaagagttggacacaactgagtgactggactgaactgaactgacccacaagtgaagacatctcttatggtgttcccttctgggtaccccaaattcaaaacaatttcccccacattagagcaaaaatagggaaattgagccttgctggagtcagtggtctgagatgaggaagctggatttaagcagttctcatcttgttgcaaattcttgaacttgactacacttcagaatcaactgggtagtttgttagactagcatcttcttaaagactgtgtctcgaagtaggtctagacatctgaactttaaacaagcatcctggggattgtgatggattgctatttgaggagcatgaatagttcagactacgtgtccacactgaactcaggatgatgactgagttttagtacaattcaaacttttcctggaaaaaagaaaaaagccaaaaaagtggaggccctgctatctgtgacagtcaaacgtcaaacagaacaattcccctcccctgctataccagaggtcaaacaggatgtgtctcagatggagtccattgatgcaaacaggatctggagagaaatagcaatttttccttttcattctgaacctccatctgaccagttccggaaacagacctgattagagcataattgatttggactcggcgagcagagcaggcaggcctgcacatggccttcccgcacagtgcaagctgtgcaggatcacctgactcttcaccgcattaaaaacaatgcgatatgacatgtgctggtttcctaacaacattcacaaactaagtaagattatacagtcaatgactgtgccaattacactttagaggagcagcagagcacgtctactcagcccccaacgacagcaaatgaactacagacactgccgttgcatcaatactgactctggtcacacaggatttggggtcttttgctggtcaggaaatgatcgtgtattactttccaaagttgaatctgctattccactttaaacaaggattctaaacagtttgcctttttgtttttttccataacacacatcatagactgactataattctaatttatcagagattgaaaagacaaaccaaataaacaacacacaaaaaaataacccatcataccagaaggctgggaggaaatgagttgcgtcagagaagaattccagcagggactttttggtcggcgtgttagacttcttactttcatgcagttgtttcctcttttgtcctagtctctgtcaagacccctctgaatggcaagcaggacaaccagtcgaccaaggaataactgctggttggaagcatctcttaggtccacaccataaatcctactccttgaatttttcattccctcaaattaggtctgcaccatccaattatcccagaaagtgagaaaaccaacggtaatataaacatttaatctgtgaatttacaggaaaacgtaggcattctgccatgaaatataatgagatataagatgcttaatctgtagctctaaatggcttaattttgccagtgtgccatttcgttttgttctgtgtatacctgagatcaatgtcctttatgattaagaaaaaaaaaaaaacatatattctattagatcctagtttgtattttttttgcaatataaaataaatgtatctgtgataactttgatttaaacctttgtattatggaaaattttaaggtagagagactattataatgatctctaagtttatgaccagtccccagcctctgctcccagattattttgaagcaaattcacatcatatcattcatctgtaaatgttcagtatgtagtcctaaaagataaagtttcttctaaaaacataaacaatgtcattattatagtatcaaaattaacattatctctttaatatcaaccagtatccattcatctattgatttttaagcagaaatattacagaaggtcatgctgatgaaaatctaacaattcccgcactgctacaggaactgtgtaattgtccctcacccccaacaccccaaggcaaggatgcttaagaatcagatgcacaaaagttctttcaaggacttgaggctgaattcatgtgtccaaaccccgctggctgcggagaccgggttggattccccagcactgttgactttggtctggatgtttatccattcatttttcagacctccagtcgcttgtttatcttggccatccctttccagcctgagacttcccacactctgccatctgggcaccctctctggtttcattcccacagcccccgtcctgagtagaaaccttagcggaagcccagatcttgcaaaggtcccaagtgctgggcctgtgttttggtaccctagttttcctgtagaaaagagggggccaaaagggcattttggagagtgttctcaagcttcattaccaaagactacaactctattgccagttgatagattt

SEQ ID NO: 58977 - DNA, 1894 bp, Bovine  19866880912327
  misc_feature (1)..(1): n is a, c, g, or t
naggcctcacctggaggtgaaggttcacaaataaagcaaagctattaggagtttggctggggctccatgacagcttgtgagactctgaaaggacagacccgatttcagacaacagtgtgcgaggctgtgagggttaatattaggtggccttgactgggtgaagggattcccagatagcaagctggtaaaacattatttctgggtgtgtctgtgaggttgtttctggaaaagattaacatttgagttggcagacccaataaagatcaccctcagatatacaggggcagcatccaatccgttgagagtctaaaaagaacaaaaaggagcagaaagggcaaatttgctctctcctgtttgagatgagacatccatcttttcctgctctcagacttcagcattcctggttctcaggcctttgatgtgaaaacatccctggtaccctctgcaagctgaagaaccaggaaagccagaggtgtaactccagttcaaaccgaagcctgagaaccaagggagctgatgttgtgtgagccactgctcaaaatatcataatctctctctcttttctctccctctctccccatatgcatgtgtttcgttctgtctctctggagaaccttactgatacagggacttatggaagaccctataccaactgctacctgatgtgctccaccatcccacccaatactgagataggacagttacagtcatatcagtccagggcaactgcctgatgcttaaaaggcaagagaatgaaaaacaccactgatgaatctggcagagaatccatgtgacctgaagcccaagtccaaaggctgaactctgggacagacaggaagcaggtaagggcccatcagaagtacccaggcaggggaagaagaaaggagttccctgaggataaggccaaggtctgtccttcttaaatggtggatgcccgcctcctctgctacctacactcctgagacccgacttgtgctagctctgctacctactcacgttcagtcctcagtcaagacgaaagatgaaactctgaatcctgttcatctaaacaacagaggcgaatggaagaattccattaccaaacccccaccctaaatcccacgtctctctctatctccccactgcctactaaacttaacattaatgtacccggccaccacgtcttcccacatccaacaactccctgtcctgcttgatcttctgcttctacacttaacacctgctctcccacctcctcctccaacctttcaaccactttcacttgccagattctcctcttcaacggcctctcctctttacatactattctcccctttctctcccctcttcaaggagcaagttcgaacccattattgtatagaaactgctactgaagatcaacagacaaaggaattccctggaacatggagtcccctactccactctgagatgactggaaattccacagacatttaaatctggaaaatgctgagtatttcatctgcttcttagagttacacagtgcaccctagtatatcaaaggctctgagaaatcctatggttaagaaactgttcaaatggacacagttccctgtgccgagccctggaggacacacttaagatgtggtttgacaactagaatcctagagtacaaacacgctgaggggggaaaggaggaaaccaaaggaggggttgatgaatcccatcaccagcccatctccactcagtacctgatgggcgtctcccgacgggatgatgtaggcctggattggttccgtcacatactccaagttcctcatggcttgtctcagctgccgaagcagctctgaagttacctttggagccattctgatgtctgcaacaacaggaagaatttgttccaaaaccagtcagactgcccccacgtaactcaatg

SEQ ID NO: 58978 - DNA, 919 bp, Bovine  19866880986153
  misc_feature (1)..(1): n is a, c, g, or t
nacgttttagttttcccatgtttaattattgatgacagcagtttcagtgcagatatcagagaactgtatccctgcttttagtcatgaaaatcttggtatagcttggcttttaaatataatttataccctctgatcttcccccagaaagagtcctttgtatttatttttttttaacaaatatttgttttgttttgttctttttatgtggaccattttaaaagtctttattgaatttgttacagtattgattcagctttatgttttggctttttggccccaaagcatgtaggatcttagctctccagccagggatcaagcctataccccatgcattggagggtgaactcttaaccactggactgccaggaaagtcccaaagagttctcagttgtatgaataaatatatttgtgaaattttcttgggattcagtttttattagcttctcaatgtctttttttttttttaaacaaatataattctgtttttggttttgtttttttggtatgcaggatcttagttccccagccaagaatcaaacccatggccctctgcattggaagcttggaatcctaaccactgggctggcaggaaattccctctttctttttttatctcagaaaaaaatcaagaagacaatgaaaaatgatccatactcctactagtcgatgaccccttacttctgcttatgaaatgctcatggaaaatcgttccagtgctacaggaagacatagaatgagatgcaaaatgctctcattatccctccccctataccagtttctcctcccaaaggtctgtgctattcatggcttcttatatatcccttcagaaactattgacctcgtttatcagcattataaatgcattatgtacatcctcttctcagaaggttctgctggaagttaagaacattgctctctc

SEQ ID NO: 58979 - DNA, 1376 bp, Bovine  19866881018020
  misc_feature (1)..(1): n is a, c, g, or t
nctcgtcttcacaccatgcacgtcatccttgccttcactatcaggacaggtacatccatggagatgaagctcttggaaaatagctcatggttttctataaaaggagaggatttttttgttattttatatagtcaacatctttgctttattttacaaaactgaaatgcttaagcaatgtactaaggcattactttgatcccaataaagacagatgattattttaatagactatgggcctattagcatgaagctaatgctcttaaatggtataaagggaagaaagttgttagaacaaagaatgaaggctagataagtccagtttgatgacttgacagtttcattgtaaatcaagtcagtataaatgaggaagacaatatacatatatttttctttaattctggagtcatctggcaatcaaagttgagaaaaatttcatgcttctgattggaagacatatgacaaaccaattttaatttcacaaattcttaagaactattatgttgccaaaatccagattaaggtaaatgggtataaatgctgaacaaaagtagcaccccataataataaaagaaaataaagtcactgggaactgtaagtaaagtgcatggtgagaaacttactgtatcaggtgttcaatttctttatatgaagacaaacgacagagggacagactctaaagattaactgggtggaggctgtgggaaattacattgaataccttctaatttttcagggatattttgcggtgactgagtttgagactgaatttgtgaaacagatgaagcgtcatctgagagtaattcctgctcagcatctgttggataagagtttagttaaaagccatgcaaaacaaaaaagcattaagattttaggaaggttagtgcatacatcaaatacctgcatacacagggatgataaacgcttcagccatgagctgagcatgctcacagttatcccacacatcaatcattatgtgtggaaaagaggaggttaatgtgttaacactccggctgctactgctaatttgacatacatgctttaaggaagcatggctactggcagcccaggcaaataatacaagcatttagcttttgctacagtgttagaaaaccaaaaatacattgagcagccaaatgaatggaaatctgaaagcctcaccaatgatgctacattaatgaggcaaaatgcctcactgaatttttgaacaatatccaattagtgattcctactggagcaatattagtgagctaattcaggtcacaatgaatgtggaagaaactacttataaagttatatatatatatacacacacacaaggagatggttctattgtgctatatttgttaccggcatctttaggctttcaaaaaataaga

SEQ ID NO: 58980 - DNA, 671 bp, Bovine  19866881122435
  misc_feature (1)..(1): n is a, c, g, or t
ngattgaacctgcaccccttgcattggaaggtagagtcttaaccactggactgccagaaaagtcccaagagccacttttctaatctccttatgctcactcagtcatatcctattctttgcaaccccatggactgtagcccgacaggctcctctgtccatggggttctccagggaagaatcctctcctataaattggacctcataatgtactgcttaccctgatgggtaagatgattgtccaaggatacaggctgagccaccaaggctgccacccggtgacccatgctctggggctttcctgggcttcagtgaaggggaaagagtgacatcattgaccctgagctcagggaccctggtgagtcatcagagtcagagggggcttcagatccatcccctgaccggcaaagcaaagaggacaggtaatgagtaggaccaccggcagggtctccccccgccatctcctgcacccagactggagcccctccactgcttggccaggcctctgagaggtggtctgtccttcttgaaggtgattttcaccaatggtggtggtttcggcttgctttcacttagcacgtctctcttttatttaaaaatagcaaagtacttgaatgggtcagaaaaatcaatggatccatttaaacttcaaacaaaaacaattcaggtaaagc

SEQ ID NO: 58981 - DNA, 1196 bp, Bovine  19866881173447
  misc_feature (1)..(1): n is a, c, g, or t
nttccctcaacatccttcattgttcagcaagttgtatggatttctgtgtccaagatgtcccgttcctccctttctatctcaaagccactgccttagttcatctgtttatctctaaatgccttctaacttgtctctctgccaacactctttatcactccgttcttcacaataccaaatctcagacacatctgattatgcctctcattagctaaaataagtgccacagaataaaacctaaatttcttaaaatagcacccaaggccttcatgacctagtgctctcaaccttatctttcctgttttctcttcccaccacatccatccacagacccacatgcccgtggcatagcctattattccagtcagtaacttagtctcgtcttcaacatttaagagatcttctaaagctcaagtcaaatgtcatctcctctgtgaattattactctccagtgggataaacatttcccttttctgtgcccatctgcacttcctataaatgttgcgatagcattgctctcaggctagtgttggagtcagttacataaggatctattttccccactatagctcttgtctggttcacatatgctttcttaaaatgctgaaaacatatcaagccaccaaaaatattattctaatagaggaatatatgaatacatgtattgttgcttttgtttagaactaagtcattcgtgtgtgactcttttgagacacggttgtagtctgccaggctcctctgtccatgggtatttcccaggcaagaacactggaatgagttatcatttccttctccagggagaccccatcccaggaatcgaacctgagtctcctgcattggcaggcagattaccgctgagccaccaggaaaggtcatgaaaatacatatgtgtatatgtattctaataaaattagggggtgaattttatggtaatcttaatttaaaaaaaacattagggtgggtggtacatgaaagttaaagaagacaatcccttcatgtacttcctcaacaggcaactctgatggtaatatttttaagaaggtaaatatcatcttgggttggctaaaaaaattactgggaattgagttcgccatactttttaattataggtatggagaaaaaaataagccatcttacggacttaagacctaataaagttatttataaatgagttcctgctttctaagcccacaaaacgt

SEQ ID NO: 58982 - DNA, 1086 bp, Bovine  19866881188379
  misc_feature (1)..(1): n is a, c, g, or t
nacggggctctcagctctgggtgggaccctctcctcagccggacgatcagaatcacactcggcaaaatattaattattgttgcttccaaagccccactactggcagatgccaggccctgcccaggaagttcaaacaatcagcgtctctggcattttagtcacccccctcccccccgttggagagctgggtcggtcgtgtgatccccgtcccctccttagatgaaagccacttcctggaacccagcctaggacccacaggtgcctggaggctggtgggggctgggtagagttggggtgtgtgtgtaggtggggaatgtaaggtgaagacgagaagaataggaaagtctccaggaaaagagaataaacacggtgtaagtgaacttatctaggattctctttttttccaaaagatgtaagaaaatcgccctgagtcccaagctgccaaaaggcagagtggaggcacttcctactgcactaatggcaggtaatttcacaggcaggatgaaccaccccagtctaatcagtggttgagcatattgggaacgtgagaaagcagtgggcaggccaacccctttccaggtgactgtggggctgtggcgctcatacttttggtggcagtgaaaatgccctgtcaaaattcagtgaggtggtacaggtcctgtagggtcttgtcccctgacctgcatcagatttgtgggaattttaggaaatggtctcttgaaagtttcttgggacaaattgcttaattgatgtcaattaagtatcagttgatactccaaagaagcattccagaatcagaaacagtttctgaaaaaaaacactcataatttgtaaatgcatgtcctcctgacccctctaaaaactggaaacaatacttggggaatgagcctatccactccacaggatatttcacagctcctaagaatgatgattgcaaagagtctttaataacataaggaaatgcagaggctataaagtaggatacacaactatacccacagggtgatcacagctgttcgaaaggaaaaaagggaagaaagaacccaacccaatacacagaaaacagggggcaggaaacaccaaatt

SEQ ID NO: 58983 - DNA, 1027 bp, Bovine  19866881205791
  misc_feature (1)..(1): n is a, c, g, or t
ngatgcaaaaagatgccaacttcatctgtgcataaagcacggagcttgagtcgagtgttactgttaatccaaaatgagctgaaaatgcaaaacaaattgcccccaaagcagtttgccaaaaaccgtggaaagctgctggggccccgggggttcagtgcgtaagtaatgctctctcgatccttctgtttgcttttaaaaatatcccaatctacgtagaagcacagtctgcgtggttctttccctcctctgcgtccctggcatgcagcatcactcatgcacgcactctgcttcccatccatccagaaacactaacagagcggtagtgagtactgccttaagatgatattaactaatacatttatcctgcaaattaaagctcctattaaacagcagctcaaatcctcccctctgtccttctgaggtgaatctcttcttggctcccacttgtggtggttgcgcaaacaagatgcttttcttctcagcgatggggtgacctccatcagtacatcaaaatccaagaacagcccccccccaaataactgaggacggtggcacgtaccgatgaagtctattgcttcttgaaagtgggagctgatgtcagctgcattgctgtcttccacggggatccatttgtagtgtaggtgcattgtgcaggcctcggaggtccgccgggagacattgagcagggctgtgatgtgcaggttggcaaggaactcgcacttggatgcgtggtaggcacttccaaggtaaaggaaaggaaggatttcaactgggccaccctggaagcaggggcaaaggacaaccaggaaatattgatcagcttgctctttggggagaagaaagaaaacaatcctgacctatttgttttcaattcggaggttccctctctggttcccaggtagagagttgagagcagggcagtttaaccaagagtttgggtagagcctccatcctggtaaactctctaccctatgccactgccttgggactcagggacagtaaatcccacacagctagattttcattt

SEQ ID NO: 58984 - DNA, 920 bp, Bovine  19866881265383
  misc_feature (1)..(1): n is a, c, g, or t
nacagggtaggcacagaagtattaggtgggtgaatatatcctatctgcaacccacagagactggagttggtctgggcaaggccttgtcctggcttccaggggtacagaaatgacctaaataactgtttaccctataaacttatgggggagacagacagacctgcatgctcaccacagacttcatcaaacgaaggaggtggccatcagcaggggggctggacctgcttgttggaagggtgcaaattgagtttagagagacagttgttgctgagtccctggtgcgacaggcagacgtgagcctgtggggaatagagacttaccatcagataaaagtcaggcacacacaggctctggagccccactgcctgggtttggtcctccactactcactagttatatgatcttgcctgagtttactctaacaaaaagtgctgacttcaaaacctgctgcagagattctgatctagcaagttcaggctggctaggagcctgtgtagtttttttgttgtttgttttcccaagcatcttgtgattcattatagatgggccacagaccatgtcttgaaaagcactggcttgcaggcagagatcatgccaatcagcaaactggagtgtcagacttgtatctcagtgacgtttttcagtatgagatcatgaattgtcattcgaagttagacatttaaacataataccacccagtaggtgccatggagaaggcttcaggacagcagccaaggaggatatccaacaggctctgtctccccaggccagcccaggatactccccaaaggcaggtagcaagggactctgcaaatgtttattgatggtctatcaatagacctcagagaaggcaatggcaccccactccagtactcttgcctggaaaatcccatggatggtggagcctggtaggctgcagt

SEQ ID NO: 58985 - DNA, 1451 bp, Bovine  19866881420124
  misc_feature (1)..(1): n is a, c, g, or t
nctatcatctaagaacttgacagtaagttaaatggcactttaacgttcgagtatgttttcaattgtgtaattaacttacttttgagcttgattttgtgattagtccacatataagagatcaacattatgaaacaaaaaacacacacacgtctttttctctaacattttaaactttcagttaatttcaattaaaactgttctatgcatgcagttgatattcaaataatcactacatgaatgccaggtgaatcattttgtaattcacctgaaaggaagagcatcctccaagtagtatggttacacatgtgtgtccataactagctactgctagaaagaaaaaaaaactaatcaaattcatctaacttattagacataagggatatacaagggataacaaactttttctttcaagccatagtcaatgaaacactgctaacctgtatgatttagagaggattcttagtatacacaacccactgcagtaaaaatttgaaactgtcttggcttttggccaaaagaattcagtcactagtaagacctgaaatacctcataacaatctcatctagaaatactagggcacataccccaagatcaaatgataaagcattaacagaagacatgaaataaagtattagggcacccattttgaatctcaatgactagccacagtctacgactgctcaattaatttcaaataaggggtgtttatgtttaaaagaaagtactcttgattaaacatcttaaatgtattttattcaaattctacatgtttaatgtttccaaaggaatctgaaacagcactgaattttaatatcagaaaaatgagtattttagtgtgagaaacattattagtaaccctgtgtcttcaatacagtttgagctttcttaattcaacggatgctgtttttaaacactgctccctaatattacctttcactaaattgccaacaaaggacatatttgatctctacaatagtaatcctaaacattacttcaaacagctaccaatttaggttataattaactggcttgacctatcaatgacactggtgaagcatcaacacagaggtccttgaggaatgggagtgacaaagtaaaagccacttatagctaactgtaaaaggtaaatcaggtggaattttgaacaaactgaagttaatattcacctcaggttgatgcagtgttgataatcagaagatcaagacttagtgcagaactagaatcaacaaagagcctgttggaccagctggggccctacacatctggcaagcttaaagaacaacaaaaaaagacttgaatcttcagtaattaaaaagataacatggtacagcccacaatctagcatttgagctacacgtatgtcatgtgaaaagagaatcctcttccaaagtcaaaaggtgattctactttatgcagattggttactgccgttcagatttaaacgcatctt

SEQ ID NO: 58986 - DNA, 797 bp, Bovine  19866881514959
  misc_feature (1)..(1): n is a, c, g, or t
nctttaaagctttacttagaattgaatgattctctttggagcattaaccaaagaaatcttggtatttaatcttgaacaaaatctgaacttcatttcattctttcagttactttatcctatatattaccgtaattctttggctaattagttagttcttcaaagtggagtttgcccttcaagtatttataaacacagaaacttgtttgcataaaataaggcactgaacatttactctctcatgataaattttctggttaatctcctttccatcgggaaaagatttctttaagggtttatttaaaggatagctttatatttaagctatacttaaattcctgaaagcctgcactgcttttataacttctatttgcttttatctaggccactgatacaggagaattagtcaggaatggaattcccctttggctttggactcaatctctgtgattaaatccacaagggcacaacaaaaatgatttaccagggccacctcaggcagttctatgtcttggtgcttattttagtacctaagttggaaatctaacacaaccctatcctgggcatcgtgtgtctatgtatgatgaactctagcttacggggcccatgatcttccctatacatatagttacgaattcaatctgcgtgttaaatcaagttgttcagtcattttccaatacttacatgtgacctttacaatttcactgaaggtatgtaggaaacttatatcatttgaacgtgatttacaaagtctggatatgactgtgcagacagaattttcagcttgagttaaggttaga

SEQ ID NO: 58987 - DNA, 1073 bp, Bovine  19866881607844
  misc_feature (1)..(1): n is a, c, g, or t
ngaaatggcacccctcgagtatccttgcctgggaagtcccatggacagaggagcctagcaggctacagtccatggggctgcaaagagtcggacacaacttagtgactaaacaacagaccagactgtaattgtttttatttgaactgggaggagaaccaaagatttcagtaacccaagatactgccatgtaattagttctatgaaatgaagctttgagactgtcaatctagacaatgacactctaagaataaacaaataacgtactgtttcaaagcctactatttctattctctaaccagaatatacatcagggattttaagcattttttgcttttcatgaatttcttaaatgacatctgagaattttttaaaatgttacagctaaatgtggatcttgaatcatccccaggttggaaaactggaaagttgtttcatatcatgagtaatagaaaatactaaatatattcaaacttcccagtgtgagctagtgcatacattaaattaaaccaaaaaagcttaggcagtcatgtttcaggttttggaatatgtaatgtataaatataacctactacaagaaaagaaatagctcttaccattaaccaccaaaccaaaccatgagacagtattttattttcagttgtatttggaagaccatgtatttgttagctttggcttgccatttgctgaataactaaaaatggcatttatgactagaccatcaaaccccaaatggaattgagggagagattcttttactgaaatataaaaaaagaaatttccctttagtattatgttagtacaagatctttaaactagctctcttgtggaacataaggtaattagttgtcttatccacagtttcctttcatccataagatactgcttggtgagaaagccaaaagattagagtgataactcactccaccagaaaggaactgctcagcaacagaaacggtatcgaaaaatttcaagccaaactagacaagctgactaaaagagagactcacttgtggaactaaccatcctagctacctgggcagggactcactctcttaccatcagtgacactgtaa

SEQ ID NO: 58988 - DNA, 1015 bp, Bovine  19866881935070
  misc_feature (1)..(1): n is a, c, g, or t
ngaaggtatgtcgggacctgctctactcaccgttaggccaatggagactcttccatcactcattccatattcatatatggaatgaatagattccataaaagcttccttaaagcattctatttttaatttaggtaagaatgttactaagcagagcccatgtaccaattttatgacccagactacaatgctgtaaaagtaaatcatgctgaaattaataaatcttttctctctataacccctgtattgagtttaccaaccttcctataactgaaataatgaatgcaaaaatatttctcctcacataaagcagactgccaactgacactctctgcagcatccacctccacccagttgcacagataaattctactgtcgtttttatagcacctcttgtataaatctggatattttattatttgagattttgcattgacaaattttcaaaattagctcattttatgtttctacaaatcatcatgctggggtaatgaagaatgagtgttcatgacagggaatgacttagcagatgcctcagggaacatcagtcatttctttgtcctcttcctgactcttcctcttcctggctccctcctccactcagtttccttcctgaacggtggtaaaagaattagattaaatttctagaataaagattgcaaataggttacctctcatgagctcactctaattaacagtgttgcccaggctgtgtgtcgagaagagctctgaggtctggtctgggctcagttggagagagcacttgggttgatcagcaatgactgccatgggtgtggaaaggaaacgtatcatcgcacatgccagatatttcctattcctgcatctttcaaaagagacaaggggccaataaaaattcataagccaaaatagagataaaatttcacagagcctggtatctgggtgagtgctcttgctactatgctggcattaaattatgtagaataggttcaacatgatattctgacagagatcattagagtaatttcaaacccaccat

SEQ ID NO: 58989 - DNA, 1139 bp, Bovine  19866882027088
  misc_feature (1)..(1): n is a, c, g, or t
nctgagcgactgaactgaactgaattgatttcttcagagatggtctgtggctccccagtggagaggacagcctgcatctttgctttcaagtattggtactcttccatctcttcctttctctacccatgtccagggaccttaatggccactctttcagttggacctttgaattctgagtaaacggacattctctcttgcactccagtttcatttagggatcacaagtaaagagttctggcaaataaatgaaaagtcttccaggaatccggaaaacagttatgtaaggaacaaggactgttatcttagaaaagataaggtggggaagggacaagatgaccatcttcaaatatttcagagagtctagatttacacaatatttctccagacctggaagcaaaaagtaggtgatacgggaaagtcggcttcagttctttgtccttagaaaatgaagtcactcagtcgtgtccaggttatttgcgaccccatggactgtagcctaccaggctcctccatccatggattttccaggcaagagtactggagtgggttgccatttccttctccaggggatcttcccaacccagggatcaaacctggatctcccgcattgcaggcagatgctttaccgtctgagccaccagggcagcctgtgttagttattattttgcttgtagtcaattgattgtgcttttacttcacatgatttctagggactataagcataactttaagctgttctttgatgatgggtgcctcatgccttgtacatcccaggctagtttgagccattccatagcagtagtgcttggctggggtgtgtaccccccaccctttttttgttagcatggcagttaccttagcctaattccatagtcaagtagttgagaggcttaattctgagagtaggtttttttttttcccccaaaatcctggtgcttgtggtgtgtgatcaaaggataatggctgagattacctgtgcatactgcctctggagacatgatgttctatatattttactgtgacccagcagaatttgtatttgtcaaagcatatattcagacctgtatcacccaaaacttttagtcatggccactaagatcaattatattcagtattatttagataaacttcagataatt

SEQ ID NO: 58990 - DNA, 1487 bp, Bovine  19866880681174
  misc_feature (1)..(1): n is a, c, g, or t
ntggaaagaacacaggctttggcacttatgctcactgaagcccagtgagccagagaagtctggggaaacagggttagaattaagagccatcagaaaaatcaattgccctgggaggtgaacacagggagctctggatatatttaaactatgagtcacatgactagacgctacttaggcagaagtaaaacatgttttcctttaaatgattaaacttagttgaacttagtacaagaaaaatttcttttccctgtgaatgtttttttccccgggcttaaagaacttcaagatgagatttgttttcttaaagaaaaacttatatccatagcttcaaactagatacatctgtggactcagaacacccaaatgacaccagataaggtagcccatctcctgcatctggatggttaagatagcacattttaaaaaaagaaaggttagccaaaattcatcttaacagttattctgcagtcccatctggattcaggttaatgtcaagatgggagttaaaactcaccatgttggagctgtcttgctttggagaggttggatttttttttaaataagtgacaaagggagagaaagaagtcttaaattaaatgcaagcacaaccaacaattacaccatcggtttcagtttgaactggacacgtctggcctgtttgctgttcttcttttggggttggttcacttaaaaacaataaacgtttttgttctttcttttttactatccagtgaccaaaagctagaattaattatgatcagtgcctactggctttttccctgcgtggagagagaatgctttctgtgtctccttttaaatcttttctttctcaaaagtggttacctttctgaggagggtttctaatgaggtaccagatcgcctttggggcaggagccgcgggacaggaaacccagggcaccacttcctgctgcccgctccctgctgaaaggctggagggggtagtcggtccgagagcgtcgctcctttccctccttctgtcctgtcttaggtctgtccatgcacgcgagggagaagggcagaaatgaaagggtgcgaggccctgcacctgtgtcatcttactccatcctcagaggtatctttaccgtcctcccccctcccccaactcaatctttgaggaacaggaggctgggacaggtgacgtccccatgcgctccacactggggctggaccggaccgtggagtcatctccgcgcgcatcatcaccgcaggcaagccggggtggcctctgcagtgctttccataaaggaacgaaaaagcgcggccgagttagcccgagcgccggtaggggctccagggtgttcagttcttaactggttgcggggagtaggagggtccctagtccccaggagccagggactggagggcagacccccgcaagaaagcgcaggacccaaggtggggaggggcgaggaggaaggagtcggaggaggagaggatgccgggctccagtgccctcgtccccgagc

SEQ ID NO: 58991 - DNA, 1222 bp, Bovine  19866881337035
  misc_feature (1)..(1): n is a, c, g, or t
ngtaaaggaattctctgtcggacttgacatcactcccatcctctgatactcgcctactctcttctcaaagaagttagtcttcccctccagtgaaatattttccataaagtcaaatggattttctactctgaaaacctgaaaaggttcatagcaaaacataagcacagaacaccggtttcagaaagaaccagagggctacccacaaaatactttaccttgctaaagcccagctccagcataagtctatctgccacgaactcaatgtactgcttcatcaaagtgcaattcatcccaatgagcttcacaggcagggcctccgtgaggaactcctaggggccagagcacagcttctcaataaaaccgaagcattaagaggtcttctagcaagcacaaggcctccctgtgttacccacctgttctatcctaactgcattgacgattatttcttttactctctgttccgaaggtttgtgcaacaggtgtttgaacatcaggcaggcaaagtcacaatgcaaaccctagaagaaaaaggtttaaagtcaccaacagagcagtggcaccacactccagtactcttgcctggaaaatcccatggacagaggagcctggtgggctgccgtctatggggtcgctaagagtcggacctgactgagcgatttcactttcacgcattggagaaggaaatggcaatccactccagtgttcttgcctggagaatcccagggacgggggagcctggtgggctgctgtctatcggacacgactgaagcgacttagcagcagtagcagcagcaacagagcagtagacttctatcattaacgtggaagaagaaactgttaggctggcattcttgttagacatcctgtgtggtcagactaaagcatttcaaatgtcaaggggaagatgactcaaatgctttgtcactaaggcaggctcaggccccacgctgggccccagtgctgcccctagaggacagcgagacaggtctggtcctcactctgtggttgccaaggagtgggaggaaatttttctcagcattcttccttcctacagccctgagctttaacattcaccaccactacttccagcagaaaaggcaaaactctgaataggctggttagtttttagatttataacctaatgtctgggaaagcagtaatagtaatgcaatttcaagtgaatcaagtctgcaagtctcagtgcattaaatcccaagtaatg

SEQ ID NO: 58992 - DNA, 998 bp, Bovine  19866881522197
  misc_feature (1)..(1): n is a, c, g, or t
ntccttcaaggactttagggcccgtgaccggagatacgaacaccagtgttctgttaactctgcttcctgggagggagggaggagcaagacatatttgcctgaagattagaaatagagaaaccagcccccagcaggttctgcaacttggctgagatcttatcactcgagagcttgaaaactcctgacttatttaagccacactctgagcgcctcacatgaatcttacaaggctgttttgcttctgtttaattggggctgtgccttctggctgttgatgtcctctgacaaggcagctgtgaatccagaggactttattcaatcatccacttactcattcactacgaaaacctttatgaagcacctactctgtcagcagaaagagtgggccctttgaagaagggagaaatgaatgacaaggtaccccctctgactcttgctggccatgtgacctggtttgacctcctgggcctcaatttcccttcccctctgatgagaagagatgatgacctcccagcccagtgatgagataacctgagtaatgggccttttacaggcccatcgagtattcatttctttacccttctccccagctctgtgaaaaccaaggcagtcttagcctcagtgatggacagtccagggtgaagcaggccttggagccctcggtggtccacatttgatttcctcttcctccagcagaaatatcaatggagcccaggggagaggggaggctcatgcatatgataggtgtcaaggatggcgtttgctctttagactagcccggtgctttgttattagcatttaataggtccccagaaagctttgaagataataataggtctcccctccctttcaactgatgatcttgacgtgatatacttatgtctgtaataaaattcaaaggttctcacaaggagccaagacttgctcttatctttaaaaaaaaaaacttaaaagtctagttagaaaattaaactcacagagaggaacggcccaggaat

SEQ ID NO: 58993 - DNA, 2169 bp, Bovine  19866880669653
  misc_feature (1)..(1): n is a, c, g, or t
ntactaattcagtagcaaatacattaggaggtgctcagagcagtgatcccatcagatactatcaaagagctgcacatggagacaagcctcttcataattcatggggcaatttcactgtctttccggggaggcttcttatcaatagaaatgtgctcttgtgagtgaattgttaggaataccaattatgtgcttgactatttaattctacagatattcttagttgagtcatgaaagtgtgtagctgatcaaaatcgaatttcagcatcttcttacagtgtcattcttcaggagctccagccttgttaaatgtgggttaatataaagtaacatttattaggaatttcttctttgatattcaaaatagctttaagacctcttccctccaaatcactgaagtgtcaatactccagctcccccctaaattcttctaactttgatgccacaaaagtaacatttattttttattcagtgtttgatgttctctttctcttgacttacaatgaaaatgattcccagctaacgctactgatgaaagcaagtgaattcacctacaatcagttgtttatatattttaaaatgttgaaaagaaaaaaagcttagggtttagattgtgatttcttgtgcatatatatatatatatatatatatatatatatatttaacaactctgtgttttaaaaaaaaaacaatttcccatctaacactaagagttactgagttttaagtgttcatttattggaattcatcccagtgctaaattcagcatttaagtgcatagtctcgtgtaatgttagttcagttcataactagacagggccaaaaaagtaaactttaaatagaaaacaatgaaaagcatatataatccttgagattaaaaaaaaacctaaatattggatcttcaacaaaatatgaaataaaggaactgattctttttctccacattggaataatcctggaaaaccaaaaagagctttgaaatgaagatacttaggggaaagcacccagtcttccaaaaatttatagtggggaatattttactggaacacactcaaatacttttgcctttttattcccgagtgtatattttagaattcttaaaatagaattcttgaaaaagacatcaaaatcatatgcagtcactgggaaaatgaggtctctaagatttatttatactttgagaactgaaaattaggcattaaatagtcagggagaagtttgggctatgaattttctctggaagatcttccctggttggctcagtagtaaagaatctgcctgccaatgcaggagacgtggattcaatccctggatgggaaagattccttggaaaaggaaatggcaacccactccagcattcttgcctgggaaaccccatggacagtagagcctggcaggctacagtccatggggtcacaaagagtctgataagacttaggactaaacaacaacttttctctgggggcctctggcggtgtgacctagaaatggtcagaaaaaaaggggatttaggggagagagaatttcccaagtggatggaaactagcagtgcctcctttcctactaaaaatgctaaaggagtaaagattctggtgttatgcaagagggcagattttagcatccatgaagaaacagcagttttaggaaaggattctcactggtagacattgaacgtggtaagctgtccaaatccaacaagcaataggaaaatctgatccggatcagaaggatgattggtctgaagatggagccgcaaaggtaaagcaaatcctaggttagcatgctttagtgagaggaccagggattcaagacctattcaattttaggataaaggaacgtgggagcagagtacatcatgtgacatgccaggctggatgaaacacaagctggaatcaagattgctgggagaaatatcaataacctcagatatgcagatgacaccacccttatggcagaaagtgaagaggaactgaagagcctcttggtaaaagtgaaagaggagagtgaaaaagttggcttaaaactcagcatccaaaaaactaagatcatggcatccggtcccatcacttcatggcaaagagttggagaaacagtggaaacagtgactgactttattttcttgggctccaaaatcactgcagatggttactgcagccataaaattaaaagaca

SEQ ID NO: 58994 - DNA, 1133 bp, Bovine  19866881528085
  misc_feature (1)..(1): n is a, c, g, or t
ngtaacttatgctgaacatcaaagggaaatattttagggcctcagagctccagactttcttacatttttcatatcatttcctatggtgcaaacacatttaatagaaaaagagagagccagtgttctggagaagtggcattgctttttcacgcttccttgaaaccaagattgaagtagcccgagaggcatttactttataggttcaggtggcctgggactcactagtccactctagtcctgggcagctagttaagttcacaactttgctaataatatcatacgcaggactggagagaaactccctgaagacacagacatttaccaccctgaggagtgatctgctttttctctaatttcccaggagtaaacaaaggtgatggtggctgaacccttagcacagagtgcttcctcctttaaaaaattttttttctataaaacttttccagcaagtcacagaataatagaagattcagggacataattagatagagtagaaaaaaatgtattccagatcactaatatgaaaccaacagtattttaaatccaggaaacataaaatagaatagaaaggaaaatggcatagagtctagttacaatgtctatattgccaaagctacagcataggggatacctaaatataaaactaaatacatgttcttgtttatttaaaaatagagggaagttaaaggtaaataaataaggttcactaagagactatatctcaccttacaggtgaattttaatttggatataaatagtagtagttgtataaacagaggaaagtgaaagtcgctcagttgtgtctgcttctttccgactccagggactgtagcccgccaggttcctgtgtccatggaattctccagacaagaatactggagtgggtagccgttcccttctccaggggatcttcctgacccagggatcgaacgcaggtctcccgcattgcgggcggattctttaccatctgagccactagggaagcccaataggcagaggaccctggtccaaaccattctattagcaatatttccttgttctagaaagccaccccatagctttccttttgaaaggagaacaaacttttcttctggaaatagcctgtatgtctttttaaaaataaaattcatcag

SEQ ID NO: 58995 - DNA, 1164 bp, Bovine  19866880473181
  misc_feature (1)..(1): n is a, c, g, or t
ncccagcttagcaaacactttcccatgttcataactcccgcccaagcaaaagcctgaattagatgagtagccgtagaagtagaaatgtaactgaatcaaaactcatacaccagctctcgtatatcacgccagctgtgcagggcctcaccgcacagggcgaccccagctactgggagttgacccaagtgggcttatggcggggctgagaaactgagggggtctctgtctccctgggcaacctcggtgtactatctgagcctcaccctggagactggctcgtctactgggctcgcgtccactggtgtttttactgagcagcgctggttgggcatgggttactcagctctcaaggtgagaatgagggctggtggaggcatattttaaaaaccaaatcacaaggatccagggcacatagctgactcctgctttcctttctccagaccaacggctccaaccacctggcctttcctcccatctctagcacagcaaagctccagggtggggaaatgaaggcatatgacccccggggttgactatcacctgggtggggcctgagggctgacctgacccatcccagcctgactccagccttcgcttccagctgaccctgcctccctgggccttcttggcccagaagttcacctcccaacctctggctggctttagtccactaatcccaggattcatgatggcgagatgtactcgctctcctctctaaaacctcagtcctgccctcctctgggtctcccttagttccctccacatcctttccactctgccctcctgctccaagtcctcaaccaggctggggaccctcaggttcaggggtggggctctccttgctgagagctgagagaggggaagcctgatgggagccaatggggagaggcgcatgagtgtgctggcacgcacgtggatgatcatgcgcatgacacgtgctcctgcccgggttggcgggagcgggagttggcgggggagcggctggacagccggctggccctgggaggtggcccggtgccatgggaggtcctggcagcgcctggctggcacactgggcagcgggcctagtgcttacaggtgtatacaagctcctcccgcacacactgctggcactccacgtagcagcaccactgcacctggcagtggcaggagaaggccgtcagg

SEQ ID NO: 58996 - DNA, 1342 bp, Bovine  19866880486367
  misc_feature (1)..(1): n is a, c, g, or t
ncctgacacgccgtggcacttacacgtggtccggaggccactcttcacggcctgcgaggagaggcaggagggaggcgtggtcaggggcctccaggctgcagcccccggagtgccaactgtggccggggagccgcaggaggatgggagaggacaggggaggcccacatgaggcgggcagctaaaactcaagctggcccatgtggcacattagtgcaaactagctctaggcaccccttctcctgggcagagacagtctgaggaccgtctcaccttggtgagagcagcgggggctggatctcaccccagcacctccccgggcccaaagttcctgtggagcagacagcttgcacaactgaacacagcagccctggtttacaccaactcagtgatgggaacacaggacacagaactcagtctcttaaagaaatggagcccgagcttctcccagcttcccggtcccaacagacctggatactttttaccctccagtctttccactgctgtgtgacctcagctaagtcccttctgtcttcccatctgtaaaatggaggagggccaggggttgtaccagatcagttttcaaacaccattggctcctagggcctccaggaagggcagtgcttggaatggagacccttctccaaacacgttcctgcctcaccaagccaggctcccacctggtacttgacaacagtccagagtagatgcccaaggaacactggttgaaaggatgaggttcatcctggacggcctctgtgtgtgtcctgcaggggggtagggtgggtactggcctcctagagacctggctccccggctctgcaaccagcgatgcactcaccttgatgcccacgtgggtgttgtgggcgtctgcccgcgcccgcaggtctttgcttcctctcttgggccccagaaagttgttcaggaacttggtgctatacttgaggttgtcaccacacacaccccactgccaggcttgccggctctcgaggcccggggagtcatcacaggtgcaccgctccatgcggccagcgctgcaggcccgggccagagtgtgcgtaagggcggctgcggacaccgcatacaggaaggccgtctccttgaaacctgggccgggccgggggggggtgggatcgggagggaggaggagagtgggctcaggggctgtgagctgccctctgagggtagacaggctggagggaggggcgtgttaccccaaggacacagttcagggcacttgccctgtcgcccaccccttaaactcaggctgcaagttgctgtctaaatggagcttcctgtctccctgcggggtgtgtgcccaggttctcagggcggcaggatgggg

SEQ ID NO: 58997 - DNA, 1220 bp, Bovine  19866880884004
  misc_feature (1)..(1): n is a, c, g, or t
ncccagaggaggatggcgcacatgtgccgatacacctggcccatccttccaccctggcacgtgtgcccagcagactcagtcccatgggaatgattccttcacaagacacccaagaggtagatacatgcagtcagccccatgggtgggtatagcacacagaagcacaaaattgggtgtgtggaggtgccttgaacatgggacagaaggcctgaagggtggggccagacctctgactctaaccatagcactctccctggaaggaaaagcctttggtcatgagggaaattcccagtatgtgtgcgagcgtacatgcttggtcacttcagttgtgtctgactccatgaccccatgaactgtaggatgccagacttctctgtccatgggattcttcaggcaagaatcctggagtggattgccatacccacctccaagggatcttcctgacccagggattgaacccatgccttctgcatctcctgcattgcaggtggatcccttacccactgggccacctgggaagcccctcctagtacatagtcaaatgtctataagcagtgaaaagatgggatgggagccaaagaagtgatgctggctaagggtgacacacaacttctaaaggaacctctagggtagagctgccaataaggcaaatcagaagggttatgatcatgaatgggggagcccgggcactttaaccccaggttatgcatgtccctgccccccaccaccagcctttctcccaatagatcaaagactagacagcaaggacttcccttagtagagaactctgctgggttgaggtgacagcaaagacaggcaggcctgatggtccagctttcccctaacgtctccctcagcctgagggaagggacaggagacggaggctcgagtgacacaacaaggcctcaagacccagcagctcccaccagagctgctcagagtcaggcctgagaaccagaaatacagggtaaaccaaggtccctgtctctggaacgagaatcctcggccctgccctcctcttcaagagactgtcctgagaaggaaagttggcttcccactgaggtaataaagaacacctgctcagcgatgtaggtcaccctcaggttaagcagggaaaactccctgaaggaaggaggccttctgaggacaaagactgaggagcttcgctcatctgggacacaggttttaaattatacactcccccacacgtatcacacaca

SEQ ID NO: 58998 - DNA, 745 bp, Bovine  19866880916062
  misc_feature (1)..(1): n is a, c, g, or t
nttgactacactttcgtcctgcaaagatcaaattgatgtttttctgggatagcttctcagtcatcagccccaaggaaggataatcctgtaaaaagggacaatgtggagattagttaagaagtaagaatctgttcacatacatccctggattctaaaccttaggacttggttgattttggccatggcccagacagtggtggggctttaactttttcaccccatgacaataagaagcaaacacaaactcaggcgtgaactcgggatagatgaagagatacaggcttgtagtatcaaaactaaacacctctttcttcctactcagatttgaagcatccacatcaaggagcagcttcctggaccaggtactgccaggcctcgtcattttgaagcttactcctattttgtggctcctaacaaatgccttggcttggtgctcacagtactctgccatgtgatctcaaccttcctttccagtcatcatgtagcctctcttcccctttcactcaccactgatctggaaccctgtctttctcccacctgaagtggacttctttttgttaatcctccttccttaggatccagctcaggcctcaccttttccaggaggccttccttgaccaccccaattcacgatgagctttcttcttttgaatacctaaagcctttatcaaatgtttcacctagttagcattaatcatgcactttctgttattggtaccatatcttcttgactaaaccaaaaact

SEQ ID NO: 58999 - DNA, 894 bp, Bovine  19866881224987
  misc_feature (1)..(1): n is a, c, g, or t
nctgagaagggaccctaaagtcaagagagtgctgcagaagaaaaaggaatttatattaggcagggactgtggtccctagcaagtacgacactgatggaaatattcagtgctcagtatgccatagggttgacagccacccaagcctatttttcccctaaagtgttcaacttaaccttttgtacgtatacattttgtaaatgtacagaaatagattttctattgcagaggtcactcgtctctcacctttccagagagttattctataaagctgctataaaaacttggaataatgttttttgagaataaaataattgacttctttttaaatttgtctggatctttcttctttctttttggtggaaacaattttttttttccccagaatttatgttcctaccatgacttgtgtataaaaactgggttaagtataaatatgattgcatcaatatttgacctaccatagaaggttactcagtttggccgtgtgttggtgctaattcacataaaattcacgtgtaaagcaaggccgcatttaggtcctatgagagtagtgcccagcactctcccagtatgtatgtaaattgtatcaacttgttttcctcttactaatttttgtatttcaggctgaaagaatattctcagaggttaggagaattgagaattacagagtcgaaggcatggagatctactctacaacactttggcatcttcaaaaggatgttgctctttcagttctttcaaaagacttaacagatatggataaaaattcaccagaggtaaattaactgaagcacttcgttcatgtttgtttttcttttcttttttttttttttttgctgcatcggcgtggcatgtgggattttagttccccaaccagggatgaacccaggccct

SEQ ID NO: 59000 - DNA, 1328 bp, Bovine  19866881246610
  misc_feature (1)..(1): n is a, c, g, or t
ntactgttttgtacctaaatatgagaatctgttttctaaaagaaaatttcataaacaaatgtatttcagctaacctgaatacatttttgaatgaagaccaaatagtcaaatggtattgatttatcaatttagctatatatatatgtgtgtgtgtatatatatacacacatttttacaatcataaaatatatttaggaatttctttttttctactctattgaatagaacaatttattaaaaagcctttttttgggagagtggtaatcatctaacacaattttcctgaataaccatcttcaattctaagttatttgaaaatggtacactttgaatctgtgttagatgctgtccctgtacttcttatcccaagccaaaagtattccttcactatctgttgctgctgctgctaagtcgcttcagtcatgtccgactctgtgcaaccccatagacagcagcccaccaggctccacccatccctgggattctccaggcaagaacactggagtgggctaccatttccttctccaacgcatgaaagtgaaaagtgaaagtgaagtcactcagtcgttccgactcttcgaaaccccatggaccacagtcttctaggcttctctgtctatgggatttccaggtaagagtactggagtgagttgccactgccttctccaccttcactatctaatgagctctaaaacaatattatgtgtaaaagcaaccagttactatactgcttattaagatgatttttccaaggcttttttttttttctacaacttcaacacttccgtgatgtcttaccccccaggaataattgataaatctatataaaattgattttttgaaaaatcaatttcatcaggtggattttatacacatccaaattagcactgattcaagtcacttaggctagcaattattccttcccaaatagttactttaaaaattaaataaatgacagaatttctgcctcataataggagagatttttgaagactcaaagtaatacttttttataagagataattttgaggaagtgcttatatttaggcttacatggtatatcaaactgggtatcccatgtttaagctttaaaaaaagaaaaagcaaaaatcagttgctcatcgtttctctcaacttttttctatgcctaataacaatggcaccccactccagtactcttgcctggaaaatcccatggacggaagagcctggtgggcctgcagtccatgggggtcgtgaagagtcggacacgactgagcgacttcactttcacttttcactttcatgcattggagaaggaaatgggcaccccactccagtgttcttgc

SEQ ID NO: 59001 - DNA, 1315 bp, Bovine  19866881260513
  misc_feature (1)..(1): n is a, c, g, or t
ncagggggagagcatttcccatcactgggggtgcctggctctgttcttccaacccccaacccccatccatgtttctgcttcagagggtccgatggttccagaggaggccacccccaggatgtgggtgggtgagcaggtaggtgccacaggacaagactggcggttcccagggtgctgggtaaggccaacctgtctggacccttagctggagggaccaggaggtgtgcctggcacccgggccggtgccaactgcgggcagttacctgggaaccaggaaagccttgtcctgcctggagcattggccttggccctcaaaaaccctattagatcctcctgataacaggtttccgctgcagggccatttgcatggtaagtgggccttttgtgctttcatctcaaatatctcagcccacctctcctgccctcactaagccccctaaatatacacacacacacacacatactccccacctcttcccagaaggggagagttagtgagggcagtgtctggcccaagaagagggcacatggctccaggcagtcctttttcagagcagtgttggggggaaccctcaacacccctggctcctctcccctcttgtcatctgaggggcccccgaggtttatgctcctgagaagcacctccctccctccatccttcacattcctctctccttgacaagactcactgtcacctcatacctcctccaagaagatgtccttagtgagcagccttaatggcaaatttggcaggtaccatttcccacctttattccaagtccttctccccactcctttcactcactcatttatttaaatttcaatattgagcatcagcttcaggccaaagaaaaccaaaagccaccagactgctcacaacatccctgtctgggtcgcagccttcctttcctccccagctctctgtctcagaaactctaggactgaatcagtacacctccccttgccccaccctggagcccacccctggctcagaaagaaaagagcctggcccagctgtgggctttgtctctccaagaactgctccacttcctgttttccaggggatgcctgcggaggatggcatcatggactatgtgctcaggagctaagtgggcagcaagcagcccgcccaaccagcttgctttgcatctcaacaatctcggatatttagagcgtggctggtgcaacatctgtgcaggaaatgctttccgcttcctcctcctgtctccctcccactccactcaggctcaggctggagatgaggaagggggtctttgtccctggcacatactgtacaaatcaggtggcatagtgg

SEQ ID NO: 59002 - DNA, 1349 bp, Bovine  19866881523003
  misc_feature (1)..(1): n is a, c, g, or t
natgcgtgggcactaaaagtgcacgcaccacaactactgggcctgcacgcccagagcctgtgctcagcaagaagccaccacagtgagaagcccaaacactgcaactggagagcagcccccactcgccgcagctggagaaagcccgtgcacagcagtgaagacccgtccagtgtagccaaaatacataaaacaaaaatttgtttaatcttaaaaaaggaataattaaatatatttaaggaactcagaacagtgcctagcacaaagtcagagctcaataaatatcagctaccgttattactggtatccctgttatccgaggctgttttcccaatttatttacccagttcctccttgagtttgagctgggtatctgagttagttaccctagttcagatattacaacccccgtgggctgggaacctgatgacctttttaacatactttgaaactaggaggtctaccaaccaagacaatattttgggtttcttcccaaaatatttagtcatctaaaatcctcaccctgttgagaaccaacttcctgttcaaccccagtcaacaaccaacataatcagaggtgcgacatcagccctctgagggccaagttgagtatgctctgaacagctccgttcccataaaccacagacgtctgatgagtgacctcactccagtaacttctcgggtgttatataattaggtgtttgcatatctgagtattgatgggtctaaagagatgtcacacctactttccacactgtctcccaccttcttctctaaacatacacactatgctcaccacacatgacccaaaaacaaccaccaccacaacccaagctagctatttcctatcctaccaaattacaacctgtctataattaaaggaatgtctggaaagaggctatgagatcccaatgtctgagttcccagggatgaagggtcccagttcttctgggaaaagcagttatgaattctctggaagactgaggtagggctgaccctcaaacctcaaagtggaatcgcttcaactttacatgtcagtatggtcaggacaggtagaaagccagatcttcaggggaaaaattaaacctgttaactatctgtcctaaaaggggtggacggcaggtttcctggaaatagatacaagaccaggtgttctctgaagtgcctccccagccacagtgatgatgacccatgatggatgatgacctaaagtcagggacgactggggagggttagcagaattgacaaaagtacaggaagtccagttaaattagaatttctgataaaaaataactttttaagtatgtaccacatcttgcataggacatattggacttttttattgaagtata

SEQ ID NO: 59003 - DNA, 1151 bp, Bovine  19866880538681
  misc_feature (1)..(1): n is a, c, g, or t
nagtctgccttgcaatgcggggacacaggtttgatccctggtcccgggagaatccacgtgctgagaggcaactgagcctgtgtgccacaactaagacccaatgcagtcaaataaataaaccatttttatttttgaaggaacagtgcatttatagagctgggatttttaagaaaacaaaggatgcatagtaaacatgtctgtcttctcctgaccctcaacccctccaaaatgccccagaacaaccattattgtatacgtatatactgtctctcccttctttccttatcaacacaaatggttggttactattgcgcatgttaagtcgcttcagtcatgtcgcactttgcgaccctatgtatggtagctttccaggctcccccgtcccttggggattctccaggcaagaatactggagtgcgttgccatgccctcctccaggggatcttctccagccagggaatgaatgcttgtctcttctgtctcctacattggcagggggggttctttaccactagtgccgcctgggaagctctttacaaagtgccaattcaataaacagttaccttgttcttcacagctgcatatagaaacaattctaaaaggaaccatgtgatattgaattaggccctgttgatgaacctattacatggtccagtattttgctatgacaaacagatctacgctgactactcttgtgtgtatatgaacttacacatgagcatgtccacctataagataatttactttaaggggaaatgctgggttaagggcaaatgatatgtgcatttgtaattaaaatttttgattactgaatatttcaagcattcagtaagcaaagagacaagtacaatggacttctaacacatactccaccacttttcaattgttatcattaatccatggctgatactatatcatacatactatatatatatatatatatatatatatatatgtatatagttaggtcctacttatccccttcatcccaaattattctgaaacaaccctgacatagtattttttccatgggtaaatatttctgaaaagtaagggcttaaagaatgtgtgtgtgtaatttcattagcatatctaaaataaattaatattattttattaatgtcatcatttgttagtatcacatttcccca

SEQ ID NO: 59004 - DNA, 2849 bp, Bovine  19866880798964
  misc_feature (1)..(1): n is a, c, g, or t
ntttccttctccgggggtctccctgacccagggatcaaacccacgtctcatctggctcctgcactggcaggcaggttctttactcactgagccaccagggaagcccctagtttaacaagtcaatgaatgcaacaaataagtaaataacttgtatcctttaaagtacaataataaaaaaaaaatctctgattcttgtgagttttaactgacatctaacatttcatttaaaggctttactgttaagaagccatgtttcactgaacaatgttagaaaaacaaagatccgcccttgttcccgtgattcccagaacaaacactgcacttacatcaacatcctcctgggtaaaggtttctgggtcctcccccatcatgttggccaagtgtctcttcccgatgttgaactcttcaatctgctttttaataaagtccaccgtgtaactctcacgtcttaaggctgcaacatttttctttgttgttacagccggggaatgtttgagccttaatatctagcagaaaatacaaatggaaagacaagattttaagttaaacaatgatcttataggccactgtctctaaataaaagaagacatttcaaacaattgtctttttaggacggtactcaattgataggagcctggaaacgagataaagcatgcttttaaaagcctatgctcacaaagaagtttaaactactaacatttcaacacattaaaaataataataaaaataactgggtgatatgctacctccattatctgctagaaatatccacatttgataccgactggtcaatgtcagctgctatgggacttgacgtatagtgaatgagggttaaacggtacagtgcatcctccgtcttgtctgactctttgcaccccatgaactgtaacctgccaggctgctctgtccgttgggattctccaggcaagaaaactggagtgggttgccgtgccctcctccaggggatcttccaacccaagatggaacctgtgtctcctgcactgacagggggattagcgccacctgggaagcccagagagaaacaccactccccttaaaataagcctgtgtacatgcagacagaaagcagcaagcagaagacacagacctggtgtgcgcttctcatgaacagaataccctgacaaagcagaaggacacttctgaggtcaggttacaagaagactctcctccccctcttctctctcttgatcagaccaaggaaagcaagacgtggtgagctgccccccaggggtccacaggccaagaactgagggtggtctctggccaacagccagcacaacagctgcaaggatgtgaatcctgcccacacccacactgagcatgtgggcagcagatttccgcccctggcctgagatgaccatgggctgctgccttgcaggagaccttgagcagatggcccagtgcaactgtgcctggaatcctgactcacagagtccacgagggaaatatctgttgtttcaagctgctatatttgaggttaatttgctatacagcaataagtaatcactcaacaccccagttcagagaaggcaatggcaccccactccagtactcttgcctggaaaatcccatgaacggaggagcctggtaggctgcagtccatggggttgctgagggtcggaccctactgagcgacttcaccttcacttttcactttaaagcattggagaaggaaatggcaacccactccagtgttcttgcctggagaatcccagggacaggggagcctggcaggctgccgtctatggggtcacacagagttggacacgattgaagcaacttagcagcaacaccccaattacaacaataaagcggagtacaagaaagttcacttactctgttttataaggaaagagaggtagcaacgacgggcataccttttatcaagttttctttaaataagaacttggtaaactacatgaggaaaacgaaaattttaatgacccagtattttccataattaaagtgacgagggacacactgaaacatctttgctaccaaagggctttctttcctttcccattgctaacaaaatcgaattttaaaaaattcaaaaattatctgggggaaaacacaactaatgcactcagctgtataaagcatctgctacaaacaccggtcaattttcaaatctgctttgcaaagacttttgaggaatttgccagtagtattaaaactactgaaaacaaactggatgctgtgataaacacagaacattataacctccaggagcccacaagatgagagatgaaaagaacagatccttaagagagaggcagcaatgttttttgcagtaaaagcaaaatacacaagggctaagccatcgagtatcatccagcattcttctctggcggacagtccgatcaacaaaggcttgttggctcagtacaaacttagaaagtgctcagtagaaaatcaagaggacatactgatgtttatagtaacagttttcaaaatagagattggcctactgctttttcctattgtgaatgtcataaatattacagaaagctaaatgagcattcttacagaaaattgtattgataggcgttaagaattcatggataacctttgtattacaccgtgactgtcaactacttataacaaagccaaaactacttttatttgtgacagtaaaagagacacgtgtaccccaatgttcaatgcggcactgtttacgatagctaggacatggaagcaaccctagatgtccatcagcagacaaatagataagaaagttgtggtacatatacacagtggagtattactcagctataaaaaagaatgcatttggagtcagttctaatgagggtagatgaaactggagc

SEQ ID NO: 59005 - DNA, 926 bp, Bovine  19866880942650
  misc_feature (1)..(1): n is a, c, g, or t
ntgtgatgtcctcggcagccgagccccctgttccattgtggggcctgaggttggcggagcgtggtgctgggctctgcgggcaatggtggggtccactcccggttggcttgcacccttctctctctatgcctcacaaactctgcccctgtgattgcaggagcggccaactcgacgtgcgggagctcatctccctgtacccactcctgctgcccacgtcctcctcattcacccgctcccacccgcccctgcacgagtttgcagacctcaaccagctgacacagggtgaccaggacaaggtggccaaatgcaagcgcttcctcatgagttacctgaacgaggtccgcagcacagaggtggccaacggctacaaggaggacatcgacacagccctgctcaagctgtatgccgaggccgaccacgacagcctgctggacctgctggtcactgagaacttttgtctgctgcctgacagcgctgcctggctggagaagcacaaaaagtgagtgtctttccatccccactccagatgctccccaggggctccccgcctggcccttccctgccccctaccttcagatgctgttgtgctactaatgaaccagagcgacttctgagtcccacaccttcctccagggaccacctgtcacccttgggttcgtcagccccatcacggtctgcagaccagacgaaggggtctcagagaccactcagctcccatgtcaatcactcagatgggtccatctctaggcgacctcatggactgtagcccgccaggctcctctgtccatgggatttcccagacaagaatactggagtgggttgccattcccttctccaggggatcttcctgacccagggactgaacccgcatctcctgcactgcaggcagattcttcaccatccgagccaccaggaaagcccctcca

SEQ ID NO: 59006 - DNA, 704 bp, Bovine  19866880963957
  misc_feature (1)..(1): n is a, c, g, or t
natatgtacccggttgatgacagaagcaaagaggaacccctaataccagacagaatggaactcagggagcttagggaagggttcagtgaggcaggaatgttaatttatattgataaaacctaatatccattaagtggctttgacgaccatgaacctttttgcaccaggcatttagcatggaaacatttaaagcaaaaagctgttaactaacgctctaaagaattcgagtaacacagcatgattttatagctacagattgaagtacaaagaatacattttctatgcagatgccagtggaatattaatagaattatgatgcagtaggttgtagagaaaacccaacaaattataaaaatagaaattatgtggattagaactgtaaaactttggggttaaagtgaaatcaaaattgagattacagactgctgaaaaatatatgacagttcatattaaaccctatgggatatggacaatgtttaacacagaggcaaacgtatttattaagctttgagaaagactagaaataaaatgaacagtagtcagttcaagaaggcagaaaaagaatgaaatggatgattgaattaaaggaatttaaaagaaaaggtaggacaaataaaaccaactaaccctttgaaaattggtgaaattgatcaagtgctagcaagtctggtgaatggaagaagaaaacctaagaggaaacataa

SEQ ID NO: 59007 - DNA, 582 bp, Bovine  19866881055756
  misc_feature (1)..(1): n is a, c, g, or t
natgggaggcatccctggcctccggggaggctgactcggtgccacagaggctcacagaccgccaccttgtcccccccgcaccctgtgacgtttatccacagaggctacatgggtccactcacccatcagaaagtggactcggtagagatcagattcctggagcaggcgtcgcagcttcgcctgcgtctcagtcacttctgcatccttgtcgggggtgcagggcctctgctgcagcacctcgtccaggtagaggacagccaggtgcgtatggtactcctccttctgcaggacaggggtgagcagacgggcagcatgtgcagggggccaggagaccaccccacccccgcccctgacgacgtgtgcaggagcccagagaccgccccaccccccgcccaggatggcatgtgtgggagcccagatgtgtgatgtgagcaggggctccaggtcaacagaatgcaagtactggagagaaagctttcagaaagcatgatggaggacctgaatataaactttttgggagactgccctggggtcccggtggtcaagccttcaccttccaatgcaggggacgcaggtttatcc

SEQ ID NO: 59008 - DNA, 1921 bp, Bovine  19866881127679
  misc_feature (1)..(1): n is a, c, g, or t
nggcaggcggattctttaccctgagccccagggaaagcccatattatattatacatatatctatatataataatgtatttatatcaattatttctaatttgcagaaaatgtgcttttcaaataaaaccatcagaacattgactttgttgccacgtgattgttataatcattactttaatttaggggtaggttgacgttatcacaccctgtatttaaaaataatgaagacacccaccgaatttctccttttgctgattctaggcattggtgctttgcagaaactcacaactcgtccaagtggccggcctgttgggcccctgtgctgggcctggcccctctcggagttccaggagtgagacggtaccagggttcccagagaaacacaagcttgtatcaagggttgctataattgcctgagagggccagctgctgccaggctgggctccccgtttgtttccacggggcctttcccagtctcagctgactggctttccacaggagacctcataggaagggcgctcagctccactgagtcccgtggccaggcaggcagcgggcaggctagggggtcgggggaggtgtgcctggttgcagctgggtgcgtaggcaggagtaggaagcatcctggagatttcagagaacaaagatttggctaaaaatctaaatgttcatgcgtatacatttggaacaggggtaaatagagtgggatcagctacccactccagtattcttgcctggagaatctcatggatcgaggagcctggcaggctacagtccttgggatcgaaaaaagtcaggcacaactgatcgaccaacactttcacttttttcactttcgaaagagtaagcccaacactcctgtggccctgccaggtgcctcgggtcaggggtgcctgggagaatgctcttgacacaaaccccgcacggctgaaccgtatcatggtgtgtcccagaagctggctccacatgtgtcctttttagtctcaaaactttgcaaaaaagaaagacgtcctgtgcggctggccatccaattattattttgaaatgtttcttttctctttaggaattaaaaaaaaaatccttgcgcacattttttaaagtttttttttaaacaaataaagtgttttcttcaagtatattatctatatcttgactgtataatttccatcagtcagtacatttaattatgataaactaatacattcaatcacaacaagcaaaaaactgtggtccatgggttcctttggaaaagttacatagaagaagccagataaatgtacattttgacacatttgactaaacccaaaatttcaacagcctttcctatgttttctccaaattgccaccttttccaatgactggctctttctctcattattgccctctaatctctgatctctgtgctgaggtggattcagggtgtcccacccccagagtgtcctgtttgatcgtattcttcaggattctgtaagggccacatcatagtcactatacttctaaccacagtcaataatttaaaacccagattaaagatgacatattcctcgtcaaccgatatttggaaaatgtatgtattacttgaacaactgtgtcccatttcggtctttgtgtcccattttctttccagaaaatatatcatgagctggatttcaaagtaagatttctggtctttgactaagcaaagatcctcatcctttttgtttgaaaatgggggagttggggcagagggcacatgagttgaaacatgcatggagtgatacaaaaattttgctgtacaaaaaaatatttttttcttaaagaatacaactctctttattaaacaagaagtaacttttcttccagtttttaaattttttaaaaaagcaaatgattagctgtacaaaaatgttaaaaatactttatttaaaatatcctcccagga

SEQ ID NO: 59009 - DNA, 820 bp, Bovine  19866881166618
  misc_feature (1)..(1): n is a, c, g, or t
nagttggaaagtgtgtgtttctgactgatttttgtcagatgtgttccgtcgttgtggggactctttattggacaagctgagcgtggtcaccttgccttcctggctatttacctttacctcagcatggtcaccttggcttcctggctgttctgagctggcgaccagctgaaaagcctggaaggccagattcggggctgagtccagcctcctgcccagatgcctgggtctctgcaggtgtacaggctgcagccctaggcaaggccgtccccgccctccccaaaggtcccagagcccttctgcagcccagatggttccaatttgaggccttcactcggtgctggagctggattgagtttcttccctgaaaccaacaagacctgcttcagcattttgcttggattaaaatatttgtcccccctttttttttttttcacagggcaggaggaggactcctgaagcctccgaaggaaggaaattattacagggccctacagaagtaggtcatgtgcgacagctgctcatagtttaagaggaagaaaacaggggacctcaaacctggagcacaactctttcaaaatgcttgtgagcagcccaagaaaaacatccttccgaggcttatctaataaccagcctctataatcgtctcaatgtgcgcgcgggggtcctggagtttgcacctacttcccggggctgccgagatgctgaaacagaacacagcagcatttagcgaaggggatttaatagtttgtgttagagctaatatggcccattaggggctgtcgtttttataaacaacaaagacacgttaccctcttcttgg

SEQ ID NO: 59010 - DNA, 1705 bp, Bovine  19866881199691
  misc_feature (1)..(1): n is a, c, g, or t
ntctgtgtctggctgttctgaaggtccggaagattctttagagatgcgttcaccatatttgtcttgaggtcagttgtgtagactgtctagagcaaggttccccacccttcattagatccacctgtcatgaccgtgatgtggacaattcatcctttggggtgcagctgctttctccgagatcagacgagatcgggcgccttcaggctgatacggcctgagactgctttctccgtaaggggggtgttggcagcatgaggagtaagggaagggagaagttggtggggttaagtcttagctctgccacttacaagctctgtgaactctggaaaattattgaacttctctttgtatctcagattcctcctctgaaaaatggggataagtataaaacctccagagaatcacattcaaatgcttagaaccactcacagcactccataaatgttactggttagtattttcaatgatttccaccaaagtgccctaaacagtagaagaatatgagtaaggatctggggagagaccccaaattagcctctatctgctggacgtttcttttaagcatcctgtgtgtgtgcatgctcaaacacttcagtcgtgttcaattctttgtgaccccatggactatagcctgccaggctcctctgtccatgggattcttcaggcaagaatactggagtgggttgccatgccctcctccaggggatcctctcaaaccaggaaatgaacccatgtctcctgagtctcctgcattgcaggtggattctttacccactgagccacctgggaagcccttaagcattctatctcatgttaaatatttatgcaagtcttgcattctactccattataaggttgagtattttttttaacacattttttactgagggacttttgcagaaactaacgcctgcggctggagatttattacggaagtgaacaatgaaacactctggtcgataacgtttgggtaacaaaagatgtattaatatgtctgtagtcataagaccctgatgctggggaagatgggaggcaaaaggagaagggggcagcagaggttgtgatggttaaatggcatcactgactcaatggacattaatttgagcagactctgggagactggagaacagaggagcctggcgtgctacactccatggggtcacaaagagttggacacaacttagcgactgaacaacatttcttctgcaaatgtatttaagaaaaaagtacactctaggtagacacctccatgttgcccctcgacatgggcttgagtgaggggcacagccaggggaccttgagccaatgatacagagggtgggtgcccaggctggcactggaaggtgcatttcactggtgagagccatgcagggcccccgcccccgttccctgctcctccctcaactgggagccacaacttcagtccagcttttctcatttcaagagctggccttttcttggacgcctgggatctagagaatgtgagcgtggaaataaaaatcttggcttggatttcctgagctatgatcatcaataaaatagggcaaaagagagctataatctaatgtactatattactgtaattagagcttcacgcatggagctcttacccgccctccctccaaaataaccaaacagttttagcatagatagtagcgactttattctccatcacggggcactctgtgattgggtaattatggta

SEQ ID NO: 59011 - DNA, 833 bp, Bovine  19866881235829
  misc_feature (1)..(1): n is a, c, g, or t
ngacgcaggtttgatccctagtcggggagctaggatcccacatgctggggggcaactaagcccacaggaaagagcccacatgccacaaggaagatgccacgtgccacaactgagacccaatgcagccgaataaataataagcagaatgaaacagaatctaggggaaagtatctcattctgagaagtaagggccacaggatttaggtaagggccacaagatttagctgcctccaaagaaaggaagcttcactcacttcctttaagaataataacaaggaagaaaaacaaagaagaaaaatgaaagtggacgggacaagaggtggagggtgaaaacaagccacctgggcctccggtctctttcacaaatgtctggttccctctctgacctcccgcaagtacagattgagcgccaggaacataagacgttcagttagacccactggccaagttcaggttcccatagggccccagcaaacccatgatattggcctgagagccaggcctcacctgcagtctcctttctgtgacaagatgctccaggtacttaaccagggcttgagggtatttcttaaggcaactgatgatatcatctgggttaaaaccactctgctgttcatctagtggtctcttggtgaaaacctgaactccgacctgaaagaaaagtagccatttggttagcgcgcttttcaaagaccccatcttatctttattgtgagcgctgcatgctttgggtaaaagcactgtcaaaatcgtgatgattcagaaaaccagagcagtgtggagtgctgacagagacaggaaatgacccagagctccagctgggccttctaaaa

SEQ ID NO: 59012 - DNA, 977 bp, Bovine  19866881348478
  misc_feature (1)..(1): n is a, c, g, or t
ncagacccccactgacagacaacctcccaggactaaggaaggaaagaaagagcttctgaaagcagccaggtctgaggctctgcagccctgctgagaggccaacttcttccttccaggagccgtttattcagtcacgccttcatttactcatccaacactttttcagccctaccctgtgctgtgcagtatttgggaagccccaggatgcaataggaaccccctcccatccgtctggtgggagacgcgagtaggggagagaattcatacaatgctgcgccccacaggctctgctgggtggggagggggcccgatgggggccacggaggagtgtggatgtcaagcaggaaagacgatatattcccacacgacccctctcccacaaggaaacttcagaggcgacgcaaacgacaaaaggaaaattagactggacgttcaaatttacaacttttgtgcacccaaagacactaacaacagaatgaaaagtccaccgatgggaaacacttataaaagcaaacacccagcaaggaattaatgtctagaatagacgaagaacccctacaactcaacagtaaaaacaaacagcctgattccaacacagacaaaggggctgaaagggcatctctctgaagaagattcacctattttcatagtgtttagctttccttttttgttctgttgttttctggttttgacagcagagaaatcatgcgttcataaagaggcccaagaagagttctctctctttctattttttctggaagacattagttagaattgatccactattctttaaacgtatggtataattctccggtgaaagcggtctggtctggagattttaaattaggaatttaattcccttaatagttgtaggactgttaaaattatctgtttcatattgaggcagttgtggtaggttgcactctttcagaaactggtctatttcatcccacttgccagatttatgtgtaaagagt

SEQ ID NO: 59013 - DNA, 3245 bp, Bovine  19866881362144
  misc_feature (1)..(1): n is a, c, g, or t
nggatgaggcaggaaaccggtgcacagagatctcagcactgtcagatgccacttctgtggcgctggagcaagcctggtcccgaaacctgggcatacaccgattagcaagctctggaaactgccatgcagccgggtgggacagcacaggctcaggtgcagcagacctgctgcacgtcaaaccttgatttggcacaggaattcttttaaccttaaaaagtcactttgtatgcagtgaggcatggtaacattctgacaggtggggacaagatctgattacagagcaggattggccctctagtaccgcgtgccctgccgtttccacagggagccgttgggcttgctgtctccagctggatggggggaggggagcgtcttgaaaggatcttggcgtctgtgatgctgagagaggttgtcctcctccatacccatgttctgactcaggcagttacaaagttctggcaagatgaagacaggaagccattgtttccttttctcttctgaacagagtagtgtcagccacacagacaacgtactgtgcaatgtggcctcctcgcccaggttgctgtctgcaggtaggagctggatttgcttggatagtggggaccatcagagaagaccaaggattctgcatcttaccctgcaggaggcagtctctgtactcagtgacatttacctcctgatgttaaagcccttgtaatagcctccttttgagggcacaatggacctagtcccttgctcctaataaagagaatatggggtgggactttcctggtagtccagtggttcagattttaccttccgttgcagggcatgcaggttcaatccctggttggggagctaggccaaaacaccaaaacataaaacagaagcaatatgtaacaaattcaataaggacttgtaaaaaatggtccacatccaaaaaaaaacaaagagagagagagaatatgggaaaagtgatgtcatgttcaagattaggttacagaaaggctgtggtctttgtcttgggtacgctcttctgcatggtccttctgtccatgctgaggggagtcatgggccatgatgtaagctgaccaagaagtagtccatgtgggaaggaactgagggaagcctccagccaatagccagtgaggagtttgaactctcaactcaacagcctgtgtggctgaatcccaccaaccatgctggtcaatatggaaactgggagactgaaccttgtaccccatcagatgagaccacagccctggatggctgcatgaccatgccctcaggagagacctggctcagatgcacccaggaaaccgttccaggtgttcatccacagaaagtgtgatttcacctgtgcatgtcactctaagtgttacgtttgggggtaatttgtcacacaacaagagataactgatacatagcctggggcacagcaccctgatcggagatagaaaaatttcaattgtgtgatacaaggtttgcccagaattcatcctacagatatttcacagggcagcacggaagactcaactattgtcccacttaataattctaataatttactccactaaaagctttttattaattaacaaaccatccccagatgacctgctttcctttttgttgttgttgttgttcatattctacccaccctttggtagaagtagacaatcatcagagaaccagagcaaaagcagcttgaggaaagagacatggggacttattcatacaaagtgaataatcagaaaagttggcaggtctgattcagacagtgactgaataatgcaactagatcccgctaggtaaagcaaagctgggacagtaagacaagagtttgtgtgtgtgtttggtatatatgtccatttgggtaacatttctgtcttcttgtttaataattttggaaaattgagaggttcaagttcaaattagaggaacagagtctttagaattgaggaaaaatcaattaaaaatcaatttgtggtcatgctcagtcatttccaactctttgcaaccgtttgaactgtagcctgccaagctcctctgtccatcggatttcctaggcaagaatactaagagtgggttgccattttctcctccaggggatcttcccaacccaaggattgaaactgagtcttttgtatctcctgcttggcaggtgaattctttaccactgagacacctgggaagccacagaaaccaacacaatattgtaaagcaattatgcttcaattaaaaataaaaaaatttaaaaaacccagttagtctaaggatttcaaaatattttcccccagaagtatcttacaaagataaaatcttaagtaaactctaatatgttaaacaaaaaatatggtattttgttaacataaatttatttacacattggaaaagactctgatgctgggaaagattgaagacaaaagaagaaggggatgacagaggataagatggttggatggcatcaccaactcaagacacatgaatttgagcaaactccaggaaatggtgaaggacagggaagcctggcatgctacagtcagtccatggggttgcagagtcagacacttacacattcaaatccataacactgactcataaaatcaatcactgagatctatagaatgaatacagagtttaggattaggacttatgggtctcagaggcagtatgccctttcagtatagctgaacagaattcaaatgatgataattcacaaagacaagtagtttcaaatggtaaacattttaaacacaactttttagcaagtgaggatacatatccattaagccaattcagaaacttgatggagaaatagtaaggcattttttatctaacaatatcagagaagtgctgttagttcttaactgatagttgtttaatttgatggtggttgatcaaacacttagctcatgttaatgatcactgggaaggaaatacttttcaaatgtaaccttgaacaatataaaattatattaatttgaaaaaatcagacacagaaatgcagagtcctttgtcagatggtcatttgaagtttctaaataccatgatctgctttgttttgcatgctgagtccaaacttaagctctcagtttcaatcctgacattgtaattataatttaaggcatgctagcatagggggccctcagttgccaaatttagttctttaaaaatatcagcaagatgtgcaaacagcacaggcctgctaggtttgaggattttagctaaagatactcctgttacataatagtaatggtgcctctcag

SEQ ID NO: 59014 - DNA, 1102 bp, Bovine  19866881404293
  misc_feature (1)..(1): n is a, c, g, or t
nacaccaaccctttaaaataaccaaaccctttagagccccacacagctgtgtgtgcaccggagaggcatcactttagaggtaaagacccattgatgcgtatcacagccctgtaacaggaggctcttcctatgaatccactaaagatgaattcttatgtgcattttaaaaaggaccttctacctaaagttgggcttcccaggtgactcagtggtaaagaacccacctgccaatacaggagatgcgagttggatccctgggttgggaagatcccctggaggaggaaatggcaacccgctccagtattcttccctgggaaatcccatggacagaggagcctggcggggtacagtccatggggtcacacaagagtcggacaggactgagcaactgagcacacacgcaagtgtatgtatacatacacagatacaccatttatacacaccacctgtatacacatacatgcacatagtgtgtgtctatatacctatcctatggatcctataagagcaacagcaacagttacaagcgaagtagggatctggagagggcagggtaggtgggccaggagcaggggtgggggggtaggagggtggtctgggtctccagggcattgcctttgtaacatcttcctcaatcctggactttctaacagctgttaagaattattgagggccttctggatgctaggcaattgtccccttttacatgttctttttcctgaatgtttatttcctcaacaaagctacctgaccatcaagacaagatcctgacctcaaatcacctgcaagatttcacagcacgctcagtgactcctcctgcccttctgcatgaggcatttcagctcactcagggtagccccagattaacttgcttcttctgccttcatttagtagtacagtgttttttaataaagaaaaacgagtcaggtttgccacagaagagatgagttgtaaagtacgggccaaattattgggtagtctccaaacacctggccaccacaaatgattactttaatgtatttctaatgagaactgggctcaggccaagatgaagatgcttaacccattaaggaaaatttcctcgagttttcttaaaggatca

SEQ ID NO: 59015 - DNA, 1002 bp, Bovine  19866881410804
  misc_feature (1)..(1): n is a, c, g, or t
ngtgtattaagcatggggatcatgtcagaggctcagatcctggcttggcctctgccggcatcgcgacccgctcccgcagcctgcatccttatctgtacaacgtggacgcacagagaatttgagtgacagacacaaagtggtctgcagggcccggcgcccttagatccgaacattttctaatcagcagcttggaggcacgcttccacatggctagctgactacaaacctgaaatttttcctttgggatgttcctccgagcgcctttcgctagaactagagcctcctccactcggtggctggctaacaggtcctgtatttgtttttccagaggtagcggagccaagatgtaaacacctttactcgtggcaacgatcactcttcctgggaagaaatggaacaggttggagaggaaacggacactgtgctggcaagaaaaacaccccgctttcaccccacacaggagcgatagctgactctgaacaatgtcatcacagttctcccaacacagaatcgccacggcaatcagaaattaacgcttctcttatcttctttccatcataagaaaaaggcaaactcttaacactacatttttgaagtataagacataaagatgctttgcctttttttattctatgatgctgataaatttaaagccagttgaatagatccaaatgagtctgtagagctccgtcacagaaaatgagcaataagaattatgctactcctcatataaggctggggcttccctggtggctcagatggaaaagaatctgtgtgcaaagcgggagacctgggtttgatccctcggtctggaagatcccctggaggaagtcatggcacccatgccagtgctcctgcctgggaaatgccatggagagaggagcctggggggctacagtccatggatcacaaaagtgctggacatgactgagcaactaacactttcactttttcaaataaagccgttcaaaattcttttctctccaggtagtcagttacaag

SEQ ID NO: 59016 - DNA, 1057 bp, Bovine  19866881451131
  misc_feature (1)..(1): n is a, c, g, or t
natacatttagatagataatgctgctgctgctaattcgcttcagtcgtgtccgactctgtgcgaccccatagatggcagcccaccaggctcccccgtccctggggttctccaggcaagaacactggagtgggttgccattgccttctccaacgcatgaaactgaaaagtgaaaatgaagctgctcagtcatgtctgactcctattgaccccatggactgcagcctatcaggcttctctatccatgggattttccaggcaagagtactggagtgggttgccattgctttctcctattgatagatatgtagacagatgatagatgacagataaatggtagatacatagatagatacatttagatagataatagagggtaggtaatacctctatttcaatatttcatagtttatcactggaagcaaaggcttgtgaaagacacattcttcagacacacttaaataacctcgataagatgtatcaggatacaatagtgcttgcagtgaattaatggtacctgcaaccagcttctctattgtggcaaatatgaatctttttaagtccttcatatttttgaggtgggggaagccatgtcttgaagagaacttgcatagaatcatagatttctaatttaggggagataaaagactcctttcgcagaagatgcaatataccgatctttattttcatcaggagaaaaccatgctgatagacttaattacagtaaacagtttggcaattaacttctgtctctcagaacgagatctgagtaattctgatggcaagagggctgctcttgaggcagctgtttcttcttcaaatttgagtgatttaattcttcaaattggtgagggttcctggctttcaggagagagaatcctttggaaccattttaaagaggtctttggatgcattcagagtgaattacttggtttaatcatatatgaagatctgtgtttccataatcttttcccaaaagctgtcctttgatgagcatcctcagatgtacatgtgttacttatcccaatatctgagctcatactgtacatgttatcggtg

SEQ ID NO: 59017 - DNA, 947 bp, Bovine  19866881548261
  misc_feature (1)..(1): n is a, c, g, or t
nctagatacagatttcaggaaagcatcacgtcttctgccaacttagcagctgaaacctgagatggccttaggacagatgatattcatacactgggtttcagcacaaagatcaaacactcaagagcctcatcttgtgatgttatctcaagaatatcccggcaatgttttctttaactccaggaagagcgatttagagggatggatctcgccacatgtgtccagctgcaagtttaataactttcgggaaaaaagactgtcctataaacacagaaggcaccaagtatgggtgcctgaaacttgtctgtttctttgcttacagtcgtcagaatcttgtatacacaaagtacaaaattaataaacacggtggaattcactattatcgtaaaccagccagcaatattttatgtgcaccctagggtttcattttggaatttcactcttcagtggatggagatgaccgaaaatcaagttgagtttcatcagtttgtgaaacatccctcaggagttgtatggtcaacctgtctccagatttaatcatttataaagcttttcacttttcagtcaattaaatattgccacctgagaagctatttctgaagaagctggactgtgtttctcatggcgtggaggcatttctccacacctgggcttcccagggtagacgggctctttgtggggtggctctgacatgttggtgcaggaaccgcgtgggagggaggaggggaagtcctgcctccctctatccccacccagtccgttctgctcatgcacacgccacactcatcttggaaacatgcaagtcggggtgtcgcctggggagacggttgattgcggtcactgagtttcctaccgtgataatccctgtgcctggcagccagccttccctgtaccctgctcgctggctgcccaggctgtggcagagggcaggggtggctcctctcgtgcaa

SEQ ID NO: 59018 - DNA, 840 bp, Bovine  19866881713919
  misc_feature (1)..(1): n is a, c, g, or t
nctccaggggatcttcccaagctcagggatcgaaccccaaagtctcttacatccccctgcattagtaggcatgttttttaccactgggaagccaggcacacaccttccatacctcacactcaccagtggtgtatcggttctgccaattctccgccatcaggaagggggtgaggttcgttgttttggggtctcactggcatcataaactccctaattagaattcagatttcttaaaccagtgagttcacctcacttgcatttgtccatcgaggagagtttccaggagtcactgaatgctcgatcgcctctttccttccaatcactaattgaataactttctgtatctattttatcttctggttctgctgttggatacctgttgccttattagcaggaattccatgaaaaatttaactggaaaaaaaagtgtcgattccccaagtggatgactggaatacattctctccttatcctgtggttattagcttccaaaatgcttaccttttaataagcattttaattcagatagaagaggtacagaaagtgcgggaaataatcttattctaacactttaggaaaacacccaaaagttcaagtagaaaaaagtcagtttctcattttctaaagatattttttatctggacattttattagtaagatcaacctaaagaaccactgtggcataatagtcatagaatatggtaagaatctgtatttagattacttatatgtaatagaaattctagtactgactattttacatttttttctggctgcccggtgtaatatgcaggacttcccgaccagggatcgaacccacatcccttgcagggaagttca

SEQ ID NO: 59019 - DNA, 602 bp, Bovine  19866881946851
  misc_feature (1)..(1): n is a, c, g, or t
ntaacaagaaaaatgttgcagccttaagacgtgaaacttacgtagcagattttagaattcaacataggaaagagacatttaactaacatgatgggaaaagattcagaaagttttacccaagagaatattgacagactgattactttccttttccccaggggtttgagaagtgagcccagccaataatgaagcatcctgaagagatttttccaaaacaaagagcatccagtggggagaagatggccgcccatttcattttctttttatactggcaaacaagcatattattcatgaatgcatgaggcacacagaaagctactacatgtgaaggagaaagaaaaacagccaaaaccacttgtgagctcaaggtctgttttcagaaaaaactaaaaaccaaagatccaattggcagcagatgactgattaaggaggaactagaagaaatgttagtggaaaaactgtcagatcaagaataagctcagtccatttggctgctgaaaagattatcaatgttgccctctggtgctattgaagaagaatttgtgttcataagcagaaataatgacaaaccataaaaataatctcagcctttagataaaatg

SEQ ID NO: 59020 - DNA, 1829 bp, Bovine  19866880459497
  misc_feature (1)..(1): n is a, c, g, or t
nataaagactttaaaaatggtacccatcagaaacattaacaaatcttaaaaaaaaaacacatgtgggagattcgaagatacagaggagaagaaaaggtttaggcagaaatgggagtgatgttgtcacaaactaaggaagctagagaatgccaacagccaccatgagctggacaagggagggaaggacacccctccagaacttctagagggagctcagccctgacaacacgttgatttcagacatctggtctccagacccctgagaggatacatttctgttgtggtaagccacctagtttgtgatcatgtataagggcagccataggcttcccgggtggtgctgatggtaaagtacccgcctgccaatgcaggagacacaggagatgtgggtttgatccctgggtagggaagatcccctggaggagagcatggcaactcatccagtattcttgtctggagaatcccacgggcaaaggagcctggcgggctacaatccatagagttgcaaaaagtcagacatgactgaagtgacttagcatgctcgcaggcacacaatggcagctgaggaagctaatacagggagtaaaagtatggaagggacaaaatggacttacaccaagcaagcgagagccatacacaccaagcatgtgtatcaccgtgtctagaagctttctcagccgtctttctccttactatttggagagctcacacattgatagcagtcagtaaataacttgctgatgtccagtatgaataatgcctgtttgttttacccacagagtttgcttagcctgcaactgatccatcctgctggtggacctgtaatgaagtaacaaaggtcagtaggcaaagcatctactcctggagaaggtgaaaccacacaaaaccagctccagactgtctatggagcaagacagtaggaagcattctaccaaaaacagctgtgctgctgttagctccagcagggctacctggtgccaccagtccctgggcctttgaggtttctgcagaatagttaggtggcttcttcactttccccactgctggttggaattcaaaattttcaaggctgagaagtcagtttcctgttgacaactgcttgccagccccgaaattttatcgatctcatctccactgctattctctttgttctaaagccttttaaaacgtatctttaaaattcctttatcatcattctagaaggatgaaggtgggagggatggagagaaggaagcactgagggagggaggaagggagagaggctaaagttaacatatacgtttaatccaccatctttaactagaatgatgcaaatttttcatctgaagatttgtaccttgattcagttctggaaaattcttagctattatctcttcaaatcttgcttctctgctgagtcgttttttctcttcctacagtaacaagtcaccataaacatagcaccttaagacaacacaaatttattatctcatagttctgtaggtcagaagtccaagtgggctctgctgtcaaaatcaaggtgtcagcaatctgagtttttatctggaggtcagaaaatagaggaagaaatctgctccctcgtccattccagttgttggcaggcactcagttccctgttcctggggctgaggttcacgagtccctatgggctgttagcctccttcagctcccctaggatccctgttgggggccagagtgaggtactccgcccatggcaaaggtcatgaggaaggaggctcgacatacgcaaaggcgggatcgagcctcaggagtccccctggaaatcctcgagcgtctacccccataaccagagcctgccgactttacta

SEQ ID NO: 59021 - DNA, 2455 bp, Bovine  19866880494796
  misc_feature (1)..(1): n is a, c, g, or t
nggagattggtaggagaacaaattttggtgataaacaccatgctttgttcagactcaccttgccttctgacaactgcggcttgtaactggtccaacttacagtgaatttcccctccctatccctcgaagctaagaccttaatatccaatgtatccaattagttagtgctacccactgtaagatacacataattcaacatgagtgaatcccaaggacacacctgactcagagtcaggctgagacccattcagcagtttgagaaacagggaattatcccaaagtgacctatagacaggctagaaaagaggaaaaaaaaatatgaaaaaacaatagaaatctctgctttgggaacaggatgatagtagaaactactaactatgaaggaatagccctaagatccatacactacagtaatataaaggatatatactggttctattacagttaactggtgttacataatcaatatcttacttcattatataagacacttagtttatctctttctgctgtcaataatttaacattggactgtatatccaccatgtgcttttcaaatctttctagcatacgctgaagttcgtctctttctcttgtgatgagatggatatccgagtcgtaatcaccctgaaatataattcaagacagaagttatcatttgttgtaattatcaccacatggttgccacaaggatgctgatgatgagactgactgaaagatgtgaacagacaaaaagaacacaacttcctttaatgtaattaaagaatacaattattaatctataaggagagcaggagagagaatgctggcaatactggggcaaatttccaggctttcaagttcccagcaagagacccagctgccactgatgctacttaaatagatcccatcagatgcttcaattgtcattctcccccagttgtttatactggtgttgtaactaaagtataatccccagaccagaagcacacagtatctggggatgtgcaaggcatgcaaattttgaggtatatcccagacctactcaatcagaaactttgggggcagggcccagtaactggtttatcaagccctccaggtgattctgattcatttggaattgggaatcactagtttataaccctctccaagggaggaatcaagagggtatgtgtatacctgcttacctgctcacccagtacaagtaactctaacagcctagcacattcctcagcgtttcctaagactaaatccaagatcaatttcccaggcataccagcccccaactgtcccagcaccaaacctaggtgaggtcttttttttatgcaatcagataaatataaatatttctaccagacggtgtacattaggatattcactgaataagcaagtacttccaacattcctaaaacaagattatgcctattatttcattataacttaaaaaaaaaaacattaacttcctcctgtagaaaataaatatggtaaatgtatacctggtgtctgtggtatattaatgttcaagtactatatgcagaagccccagatagtgacaatctggtattctgctacattggaaagcatcctgatctaggtcaatatctactatgcacatgccatgtccaaaggacacttggtaaatggtaaatatccatgaagatccttcacctgccacttggaaataagttatcctcttggttaagcaagaaaagtcaaggaaaaatgaatgagaatagctatctgtacatcttaaagggtaaaatgtatctgtacaggataaaagcaattagggtgaggacttaattaacacttaaataatgataaaagaaaacctataacttaaccatatttaaataaaaatatttttacagaaaggaggtggtatgcctagattttagaaaaggacagctcaatgaataaggatttgacagtctgttttcatcattgtctcggtctcagcttaaacgccactctccgtaaggagtccttccagattctccaatctaatttagatctccctctatatactctcatagcattctgaatatttcccgtattctttcttcattaacacttactataaatgaaattataaagttatttacacaaccggatatttaatgtgtctttatcactaaaaccagacatcaaattgccaacatccactgggtcataggaaaagcaagagaactaaaaaaaaaaaaaaaactctgcttcaccgactacgctaaagcctttgattgtatgtatggatcatatggatcacagcaaactgtggaaaattcttaaagaggtgggagtaccagagcaccttacctgtctcctgagaaacctgtatgcaggtaaagaagcaatagttagaaccggacatggaacaatggattggttcaaaattgggaaaggaattacatcaagtttgtatactgtcaccctccttatttaacttatatgcagagtacatcatgcaaaatgccag

SEQ ID NO: 59022 - DNA, 2860 bp, Bovine  19866880637418
  misc_feature (1)..(1): n is a, c, g, or t
ntatagctggtcagtgagaggtatgcgggccccagaacttgtgacaggcatctgaagtaggactgtcctgtgggactgagcccttaacctgtggggtctgtactaactccaagtagtaaatgtcacaattgacattgagttttggaccagttggtgttcagagagttggagatgtggttttggaaaagataccatgtatttggatgttaggaggagaaaaaaaaaaacaaaaacaaagtctcatttggtgtttaaaatgttgtgagtaaagataactcaccaggaaagagttggctgtatgcaggtaacattaaggagaaatctagaagtaaactgaggcttctctttcaggtttctgctctatatttctgaaacatattctatataactggatgttgctgactctaatgttgtcacagactattctgtttccccttttagactgtgagctcctgacagtatacagaagactaatgggttcttctttgtgtccataactcaggcagagtgtctggcacttaatgagagatcattgaacagaactgaatggaactgggtgaacctggcctccatacaagtccagcatatagcacagctgccttctttcagtgactggcctgaagatgggcctaaaaaatatcagcattactgccaactaattcaggtccttttgtttaagcagcagggacttaatttccctgttgccacaggtataggtttggctggcaatctgattatttcctggcagttaaggataatggtacttaacaagaaatgtcaataacctcagatatggagatgataccacccttatgcaaaaagtgaagaggaactaaagatcctcttgatgaaggtgatagaggagagtgaaaaagctgcttaaaactcaacattcaaaaaatgaaggtcatggcatccggtgccatcacttcatggcacatagatggggaaacaatggaaacagtgagagactttatttttctgggctccaaaatcactgaacatggggactgcagccataaaactaagagatgcttgctccttgggagaaaagctttgaccaatctagacagcatattaaaaagcaaagatattactttgctgacaaaggtccatatagtcaaagctatggtttttccagtagatgtgtatggatatgagtgttggaccataaagaaagctgaatgccaaagaattgatgtttttgaactgtggtgttggagaagactcttgagagtcccttggactgcaaggagattaaaccagtccatcctaaaagaaatcagtcctgaatattcattggaaggactgatgctgaagctccaatactttggccacctgatgcaaagaactgactcattagaaaagaccctgatgctgggaaagactgaagccaggaggagaagtgggcgacagaggatgagatggttggatggcatcaccaactcgatggatatgagtttgagtaaactccgggagttggtgatggacagggaggccttaggttctgcagtccatgggatcatcaagagtcggacacgactgagtgactgaactgaactgaggataatggttacaatagttccagtctgtctggagacttgcagtgagcctctgtagtgacttagctacaaaatgttaagaaaagctattcttcagcagcagagacactgggaaaattactgtcaaaaagggtgagccccttttaaaagcacgatgccaaagcattttgatgatggaatactttattttgtaagacatcagaatgctcatttcataatgttaatgcaaggagctacttcttttaatccccttttgtagatatgcatcaagcaacaaaggtttactgtttagcatagggaactatagtcaatatcttataataacctatgatggaaaataatttaaaaataaatgtgtatttgtgtaactgaatcatcttgctgtgcacctgaaacattgtaagtcaactatatttcagtaaaaaaaatatatattaaaaaaattcccttttggagtcagtaagagtaaagataatagtgggggttctgcatgaataaaaagattgataaacattatatattttgaaaatattccacatgctctaactttcaaaagaaccttcacttgttctatggccacaagacaaaggataaactggggaaaatgttccaactatttccatagatctaatatataaaaaactcctataaattgatagtaaaatgactaacatgatagattatatcaggaaaacaatttttaaatgggaaaggtatgaaaattcaattgctcaagtggttctttaatcatgtgacaagagaaactcactgaaagtaagagatataaattaaacaatagacatgtgaaggatgagtaggtagccaaatgaaggatggagtaagacaagtgaagaggctaataaactaataatagccattgggtattgagtgcttgctaggttctgttctaagtgctatgcatgctttacaggtattatttcattttatcaccataataacccaataaaataggaagtattgatatccaccttttacaaacaagattaaaaaatttactagaaatcacaatgtaagtgataaagtcttgacttcaattccaaaagttaaaacaactctgaatttggcagactatcaaggaagagaactctacaggataatggctagaaagagaatattcagatggtgatcaattaaacttggtggagatatagaattgtcagggtcctaaaatctcaaacagaccaactttctaaatcaaatgcaaatttcttctgcaaatcctccaacagatggccatcgcagctgccaccgactatttccaaagacaagaggactca

SEQ ID NO: 59023 - DNA, 2038 bp, Bovine  19866880715629
  misc_feature (1)..(1): n is a, c, g, or t
ntatcagattcatttcctcccattctcttcctagggcttcctcccctcattcaggtcttatggtgaccctaaaagctcccatgctttcatattcctgcttagacatccagaagttccttggtcttcttgcctccaatccatttccaaagttcctgggtaagaaaaggtactggcccaatttgaaaggtgctcatctttgaaacaatcaacagggacaacagcattggctcaactttactaaccatgtggatggttgggtataaagagtgatttctagaaaagaagtgccaggcatcaaacccactgcagtccattacagcttctctaaatcctgcatttccccattcatatattcatcatacctaagtataactattgatttaacatttacctttcaggttattctataagctcaaggaaggtggaatatgtgagtctttcttggtctctatctcttcaccaagagtagtttctggcacatagacatcctccaatatatttctgctaaataaattcaactattttaaaatgaaattttaaggtgaagacacatagcaaatgataaactcctcattaagaacttttcatacaaattaatgatagactgtaactctatcagcccatgaaataaatcctcctcctttataaacagacacctggagcaattcaactgggaatccagtgttggagaccataaaagcctttaagaccctcaccaaaaccactcttgtctgaatgactcctgcacacacactaggtaggctccctacaggaaggagtgcccataggcggcaacttaacagtagatattctatcaagaaaagtgatagggctcagggaaaaaaatccgcaaagtgaaccctcaggtaacaaaagcagcaagagaacagtgagggagagggaagcatcgtgtttacagcttcacaaaacgaaggataagcagccctgtgtctggagcaatacaagctcctttcacttagaaagtgacccaatttagctggcacacaaaatcctacttcagcatgaaggtatgaacgcttcaagacatgcacacttgtactcccagaccttggtagggcattctaaatgttgtactttaccggtgatactaagtattaatttatgtactactcaaaactaaaggaaaatatctctaaatatgtaaagaggctgaggtatattactccaaaacaataaaaataactctccagaatttggtctctgagatttatccacacaggtaaactccaatgaaaaactaagtaacgagtcctatttgcataacgctcatggagcacttccacatgccatatatggtttgagcaaaggctcggagggaagaagtaacttggcataaatcagtttggctaaaaatcgctgaaacaatacttcggctgaggcctttgatattaaatctattgttcttttttttttccttccagttttattgagatataattggcatacagcactgtctaagtttaaggtgcacagtataaagatttgacttacggatatcatgaaatgtttacctcagtaagtttagtgaacattcatcatctcatacagatacaacacaaaaaaaatgtttttaagtaagtttttctttgagaactcaggatttactctctcaactttcatatataacatacagaatgtgttagttagtatgcatttatcatgctgtagagcatatccctagtatgtattatcttataaccggcaattacacgtttatctgccttcatcctattcccccttcccccacgccactattctttctacttcctcaaaaagcacggctaaattttggtaaagtgagtatttcttaaatttacaactgcaaactattctttcattcaggatgtataaccagcatgtataaatgctaacaaaatcccaactctcctgctacactggcaatgtgacattgagcaagatagttatttagcttcttttgagctttagcttcctcatccatagaatgcgtataacaatgtcaactgcacagggttatcataactgtgagaaggaagcc

SEQ ID NO: 59024 - DNA, 1150 bp, Bovine  19866880749529
  misc_feature (1)..(1): n is a, c, g, or t
naaaaaccttacccaaagaaaaagtagtttactggcattttaacattattttaaattatctgaactaagtaaatgttaaagacttgagtaaagaatggttcaaaaagagagaattcccctaaatctctacgattatattttgcctacacaatttccttttgtaaaacacattcaatctgactttctattcttattagtatctacgacgcagcattttcagagcaaggaaaaaacaaaacaaatttaaattttattcataattacttaattttgatccactgaaaagttatcttccccaaattttaggtttctcttttaattgtaattactattaagaactgatttaaacataatttgaatccttgaaaaggtatctttaaaaagtttacattctacctatttagaacttctgaagtcatttgtatttacttgaaatttatttttaaatgttgaccaacaagttacattttcaaagacgaacaaaatagtttttatcctctgaattctgtttattatttagtttttcttttcttgtaactgataacatcaaagtaatagaaactgtaattttttggttactctcctattccttattgcttaatagatacatataagagatgtaattttaaccctgttttaaaagtatcttctaaacttgtcttaggttaagtaaaatttttttaacaagataatttaagaacttcaagggataagaaaaaaaatcaaggttttaggttaatgcaatgataccattaagatactattgtacttgatttaaattatatttcaattatgtcatttatctcaatgagaatcttaggcttgataaattaatattatgatagtggcattaataacctcccaaggaggtagttttagaaagatttcccttttattgcagtaacaagtgatgacaaatatactaaatgaaaacattaaacacgtaactgtattaatatgttgtttactaaaaagaaaaattgatttaacatatccatggtgaaacattaacaaggatataaacacactgtttaagaacaattaacctttaggatgagttagcatttctgtttccaaaagcctattgtcccaatatttttatcagtatctttaccaaagtataatacacagattcaaaccatttaaaaat

SEQ ID NO: 59025 - DNA, 1343 bp, Bovine  19866880883992
  misc_feature (1)..(1): n is a, c, g, or t
natatatataaggatgtgcaatctaggtagggttaaaagaactaaagcatacctgaagtaagttctcctcttcacataaatgtttatcaacctttcttgtagaggttatcgagaccttttttcacttcttttccaggatactctttaataacttttcggagttcttgcttgttaaacgcaagttgatagctcacttcctcctctcttataccctgtgctacccgggcttcaacaccttcaaagaaatgcttcaaggaaatgaaaagtaacaatggctaagaacggctctcattaccacttaaaaaaaaatctgattacaaaatactatatatccactgtgtaaaaatcagacagtgtgtgaaaatataaaggataaaataatcatcagcttttatcaaactactcagagataagcactgtcaaaagactagatttccctctagtcttttgatgtgtgagtatgaaaatgagattataattttgtatgctacatttttcatttaatattttatgttttccccaaaatatatatttcaatggctgcatcatgttccatccaatgactatactatgtttactcattcctccagtattaatattttttactttttttcttgaagttggcaaaatctattcatcaaaaacaaaatctattataaatacagttataaataactttcatacataggtatttacccacattattgatgactgtccagcatacatttctaggactataattcctcagttgaggagtgtaattgttaagtattctggagattcttcatatacacaaattgcttcccaggaaacttcaatcactttatacttctgtcagcagtgtatgagactattttatcataccatcatcagcattatcataattaaaaaaaatctttatcattttgaaaagtaggactttcctggcagtccagtgggttaagactctgcccttccaatgcagacagcatgagttggatccccggtggagagatgggaaggggaactaagatctcacatgccaagtggtgtagccaaaaaaaaagtaagaaaggtttgtcattttatttcaatattcttcagctagaaatgaagtttatctgcttttcatatgctcagtaagtacattcagaactcttaccatttctatattgggatcttagtgctttcctgattgattttaaaaagggcttttatattaagtatactgactattgtgctgttatattcttctcaggttgccttttaagtgtaacttgttttttaacatgcatattgattggcaagtctttacttgaatacaacaggatttaatacaagtcaaatcccctcactactattct

SEQ ID NO: 59026 - DNA, 984 bp, Bovine  19866881025910
  misc_feature (1)..(1): n is a, c, g, or t
ntgttatttctgttcgggccctatctacccaggccacggcatgatgttcgttcgtaacgactgccaagggtaggaggtggggagtggggcgcttttagctgcgctcccgccgggctgaagccgtgcccgctcggcgcggggttactctgcgcctaccaacttggcgtggggtttggcctgggatttcggcgcgtgaggctggctttactacggactcggacctccagctcccgctgggggagtttctcctttaggtggtccgagcagagctggtcactaggcagctcttgggagaggccggcagtaatgaggttgaggaacgattccagccagagcccacggggaagctgggagtctgttggcccactgttgtatgtgggccacattcttcaattccgtaaaccttgctgaacgcatgccgggtcaagcatctttgctgaggtccatctctatacagatgtataagacttgcggtcagccgtagtgtgtagaggttgatagaaatgttgggtatgacttgatagcagagttacgttttatgaagtgattggaggtgatttggagaaggacgtatgtgaaaagacactgaaaggaggtgcttttatcctgtatcttgcattttgtttaagagcaggaggggaaagcattttaggaggaagggaaatgaacaatttgagcaaaggcacagaggagcagttacttctctgtttaaggaagtgacggattacagatggtgatagaggcttggggtagggctataaatacaaatataaatctatattaaaaaggtacgtctgaaaacaagatacatacagatgttaccggactttcgatggagttgtttctgggcaaacccattgtaagtcgaagatgcaaaagcctaacctactgaatattgtatatagcctagccttctttaaacatgctaagaacacattagcttacagttgggcagaatcatctaacacaaagcctcttttataa

SEQ ID NO: 59027 - DNA, 1228 bp, Bovine  19866881159571
  misc_feature (1)..(1): n is a, c, g, or t
nagtttgaacaaactctgggagatggtgaaggatagggaagcctggcgtgctgcagtccatggggtctcaaagagtcagacacaacttagcagctgaacaacaaccaacaaataaaagtgtagagcaagagttattcagtcaaacagtaaacaaagacaatgcttccaagggtttggtctgtgccaggtcctgttgttggtgctggaatatgagaacaagcatacagccagggcccctgaactacagagacattctggtgggagagagggacaagaaacagtacgcaaatatgtatacaacacagtgtcaggttgcaataagtgctaaaaggaagtcatgctgggtgagtggagtgagaagtttctagacagagaaacctagagaactttgaatgaagtggaagaagccttggaccaatatgacatttcttccagatctcaaattaagtgaaaagttatagctctttaacattgattaaagtcagtttccaaatagatgttgttcttccagtttcatttaggtctaccagtatggatgggcagactctttagcattgcatctttgaaaaagcttgactaagcacagcataatctcattttaggaaacagttttcttcatattctggaaaaaagcctgttgtgtgggtgggtaatcccaaatgttatccctcagccctttatcgatctccaagtttgtggcaagggaagatgcttggcatttaagccactagatttaggatggctgttcaatatatcgaatgactcttctattttaatataaattaaaattaagtgagagccctgggaaagctctgttttaattagagttggaatgcatcttaggagaccatttctgccagttataatcataacagtggcgttatgatttttttttttaaagaatccttacttaataagctgggtctttcctgaggtcttcaagtttgttttatagatgatttttattgaatcaagtgaaaggcagaagaatgcaaacattcttcttggaccctaaacctttttcttgggagatgtgaaacaactgagcaatagtctgcagacgagggtgcttacgactggcttgttcttgaacatgaaccaggaggttgggaaatctggatttaccatttattgaggaccattccatagagtggttttttttttttttaattttactcgagtatagttgctttacaatattggggtttctactggacagcaaagtgaa

SEQ ID NO: 59028 - DNA, 1131 bp, Bovine  19866881515803
  misc_feature (1)..(1): n is a, c, g, or t
nattatctcagatcttcataataaaagtctggtatcacttttcttccatgtttgtggtctttatttacattttatccccctaaacaacactttaaactaattgaatgtatgattagccttctatagaacattaaaaacatttgagactattttttaattccttagatgtaaagaaaagtgtacatctatatgttttcattttttatatagtaatcaagtagttctgcattcaagggagaatatcaaggcatgaaattattgctgtaatttgacttaagagacatgtagagagcatactgcagttctctcacatcagttgaacttctttttcattaaaataaggccaccagtattttctacttttgaaacactcttaattattctgtgttttcagaattgaaaacaggagcagtccctgctttccacctcatgtattcttagaaaccacactcgggtataggttgtattttttctcatatgttataaggaattagtgtcaaatcacagttatgaataacagcacattattaaagaaaaagtgtaactctgaaacccccaaaggcaatttaaaaagaaaaatcaaaactcaagaccactgtcatcttacaaagtaggaagctgaaacacatgccgttaagtagacatcctgtactttcacgtatagacctaacggatatagaagggaaattgccaactatgttgtttttaatccagcttcttttgggaagcaaataaatttttgctataaattgaattttctgaaccattttctacaagtcacttagttgatttttaatggtgattttagctttttgttttattgaaatatagatatctattatgtgtttttattgcaggaaaatcctgaatttgatttacattttgaaaaaatatataaatgggttgccagcagcactgctgaaaagaatgcatttatttcatgcatttggaaattgaatcagcgatatcttcggaagaaaattgattttgtcaatgtcagctcacaacttttggaaggtaaagttaaataaaagtgtatatgtaaaataaaatatatctgtaagtgaatatataatttggcattcttcaaagtaattaaaactcgaaagatcttttttaaaaaatattttc

SEQ ID NO: 59029 - DNA, 1318 bp, Bovine  19866881770445
  misc_feature (1)..(1): n is a, c, g, or t
natcttttatcctctgtcagtgggaatgtaggttgcttccctgtcttggctactgtaaacagtgctgcagtgaatattcctacaagttactgcagtcaccggttcccccttgttttctttcttattctctttgtccttaagagtatcttatttaaccttgtttactgtcattttagcactgtttctagaggaagaggagataaaaatgtgtgcggtcagtctgccatcttaactggcagacttaaatttatcactagtatttcttggttttgagttttatagatagaatttgtttttgtatataaaatgaaatagaaatctaggatttgtttttatatagaaaatgaaatagaaatctagcttattttttgtctccaatgagtggctgtcccaactctagtttttaaagagtttattcttttcccactttcttaaaatgctacctttttaaaatttacatcagggatatgtttaccttgtccacatgtgaaattcatactgttttaattatagtagcttttaaatttattttgatatctcataaaacaagtctagctgcattctttttccccccagtttttactgttttttttcttaactttcttttcccttaaataaatttaagaatgaaatctaagtcacttatctagtttaaaaagattttgttaggattcttactgaaatttcatggaatttacaattattttaggaaactttaatccatttccaatactgtgttccccttctgaaagatggtgtgtctacatcgtcaggttgtgttttgtgctcttgaggaaaatgttcactttctttatataagtcttgtccattttgtgttgagttatagtattttctgtcctgacttttcttcaattcagtcttatctactttttttagaaatttttttatgctggtgttttcccttcctgtttcattgctgttatggacatattcttttcttcttttcttgcctttccttttatctttgatttcagtgatattgaagaggagagataaatttgtttatctgctcttacatctagaacctaaaggggggtacattaaaacatgacttttaatgtatttttaaataaatccaatttatttccttagttttcatccagaaatattattaaagagtgcttaaggaaaagaaactgagacatatccctattaatttttaaaattatagcttgaaaacgaaaaatgtgaattaaagtctaaaatatttataatgaaagaaacaatggagtctttagagaaaaaagcaaaattccaagctcaaaaacttagccatgtggctggtgactcatctcat

SEQ ID NO: 59030 - DNA, 3865 bp, Bovine  19866880511060
  misc_feature (1)..(1): n is a, c, g, or t
naaaatgtgggagaagctgggtaggggcatcatctctctttctctactcaccatgtctcctctaactagtttctgacatacccatggttgaatccaagtgggaaagaggcgctgggttcaagcagccatacaggaaatgctagaatcaactagaaataggcccctctcggtgaaagatgttcagatgctcatatatttcatcagaaccttagtgagttttctagaggaataccccaatcactgcaggcttaatccctacaattcctgcaatgtgacaaatacacatattcttttggtagccctctcttctttggccctcacattcccaggaatccaggtaatctatgccatacaaaactctttcttcgaattctcaggttctctgagaggttctcttggacagaattagacatggcttcaccatttctgtctggagaaggcaatggcaacccactccagtactcttgcctggaaaatcccatggatggaggaggctggttggctgcagtctatggggtcactaagagtccggcacgatggagcgacttcactttcacttttcactttcctacattggagaaggaaatggcaacccactccagtgttcttgcctggagaatcccagggacgggggagcctggtggactgccatctatggggttgcagagtcaaacacaactgaagcgccttaacagcagcagcagcagcaccaccaccatttctgtctttcctatgagttctacccttggtacatgggaagaaggcattctttgcacaactgccactaagagtgaactacatttcagacagtcctctgttttcttcctttgccctgctgccaccagttgacagcaacagcgcctcacctggatctgcagatcttacattttctgagttgtcctattgaggcagaacaactctcacctctttctcatggagaagtgggaatccaggccagagttcacaaatctcttcttttgtcttccctggatccttttatgcaattgacctgggtcatggtacctgagaggtccaagagtcttaaaaaaaaaaaagtccttctgctttgttcatttcaatacaggacctttgctttgtgtgtagttcccattgcatcctagtacctcaggaaagttacattttatcattgcaacattaacgttagttggtttctgttactctccctcccctatccctaacaaagaaccataaatgaagcacccccagtatttatggtgaatatctacattataggctttatgaacatgaaggtaaatctcactgttgaatgactgtgttaatggaaggtaactgttctctgagccaagaatttgaatcacattaactaacaaatgagctagcaaacaattctacatccttatccatgtgttatcttgaatttctttatctagagtggactacaaattaaaccttgtgaaatggcttaaggaaaagattattcttatttagaaaatagaggttgtgaaaatgtcaaaagtataaaaggctaggagtgtagaatatgactgtggcttaaatctatgactattatcatagacggagaaggaaaatgcaactcacttcagtactcttgcctggaaaatcccatggatggaggagcatggtaggctacagtccatggggtcgcaaagagtcagatacaactgaggacttcactttctttctttcttttattatcatagaacccatgaaatcattgatattgaagaaatattaactgggtacctaagcatgtacctggaataggacatggcaacccactccagtattcttgcttggagaatttcatggacagtggagcctggcaggctacagtccatggggccacaaagagttggacatgactgagcactccatccaccaccacttagcatgtacaatccattatgatgaatgctaagtacaaatgctgaataaaacgggcatgattcctgcttctttgaagctttcgatctatattcattctagctaaacacaagaaaaaaaaagaaagattcatgaaattatttccgccagtgccctacttactcatcaaggaagagagaaaattgtgatgaaaggtaaaatctgcttaatttatgatgtgaaaatatgtacaggaaacatgtgcctttagtcataaatgtgaatccttagaaagccaggtgcttgtacaaattttttccatgaggcaaaaataaatgaactgacctttaacagagtaatggtaaagaaatatttttgccatttataatatgaagttaacaggaaaaagaataaggtaaccacatttatgcagaattgctctcctccaatctctgaaaaaattaaaggaagatgagggaggtagcccaggacaggagctcaatgtctgatgaggaaaacaccctgtaaatacatacacacacgtcatgtgtagtacacagaacagccctcctcattcaccaaggctgctttcatcttgcacattcaaggaggatgaggttgatattttaaaaatgatgacatgtaagatactatagggtttattttgccaacagaaatccgattttaaattttataaactaccttattccgttatttatgatgttcttgaatattttatttacattttgctttattagagatatacagaacatggattctgaagaattatctctcagattgtcaatagacctactagttttacctaaagccagctgatttacttcctagctgacacccatgggccgtcagacagccctgtaaaccatgaatatttagaaacctgctttaaaagactttatcagaaatgaatgatgataacctgctttgttacttctggatactctgcaatacttagccagtgtctactactattcaacactaattgatgattcttttctagatttcggaactcagaagagtctcttgagaaatgacttacaatgagggctaattcataatccagctcaggacactcttgagatcaaaaggaggaattattccaagacagggaaacaacctaaatgttcactgatgaataaagatgtggtacatatgtgcaatgaaatagtgtttagtcataacaaagagtgaaacactgccatttgcagcaacatggaagtgcatgctcagcgaagtaagtcagacaaatatcatatgatatagcttatatatggaatctaaaatactacacaaatgaacctatctacaaaacagaaacagactcacaaacagagagaacagacttgtggttgcaaaggggaagagggggtgggggagggatgaaccaggagtttggaattagcagatgcaaactattatatatattaatagaatgtataaacagcaagtccctaccatttagcaagggaactatacttaatttcctataataaaccataatgaaaagaaatgtgaaaaagaatgtatgtgtgtgtgtatatatatatgtaatatgtacatatacatatatatatgtataactgagtcactttgctatacagcagaactaagacaaattgtaaatcaaccatacttgacattaaaataaaaaatttttaaaggaggagctattaataaatatgccaaacaagagatataaaccagcaaatggaaacccatgatcaccctagctgagttttcaatcaaactacctaaatacagagtctaggacatttgcttttcttgaatagaagaataaaaatgtaactctgaaggaagcagatgtcacaatgtgaggagatacacgccatgtgtggagactcatggctgagccgtgtgtctcctcagctgcttaaactgctaaagatagaagcaaggaagagaggaaaaagatttgatctgacacctcactgcccacacagtgtccacctcccccaga

SEQ ID NO: 59031 - DNA, 1285 bp, Bovine  19866880511413
  misc_feature (1)..(1): n is a, c, g, or t
ntacatcggcagatgagataattaaaggcacacggcttctatgtggcacaaccagaactggaatctggctctgattccttgtccaccttgtatcagaaatgtatgtaacacacgaattatctattgactctctgtctaaattccagagtgtgggataagtaagaattccctaggcattccaattcaacactgctaagctgaattcataattaagtgatttttcaaactccccctcaccatcacccagtgcatcctatctccttcttcactggccatgtatgaggctgtctctgaaagtttaaaaaaacagtagcatcataccatgtctaacacccaatatgtgggaacagatggcatttcataggacatgatccttttctataaatgacagaaagtgaaaagtaaaccctcaaagatagcaggctcttctgcacaacgataacacgccagagagtaatttttcatcttagcaatttcaacttaggagcccgtttcaactgtcaagacttatccatttctcatgtttcccttatgaactgtattctcacatacattaacaagctcccacggaacgtcctgaatgttactatttagtatttaagtagctttctgagaacacaaagtgtcctgccaatcatgggtactttgctactaataccatctctttggaggcaggcagaaatcattctcactttaacagctgagaaactaagttggagtaagttaataacaaaactgttcaattaataagcccaggtagaatcaaaatgtatttacccagtttgggccattctcttgtgagactcttttaacccttcatggactagctctttttgaaattttcttttgggctaatagaaacctcactgataaactagctcaaatatatacatggagaaggcagtttaaggaacagaaaactgggagccttgtcatgtcagaaactcagcaggtcaagctggaaaaaaaaaaaccctgatgaaaggacctgaagtcctgataagctgttaatagattaactattactcagtgacagtacaaaattccaatttaggaggttattcactattactgaacatttctgattgaatagataaataaaaactgaactgtcttgatattcacctgactagttcatattaatttcttcctaagtgaaagtgaaagtcgcttagttatgtccgactctttgtgaccccatagactcgtccatggaattctccaggccagaatactggagtgggtagcctttcccttctccaggggatcttcccaacccagggat

SEQ ID NO: 59032 - DNA, 1550 bp, Bovine  19866880726223
  misc_feature (1)..(1): n is a, c, g, or t
ncaggggctgtgctttgagcagtcctgagaaggggtgaacaatgtgggctgtggaagctgacttcctgccttacaatcctgctgtgaccaccgcctggctctatgaccttgaacagcagtggcacagtttcctcatttgtacaatgtagataataatacagtgtctaagacatggcatttttaggagggaaaaatgatattatgagggaaaaataacacaaaaacacacagaagaatgacccaaggcaaaccattgataagggctagatagcatgtattgtcaacatcaactctaacctacccaagggcacacgatgttttatttagctgaccccaaattccctttggtggttaggataattgacaactacatcatcaaatagttgaaaaaacctatctatagtctaataacaaaaggatggaaatgcttttattagagctctaatgcactggttctttagatagatccacagagtggatctattagctgtcagggtcaatgttaaacagatgaaactcctaaatgaaataccagtaatggaagtgacacaggtagtgtcaaatggtattactactataaaatcagaacttgttaggggaaaaataatccagaataatagacagcctttgaacttaagataaaaaaccagaaaggtaacgcctctggtataacacatgagaaaatgaagcttgaattattcaacagctcattcattttgatggtaggggaaattgcctgaaatccctttcacattctgcaaagatcaaacatattaggaatgtcaaaataatattagacatcccctttcaagagtcaaaataactcctcagaacaaaggaaaaaaagggcaaagttcagggctctaaagaacacaattaaatgctgatattgtggggaaaaaaacatggaaagtcctgctggtactattaataaaatgccagccagtcatttactaaggggtcagttttgacaaagcactgaaactgaggttctggatttcttcacttttaaatcaggttaataatttctattttatacattcatatgagaattagaaaaaactaatgtatataaagtttcagaaaacattaaaaatattagtttacccatctttgatcagtctggaagtcacaagtcataagcaaagtttcctatgtattttgcttggtcttcacatagttctgtatcccaggttgatctaactatgttttaaagagaatattgtttgcagagcttctttatgttccactgtgctgctgctgctgctaagtcagtttagtcgtgtctgactctgtgtgaccccatagacggcagcccaccaggctctcccatccctgggattctccaggcaagaacactggagtgggttgccatttccttctccaatgcatgaaagtgaaaagtgaaagtgaagttgctcagttgtgtctgactcttagcgacaccatggactgcagcctaccaggctcttccatgccaatgccttctctgctctaggtttatccaaaaggaccggaatataaatccaaggcttccaataaaaacaccc

SEQ ID NO: 59033 - DNA, 1574 bp, Bovine  19866880774898
  misc_feature (1)..(1): n is a, c, g, or t
nacataaaatataatatttgaggtatattggtaaggcactgttttataatttagtaagtgaaaagtagtcaatatttcaaactcacagatgggataagttttcatatgttcattgccttaacattttaaaagtattagaaaaatattctacatttcatgtatttaaataccatatatggaacaatgtgtatttatagtacctttgcatatctttttgttagaactaaacagtaggaatagcttttgttatgaatactcagttcttgtcaaaaaaaaaaaatccatgctgaagtctttcacatatttttcaacaaaatgacagctgtgaaaaatcaattttcaaagtcctagcagatttaaatggctgttgactctctgtggtaagattttttgttgttttttcaaattatgggtaaattattttttataaaatatctctggaggcttgtgacaatgaagacagatgcttgagaagcctattataaaagaattccaaattttaaatcccctctctttcatctcatatattctggctcattaaatcagacatgaaggtgttaaattttaaaatgcaactccctttactccattaagaatggagtagaactcgggcacagagggggatatgataatgctttcatacctttgttaaaccaaggataacgccccgcatgtttccaccataattgggttagactagatattttcaagttgggaaggacattctaaagatgggctttagagattttcagacgttttttttcactaatgcaaaaataatgtaatgtaaccttccccatttgaatcattttcaataattttccctaggtttgcttatgacaagaataatcttttttaatgacttgtttcatggcactgtctttccatttcctcaaggctacaatcatagttgctcacatcacttttctgtttcagctttgcctttaactttcaagtaaaggcctacttatattatttagcatggtgttgaagaccgtttggtttgcagcacttcctcacctgcatcccgttttctttctgtctctatgcgctttctgcttttcctagtttacctctgcatctattaaacacgcccccaaatgtgtgtcaacacacacacagcacatgcacaaaccatacgcctttccatctaccacattacagctttctactggaaatctcaattgattctcaaacctcctttcctttactttttagggcttccctggtagctcagctggtaaagcgtctgcctgcaatacaagagacccggtttctattcctgggttgggaagatcctctggagaaggaaatggcaacccactccagtacttttgcctggaaaattccatggactgaggagcctgataagctacagtccatggggtcataaagagtcagccacgactgagcgactccacttcctttactttgcattttattgtgcctggaattatcttccactttttctacctgatccttccaaagtacgttagttgctcagctgtgtctaactactttgggaccccatggactgtagcccgccaggctcctctatccatagaattctccag

SEQ ID NO: 59034 - DNA, 1761 bp, Bovine  19866880810388
  misc_feature (1)..(1): n is a, c, g, or t
ntaaaattaaacatgtacataattttttatacatagcaaaatgatttcattggcaagaaaaaggatcccttctacagaactgactaagaaaagtgatgggataaccttcaaaggaggaaacaaatgcagtgacagctaagttgttttgtactgtgatacagaaaaatagtgagagaatttctgttggaaataatgagacagacacgggagaaactgagacaacctgtctcatagacgataactacagagacaaagtaggcgatctagtaaccttcttctttatccagttttgttgtttctgcatgatagtggaacaaggattgtagaaatccaagatcacgctgtgtactgtttgaagaatgagacatacaactattgataggtgctgtatctgtcagaaagagtagaaatcttgacatcaccccacaggtttaatttttaaatggatgtgaatggctttaagtactttttattgttctgtttgtgtggacaatgtgagccataggtcttcctatattgcgctgtaaataaacggtgtcactagcactgggctcactgtgatggatggtgtacctttctcaaccctcagttgtctcattatccaagttctattatggcattaaacagccgtaagaaatgtgggcagttgcactcccaagaataaaattactcacttgggactcggctccaaaatgactcagtaattgtttaatagaaccctttgtaaaactgataggttacagagatagataagtaaataatagattgtagcacctttatatatatatatatagagagagagagagcaattatttcacactgtatatatatatatatatatatatatatatttcacactgtatgtatgtgtgtatatatatatatatatatatatgtatatatatatcatgaactatatggctaagtacataaaatattatacctcttctttttctcctagttataaagccttctgattttatatatactgtttgaattctggctagcagcatcatcaattcaatggatattagtttgagcaaactcctccaagagatagtgaaggatagggaagcctgctgtgctgcaggccatggggttgcaaagagtcggacacgacttagcagctgaacaagtgtccattagtttattcagaattgctgtttctatttataattatcttcctaatactaattgttaacttagtaagaggcttcctcttattggtagaatatttcagagaaaattgaggagttttgaattgtgaaggattgtgagaattgaattgtgaagacttacatgttgtacaaagctgccaatcacatctaaaaaccaagaaaacacacagaaagcaaaagtaatgcatttgcccctttttcttctgtggctatgagacttggtcttttgtcttcagtcattcatatacctttatgtccttagatgaaaattaatgcctgagaagtgagaattgaacagttcatattgtatatagataatttttgataatttttacattttggggggagaaataaaggacgttttatacattttaatacattctgattctggctggtagagtcatgaaagaaaatgctgtagtgtccatttggaagcagaggaaattccacaagctttatgtaaatcaaagcacaattttgtgttattgaaacctttaaataatctagtcactattgcatatcacagggcagggactagccttttaaaactcccaggaacatttccattttccaatctgtttga

SEQ ID NO: 59035 - DNA, 1906 bp, Bovine  19866880843727
  misc_feature (1)..(1): n is a, c, g, or t
nccagtgctgtttaaatcaggccattgtcctgtttttgagatatcaaactaagatcacatggtttatttgaattttgtggattaataaaaattgtttattttcagtataaatttctacaagtagagattatcacaccccaagattagatgtaattataaagagtttttgaagggaatgctaaaggctggtaattaatactttgaacagataatgataaaaattctcccctggaaaaaatctcactgcaagtgttggcattctttgcagatgactagtcaaaaatggcctgaaaatactattataactaaatgctaacttaaactgaatgtgtttgataatgtccatgtaccttctttaattctgttttctattttccgaaactcttaaaaatctgaagctatgcatgtacacttagtttaattctcgtctccttctgaaatagatatgtttaatacaaccgataataacatctcctagtgttcacagtacttgaaaatggctccttgtacctcataaaatcatgagtgtctcctttaccttatccattttatttccttagtaataataacggcatttttagcttttcctatctgaggtttattagaatactggcatagtcaagtaaggaagttttaagaacatttcatttcaagtatcctaaggaaatcatttcctgacaattaaaatctaaccaggagctcataagtgctgttgtaaaagaaaatgacccttctgacagaagaaaagatgggtgtttttagccattctgttgaaaacctgaaataaatgatagacatgattagaacactggttggaattttatagcttttgatatactcattatctaaaaaaaaaaaaaaaaaagtcttttgtctttcaaacatcctaagattaaaagcaaggaatggacaacattgtcaacattgaccacgtttcttacagtaaatgcctcactgggaaaggtgaacgattaatcctgatagttactaaattcaagaagagattttgctgaggataagaggtgtctttattactgccatcagaaatgcccccaaaatagatggttgtcatttgataattttttttaaaaatcaagactaaaatcattaaagtgaaaaatattaaacattttcatagatgctgattctgtgaagacaaacacagttccttctattcttagaagctaaaaactgatcagtaaccaacaggtaaccttcagtctccctgggccattggtttatagcctatgataagaatctatgcccggtgatgccacaattatatctaattctgatatgcaacagaattgtccctgacaacttttcatactttgtttctctcaagattttaatcagagagaaaaaacctccatttattaataactgaagttatttcctttaagtttccttttcttctttcccttatcaaaaatggtacagtaactcataagtactacaaacaaacgattttcatttgatcgcaaaatggaaatttcctgcagctgtttcacaaatatcctaagagaatcatttgcagcatgtaaggagcctttattagaaataaggaacatagcaggcaagcagattaaatggctcttgccctaaagctgcatctgcttttaagtcaataaaatattcagattgtttaaaactatagaacatgtggcatacaatagtttcaagtgaatacaactttgctaggataatcctttccttaaagttgctggagagttttaggaaaataaggactcactctttgaaacttctcaggcagccagtgctgtcctcttgcctgggagttttacaaggtcgcagtatactggaagattcataggtcttgaaacagatcagaattatggtgaagtcacaactctgtctcaagtagaaaacctgcctgccaatgcag

SEQ ID NO: 59036 - DNA, 1765 bp, Bovine  19866880844752
  misc_feature (1)..(1): n is a, c, g, or t
nacgaggaggtgtccttagggctaaaccattttagccaaggccatagaacccagagacctgggttccaaagctacatattctcttactagctgcatatgatagttattaacttctctaatctccaatttccacttctggggaatagagataataataactgtctcataatgagtagttgtggagataatgtacattaagtgcttggtttaattctggcacatggaatccacttaataaatattggctattatttttatttgactccagtatatagaatattggtcctctgtagaattctgatattttagtgaggctgctctgggaaagaggcaaaatgcagtgttcgagtattctaagaataataagcttgggaaatgtcaaacgctgatattataacaaatgatgtttaatcttgctcatgttcttaataaaagagcctgatgggagttaaagatgtataagtagataggtggtacagggtaatgcacccagggagtgcagacagagctctccggaatctctgatagcctgctgtttcatttacacctgagtcaacagaaaattgaatcgcatttatattctcatcgaatgttgtctcttgggtcaaatatttcataaacttttgagctgagagccgggcctacctcattctttatggtgcatagtcacattcttcatctgacctggcatttgaaaagtcactcctgtttgtttctttgagtaatggatgatgcctgtatttctcagctagaacgttgccattgagggcatttcatatagtgaaataagttagtggttctgttggtttatactctgagttcataagccatatggtaatttatattacttgaaatgagacctttgttagaaagccttcttccctgactttcatttacagtaaaaaagattcatctcacaacctattcatccacagccagctgttgactaaaatcacatatgtatccctgtagctctcttctgatttggtgccttgccagcattcatatgtcttgtcatctctggagagttttcaatattttcaacttctctgacacttagaccttttttgtttaaaattgcaaattacttgactgtgtttatggcctgttatggagacaagacatgaatcctttctttactaaagaataagattaacaaagttgagtacttttcctctttgtctttttatatcattgtaggtgttcaacctgtgtgttatagcatcacaggaaacacattctaattgagctgagactttaaacctaatagtgtagtccttaacaacctggacacacacacatatacacacagagatagaatatacatgaaaaatgttttagttgaaatccaactttaattttccaagctactatttttgaccagctattatcagcaaaaagtgacaccagtctccattctcagcatgtttacagtctagtattgtaatatgtcactatttgctgcaaattgctggtttaaacagaggggaaatttgaaagtcacttaataaaaagttttgagataggtctgtctgtgggtaccacagaattggttcattcagcagcctggagatatcatcaagagccaatcttccttttttgcaccattgtgtcatccttggtttgggtattgaactcattctggtgactaattatctgctgtacttctaggcattacatcttgatatcagtgactggaagaaggaaaatatactatataatctttacggttatctttcttaagacagaggacattttttcctgg

SEQ ID NO: 59037 - DNA, 1127 bp, Bovine  19866880983928
  misc_feature (1)..(1): n is a, c, g, or t
natacgtttgtgtactagtggtagaggcaaatgagtacatacgcaaaccacatcacttataaacgtagaataacagactgctaatagaaaagtgtcttatttttttagaaatgactttgcagccagcattttattctttctgtctctttagtcagtattttctgagtgttgcagcaggaaggattggataattataggagatcatctaatggtggtttgttcagttccaggcacttatcaatattctcctgtgtgtgtgtttaatctactgaattcaagctgtaataattaacctacatgaggaatgctacaacactgccatactttttaattcatgaagaactcaaaaatattcccaaaatattttgttgacagcagcttttattactatactatcataataatgttcattgcgtctttaaaaagaggataatacacataataacggcaacactgttttcatttttttttcttttgcataaactttgtttgtaaaatccagtgaagtcattagagatttttgaaaacattaagaaaaaagaaaaaaaatgggggaatgacaattttgttcccaccaaaataatggagtgaaaaataatggagaacaacatggatatctatgagagaaaatactgctcgtgaaatgcaacagaggaaaatgagttaagttctccacatgcacactaagaaatatactgtacacgatatgcctaggcagcgattctcaaaggcactagagcttcttactgttaagaagaagtaattcatcactgctgggggctgactaactgttatagtttggatttggaagccaattttaacttttctcctttcagttaacttcatatcatatttacagattgatagatgatagatatcggagaaggcaatggcatcccactccggtactcttgcctggaaaatcccatggacggaggagcctggtaggctgcagtcgatggggtcgctaagagtcggaaatgactgagcggcttcactttcacttttcaccttcatgcattggagaaggaaatggcaacccactctagtgttcttgcctggagaatcccagggacggcggagcctggtgggctgccgtctatggggttgcacagagtcggacacga

SEQ ID NO: 59038 - DNA, 618 bp, Bovine  19866880985496
  misc_feature (1)..(1): n is a, c, g, or t
ntggggtgccattgccttctccaaaataaaacagaattctcaacttttagactgtgcaattttttcagccaataccttccctgagatatcatcagtcaataatgttcctaaagcatcttatctgtgcttgtacttaagtttgtttggaggcatatgtttatgtgtatttacatgtttgttggatctgtgtcctctttattctcaggttcctggaaagtagaaattatgtgttcctctttctttccagtgtttccacatcaggcttcatacatatagattccttttcaattagccattaactgagaaccttaggcatgttaaatactgaaaatgatgtaaagaagaatgaactgaaggattgagggagtaaaatccagaaaccttatactgtattagttaataatctgaaactaaaattttgagctgctccctcatggttcaattctgatttgactgtaaaacagtcccctctattaattagtttgagaaatagctgctatactctgtgaaatagcctagaactgtaaaattgcattagtctgaaactataagcatttcccttgaagttactttaaggaaatccctctactgtacctcataataggagatacatgtagg

SEQ ID NO: 59039 - DNA, 1358 bp, Bovine  19866881017241
  misc_feature (1)..(1): n is a, c, g, or t
naatctataaaaaatattcttcttgcattctgaattttgataattttatctttctatcctttttcctgattggtttataagggtaattgtgtttatttcatgctcatcaaatattccctatactatttctaattatattttataatactatatttaaatcttcaagtattatatttattctacagttatacataggctaaatcaaatatactatatatcatggcaaaaaaaaaagctaattataataatatgtttcttgttcaagattttaaaaataatgattgttggcccatttttagaatttataagtttaaacagatgtcttccttacagtgttaatatttattaacaaatatttctacatttctacattaacaaatgatattcatttctacaaatgataatatttatacaatttaacacaaaaacttgagctcacattacatattcataggatatatttctgcctaaaatataaattattttttaagttgatgtagtttgtaattaaaccttatatagaaggcaattcattaacaagctaattatcttttcctatgaagcatttttattttattcataatttttgtgttttaaggtagtaaagggagacttccattcatatctcagcctatactgaaccatgcatagtcattattaaaatgtagtttttataaaacctttttttcaactctttgttttagtattaaaacatctattgttacttgatatgaaattctaatgtaaaaagaaatttcatggagaaaaaactgtaatctagatgtttgaagatagagcaatggacatatctttcttagtatttttgaaaggcaaatggttatacttaatattacatgtctgaaaattactttgaagctgcacagggaaaatgcctaaaagaaattaatgattaattgtggagatttatatgtgctattccattaatcataagctaagaaagaaataagaacaaggaggttataagtccgaaatggaagaaggctctatgggcctaaagccattactctagaaaataaatcctgccacacatctaagggaatgaacacagtaaatttcaggatttggaaaatgtttcttgtgggagagaatctcattaaagtagatatgaattactttgaaagaaggtcatggcagtgtcaactgcctttaacatgaagaatacttccctcctcatttcattatgtttatatcaaattctgtgatttttgtttatgatcaataagcaatttcttctaagaagactggaaaggttacagccctggtttgctcacagtaatggatgatttactggaatggtgagtcatccctatttatttcagcatattgaatcatcaatt

SEQ ID NO: 59040 - DNA, 1381 bp, Bovine  19866881128052
  misc_feature (1)..(1): n is a, c, g, or t
nttcagtgcagtcactgagtcatgtccaactctttgcaaccccatggcctgcagcacaccaggcttccctgtccatcagcagctcctggaacttgctcaaactcatgtccatcaaggtggtgatgccatccaaccatcttgtcctctgtcgtccccttctcctcctgacttcaatctttgccagcatcggagtcttttccagtgagtcagttctttgcatagggtggccaaagtattggagcttcagcttcagcatcagtccttccaatgaatattcaggactgatttcctttaggactgactggtttcctcttcttgttgtccaagggactctcaagagtcttctccaacaccacagttcaaaagcatcaattcttcagcgctcagctttctttatagtacaacgctcacatccatacatgactactgaaaaaactggagctttgactagacggatctttgttggcaaagcaatgtctctggtttttaatatgctatctaggttggccatagcttttcttccaaggagcaagtgtcttttaatttcatggctgcagttaccatctgcagtgattctggagcctaaggagagtatccattttaaaatcatccatgtaaaagtatccattgccaaagataactttgcaccaattttttactccaactcagggaaatccccaagaagccttctctttgggttgtattcacctcaggaggatttctcacagaatttgctaacaatagaaatcatttcttggttatgatacagtaccagcaggatgttcaaaatgccaccggccattctgtagtcctacctggccaagcctgctggtaggtaccatatgagccatatggaaattgctaaaataggaaataaagcagcaggttctgaagccaccagcttcccctgccatggtagaattagcattagtctatgatgcaaaacatttctgcctttgaaatgcccaatatccatggaatatcaccaatccacggtgctacaccaaatagtatttcaacatattctgattaccttttcacctctttggtgcctgaaatagctacatttttaaataagaaaatttacccagaaaaacatccatacaggccatattttgctcagcagaattaacattctatagacactaatgttgtgataggatggtttgaagatgcaatctaaattccttataactgctaatgtatgtctgtacttcctccctgagagataatatcaagggatcttttgttctaacataaaaatgttcagacttgaactgtaatgtggggataatacagggaagcaattgcactaacaagatggacttagaggaatgaaaatcacctaccagaaaatccacaataaggagaaaaacagcaa

SEQ ID NO: 59041 - DNA, 1814 bp, Bovine  19866881145286
  misc_feature (1)..(1): n is a, c, g, or t
ncccagtctcataccaggcattctgggagcccccttatcccatccaggcacccagctggagcattctggatagcaagcaccttctgtccttcctgtggaattctgctggactgtgaattcctgttcacttcactcttctgagtgttcaggtcctaaaaactattgaacaaaaaatgtgttcaattattttttccttgaatgaataacacagtgatgaaacagaggaacttctgtcatctcagtgaggaagccagtgagttccacttgcagcgtatctataatctggccactctgaaacatgagaggttgaatatgctctggtaatatcagcatttggggattcttgggaaagaggaaggcttattatactaaaaacatgtcttgatacttggcactaaatttattcgttttatgtaattgaaagtgtcttttacccatttcagtactaaatatagtgaataagacaatgctgtgggcttcatgagatctctgtagttttgataatgctttgaatgtaaaacataaagaaagttgagatgtaaatagttctttttttgctaaacaaaagaagagcagaacaaagaattatctgcttcagattcaaacagtatagtaattatctgtgggtgtcaagaaatcacagatgcacttttcctctttgagccttctgtcggcagtgcagctggaggtggaggttagagctgagctgttaaaaggtcacacgaggggtggggggagtgggggaacaggaatgtctgcacagctttccacaatgccctacaatttattgatttttttttttaagatatataaaaggtatgtaaggtaacaaaactagacttctaccattctctcttggttcttagcaaaaaaaaaatggcctgccgttggaataaggtagctgtccccattgtaacttagtactttggttcttatataaattagtatctcttagtttaatgtttcatggtttgtagtttaatacttttaatatttaacaatggcttcaggctcagtctctttagtcgtatctctttgcaaacccatggactgtagcccaccaggctcctctgtccatgggatcctccaggcaaaaaaattggagtgggttgccatgtccccctccatgggatcttcccaacacagggatcaaacctgcatctcctgaatctccttcactgcaggcagattctttaccaatgagccacaagggaagcccacagatgacttgaacagagtaaattttaatgtagtacctgctgttggttttagtctttggggacatgcactaatggaaaagtgatatctattgactgttctgacggatatgtctactctttatggggaggaaactttatatgccaaatttccataaacagggctgaattcaggctgtgcatgttcagaggacccctttgagatctccatggcaactgactcatccttctacccactcagtgggaacactgttaccatagtttgtagatttctcatttttcatgcttgttctctaaaaaattcgtcctgttaataagatagctgctcatcaatccactagaagtcctcttcagttcagaataccactgaaacttcccctaaccaagatcaccaatgttgcctttattgctgagttatcagtgtcctgtccttaaaagtgtctccttccttgatttgtaagacttcacccacaattccttcatgtcttttcttccttttccttccccaagtcctttcttcttgccaaatgtatctgcgcctccaagattctgtacttgcctgcctttgcctcacatgttgcactttaccaggataac

SEQ ID NO: 59042 - DNA, 1088 bp, Bovine  19866881384487
  misc_feature (1)..(1): n is a, c, g, or t
naatctgtttgtacattcattcttttttggcatcctgcatcattatcctcatatttattatgaaccaaactgttgaaaggcatgggggcttggcagattttaaatactccagtgataggtaagcccactctttaatgagcaacacacctgatgcaaagaactgactccttagaaaagaccctgaggctgggaaagattgaaagcaggagagaatgacagaggatgagctagttggacggcatcactgactgaatacacatgagtttgagcaagcttcaggagacggtgtggataggggaagcctgatgtgcagcagtccatgtggtcgcaaagagtctgacacaactgagcaactgaactgaactgaagccatggaaacagcaccaatcaggcactatggtaggaagttatctgtactataatcagcaccatcattttcaagtatcaaaacacacacagagatctgtatctactgatatctataatacatcactacttaacgtgttttgacttctcttgggaaatttttatacaaataccttagtaaacacttaaatttaaattcaattttatttagttttaaataaaatagatatttaagaaaattcaagttaacaacacttatctagcatatgatttagactaattatgtccaaatcatttggggcttttgacactgtttctactccagaaagcaaaatttggcatcagtatagtcatcagttcagttcagttcagttgctccgttgtgtccgactctttgcgaccccatgaattgcagcacgccaggcctccctgtccatcaccaactccaagagttcaggcaaactcatgtccatcggagtcggggatgccataccaaaggtgaattcctaataaagacaacaaaaattcactataaatgttaatagataaaacaaaagattccacaacactgatgtttgatttagcacagaaatcctcttcctgggaagtaaataatgttaacattgaaacactaaaatatagatttctctagaactgtttactgtttgggaatttaatgaaaagttttaaaaagaagtaatttaacatataaagactggcta

SEQ ID NO: 59043 - DNA, 1539 bp, Bovine  19866881430208
  misc_feature (1)..(1): n is a, c, g, or t
ntgggattctccaggcaagataatggagtcggaaaccataccttcctctaggggatcttcccaacacagggaatgaacccaggtctccctcattgcaagtggattctacacacacacacacacacacacacagatatatatatatgtgtgtgtgtgtgtgtatataagtttatatgtgattgatatgtgaaaataaatataccaaatataattggtatttgtatatagctacagtatggtgattttattctgctaaatagtttggcaagcctcactagggaactggggaaactttcctaactgggaaacatcataaaaaaatacagattcctgttctcaaggctactgaacaaaattgctgggcatggagcccaggaatctctagatttaaaatgctgcccaggtgattctggtgatcatccaagtttgaccaccaatattagactactctggcttctggcagaaagagaacagctacttcaatatctctaagcccattaatcaaagaaatgtctctagggtaatttcttctaccatatcatgtatcactgttgaccacagctgccaagggctctgccgtataaccacttgatgctccttgagccttcgtacatctgtgcatgactgtgtgatctagacacttcacacttgggaagcttatttgcagaaatactgtctgctggaaatcagacactgctatagaaggaaaaccaattgctaaaacatgcttgatcaaatctctgagacattgcgacaagtgttaaataagtttttgaagatatgccaagcagcaaatgagaaaacagttgctagtttcagaaatattttgcaagtgtgtggtaattcaaatttagcagggaaggtaattttacttatgaacaaaagtgatttataaataatcctggaaaattaagcagctgggctagcacagggcttgcatatttcatgatttttaaacgaattgcaaagttgactcaaaaataaatctgaacaatttaaagcaattttatttatcagtgtaatcttactcaaatgctacaagaacttcaatatttgcttttattttgtgtataaagtagattatctttctattgaaatatttttatatttcctatgtgaaatggatcacaaatctgatatttatgtatctgaggtctctcactcaacttagaaatgtattttacattgagttctgtaggccttcaaataaacaaatagcagattatttcaaatgtgaaaaaaaccaaagttctagaaagtaattgttaggctttccagcatagcgggtatgtgcataataatacattttaacatcattgaccctttgaattttagagtttgttcaaaagaaaaatgtaaaaaaatctatgctgagcaattgagatagtagcatttgacaagtgggtttggagtagaggagctgaggtcagagtttaagaaatgattgcaaatatacaatgagaatcgtgaggatgatttggggggattcaaaaaagccatacattaatttttagtttcttgtcccccaaaaagaggaaa

SEQ ID NO: 59044 - DNA, 1588 bp, Bovine  19866881551129
  misc_feature (1)..(1): n is a, c, g, or t
nactttggatgataatgatgtgtcatgtggtttagacactaagcccatccaactctttgcaactgcgtggactgcaacacaccaggcttccctgtccttcactatctactggagtttgcttaaactcatgtccattgagtctgtgatgccatccagccatctcatcctctgtcaaccccttctcctcttgttcttaatctctgtatatccatcaattataccaatgtaccaatctggtgggggatgttgataatgcaggatgatacatacgtagggggacatggggatataaaaatctctgtatctcctccttgattttgctgggaacctaaaactgctccccaccctccttgcaaaaaaaaaaaaatcttaataaaatgcacaaattaatcttttaaagaaaaaaaagtacccttcattgttaccaaactttgattttcagctttatgtcagttatgtacatattaatcagaaattagttagcatattattggaaattttccctcttaattttaaaaaattgcccatgctatttttcatgaactagttctatagaagcttctgtagtttaatttatttgggaaaatatgttttactcaaacttacattctatctttttcttacactttgttttaattacctgagatcctcagagcagtaaaggtagaaaaaaaaaataatgcaggtaacaaattactgccttggttttattatctattacttcactattgcctgaagtacactatttattactttcagtctgcttgaatttcttatcaggtaattctctgagtcttaaatagtttaatgcattggaaatagagagacagtaaaggatggttactggttatttttattttctcagaaccatgctgctcttttagtaacatgctaagccatcatgcttaagaaaagaaaaactaaaaagcattttagcaggtaaatatacttgtttgagaaggcagactattgaatagagtagtagaactacagctatagctgcaattgaattaactatgaaattttactcaatcacaattttagaacttagaaaatactgcagagattattttctgtaatttgttcaagtaatgaattgtatatgcatggattcattaaccagaaaatatttggtaggatttccctgaccaataaactacagcacttcatgtggataagggtaaaaacatttaaaaacaaaaatattttacagataattgttaattctattttgttgttgttgttaattggactaattctgttttcaatgcctccccaaaatggatcatttcctaaggttttcaaactttttaaaattaaacttaattttatttccttttatgacattataagaaaaaagatgaatgctttccaattcatagtcacaaagctgacaaaaccttcccactcatggagtcccatcagtcagtcactgtggggcagacaaaataactcgtcttagccggtttctccataatagtcatgtctactcacatggcttagctatatgttatttacatatggggtatgtctatgtatatgtatatatacagatatatggtatgtgcacatatatttaactcatatg

SEQ ID NO: 59045 - DNA, 1781 bp, Bovine  19866881895999
  misc_feature (1)..(1): n is a, c, g, or t
naatatagtgagaataagcaatgttaaaaacaggcacttgagagcccaaactgcaggttgctgctgcccagatgtagaaaaacactccagtttgacagacagataaagcgttttcctttagagtctgaataaatgctcttcttgaatctggcaacatgaattctcaagagaaaacaaacccagcaaatctcaggttcatagttgatttcaaattatccccttccatttattgcttatatagtgcggccatatgggaatttagtataatctggacaggtatgatttgccatcggtgtgaaaatatccccttaagatcacttcctaattatgtcattaaaacttaataacctaaaaactgcctccttgctggacaaggggaaaaatcattttgctgtttttgagtcacattttttacacacaaaatgcttccagcctcctctaagaaaatccattttgaaaaaaatttttgtttttattgctgctttctcaaaatattatagcctgtttaaatacttaaattagtttatttttaggtcagagactattactttgctagtttaattttttaaattacaaaagcaaattataataaataatattttaaaaattaactcactttccatatatagctataatatatattttaaattttattttcatgccatactctttttatatataaattgatcaaataatacatgttattctatatcagaatttcttcttatgatgttaaattataaacactgatccacactgtcaatagaatactgaagagaacattcattgaaaaaatatcctgcagtttacttagtcaactttgtttgtagacatttagataatgtttagattttctccgcctgtattattacctgtctgcttgatctttaagagactccatgcattttaaatattaaagttttcttaatgattctagaaataaactatgggcaacctctactagtgaacttattttctatgtctccatattttaacatggatcatcatctaaagcctcagctttatttggatgcatgaaacaacactccattatttttaaaacaatatttactattatttaaatagtatttaatatttgctattgctaagtcacttcagtcgtgtccaactctgtgcgaccccttagacagcagcccactaggctcccccgtccctgggattctccaggcaagaatactggagtgggttgccatttccttctccaatgcatgaaagtgaaaagtgaaagtaaagtcactcagtcgtgtccaactctgtgcgaccccatggactgcagcccaacaggcccttccgtccatgggattttccaggcaagagtactggagtgggttgccattgccttctctgatttaatatttactaaatatttaaaacatatctactacatagtcatcacagcaattctgcaaggcacaattattcttgttttccagataaactattcaaagtgtttaagcaatgttctcatagcttgttacaaggggtgtctgcatggcagtacaagtgataagtattaaaagaaattaacaatacaggtttgtggaaaggagatggaattttgtcttgaatatattcagtttctgttgcatgtaggatgcccaagcgcagttatatggtaggaagatgaacacacatctggaactttgaagagagggttcctctgaagacacaatttggaagtccttagcttataaatgaatttcaaaccatggaactgaaagggttatcctggtaaagtgcaacatgtaggcaaaggcagg

SEQ ID NO: 59046 - DNA, 776 bp, Bovine  19866880522117
  misc_feature (1)..(1): n is a, c, g, or t
nctgattgtgtgacatggaaaggtatacatttgaaatctaattttcccagcttaattagcatgtgacccattagcacagacttatgaggaaagagcattctcccagcaaccattatctaatttccgggccttgagaccaactgctccgctaatgctgggaagggtgagcacagctaggggtatgtcaccaggctgctggctggctgccagaaagtccatgtagcattagatctggaaaggctcactgcaggcaaccagaaagaggcttgcagtgtgagcattcctctggccttggtcctttgattctctttgaggcaggtactaaaggcggacagttgtccacacacaagaggtgcagacatgaatgtggggcagttactggtgcctttcaagtgagcaggctgtgtaaaactagaatatgcagggctttctctttctttctttttttttaaggattcaagtttatagaaaattttggcattttccccataaccctctctttctcctttcttcccttctttctcacttagcttccttatcatcttctctcgattattaatatttatggaaggcctgctctgaacaaggcgccttgctttgtcctctgggggataaataagtgactcataagtgctctctctgccttgcatgttttattctgataacctagtccctgttctggttttggttatgctttcaggcgttgctctgctagttcttggcaaacctgaaagccactcagttaacagtgtccagacctcacacaccctaacaca

SEQ ID NO: 59047 - DNA, 736 bp, Bovine  19866880569951
  misc_feature (1)..(1): n is a, c, g, or t
naccctccctgagcctgattcctcatcaccaaatgggaacagtaacactggccttgcttacatcacagggctgtgtgagggtcaactacggtgatgcctaggaggtagaaaagcacttgaaaatgtgtttaaaaatgtaaacacatggaagagacattatgcaaagacatgcctcctccagaatgcaggagcaaagtctcaaaacttgaggatttctatacttgctagatatttgaagaagagatgagtttgcttgtaattcacctgtagaaataagcaaatgccaaatggttagatcacagaggagggaaactcagagcatcagattgagaacatgcagaaaagatctcattgcaacagctggtccagtgatggtttgtaccctgtcctggtagcagccttatacgtgttccatggttttcaaaggtcagcaccttatgattgtgctctgtaatcaaggaaccttgtccctcatccttgccaggcaactgcattcccatctcaatgacatgcagaccaacaacactgttgctgcactggatctgagtctcacttgaagaggatttcatgggaatgtttcttgtgttattaaatcctctctcagctttgttcttcacactggttgcttctgtctgtaaaacctatctgtaacctccatgcctttttttttttttccctgaatccagtttagagacagataatacaattattatcagtcagaaaaaggtctcaggca

SEQ ID NO: 59048 - DNA, 1529 bp, Bovine  19866880580374
  misc_feature (1)..(1): n is a, c, g, or t
natggctggtttgtatcatattggatttcacaggtcttgatgatatctaggcttcttatcatctgttttccaattaactggtttaaagccatgctgttgccttattcttaagctagaatgatggtgaaagtgtaagcttctgctgtgaataatattctgtagaacaactttatagcatctttctgccagtgttaccactgctagcttggagatggtcagtgatggttcccaccggggctctacagttacttcagagtaggtcgtctctctgatgtgtttgtcccctaggcacatccctttcctcagcagccccagtggagagtgtgttcctctccacttccacacctggtggaatgtctcccctggcccccagcccgtggccgttcaaatcccaccttattgccaggccccacctcttctgtggaccctccttttacttatccaggctccactatcttctcacagccccagcaaccgcactgcacacctaagcattttgctccttcccactttgcttttctgtaattattcttccaagtcaccattcatgtctgtcaacccctatggcagcctgcttcagtgaatggatcaagcctctccacctcacatggtacagcagaggatacatatctccttctctataaatgctcttgaattaaaaaataacagccagtgagtgacagaataagtagtgaggtcttatttctccctccatacagtcattctggggagggttgaagacacgatgttctaaagaaaatagcttgatctagttaagaaatacgtgattaatctattcatttgcgcaaattggaacttgtgttaaattgccaagctgaaaatggttactgcagcagtgccaggaagaagatgctaaggagaaagactttttcttatctttaaaaccttctcttcacctgatgagagcagcacagtggcttaaggaaagaacaccagccaagaaatcagatgacttgggtttgaggtcagcctctatccagccatgtcttctctgcaaagtcagttaacccctggagtatccattagacatccatgaggcaagagcaggacctaccctgcccactttgaatcagaataaagagtctagtgggttcaaagagaaagctctacatggatacacagtggctctttcacagaggcgggatttggcttatgctcaggaaaaaaatggcaacccactccagtattcttgcctggagaatcccatggacagaggagcttggtgggctacagtccacgggtcgcagagtccgacacgactgagcgacttcactttcagaagaaaacaaaaaacaaaaaaaccctggtaataaacactctgtctttattagcctcaccacctctactggaatcccctgtagagtggggctcagcagtagttcgggacctggaataagacagtgctgattctgccatattttaaaactgagcctgcaggagtgaagcctattttcaaaggtagggaacagaagtgctgggggaagttaggctaagataagaacgaaaag

SEQ ID NO: 59049 - DNA, 1302 bp, Bovine  19866880645027
  misc_feature (1)..(1): n is a, c, g, or t
natggcaacccactccagtactcttgcctggaaaatcccatgggcagaggagcgtggtaggctacagtccatggggttgcaaagagttggacacgactgagcgatgccactccatgtcttagctattgtaaatggtgttgctgtgaacattgggtacatgtatccttttgaattatagttttgtccagatatatgccaggagtggaattgtacctagctttgtctttactagcaaatttcttaatttctctgtgctccagtatctgtaaaatagacctggtaatcctttatggatttgctttctaagattacatgtgattgtaaagtaccaactgttatctgttaaaattctcaataatatcagaaagaaacttgacaagaatgaatgaggctctatgagcacatgttaatatcatcacaatagatctttctttaatcttttttttttgctttgaaatattcatattttaatcagcctcagtcttagcacagtatctggcattttgtaggcgatcaataaagtttgttggatggataattggatgcattaatgagccagttttcatcagtttctaaggtttctgtgggattgtattgcaacgtaaaactcttggcttcctgtgcaggctttattctttatcagacttgtcctcttcacatccatgatgagttcttctctcctttgaaggcaggaatcctgtctgtttttgaccttagctactgaagagcctgacctatccttgctgtcccccactgtttctattttagctacttataaccagccttgtaccagaaaggaatgtaaggtggttcccaaatgacacggattaaaacatgaaaaaagaaaattaaaatgacagagtaaagacagggatgaaggggacttgtaatcattgttctaaaacatgtacattccttgagaaagatctactggccgtgcactgcgttgctccaaaagagaaaagtgcatccatatgcgggatcctgggaggagggctgtgaggagatcatttgagtctttgcttttgttggctttctgctacaaatgtgggtctgcgtaaaatggtgattcgcaagttatcacttgatcctgtacaaagaaggggataatgaaagcaagatattttataatactataatctttatggtagtaaatagattaaagcataaaaagaatacctgaatgcaaaataccagactttgtaggcaaattatttatattgatattcacaggttcatattgatcaattatgataactttcaaaatcccttcaatgagttggattttgaacacatcatgat

SEQ ID NO: 59050 - DNA, 3081 bp, Bovine  19866880722841
  misc_feature (1)..(1): n is a, c, g, or t
ncaattctttcagaacttgagtgctttatttcttgactgtttcatctaatcctccaagctgacataagaaaaagtctgaaacttcttcacactaaggtataaatggctgataatagtttataaccaagtctctcaaactggggcagcagaaggtgccaaggggcacctggtaaagctttggaaccaacatggcacatctctgagacaacaaacttacttgaagaattagtaaggaaacattattttatgttaaaacaaacacaaatataatacggaatgaaatgtgaaatgattgaatgaatgaatcacactaaagtaaattgttacaaaagaaataccatgcatgaggctgaaaccccagagccctggggatggcaaatcctcttctgtctcctctgccctagtgggtaagcccagcagactccagctatagacggatggatgaggctcttgaagagccctgtaatgggagaccttagggtcaagaccccactccagtactcttgcctggaaaatcccatggatggaggagcctggtaggctgtggtccatagggtcgctaggagtcagacacgactgagcgacttccctttcacttttcactttcatgcattggagaaggaaatggcaacccactccagtgttcttgccgggagaatcccagggacgggggagcctggtgggctgccgtctgtggggtcacacagagtcagacatgactgaagcgacttaacagtagcagcagcagtagaggtaattcaagcagcaagcctgaattgaaagtaaattcagcaagggcctaaaaattttttgtaacttactaaaattaaacaaaggaatactaaacaccaacactatcaactttattatacacattttaaagagtagctatagggtatggcatatttcactttcaaaacttttcaggattgccgaccctcatggtttgaaaaagatgcttgtaaacccatgttgctttgtggcagatggatgcacgaagaggcatttttaaaacgacatatttcttttagctacgttcaagatgcttgatgtatggacccctctggcagtctggtgaagtttacggactccttagaaaaagtgcttttaaacacataacataaaatatacaagaatctgattaactagataaacagttcaaaatatttaaaatccaaatttgtgacctaataagacattcacttctttctcaatatattaaataacaagctctaggagtaggctgagtgccaaatttccaaaaggtgataggtataaatagccagtgaaaattatttttttaaatctctgaggtaactgtgatgtggtagaaaaatacctgtaatttcttttgatggcaaagtaacagttaatgtgggtacttctgtggtttcttgccaacatttatacttgaaggaggagctaaatttcagttagaagttggtgaaaaataaaaatgtatttttctcatgcatgttcatgaaccccaaatgatatgcccttagataaaaaggttctagattctcttgacttcagactgaattatttccagctattctgatgccttagatccttgggacagaaaaagcagtgagcaacttttatttaagtgataagtagactttgatgagcctttcgcaacccctatcaccatctccaccgtgcagatcatccaagttctgctcttgggcacaaccttgtgttccaactccatgtccctcctcctggtggtcacagaagaaaggttctaaatttctcagacccacatgaattctccaaactgcctttcccaacagaataccaccttctccttcacctccattatctatctttagcccctgtttcccactgtcttaaaggtcctagcaaaatgactcacaattcacatataatagatttaggatgtttgcaatgtctaagcacaaatccatgaagtaagaggatatggtcacagaaataggtcttgaaagccacagaagcaaccttctaacagctttagtcctgaattggaaccccaccagcgtcagtgtttgagatgccacttttcctagaaaataagaaagaaagaaagtaaatatcattttttgaacacttaagtttcctgtgaatggtgctgcatttatattttctcaatctcctaaagaaagaaaaaaacagggagctattaatatccccatttatgaatgaggaaagaagcttgaaaagtttaagtaacctgcccaatgtcatacacagttctattaaactgattaattaactatagggaaatctctttttgctatacttctgcagacttttttagagtgcacagatcaacaggtgattttttatatgtccaaagaaaatgaataagaatctagttggaatttacaacagataaatggcttgaacctttaaaccaaagaatttgaaagaatcccattctactttgcctctacttagataaaggaaggaatgaaacaaagtttccttgtgctacttatcaatgtctgtcatcaaaatgcatggctaaatcatttatatgcctgctggtttccaaatgaatcattaatcactgtcaacagtgatgaacggtaccctcataagaaaacgttatcaccatttgtagtcaccttcatggctgtaaaaatgtatgttctcatacaactataaaaacaagctggctgacaaatgaacataccttctgctctgtatttttcaaaacaggttaactgtacatttcttttttttttccatttcacaccccacgtttgactagtagcttccaggtaaggccccccacacagcagaatgtggtttagaaggatcagaaagatgttcagctagactaaaacagcagatgatgtaatgatctgagcctgtgaaaaccaggtcaaaccaaatttgtttctgccagtttgacaaggccactggagccctttacatgtgccttcagtttgtctctgttgtgtcagcctctaaataagggatttttctcctgtgcaacatgcatctttcttggtcaaatgcaaggtacctattgtagccaactgttcctttcttccaagcagtttactgtaaatagtgtcctaagatacacgt

SEQ ID NO: 59051 - DNA, 1574 bp, Bovine  19866880849950
  misc_feature (1)..(1): n is a, c, g, or t
ntcagactttattttcctgggctccaaaatcactgcaggtggtgactgcaggcatgaaataaaaagacgcttactccttggaagaaaagttatgaccaaccttagacagcatgttaaaaagcagagacattactttgccaacaaaggtccttctagtcaagggtatggtttttccagtagtcatgtatggatgtgagaattggactataaagaaagctgagctccaaagaattgatatttttgaactgtggtgttggagaagactcttgagagtcccttggactgcaaggagatccaatcagtccatcctgaaggaaatcagtcctgaatattcattggaagaactggtgctaagctgaaactccaatactttggccacctgatgcacagaattgacttactggaaaagatccttatgctgggaaagattgaaggcaggaggagaaggggacacctgaggatgaaatggttggatggcatcaacaactcaatggatatgagtttgagtaaactcctggagttggtgatggacagggaggcgtggcatgctgcagtccatgggattgcaaagagtctgacatgactgagggactgaactgacctgaactgaactgaatgacagaaagcaatggagtattctgaaattgtgaacaaattttatcttctttacaaccttgcccatagactgacatgtcagctaacaaagctctttgtttagcttactgggttgtacatatactgccatttttcatctactcagagaaaatttttgtaacccaaaactgaataaacagactttttaggatcgtgatgtattttctctggggtaggtgtcttgtccatgctgaatcatatgatgagttatattaattaagcttggataagaaggagcttatagtaattttttaatttcatgttttcttctagagggaaaaaaatattttctgatttttgcatggagaaagaatgcagaggatgtaggaacagagaggtgttggggatttatccttggacatgtagttctaccggaatcccctaaagtcactcttcgtagttgggcactcagatgattaaattgtctcagtgggccacttagactcaatttgatataatcatggaaaacttccagtgtgtactaatactcaaagtcaggaagtaggagttgagtctacttgagaccatcaaaaccaggcaacttctaaactaaaagttaacataggcagtaaaagaaacccaacatttatgtttaattatttgtgtatatggcatctgaaagtatttggtaagaaaggggaatactattgtacttttcctattttagacctcttctaggaggttgcttctgtggtttcatttactgagtttgatcagaaacaagcaggggaggtgaggaacatggtgggcattggttaacagaatgataacaagaaaagatttttcctttctaccctatagtcttttgtttcagcttgtctgtgatgctgatctaggggatgagcattgccttattgaaggacttgaaaccatgatagtttaaaacaattaatggaaactccaagagactgattactaca

SEQ ID NO: 59052 - DNA, 1313 bp, Bovine  19866880876932
  misc_feature (1)..(1): n is a, c, g, or t
ntgatccccagttagggggatggaagagctgagtgtgttgggcagggtcctgtgcttgtgtcttgagttagaagggagtggaacccctcctaagacacatgatctgagcttgaagttcttgaggaaaaccaaggtgctgttggataagaaaaataaataaatatttgtaaaaaaccgaaagcccaagaaagtaggtgtctgctaccgcttgtgaccaggagatgaggatactctggaggagaggacactaaggaagtctgggctaatggcctctgttttgtgtgtgaagtgggagacctgactcacggtgctgtgcaagctttgcagcaacctccacagattccatcctcccacccagatctccctccccgcctttcctcaggagtgagggggaacaaaagttgacaagatgaattgaccctgaatgaaagaaatgcctactgtaagatggaaaaaaagtctcatacagaggtggaaatgcctgtgagtgtgataggagttgtttagggaggtacaaagaaaagcaagccataccaatcaagggaaacagcttttcaagttcactacctatgggggaaaaaaaagaaaaaagcctagtaaagattccagaagaacaagctaagctcatggaaagtgctgagaatagctggtttattctcagtgtgtctccctatttttataacttacctcaactgttcctctttctcagtaatgttgggtggcgagggacattgcagtgtaaatatttacagaaaagtcttcaggggggacctatggaaggtgctggtaaatgtggataattagccggcctggttttctgaacaaggagcattaatgtgcctgtggacatgcagagaggcgttatcttcagaacatatttcaggaatggaaaaacaaacaaagctgattatgaggaaaatggatctgccaggaccaaattataggaacagacccgggggcagaaataaagcttacaagctctccagaatctgaatgctgcagagctcagaagtggagatggtacatgtttgggtctgccaaccagggcacctccatggtcctggaacaaattgggaggaagtaagaacagaagccattgttccgaggagctgccccacccttagagtccacacagaaagaaggcagacgtgtgcctccagacctgaattggaggtgggcccctgaccttcctcatcccagaattttgcccctagattttgggcactgaactatggatgtttaaatgtcttcagtaaacctgatccttgcattggcctgtctcttctcaacccttctaagccagtttcaaccct

SEQ ID NO: 59053 - DNA, 991 bp, Bovine  19866880891841
  misc_feature (1)..(1): n is a, c, g, or t
ntctgactttgcctctacttgacaatgaacatcaggcaaattgctgagttctctgggatcttgcctggtcaccacttccacagtagggagcaccctgttcactgaggtgtcctggaattcctcacgatctgaggctttatagattgaacaatgattaatcccaagccagtgtcccagaatattgttaaatatctatccacttcccagcatatgtaaaggagtagaatccatcttttcactattccttacagaagcctatgtttattttttatctcaaccatgcttattatggattttgtatctcaactatagcataaatgggcccaatttaagaaaaaagttcctcattactatgcatgtgggggtaaagccattttatgaaatgtatcttcctggtatatcatcatattccctaaagttataggtatatcttgttacacagagaattatcgatggtaagtgaaattttcttactttttaaaatgattgaatataaatgtgggatcctaatagaaaggacttatacaagtttgaactgtcgacaatggttgtagatgccctaacaaagggtttgtgttatggaagaacagcaatgttttaacccacagaatgaatatgacacattccacatatgtgagcatgcatacatacatatacttaagtatttaagagaaagctacatttaatactgttacaaattgttttcttattgttatttagtcactaagttgtgtccaacccatggaatgtagcccgctggtcctctctgtccatgggatttcccaggcaagaatattggagtaggtcgccatttccttttccaggggatcttcctgacccaggaatcaaactcaagtcacttgcattggtgggcagattctataccactgaaccaccagggaagcccatacaaattgttttacccaaggaaaaataacttagcatttacatagcactcatatccttttaatgccttttcaaatctattcag

SEQ ID NO: 59054 - DNA, 2054 bp, Bovine  19866881168528
  misc_feature (1)..(1): n is a, c, g, or t
naatgcaagttctaggtgatatatgtatacttattgctgattctgttgttgaatggcagaaaccaatgcatattataaagaaattatcctccaattaaaaataaagaaaaagtaaaatggataactaacaaggacctactgtatagcacagagaactctgctcaatattatgtaacaatttaattgagaaatgaatctgaaaaagaatagatgcatgtatatacataactggatcactttgttgtacaactgaaactaatacaatattgttaatcaactgtactccaaaataaaattaaaagttaaatgcaagttcttagggcctactccaaatctactaaatcagaaattctggggaaggagaccagcaatgggtttccacaagccttctagatgagtcaaacaccactcaagtttgagaaccactgatctaaaccaaatatggcagcttgtgtccctggctgtgtgattagtttgggtggaggcctgtgatgcagtcccaataaatgagatggaaggggaaactggggcttcctcagtaagggaagatatatttcccccttttctctgcttctggacatttacatgtccagccagttaaacttaatgtttttatgtatcaagagttgtttataaagagttttgacaaatatttgtcattactactttgaaaaacataaaatgttacaaataaaaacaaggagggactaaatgtagtttctgtgaagaatttatttggaatattctgaacccaattagaccttactctgctgcctatttgtagcaagatcataccttagtcaacccagaactggacacactgctatcacctcagggttagtcacggactacagggatggggctattcactccatatagatccctggctaaatgctctgtctcccatgtgtgctttgctgggggtggtggagaatggttatttggacatccatttgctctcccatgctaaagcaaagagggtccccagagttgtcttcaaagctgctcagtggccattgctcaggccaagatcagtgtttgcagagctcaaccatttctcatcaaggactgtttgctgttctttccaggcttatatgaagtctcagtgtggactcctcacaagggcatcccagtatttgatatttagttacaaaggctcactgctgaaaatgtgacctttcagttggctctgttttcctaatggccttaaagcagatgaagcattattgctaagaactgaactgggcctttggcttcctttccatctcagtgagagaggtaactttgcaatggtcattctgatttcactcaagcttctttctatcctccagtcttctggaacatcaaaatctgtagcatttcctgatttggcctttgggcttaagtaatacagcctataaaggaagcagactgatttttttcttttcatttttaataccaattgccctggtagaaaggaaactgctgtgagttacaatggcagaacttggagattaattagtaggctccctctccttcccttgccgagttgactgtgtggggcccctctctgtatggcacattgaattatggaacattcagccgattagttggaagggcttttagcaacggtggcctatctgccccagtatgactatttatagcttactttgttccagcaaaccactttcattctagctcctttgcctggttggtattgaactatttccattatccatgagggtgctgtgagccaaattttatttacagtttgaagccattaatatcattggttgaagggatttaatgtgggacattaggtatgaatgcactatagattttaccatcacagaaacaaatcgggcacagacacaaggcagtaagatacagcagctattgacagtgatgctcaaaataaaaccacaaaaaacacatgtaacattcatcctgaccagacatggcactataggagtccctattacctcataaatagagctaagtgagctggtatttaagattctctataatttgaccccaaacctctatcccactccatctcccgctaacatcctttt

SEQ ID NO: 59055 - DNA, 1875 bp, Bovine  19866880574063
  misc_feature (1)..(1): n is a, c, g, or t
ncagcccagagctaatatctgtctctgaccatcccttgcttgcaaaggactcttatatctgcagcacttattactaatctatgtacatcccagagtttatatttgcattgggaattttcctttcttgtggatttgtttcatcgccttatctatggcaagccctactccacttttctctctcttttatttaacacggtatgaggcatactcaaatatttgttgagtcataccttaataatcactgtggtgtatctaacctatgtctgtctctggagtatgtacctgccatatattatatcattaaccctcaccacttcctgcttcacttttaacaggtgagaaaactcaaagactcaaagccattaagtcacccagagttgatattaaagagtgtgattcttataatgtatcgaagcttatataaccatctgaagagcagagaagaggctcatagtcaagtttgcctgactctagccctgcgctcttaactaattactgctctgctgtctacctctctgactacgaatggcctaagtctctgccaagataccaagttccaaggctttctctgtcttttatattgttccttgttattgtgcaaggaataatgcacagagaggtgtgtctatacggagacaagggtgatacagaggggtgcaggctttggtgccagatccatatggattcaaacccacatgtctgccatttactactagctgtgtgttcttggccaagaatttcagcctctctgaactgcagtttcctcatctgtaaaatggggacactgacgcttatctctgaagatttgtaagaatacatgtaaatccttaatgcaatgcctggattgaggtgggtactcaaaagatggaaattcacattatgataaatactggctgcctctatggtgcagtcccactgagcctatagatcaatgtgtgatgtgattggttagctagttggggaagtaaatcaccttatttccctgagacttaggggctccagatgctccaagggatggtaatcaggccaatggtacatggaaatttagtagctaatgtctctaataattgggcttccctggtggcttagacagtaaagaatccatctgcaatgcaggagactcgggtttgattcctgggtctggaagatcccctggagaagggaatggctacccactccaggatgcttagggcttccctggtgactcagatggtaaagaatctgcctgcagtgcaggagacccaggtctctgataataacgcatttttagcgataaatacaaaatgttcaaatccacagaccagagtcctttttttcttttctgtttcccccagtaacttactcttctgggtaactctgaattagaaaaatatcagcagataggggagggctggttaagaacaagttcttatctaagggtgaaggagcctctcctaattaagaaacacagcacaaaaagagatctcatataaaacaatagaaaaaaatataacttacagaatctagaaggaaacaaaacaagcagataattcccctagaaacagataagaatgaataacaggcacccacaggagtaaaacccactctgccttcaaggatgaaaaccaggggaggtggggggaaaggctttccctgagaagctgtgcaattccaaaacatcagattatgattcgggtttatttcctgataggattaaaggtagattgactgtcaaattcaaaacatcctcttttttttttttttaatctgaagattcaaccaggggaggctttgccttttctcaattgttttgcaaattgattactcagggaagttatcacgtctgccagatatgggcacctctctgcatgtctgcacgctctgctcagtcagcgg

SEQ ID NO: 59056 - DNA, 2498 bp, Bovine  19866880632536
  misc_feature (1)..(1): n is a, c, g, or t
natggacctaatccttcccctgacactccatcaaagcacctggagtcaggcattgagccaatctgaatccttccttttcctgcctaactctagacaaataggagatcagactacctgagagggctgacttaaggcatctgagataaacatactgtggtttctcaaagcccttatgtaagagcctgtgagcctctgcagtattcagtgcctattctggcgagggccatggagctgcatgtgtttgagaagaacggaggattttaaaggcgttttgttagcaagtgtgttcgcctgagggtctgcatggtttgattttccccaagcccctccagaagctctgtttcctcatgatcagtggtgaaatccccagaacagaatgggttgtgtgaaattttagattttatgcaagttcacagctagaacccatgcacaattactgctaagcatttgattttgtcccagtgaaagcccctaggattaggcctttcagaaggaaggaaaaaagcccccttctgaacttctagtctccgttggctattctacgacagaatagttttcatactgccagcgcttttacaatgtaaacggtttcttttcaaggttaagttttaagagcccaaagccactattgaaatggcaggggcagagcgggaacaattctgctggcattctaaaaataataagctttattttcacactgcaggttggggtttaaaagagtctcaacactttacttttttctgaccgccacttgcagctcttttctgtcaatccggcttagggaaagaggctggtccccatacgtttattgctcagctgctaagtcaggtctgactctttgtgaccccacggactggagcgccccaggcttccctgtccttcactatcttccagagttgctcaaatttatgttcactgagtcagtgatgttatctaaccatctcatcctctgccgccctctccttcttttgccctcaatcttcccagcatcaggatcttttccaatgagtcgtctctttgcctcaggtggccaaagtattggagtttcagcttcaacatcagtccttccaatgaaagagcagtaatttctgagaatcacataagatgaactctctgggatgaatatccccaacctttccctccttttaggactcaggtgatgaactattagattcgtggtggctgaatcttaggcaggagcatgcctctgccaactacaaactggcagctgccatccacctctgcaaggattgaatcatgaaccacagcagttgctgaccctcaacactccctgaaggagttcaggacgaagagcaggaatggggctctctgtactttgggagaagctggcaggacaggtcttcagatagttagatatgtgcaggagaaggttttatgaggccaattcttgcatctcctcgtacctagaaaagcactaaaatcactaacagtgacgtctgcccctcatgactagcagcaagtctttgccaaagtgtgtgcctgactgcatgtaaccccttcactaacatcatgtataacactgaccttccccttgcctctttagaccagttccttagagctatctgagatgctgtctcctgggtttatagtcttaactgtgccccaaaataatacgtaactcacaactctcatgttgcaattttttttttccgcctccattagctacatcagcagggagaaaattctgaaagggaatcaaagctgcagcaattgatgaactgagcattgaggccttagggaagagcttccctttgccgttctagagggtaagaggaggcaggaggcaggcctggggttcttggtgcttttccttccttccttcttccaaaatcttgtcctcagtgggcaggagaaagtgtcctttagcagaagaaggcatccaaattattccatgggagagcacactattaacacccagaaaatttatttgtcctgaagatgcttttcttattaggggtcatcttgaccctctctgcatggcgcctttgccttaacccttaggaggcatgaagctggggcttaggggaatgagtttcttggaggaggggagacagacagaggtcagagaatctggaagagtctaggagtgaagcacactgttccatgagcatatgacgtgtgggtgtgcatggactggaaacagacccaataggaagagcaagcacctgtcacaggctctcagttggttggcggtcagtaatcagggagactgcatgctttctgaattgaattgaaccagcagacccacccagactgtgctgggcattacagaacactttcacagatttttaatatatatagaaaatgaaaaaaacacttttggatagttatatatatacatgcatatgtgtgaaaaagtgtgaaaatgttagtctctcaattgtgtccgactttgtataatactgtgggcaatgacagcatattaaaaaaaacaaagacattactttgccaataaatgtccttctagtcaaagctat

SEQ ID NO: 59057 - DNA, 1686 bp, Bovine  19866880777637
  misc_feature (1)..(1): n is a, c, g, or t
nggagtgttgggaacttcttggctatatacgtttaagtcggcttcttctgtttcaaattatgcttacttcctcccattcccgcagcctctctcgctgaccttgggctcacaatactagcgcagacccacgcgtcagttctaacattcttctcctgccctgtgacacctaaggcttgtgttttcccagcccttcaaagggtgccgcacacaggtcacgagctggggttcaccctcgtgtggcgctctgctgcatcttaacctggtcttgcctcctgcctttgctcctgactgtaggcacagtgtcctgagggcctgcaatgaagggcgctttttgaatccccaacaccccaaggggtcaggtgaaagccctgttccatttaacgtcccatcggctttcttgacactcgaactctgtgtctgttttacatctcatttcaggagtccttgtgagtctcttataagtcagtgtcacgtctagctcctggtggcatcataaggatgttcgtagggactcatagttgaacaccctgccggcacgtcgatggctgactctactcaggtcacctttgagccatttacttcatctgggacatttctctttaacatccttgttatcaattcgcaagagtgattagtctgaaaacacagtgtgaaacctattgattatcttccctctaattcgaggggaatcgatctatcagacaaacaaggttttccattccaaaacaaaccagatggtcacaaagggattagttcgatgggcaccttcaaaatttgagaagggccctggagggacagctggacctttctcctgaccacaggcagtgttccactcatagactgccccaggcagcctctcttgccccagtagaaagaacgtttgcccagttgtcaaggcaaattcacgcccatatcagcaaatgcttacttatatctccaaaagcatctggctggccttgatgtttcagcttcagccgaggccaagggcagtcaggcactcttaagtagattgttgctcagagttggcagagcaggatccacctgacagatgccctgtgctgtgcccaggtcagccattgggcccatagggcccccttggaacacggaggccagagcaatgccttgggtaggctttcttctcccctgtcctcgagcctctgcagcggtggcctctgccaagctcccaaccctaggatgtgccttccttgtttgcatggaaggacagtttgtacttaaaggagtgattagatagattcttcttgcacgcttccatctctgatgacgaccagcttcatcgatataattatcattagttctcttcatctttctttaatggcaccagctggacagactggttctctttactgcccagattggtggtggggttgcctttgtggggataggtgacaggcaccatggaataacagatggtaaattcagggcttgttggcaatcagcaggtttttgctaatgacttaattagctatgcaaattgtcaaatcagtgtgaacattgtttttatcgaaaactttacctaaattaattaccataattaagtagcagaatgtcaaggatgttggctgcgtaaaagggcctggctgagtaagaaaaaagagagatctgtcttcaattaaaacatataccgtccttgggacagagaaaatgccgtttggaatgagttgcgtg

SEQ ID NO: 59058 - DNA, 1820 bp, Bovine  19866880799205
  misc_feature (1)..(1): n is a, c, g, or t
ncttggcccccccgacactgagacttggccccggtgtacaggacacggtgtgtctgacccaggtcccccagcgcctcctcccgctagtgttttaagtgggcttctctctcccaaggttccctgtaataatgtcagctgctgttcacaggatgtgatggtggtaggagagccaactctgatgggaggtgagtttggggacgaggacgaaaggctaatcactagattagaaaacacgcagtatgatgcggccaacggcatggacgacgaggaggacttcaccaattcacccgccctggggaacagcagcccatggaacagtaaacctccggccactcaggagaccaaatcagagaaccccccgccccaggcttcccagtaagagtgaccggctccagaatccactgtccatagccccgtgggtcacgctcactatttcagatccttacttacaggagaggaaggagcaagacgttaaaactttgccacgcaaataccgatttctaaaccacaatgatctgagtttctttcttccttttttttttttaattgagaggaccattccgaataaacttccatgacccctccctggaggccttcgcaggtaacagagatactggcactgatgataattaaaacaagagcaaatgctaacgcttctcctggctcagtttgaaccatgtctgttaatttcccttcgccaaccccgcatccaaccatccaacgaaggccatattgtcagtaaaccctcagtgctcaggatcccattctatgccgaatccaactacagatgactttttaatattgtaaaatattttctgctttttgacttgcatctgagagtttcttgtttcagtaaaaaaagaaaaggaaaaaaaatccgcttttgaaaagtaatttaaacgtacctttatttttttctctctctctttcaccttttctttctttgggtaacagcgaagagggcccagcagggtaatttatggccaagctaatgtcagttggtcctcgagcccgagttggttcaatcgagcctgagtgcagaaacaagaaatgaccttttgtcatcagagacaccaaggcagatttttacgtaaagaaaggcacctggccccttgagaatgtatttgtttgtataattgctgttgatccaaatattttcaagccatgtaatccattaattttgtgggcagtttaataaatctgaaacttctgggtttcttttttttattgtatctgagttgactgttgtttctcttcatagtatatttcctgtataatattttgtaaagccctcacctggttcttttatggggactttcccttgggggcaatcccagtgtatttatgtgaaactttataaaagaactaatttttccattcgcatattaatatgttcctctatacatgtaaagactcagtggctcgtgtgttataaaacagctgtattttatgtatgctttactgataagtgtgccaataataaactgtgttaacgaccaaagcaaaggagtctgcatatctgtgatcctggcagagaaatctgcccacaatgatgagaagtactgagtgtggatttatgacccaaatcccacatggagtgggactgtgaaaaaggctcatctttataaactacagtttcttccacactcactgcagtttacttgggcaaacacaggggtgccttctctgtgctgggcactctgctgaccacagacacagggattggaaagcaaggattgacctcgctctgtggctggtcaaatacaagggcagtggcttccactcactgagtacttactctgtaccaagcatctcaattt

SEQ ID NO: 59059 - DNA, 1254 bp, Bovine  19866881423941
  misc_feature (1)..(1): n is a, c, g, or t
natgcataatcgtgggtctacgtatgagtgtgtgtgcacacgtgtgcatgtgtgagtgatgaataaatggcaaattataataaaacagacgtgtgctaaggactttgtatgcacctagaggcttgaggacagttacacagttatgcacaggactctagctggctctgctaaacctccaggctaggatgtgtgttctccactcaggtgggcttgacttgctatcttcacaaaatgagtggagacataagacacattttgtgtgcatgctcagtcgcttcacttatatctgattctttgcgaccccatggactacagcccaccaggctcctctgtccatgggattctccaggcaagaatactggaatgggttgccatgcccacttccaggggatcttcccaacccaggaatcaaagcttcatgtctcttgtctcctgcattgtcagccgagttctttaccactagcactgccttggaagcccagtgcacatttggggctccttccaactgggggtgttggcatcgttttccccacacacccccagtctttaaaaatccccccacatcattcaacatccacagtgagagctgaacttcctgccctgtcttgtgggaccgccccgcccaggaggcgatattggtccacctgagggtaacccatgtggtctcaactccccacaaggcagacccctctgctccttgctggagaccctgggatgccaccagctggtgcccatgtacctcttctcactaagcccccgagcgaggaccaccaacctctgaggacggggagggactcctttcagggcccctcaacgcttctgcttaaactggccagcaggggtcactgctgtggactgacacgggtctccatccctcccagggttgaggctgcggttcggggtcgctcctagcccctgctcttggatggagtgagacgcagaagccaaggattaaacccgagcccttgccggacacacacgctgccgtccggccactgggtggaccacagccatggccgtggtaacacgaccccctgtccgtgttttcagatagggcagataaggccagcaagtggcatttctagttaaacaggaacggggtgtgagtgattcaggacacacaaaagatgttatccttacgagccagtcggtgcttatcatctgacatccaaccagccgggggacctacagaaatggacacgtttgcctaacctggatacttccctgtttctctcagccatctgtaagtttcac

SEQ ID NO: 59060 - DNA, 1613 bp, Bovine  19866881533744
  misc_feature (1)..(1): n is a, c, g, or t
ncagagatagtggtctcagggtgttggatgagcaagagaccagaagagaagggtttgatgtggaaggcatgtagggctagtcaggcccaggaaagaagcttggttctcaggccaccaaagatctgacttgggtgttaagagctctttcgggctgctgttagaagactggatatgagaaaggcatgaggggaggcagagagattaattaagatgcaaaattatgttggggagttggactcgtggtctggaagtgaaagagagcagcagccagagcccttgctgacggactggaaaaggaaggtgagagaaaagcaggggtgagtgatgatgcctaggtgtccatgtgggatagatggggaattgtggtacctcgtgctgactcgtaaagacaggctgagtgacagcatggtggtgaaggcagattggggcttcagtttacactgatccagctgcataactgggattgagaaataccagctcagaagcagcaggatcctcttccccaggctggcacagcgtgccagttcagccgttcaccaattccgaggtctctgtgaactgtaataggctggaaaccagtgaagtttaaatgaatatataacccgggcgactcctctgggtcagcatcttaaagtatggccatttttctcacatttctaacaccgtttcaagggtatcttacatctcagttcagatttgccattctatccaattggatttcttttcaattcaacccaattttaaccccaatgttcaagctattttttcccattatgcccataaatggaagcaaatcatagtatcttgtataaatgcagctgtttttccttgtcttctcttttctcattttagatgaaaatcttctttctcctttctttttattaaccacagcaccctccctctgcaccccgctgacttccttttctgttcctcacctcctgagctctttcctgtttcttcagagagcccctgctgagatgttttcttatatgatcaaattataggtcaaattcgtcaaaagaatggcatacaggtacatatctcatgaagatttcaactaatccagtacgtaatacctcctttgtttaagtgggaacatcggtaaataatgatgctctttgataatgaagaagtaaggaatggggcttaaaaacgtgccaaagttccatgctaaactgaaaagattccaaacgtctgttgccctcgccaccaataccgtgactaggtttgggtattagacatggtgtagcatagttcatacgtttgatagttaattagttgatttcaataactatctccaggtgtgtaataggaggtacacactcttcaaagcacaggagatgcagagatgatggaagatggtccctctacggcaaaggcaaagaaataaagcatggatacatatacacaaacatgtgtaaatagatagtcagtgggaatttgctgtaagaatcaaggaactcaaggttattactggggctctgtaataacctagaggggtgggaataagcagagggtgggagggagaataaaaagggaggggatcaatgtacacctatggttaattcatgttgatgtagacagaaatcaaaccaatatgtaaaccaagcatc

SEQ ID NO: 59061 - DNA, 1181 bp, Bovine  19866881836236
  misc_feature (1)..(1): n is a, c, g, or t
natttaaatgctcagaaaatgtttacggggtggcttcttcccttccattctattctgcaactggccctcataatttgtgataagaattcagatggtacctaacacaacctttcttcctgttgtattgttcagagagaaatgaatgattgtctattttgagtattaatcttccgttgtctccatggatacctgattcacttagaaatgagaggcttggaacccagaggacctatatttggttcctcatggatggagagtctgaagctcagggaggggcaactgtaaaccccatcacggtgggcacggattggctaagcaataaaacaccatctacagcgtttgagaaagagggaaacatattcaatcatttttacagctgatgtaatagcatctgagtttctgctcaaagaaggaatccattttcagatcacaccccagtcaaagggattctctcactgctgagaaaagggaactataaacccactgccatcagactcagaaggaagaaaggcgactacagatgctctcagagactgagatgggcagggccatgtggacgcatggggcaacccctcctggaatgaagcttttgcagaaatgttttccattaagtgcctgtatttaaaatcttattttgtaatcacagtatgcagaagctaagactttggactgcagtctcaccttatgtaagtactcaagggaaagcacgcaccctggcaactgacctaagtcaaaaggcgcagagggcaaactgctgagaaccaagagaacctgagtaaagagaaagtgggaccagaacaaatgcagatgattctttgattcacaactggtccagggacttcaccggttctctgtacaagaaaagaagagaaaacataccaaaatccctctgtatttttttttgcattttaatgtgtattgttacacttaagttgaccactttagtacttgagcgtctgaatatcctgatggttaagacaaagagagaattatgaatgatgactcttatgtgctggagcaggagggtcttaatccgtaaaggagtctcatttctgaccaggtttggaatcaattcagagttggatgcagataatagtacatgtatatcagactattacgtcattacggactataccgatgtggagaatgggcttatatctgcatgcacgcggcttccaaga

SEQ ID NO: 59062 - DNA, 1535 bp, Bovine  19866880476204
  misc_feature (1)..(1): n is a, c, g, or t
ntactggagtgggttgcctttcctcctccagggggatcttccccacccagggtatggaacccgtgtctcctgcattggcagacagattgcagattctttaccactgagccaccagggaagccattatcaatgataggtgtaagtttgtttttttttttttttccatttattgttcctaaaaggagagcattccccagaaaagacgcagtcctttatgctgctggaccttcgcaagggctgttccctctgcctggagcaccgttcctccatatctcacggaagttctggccctttagactgtagctcaggtctctttcctctgcacccttgggctgcctcaggtatccaggtgtcttccaagctctgtgttggggaccttcattttctgcccacatggggctcaccacccccacccccctgccctgcacgtgtccctgcagtggacgggctccatcagaggggcccactgccacatggccagcagagtgaaggagggcagtgtccccaagctgtcaccgctccaggcagcccggaggaccagccccaggggctcagaaacacaaatcaaatgtgtctccttcaaattaagcccacattctggtctagtgggggcagagctatttcttagccaataaatattaataagaaaaataaaccaatcttctaggcttcttcccctcagctgccaccccagggtcataaattatgtactgcctgtgtctgttttgacaattgtgataaagtgagcttcatattcggaaagcgtttttctggtaagactgcagcattgagtgttttacatatgatcgtccctccttcccacccccagccattttccatcttggaggaggatttgactgcagattttctactctagggttttgttaccatgtttttgcaaaacaatggttttaaaaaaaaatgacctgtatcacaagatcttagaaattctcctggcagtggggaaatgggccatgagcgcccccatctaacagcccttgtgcatggatttcatccttcagggccagttcccttgtccaaacaccaattacccccaacaaaatccagcttcttcttaagagccctgggtgagggctctggtttctttcggcctctcctggcttttttccttcactcctgtagacacttggagtcaggactaagagaggaatcttctcatctcccctgctttccatctagaatggtttccagtcttgcttttcccactggtacccacccagcctagtctcagcccccagctcagcaagccaaaacgttgagacgccaaggtttgcagccaagagagggttgttttcaggaggaagacaagagaggagatacaaagacaaacctcagaaataaacctctaaggcaggggttgggcaattatgggatgaagactaaagcagtccggcggtcccagcgtggggaggtttggtgggtgtggggcggcgactggaaaaagatgcggtgatggtggtcctcgttctgctgaggcttatccaagctacggcattcacgaggtcaaaacaggg

SEQ ID NO: 59063 - DNA, 1834 bp, Bovine  19866880859285
  misc_feature (1)..(1): n is a, c, g, or t
nagtcggacatgactgagtaactagtactactactatgggcacagctaggcctgctccttctgcccgctgatgcgggaggcggccgtctgtgcagcagggggcactggagagggggttcccagagcaaagggagagagggaattgagaggaccaaagcttctcatgcaagctcagaaccagccaaggatcacaccccaaccatgccacctcaccctggcatcaaagggcaggtgaccctgaaaggcacggtgttcttagccctcccagctgcctctcctctgcaactcccctccctccaccgcccctggaaccttccactccaaattcagcgagctacgtaccaccgccagatcctgtgtcctcgtgtctggccctttcattccctcattcggctatccttcattcactccttccacaaagatgtgctggagctctgggttcagggcaaaggatctgaggcacccctcctcagggagttagcatctccataaggaaaatgctaatgggaagggcagactgttgaacacgaagtgattgattacgcaacgattaattacacccatgtgagtgccttgcctgagactttctgggtgatgagggcaaacaatagggaactaacccagaagatgcctctaagggtatgaaggcaggccgggcagaggaagcatgtgtatgcggccaggagcggtccagagctcccagcatgtggacgcaaggaggaaggtggtcccaggaggctctctggatggtccatgtgtcttctgagaccacagtcaggaactggtgggatggagagatgaagtgcacttaatgggaccccaccctcagttttcccatctttggcgtgaccgggctcagctttctcacatgtctctctgggacttccaaggtggtccagtgcttaagagtctgcctgccagtgtggagacccaggttcgatccctgatctgggaaggtcccacatgccgtcaactaagcccatgcactgccgcagctaccaaagcccatgcacctgccgcagctaccaaagcccacgtgcctagagcccgtgccccgtaacaagagaagccactggaatgagaagctcacgcactgcaactagagaggagctcctgctcgctgcagccggagaaagactgcacagcactgaagacccagcacagtcaaaaataaacaaagaaaggttaaaaaaaaatgtaagtgcctttccccaagaaaatattgtgattctacacaattcatggaggaggctccaagtgccttggggagttatcccaggttttcctacagtgacgacaaaatagcagccattgctgcccgtcagttgggtgaaaatatggccacatgtatgaaattgatttactaccagagaaaggggcattaatccagctgcaaattctctctgctgggacacgaggcggtaaatttcagctagccggcagcagctccgatacagcatgaaatatggtgcttgtgttgtgtgtgtgtgtttaataaagggaactctttttcagattcttaattgacaatcacattttcccatctgaaaaccagagcagatgatgagatcataaaatcgtgaggcaaaaaaaaaaaaaaaaaaatgccttttccctgctcttgttgacacttcaacacacggagtttattgagtgagccttttgtctgtagtcgggacattcttgtgtttctgaatatcaaaagggaattaaaccatccagaataatttattgaacacatattaaatgcaagttggcttttaagaacaataatagcttgtagtattattccttgttattattgtcattaacatttattgaataatcaccatga

SEQ ID NO: 59064 - DNA, 2167 bp, Bovine  19866880129645
  misc_feature (1)..(1): n is a, c, g, or t
nctcatctttgcatgaaatgttcctttggtatctctgattttcttgaagagatctgtagttcttcccattctgttgttttcctctatttctttgcattgatcgctgaagaaggctttcttatctcttcttgctattctttggaactctgcattcagatgtttatatcgttccttttctcctttgctttttgcttctcttcttttcacagctatttgtaaggcctccccagacagccattttgcttttttgcatttcttttccatggggatggtcttgatccctgtctcctgtacaatgtcacaaacctcattccatagttcatcaggcactctatctatctgatctaggcccttaaatctatttctcacttccactgtataatcataagggatttgatttaggtcatacctgaatggtctattggttttgcctactttcttcaatttaagtctgaatttggcaataaggagttcatggtctgagccacagtcagctcctggttatggtgaaagtaattcccctaaacccccagtttccagatcttgcttctttcactgtttgttcctctgctacttcaggtcttgtgatttctctctctgctataattttactgcccagtaaatcttgttcccgtcaatggttttatctcccctgccagacactgagacattcatggatcacatcacacacccagtttcatcacggaattggccttaatcaccccctgccggaacctaacacggtgccaggcacatggtaggcgttcatggtctttctcaccatctcctggcaccatccttcttgacctgaaagctgttgttgttgttttaagtcatgtttgactctttacgaccccatggaccacagcataccaggcttccctgtcctccactatctcgcagagtttgctcaggtacatgtccatggagttggtgatgctatctaaaagctataccttggccctttcctcactcagattatgtccttcttaccaactttcctcagttggtgaaaagctgctattgattcattctcacattaggcaggaaaagagagtgctgaatcccctacatgcttatggcttatcacatgtcctttctttttcgccagaggtaatctagtctatgtcaccatatttattgcccgaaaatcaaaaccagttgctagagtaatgaaggtctattggtttgtgtcggcttaatccatgtcaggggggctttaggggcgtataaggataatttgaccagcaaaaggaaagccataaaaatgatcaaaaagctaacagatatgctgagaacaccaagcttattttgctgaggatttatggccaacttatcagaaaactatttggtccaagtcgacattcaaatcgctccctctgtaattcagcaaagattccagcctccggaaaaaaaaaaaaaagaaaagcagcctctataatgagataccctggaaacccctaacttgcagcacatggagtttaattttcaacagttgtgagatggcagtaaacccagctttggaataaccagctccactgatgcctcagacctgcaataaattaatggagtgcggagacggactgccacgcctcctctgacatacccacatccgcgtttattcatcaaatggagcttaaatgtccgacctccctcagatggcactggagccagggcctgcggggtcccggcagaagtgggtgccaagtcactgggctctgccacacgaggtcagctgtgccccgggcccagccctggaggctgtattttattgaccagactctagttggcttccccttgtgtaggtgataaagagtggcatcaagtcacccgtgtgaaacacatcactttaactctgacagcttgtcattgaaggccttgtttatataatctattgtgccatttactctattcttattttaaaaagcaaacatagaaataaaaaccctaccttccagtgtttcgtggatggatgtcctgtaccttctcttaaataatctcagaagtagctatttctattgtcactgtcagtttacatcaactgatcagactttcagtttcagagttggcctcgcagaagatgaaagctggattgtgcgctttaatgagaagtctttcagggcatagcttctcccttcgaaatcgtttgagaattgctatgtctaaa

SEQ ID NO: 59065 - DNA, 1811 bp, Bovine  19866880522344
  misc_feature (1)..(1): n is a, c, g, or t
ngcatgagttgtgtgtctttggtcacttagtcttgtctgactctttgtgatcccctggattgtagcccaccatgctcctctgtccatggaattcccaggcaagaatgctagagtgggttgacatttccttctccaggggatgttcctgatccaggggcgggactctggtctcctgcattgcagacatgtctttactgactgtgccaccagggaagcccttatgtgtgagttaatccccatcaatctcttaagtgttcaggcctgcatggggcaagaacaggaagctcctaagctctatatacctcctggaaaccatgctgagcccactcacttttttcagtgactcctgtcacaagggcagtgctgtaaaaacatgcaccttgaactgagagagcttggtctcacaaaacttctgcaaatatctgaactcaagaatcatacatatatgaatgtgaagagttgcttatatgtagagaaaagaatatcattaggaacataatttccctgtgacactttcaaatgtcccataaagtcaacttgaatttaccaacaatgactttttcctagcatgcttttttttctatttttccttttccttttactgttcccacagcctttggttttgagaacaaaaagcatcgatctgaaggaaacaaaggttcccatgataattaagtggaaagggaatagaagtgagaaacagagtggatctcatgtctgctggctgatttattttagaacctgtacaagtgatcttgtgtttatttttaagcctgtgtacatggataaaatataaatgtggtctacatttaaaatcctaaatgatgtcctatatgttaacaagagataacatagaaagactacaaggctgaagttattttcttgattttgacagtctttaattataatagtatacctaacagaaattatgtgtaatataaaaatccatccacattttttttctgacagagtgatcacaaaatgtgtgatgtttaaaataactgatcttcattttgtgttttttcttacacgtggtactggaagcaaaacacttaagaggaatctagacaatccaaatgtttgaacttccaagtgattttgccagaatctttgagtttcaattttttttttctctcactcctgctgagaaagtacacacattttgaaagttagtttattagagtgcttttcccccctttaagctgatgataaacatatgggagtgggattgaattagagacaagctgttggtttctattgaatattcaaaaaatgtaagttatcaaaaaatttttaactatccagtgattggccaaagtttattagaagttcagtaaatggatataaaatcatcctgatgtggagcttataggaagaaacatggttggtgtttatttcataattggggctatgactatttggcttagcacttagagttataaagttatggtattcaaggaaaagaattaaccagaaagggatgctgaaattcacacagtggcagcaagaatattattattattttttacaccattttttgggttatctcttggtttgttatttttggaaccacatatctagaaaaatataaaatgtgttctatatattatatatataaaatagaaataatatatctataagaaaatgacacatagtataatatataatggtatatatatattatatatacatgctatataataattataattatgtaatagtataattataatataacatatatacatgtacataggtatacatgtgtatatgtatacatatataggatattataattattattctattat

SEQ ID NO: 59066 - DNA, 1760 bp, Bovine  19866880669280
  misc_feature (1)..(1): n is a, c, g, or t
naaaatgtcatattttaaaatgtggacagcttagtattaaatatgaatataaacatatgcacacacacacacacacacagtttatagattttcaagttcaggtaaagcccagttggtcagaatagagcagtgttccaacagaacacgcctatacaagaatagaagattttttaaaaaatcattgttaactttatttgtcactctttatagacattggtccatttttacataaagtagggagtatctacttacacttaactttctatagaatgattttgtaccgtaaaccagagtaacttacacaagggagaaaatgactgcaatcatgccccaggatgtcccccaaatgtttttgtgtatgtgattacaagtgtctataactccacaaagctaattccttcttatatcaatgtagtatgttcagtatccacacttgaccattcagatcaccaaactttcagaagagattaaaataatagctattatctctcaatcagatgcaattccagatctgagtgactgtgtaagcacattcatagttaatagctgctcaaagttaaaaaccttttcctgtttcagagatatttacattaagacatttagaaatggttcatagtatataacagcccaaatatcacttttaacctgtcctgtgtaaggaagttaaacatttcaaattcagcacattttgccaaaatgaataacacaaactattctaaatgttatttattacagtgcatattttaaatagtaaatggaatgaaactatattaaatggttatatcatcatatttgagcatattatggaatctatatcacaagggtcacctcacatcaatactatataattcactctaaaagaacaggcacacacaaaagagaacaaaatttgattttttataaatttaaagtgtactatctagtttaaggagaaggcaatggcactccaatccactactcttgcctgcaaaatcccatggacggaggagcctggtagcccatggggtcgctagagtcggacacaactgagcgactttactttcatgtttcactttcatgcattggagaaggaaatggcaacccactccagtgttcttgcctggagaatcccagggacggcggaacctggtgggctgccgtctatggggtcgcacagagtcggacatgactgaagcaacttagcagcagcaatctagtttaaactacactaaaagatttattttaatgaaacagtcaattctaaaccttctttttttctaagtttggcataaggaaagttcaatccattcaaatgacaaataggtttgtcatcctataaatgatgctatcattttcaggatccatgttccacatattgtaacaggtgacaatcagagtcaaggccaagccgatcattatccaaagtacgaggctgaaaaccactggatattcaaaattatatttataggcaagattatagggagttaaggggtcctttacttgttttgtctcaaggatagtctttgtcttcctcataagggatatgtcaaatgatctgacagtcaccaactctaccactgcgttcccaccatagagattgtacatgacatctgcatacttttgcagagcatcagcaaggatcttagaggcatctctaaattgttcagtcttccccataatttttaccaatttcttccagacctggcaactccagtgagtataaatcaggagaatgatccttggctagatgcttatgtcgggacaacaaacttgaaatatta

SEQ ID NO: 59067 - DNA, 831 bp, Bovine  19866880793406
  misc_feature (1)..(1): n is a, c, g, or t
ncgacaaaaagatggcagcccctgctacccagcctgcattctactgtcacaggactgagagccagcatgaagctggcgagagtccagcacttgtggctcaagggctgtataaaacttctctggttggcccttcacaggaaacagagcagcattctcaaagaaaggctgcagtcacaattcaaaaagctttccgtaaaatggttacaagaagattggaaaaacagaggcgtgctgccgtgcgaattcagtccttccttcagatggccgtatatcgcagaagattccttcagcagaaaagggcggccctcacgttacagcggtgcttcaggacacagcaaagcagaaaacagttcttactgtacagagaagcagcagtgggtttgcagaatccccacagaacctctctgcctgcaaaacatcaaagagaactgtacttacaaataaggagcagtgtaatcattattcaagctagagtgaaaggatttatacagaaaaggaagtttcgggaacttaaagatagcaccataaaaatccaggtatttatgtatttaagtataaagctttcattcatcctttgaccaatatttcatagaattttcaatttgagctgtagcaggttataaagaataagagttagtttatgtaaccatttcatttaccttccaaaatggaagatttttgaagttgggtaaaaggtgccgataattgtctacccaagacagcacagaacaagattgttctggacatgatcaccctaaagttaagttatgactgcatagttaaaagtgaagactttgagaccataggttgcagcggcaaccttacatgttt

SEQ ID NO: 59068 - DNA, 1052 bp, Bovine  19866881420842
  misc_feature (1)..(1): n is a, c, g, or t
ncggggcagtctttaaggtatattttttttgacctcaacaacacacacatttgcatcatgtgttagagttagtgggagagaaacatgaatccagaagtatttctaagaaagaaaaatatcacatttcccatttttcagagacaaatttccctagttaaagtcttggctcataaagtgtccttgactttgacctcaagggtaatttttcttttttattttgactctggccagacctatactaaagcacagattttcctctgggaactgagacgagaaagcggacaagaaacacacttcgcatcgtctcactgttgtccggcccggaagggtctcccgtaaagctctgctgcgactcaccgttcccccgtaaaacctggcccgcaggcacatttcatttctccctggaacgccgtgcagttgcccccgttgtagcaagtgaggttggccttctcattcccacagacggtggagggtaatcggaggtatctagggagaaaaaagcaacagtcactgcggttcatcttgttcattccgttcaagaacacttttttagaaaagtccgcgtatcttgtccttgccaaactaatgaggtgctcaggcggactgagctacagatgcttaactgtgctgttttgtacaccaatcactcttcggtccacaggtcctgctggagggcgctgtaaggagcgtggctatccatcttccatttctacccagtgctcattcatgagataagatctgtgccggggggttggcaataaatttagtgtagaaactcgctatggctagattagctgctgcttggctaataaatcacatcaggccataggaaaattgcatctctataatcgtcaggaaagaaaggccaggactgtagtacccaagcattcgtgtgatttctccgctgcctctcacagccgaactccggttgccccgccaacacttgctgccctcatccaataattcatgacttagcagaaggcaagccaaatgctgtccaggaggtttgtatacagcactcagtggaaagtacatgtgaattcagagtgtgg

SEQ ID NO: 59069 - DNA, 787 bp, Bovine  19866881481965
  misc_feature (1)..(1): n is a, c, g, or t
nactgtggaagacccgccggagccgggcctggggcggcgcctgtccacgtgtgttccctgggagaaagaagggaaagaagctccagagaccgcagaggggtctgggctgcttcaggaggtggtgtccttgtgtcacatcacgtctgctttccaacaagacctgcacgtctcaggagggagggcgagcggaaaccaagcttagtcagtgaacgaagtgcctgttgcaggcacccagccttccacggagacattcaggagcccaccaccccgtgtcgtaaacaagcagtggtcggaaaggcgactcttcctgctgtctgaagttgtttttcatttgggacacttactgtccgcgctttcgtctcatgctatgtcgatgatccattgattttttaaacgtaaagctaattctcctcttgtgctcttcagtcaggtacgagtttgtatgtatgtatgttgcaagtatatattgaacatccgatttcccagtgtttggtgcttaacgccacttatttaaattaagtatgcatctaacccgcacacataaccaggagctactgtactaagctggttgagcatgacctggccaagatatcaaaacctatcagaactagcttgaaactgttgacccactaattgccttaatcttaagcctatattaagcatacttaacctaatttatgggatttccatgtaaattctgaaagataagttatgtgttctgcagagcaataatgcctttttcaattcatcaaatcaaggacagaattcatttttttcaaagtttaaa

SEQ ID NO: 59070 - DNA, 734 bp, Bovine  19866881535785
  misc_feature (1)..(1): n is a, c, g, or t
ntttatttagttccgattttcttaaatgcaatttcactgttcttggataaggaaagatatattattaatacttagttattttttctttcagatgcatgtatcatatctgaagatagaatgaacaaaaataacatacagttaaaatggagaaaccccccaaaaagatatgctaaaacaggggattttattgaatttgagtgtaaacattcacataaagagagaacacccatacaatcttttcgagtcctctgtcaggaagggaaatttgaatatcccgcatgtgaatgaaacaagcacaacttccctggatgtacgcttaaaagtaatcttagaggtgggctgttagtatttgttatgtagtcactgctacagttattttctttatactttcagggatggtttatcacagttttaattagaactctggattttcagaggttcttaaatttgtaagctgagtagccaaggcttctttcatagcaggaccatgcgtatccgagtcctgagtccccctctcctgtaacacacgcagaaacatgcccgccttcagcgcttagttccacacaccctcttctcgttgaaatttacagcttcaaggctttctgagtcaactttatttcagaggaagtggtgttgttaggataatctctttccttacattattataatttcataaaaacacaaacactgtcaccccttatgtttgtagcaagcattagtaagtatttataaat

SEQ ID NO: 59071 - DNA, 1972 bp, Bovine  19866881734601
  misc_feature (1)..(1): n is a, c, g, or t
ncctttagaatgaaataggttataaacaatgctagagatagaggagaaatttccagatcaaagaattccacatcagggaaggggctggttgaattttcttgagcctggctttctgcagagactgaaccttaattccagggttgggactacggtgggaggtggggaagggacgtggcaggagatgcatctttattcgggaagtagccaaaatggcccacacgtggtgggtaatcaataggaatcttgaataatggatgaatgaacaagaaaacctgtattcccgtttaagcctggctgtgaagctctcactctcacctcttttgataaaatcaagtggagcaaatcagagggtaaattgctcactttgatatacatgatgagaggatcacacgggacagttcaagaagtagatgtgccctttaagacgtttcttttctctgcattcctgtagcctctaaaaaattaggcattctctctctcctacctagctatctctgtagacaggttttaaattctaaattgaggcaaattgactgtaatggcaaaagcacaattgtgtggtaagacagacagaggtttaaattttggttctgctgtttcccatacctgtggtcttaggatgcgtgtcattagcctgcctcctcatttctgagggagaccagacccgcagagcaagggctttggaacctgggtttaaaccctgatgctgccacttacagacagtatgagttgtattaagacacttaacacctctgtgccttagctctcatttttataaaagtgatgcccaccccacagttttattggtgatatttagttaatacacataaaatgcccagcagtacttgtaagagcgagagtgttgtcagccaattcatattgttgttattatcatgagaggtaaaaaggataacatacataaagttctttataaaaattataataaagtaattatctactcagtattatttgtttttcctttcagtgcagagttcaaagcatagatgccttggtccccttctactgacaagcacaatgccaccacatggcgagtgcctggtaagtgcttgcatgcttaataaatgagtcagtgcaaggaaaatgagagtgtatgtctatcctggaaagagttgttagtttctgagttctgggaagtacaagtgtactgtcatcacacatccctgaggacctttccttgcgatcaggagggagctaacccaactgcaaatttagcgcccttagctcacaggcaaactctgcagcacgactccctgctgagcagactgcactagagctcgctggcatcacctgcatctcacctgctctagagtgtccgtggactcaccaaggacttttcccacaaagatattttaaatcccctgggtatgggtgccatcttgctaggtgccttttacgtacaatttccgatcgttaacattggcacacgtgagatcggggcctgcttctccaaagcttccttttgctctcaaagcttccccgtgagaacagaagcctctgggtcctcatctacacagcctacacacctgagcacaggtctggatggggtcagcgtgagggaccaatggatcacacacgcgaaccccagaggaggggccctgccctttgtcatccttaaacataactaaagaatgaaactgtgaaggtcatttttactaagtgtcaatcactgacgattgcaatgagaatctaattatgtccctttgacattaaaatcatctaaagctaatcaggcctgggcactctgaccttattataatccatgtacactttaataaggataggcttgtaaatgaccccttttatttaaagggatacttacattttactaggtccttgcctctagcgaattgaaattccacagtaaagctaaaaatgttctaacgaagagaaaaataaaagttattttttccccactccttcagttcagttcagagctcagttgtgtccggct

SEQ ID NO: 59072 - DNA, 1193 bp, Bovine  19866881870185
  misc_feature (1)..(1): n is a, c, g, or t
ngtgcttcttgaaatatgtagtggagaatcccacagaaatgcatgaggaacctgacactggcaggatttcttcttagttttccttttcctgcaattccaccattaatattggatagtttatatactgtagactttacatctagtgtccacaagtatgtctaaagagtgttcaagtaacttaaagtcacatgtattcagtaacttaaaggtcacatgtattcagtgttcaagtaacttaaagtcacatgtatatttcagtcacacatatcaaatcatatgaatcaaagttaaactgttcaaatgcttttctcaaatgatattttttcaaaaagttttcatagtgtttctgtggaataaaagcattgctataatttatacacccagattgagtatctggtttgcatatttatttagcatgtctggattatgaacatgctttatgagcatacatagactgcaatatgctagttcaagaagagtaacagaattagtaaacacgagtctgctgtaaacactattcttttttcattgtttaagaatgctaaaataaattatataacaaataaaagatcattcagtgaaataagtttctgcattagctggatttttcagttataagacagacaatgtaaccataatttatgcaatatttctacagtagggaaagtaaaatcatgtgctcatcctcctcaacttctcaatgggaaaggaaaagaaatgcacaaagaagaatatgcacacaatgaggtcatggaatatgcttgcaaccccagatttctgatgaagggttctcataaaattcagtgtgttgatggagaatggacagctttacctgtgtgtattggtaatatatttaaaaatagcaatatttcaaggtaaatcattactcttatttgtattcatatacacatttaaataatattttaaagaagaacatgtttttgtgcattttcagaggaggagcgtacatgtggagatatacctgaccttgatcacggcgatatcaagccttttgtccctccctatcaccatggagactcagtagagttcagttgcagagaagcatttacaatcattggacccagatttatcacgtgtattagtggagagcggacccagcctcctcagtgcattggtcagaatacacatctcaaattgaccctttagtatttgcagccatactgttgaaattt

SEQ ID NO: 59073 - DNA, 702 bp, Bovine  19866880576169
  misc_feature (1)..(1): n is a, c, g, or t
ncagaaataggagacttggtaagttctcacccttgtgatgaatttactgtgaagctgctggtgtttaccctccagggcccctcactgggagtaccctctacataattgatattcacaattttatattctttttcttagagaaagcccctcaaatgacataaggtagccctgcaaaacatggatccaccttgacaacttaatattttaccgcaaaagataattacacttagaaaacaagtagacaactgcttaagatggtataaaaatgaaactctaacactttctacagaagttcagagaaacatatcctacttattttgcttcctccgcagactttggatttgtccatatatatacaaacttcacgaatatttcttcctcactctatttcctactcactcatatcctatggccaaatgtcaatctctgattttaaccaaaatgcagattctgtgaaacattgggatcttaaactggttgttggggattttaacgtctgtaatttggaggtaagcaactaagttgcataaatttaccttttctgaagataagctggataaactgttttcttattagtaaattgtggtcaacttgtttatgggtctctggtggtctgctttgttttttctaaaaatgatttctcttggattcttaatagcagattacttatcctttggaaattaacacgagaagttattatag

SEQ ID NO: 59074 - DNA, 1247 bp, Bovine  19866880654003
  misc_feature (1)..(1): n is a, c, g, or t
ntaggcttttaaatcctttgttagagtaggtgctgctttctgtctcatttgagtttcagattattataggtagtcttgcttctggttggtcataggtaaaatctcagacagagttaagaaagactccagtgtctgaagccaggaaaacacctgtaactcaaaccccaagtcaagcaagtaactcccagttcatccccattcatcaccctggagccttccctcctcttcccagccggccaggtaaatacatgttttgcaatgtcttctgctgaattccgtctgtgtaggagtttctgttcacctgctgagaaattctagactctgcgggacatgactaaatccttaatatcaaaaggtataaggagttctctttcccctaaggtttcaatgatttttgagccatttgcctgtagtttatgcccaagtgcgtgctcgttgttatgtaggagtgcctgtcattaaacatggcatccgagaaacctttaggacactccagttgcctcagtggatagaagtagcaggcagtaatctgtatttaattcttgaaatcgggttaaaggttgacacttgcatcttacttgatgcttgatgcctgtctttcgtgatttattagaaaacctcttctccaccccagccccagatgactaatttttgtctttcgtttgctaagtttccttagaactaaaacgatgttcttctgttttgaagggttcccgcccccaacatatgttatcccccctcctgtggcattttctatgggctcaggttacaccttcccagctggtgtttctgtcccaggaacctttcttcagcctacagctcactctccaccaggaaaccaggtgcaagctgggaaacagtcccacattccttacagccagcaacggccctccggaccagggccagtgacccagggacctcagcagcctcagccaccttcccagcagcccctcccacctctgccagctccgccagcagcacagactgcaggccagctgcaggttcaagctctagctcagcagcaacagtcccctacaaaagctgtgccggctttggggaaaagtcctcctcaccactctggattccagcaggtgagttagttgtgtgtgcttccagctgaggtgaggagaggagcacctggaatcattcagtgtcaagttcattcaaaatactagttaatccacctccctcagtcaaatagagagctaatgggaagttgctttatgacacagggagctcaacctggg

SEQ ID NO: 59075 - DNA, 932 bp, Bovine  19866880675320
  misc_feature (1)..(1): n is a, c, g, or t
ncaggggcctccctctcacagaaggcagagcctcccaaggaggggctctggcaccaccacaggtaaagaaaccaacagacgttgcccacatcccaagaccggctcctattttagatcagaacaaaggctctgagctcagaatttgatgctcacagccagaaggagaaaaaaacccagcatgttcacttaaacagtaagatattacgcttttatccagaatggaatatgcattcatgtatattttcatcttcggaacaggtggtttgaaatgcaaataaagtaataagtgtcagagccgtatcctagcagtagctactttgcaaacgttaccatggcaccaattcaacagtgtttttagacccagccacacctcggcaaggtctttctaactcgcgacagccaagttcaaaggaactaacggacgcaaactgcaaaaagagttccgaaccgatacaggaggtgaatcttaacaacacagttggcctctgaaacgactacttgaaacagggcatgagattgaagggggaaagagaggaaatggaccaactcctagaacacctggaatgtgatccgagcgtggagacaaaatgatggtaattataactgctaacacttgtttttagctgctaacagattgcgcacagattgggaagggcagactccattttccaactactccggtgcaaactgtgctttaccactactcactaaatcctggctcagtgaagggaaagcagactgtcctcgtgtatggatcatcggtgttaaactaaggaaggctatcctcccacagccgtagcccagggggccactcacaaggagtggagactgggagctgggttctgcagctctccacttcctaccgccaggagatctgctcagctgagggcggcatgcatttatttctcaagtgcggacaaagcagaaggaag

SEQ ID NO: 59076 - DNA, 2633 bp, Bovine  19866880781830
  misc_feature (1)..(1): n is a, c, g, or t
natgaaattattgacacaagctcccctccagtccgctcttcccgccagactttcttgtctcatgaagccagggcgctggtctatcaggcctcacacacaacccgtggaggtgtccgtgcctcctctgtctcacatgccgcaccctctgcatctgtacatcctgtcagcaacacctttgagggctctgtaggcggttactactacccgttgttactcccacgacaaggacgactgctgttattactcaagcccgtgctgcctgagcccatgaaagggtcctacccaggctcctccctgccactcttgccccgtccccagtgtcatggtctattttccacacagagccagagtaggtcttttaaatataaggcaggccacagcactatgcttctaaaaccttataagtctttcttatattccttagaataaaattcaacatgcttccccaggccctcaagtccacatgtgacaaggggccccgcgaccctccggatgtcctgccccagcacttgtcacttccttcatgtggcggcagcctcatccacctctctactttttcttgaacactgttcccgccacagggcctcttccatagtctccctttccagacactcacaaggccctgtctgcaccatattcaggtttctgctccaacgtgtctggatcagacaagaaagcccttttctgacaccctatgtgactcaaactccattggaatctagccctcttgccctacttcattcatttctgtgtggattctctctctctctactaaaacataaccttcgtaagagctgggacttacttattttgttatagctgcatcccttagcacagggcctggcaaacagtgggtgatcaatacatttttactggatgaataaatgaatatcattttagatggtcaaaaaataattctatgactttatgcattatggaaaaaaagcatgacaacattccaaaagaattttaaaactctactaaattatagtcttttaagataataagtcctgacagagagcttgtaatgcagaggagaggcacactcacttcctgatcacggtcttggactctgatgaactttgacctccatcttcttcacagtttgggcttgtcaggttcccatacctttacagataaaaacaaacacacaaatatgtaaacaaaacacacagctggtagtgctggaaagcaattctattccatctcaattacaaggtaacagttacacttttcaggagtatttaaggaaagtaacacttgtgaaatagcatccaaaaatgatactgtattttttatatttatttaatgtgtatatatgtgtatatataccttttccatatatatatgtgcagaatttgtatctgcatgcatatatacacacacattattttactcctacagaaaagtgatttaatgatgaatcacactacttacaactttctcaaacattctcaactactcaacatttctttgactattttagatgaacttgggcttttccccttagcaggagaatcagtcattacatgaggcacagatcggagattcctcctgagttctggagcatcaacccctaacctctgcccctctgtgtatccactgaaggaacatgtggctttgcttgctcagccttcatgcctgcaccacatgtgagcacaagctgatcactccatgctctgcttatgagtctggtctccttgaggataagttctattgaagaagcattacgggaatgattctgaaccctcaggttaggctgagatagagacaaggactgcagaacagaatcctcatgtctcaacaaccatgagagcagcagtgtatacagtgaggctggtctaggcttccccagccactgggggagggggacataggggcacaaagcaaccggtgcttaaactttaaaatccctctcattaaaaaaaaataaaataaaatctctctcattacagactcaaaacttgctcaataattgatcagtcctagtcacactgttaggtgtccttccaactccataggtaatgcaagtctatttcatatagaaataccatgtttcatttggctcagaatatacatttagtaaattcacttcaaattcttaaggagtagcctatgttattcacttagaacacctagactatttctgcagtttctcttcccatcagtggagcattcagagattccttgtagtttcacaagctggcaatctgtcccaaagttttggtaacagaaattctaaaactggcagggtttacatttttaaagagcacatttttgtcttctactaatgggattaagggccccaggacccttatggttccttgttctgaggatttacaagtcctttaaaacataaaagcccgccatctggtttgaccgaatgccagtccatctggtctccccactgccctatcccgggaggttccagtgtacgcccttaggctttagcctccccctgcctcccttccacctgctcctttctcgagctcatcagccttatggacttcttggcctcccaaagatattttccactggcctccgccctccctgttcctcttcattctacacctgctatttagaggcttccagggctaccctttgctttccctgagataagaaccaggcagatt

SEQ ID NO: 59077 - DNA, 2143 bp, Bovine  19866880795597
  misc_feature (1)..(1): n is a, c, g, or t
natgcagataaataagaagatcacccatgttcctaattcatgttccaaaagaagagaaaagagaagccaagaatatttttaaaaataatgaacaaactaaaatacttcaaccaatacagagagagacagagatggagagagagaacaaaagcgataccaaggagcacaaagcaaatgacgtaaaatgacgtaaacattaacaataggtgaatctggataaagggtctaggagagctccttgttactatctttagttatgcagcttttttctaagtttgaaactatttccaaataaagtatgtattaaattttttatgaaattacggctattttccagaattaatgggaagcaaaaattagcaaatttgagtttcaagcaggataagtaaaattaaatctataccttaaatacatcacactggaaactataaaatatgaaaggcaaagaaagtgttttaaaagttatcaaagaaaagataaattacctataaagaacaaatcaaagccacaatgagacattgtctcacacctgttagaatggttgctattgaaaagacaaagaatagcaagtgttggagagaatatgaagaaaagggaagcctacagtattggtaggactataaattggtgaggccaccatggaaaacagtatgcaggtccctcaaagaactagaactattatataactcagccattccattctgggtatctaaagagcaccaaaaagctaattcaaaaaggtatatgcacccctatgttcagtgtaggtttatatataatagccaggatatgggaacaacctaaatatctataaatgaataaatggataaagaagatgtagcatatatacacattagaatataactcagtcataaaaaagaatgaaattctgccacttgtgacaacatgaatggaccttgaaggtattatactaagtgaagtaagtcaaatacgatttcaattctatgtgaaacccaaaaacccaaaacaaatgaacaaacaaaataaaataaaaacaaactcaggttgtatgacaaatgcatctcaagtttctaagaactgccaaactgttgtccagagtggtttgttacctgatattcccactggcaacacatgagcattccagttatgccacattcttgccaacacttgatactgtcagtgaaaggaaatgtttaacatatcaatttagaaagacacgtttcttttttaaaaaatatttgtttgtttatttggctgtataaggtcttagtggtggcatacaggatctttgttgcatcatgtggagccttttactgatagaagattagcccactagagatcagattagtggttaccagaggggaaggagcttggggggtggatggaagaaatgggtgaaagacgtcaactgcgaatggtaatggatagtaaatagacctgtgatagtgatcatttcatagtgtatatacactatgtcgagttacaattctatatacctgaaacttatacaacaatcaaaacaatattataaagacaagtatattgataatgaaacaacaattagactcgataggtttctcaacagcaaccacttggagcattttcagagctcaccttatcttctactgagtctaagatcataatactttttctcagctgccacatactctgtcctaattgagggagaagactgaactgagctcagcactatcaatgacttcatttggaagagaccaggacaacagcagatggaagcagtggtatcaaatttcttgctaattatggtgcccttggaaattcattgggcattaactatccagatgaagaaacagaagtactacagaatctcatccactattcattcccttcttgtccaaggacaagcttaaaagaaactcgtttttctacaggacttccctgatagtccagtggttaataattctccttgcaacgcaggggacctcaagttcagtccctggtcggggaactaagatcccacgtgctatggagcagctaagcatgtgcactgcgactaccgagcccatgagctctcgagcttgtgtgcctccaccagagcccatgagccacaataaaaggctccacatgatgcaacaaagatcctgtgagccaccactaagaccttacacagccaaataaacaa

SEQ ID NO: 59078 - DNA, 1766 bp, Bovine  19866880832037
  misc_feature (1)..(1): n is a, c, g, or t
natgaattgtttcttgaagatgtcttcagaattgccttatgggtggagttactttctaagaagcagggtggtttcttaaggaccttggagccaggctgtgttagacaagggatctctttgacctttagatcctccacccaccatgtcctgttgaaatcagaagaggctgtactctcctgtagcctcacaccatcctcttccctcttcacggagagaagtcctgtccttacagtatgcaagatgcacagtcaccaggactgtgtcttgggctgggttctaaataaaggacacttaaagccatagggacaggagggagaaaaggctccaaatgcgattacttgggtcttgtgtttattctgacagttgtaaaaattctttggggctgacccatttttcctttcttaattaaaaaaaaaaaatctggcaggcaagaggaagaaatgtaaaacatgtgactaatacttcagctttttctcctggagccagattctttaaaattataccttagatatgcttgatgttttgaaaacgattgcccacaaaagccaccaaacatttgtttctgaaacttgtaggcttagatggcattcattttcagtaaagagtccaaaagcacaatatttaggagttactgaactgaaatctttggagatttcgctctggtgaatcagattaccccaggaactggcagagggccaggcagcctttcgcctcttgcctgagtatttccagccctgttggtagttacccagagtctgtgagggagttagactaaacgacctccaagatccctcgtagatggaaagtatatgatcgcagtgcggtgacgtactgaattggcaagcaggagctgtgtgtatgtgaacctcttattgttctgtagccatcacaaatagttcatcctttcattccttcactggttcactcaaacttgagcccctactatgtgcctggtattgttcttggtctctctaggaagctcatggaattttcaagcacttgtcacagtagatttgaaggtctctgaagttcagttccaatctctctcgtgttatttcctgtgtctcacctttacacacaccacgcttaactttactaggctacattcctttctagggccttccccccgtacccccacctccaacttcattgttgactctatctgaaatgccctctttttccctaatctccagttcaaatcccagccattgctcagattccaactcacatgccattccttccacaaatccactttggtttccccagtagtggtaagttatccttttctgagttctgtagcactttgtactgatcttgtgataccacatgtaatcatatcaggttgaacagtatgagataaccctattagtcagttaaaaatggttgaatattgccatgtaaaatggcaattatatggttctttttaatattaggagtgttcatgtatggaacttaaattagatctctttacacatgtactatactcatgattcatgtttagctaagattccttggtctttttattttttgtaatattaaactaaatcacgtttgacttggagaggagatttttaaaactgttttaattgattgattgattagttttgttcgcactgggtctttgttgctgcactcatgcttttttttctaattcccttgtgtgggggctactctttgattcagtgtgagggcttcttactgcagtggcttctcttgttgcagagcatgggctctccggctcgggcttcagtatttgtgggtcaaga

SEQ ID NO: 59079 - DNA, 1098 bp, Bovine  19866880906967
  misc_feature (1)..(1): n is a, c, g, or t
naaaatgatgagtgtagttgagctgttttagagctaattcaggggtattagtattgtcacattttgcctgaacaaaatgaaagggaattgctggaccttgaaatgctaaatttaaaacatgaacatttgacttaaaaacataaccaacagccaatttgttaataatttacctaggactgagcaaaagaatctgatttttaaagctaacttcatggtcaactgaacacatttttttatacccgcagaacagtatcttgaaagaaaaaaaaaaaaaaggcctctgataaaggatccttcctgtttgtcacctgctctctgctttccctcagggctggtaagcagggccctgctgagtctcaggtcctccagctggtacccaggttgctatggagatcctagaattcgaagagagaggttgtctgaagagtccctgcttgggccatggaaacagctcagcaggagcttcagcagatgacacagatttttccagagttaaaatgaaagcccaagggagcaaggattcacctgcctcttttccaggcagagaaaatctactcgtttaagagtttgtctccatttgactttggcgaatgacctcagcttcccttgtgactcagagagtagagaatccacctgtaatatagaagacccaggtttgacccctgggtcgggaagatcccctggagaaggaaatggcaacccagtccagtattcttgcctgggaaatcccatggacagaggagcctggagggctacagtccacgaggtcacaagagtcggacacgactgaagcgactgaacaacaatgtcagaataggtgagatgctctgcggtggtaatttctctttccctcctttttctttctttccttggctgtgtcgggtgttagctgcagcatgtgggatctttgtcgtggcattaagccttctctctgtttgtggcagggagactccagagtgcacaggcttggtagttgtagtgcccagactgagttgcctctgtgacatgtggactcttagctccccatccagggatcaaacccagatcccctgcattggcaggtggattcttaaccactgggaccaccagggaagcccc

SEQ ID NO: 59080 - DNA, 3640 bp, Bovine  19866880941366
  misc_feature (1)..(1): n is a, c, g, or t
ncatggaattctccagacaagaataccggaatgggttgccatgtccttctccaggggatcttcctgacccagggatcggaatatctcttgcacctcctgcattggcaggtggattctttacaactgagcccctgggaagccctacatgttactgcttttggtcagtttttgagctgctggggacaccttggctgtgctgtcctatcagtggagattattgtccagagggccaacatggctggagaattaggtctggacctgtgaccacccaggggtaagacgaactagctacatataccactacagcaggcctcaacgctcctagccaaactgttcaagcttgtgttttgaggctgtttggaaatgtatgactcaggatgccagaatcaaaccaacactgaagccagacatacctaaaaatgggacagtgtgaaaaaaatctggccaacatgggccttactgctggcaccaaggcctccagatagtactaacttcagtagtggtcaagtaagagactggtaaaggatgaagagacagttttggaatattgtaagttgtactgtgttctgacctgtgcttcatcttacattaaaatgtttttctcccattggaagaaatgaactttgtagttctacctgcctaagctctttcttgctcagtggcttttgtaaaaccacagagggaaatagtttttgcttattatttatgctcccacctactcccaaaaaggatctaagatccccaaacaattttgctaaccctcggccttcattctctcccagaccatctgttccttttcaccatgaagtcatagtactaaatttatgacagtacaatcatttccatggcaacaggatatggtcctcatcaccgaatccttatttcactctgaccaagatcaagcagcaggaagatcaggaagtatatgctcacattttctattctttttcaagttttgtttctctctgaagaagttcttacttttgattctaaaatcttatactcagcctagataatgtttttgcatagcttatatacaaaacattcttccagtaaataatcagatacgtaaaccaaaaaagaagttgagaaaaatcacacaagcctacacacacacacacacacactatgatgtataaactggcttgacagtgagatgactggtaaatacctttctagtttgtacagaagaaaagagaacacagaatccgtttaaaagacatgagactttgaagcctgagaaatctgctttgatgactgtgataagcaatggaaggcagctgacctagttcctactcaatgctttccttatcttgctgagcacaaataaaacatcagagggtcttcccacgtgagctcaggccatctgaccagaggaacacagacagatgttcacctttatttatagagatgactaatatctgggtatttcgtccatttgtgttaaccacactcagcttaattacacaatctttggagagactccctagaataccatttgctacaccgtgaaactgagtgaagggcatgaactctgaaaagagaactagttactggaatatcagaaaatacctgattgggggattaagttagcagtcttacaggacagacagcaaggtatgttataatgaggttctactggacagtccagataacatattaatatataactatatatgtgtaatatgtcatattatataatacacacaacatattaaatatgtgggcttccctggtggctcagatgataaagcatctgcctgcaatgcaggagacccaggtttgattcctgggtcaggaagatcccctgaagaagggaatggccacccactccagtatttttgccatggagaatcccatggacagaggagcctagtgggctacagtccatggtgttgcaaacagtcagacacgactgagcgactaagcacgaagcacagttaaatatgtaccataacatacaccatgtgttatgtgtattatatgtatataagagaagaaaagtgtaacatgtaagaactttcttctcttttctattcttccccagcttccatgtagacagggtaagtgggggaagggagtgggagaatgggtgataagggctagaaagaagagctggaggaaaaggtagagtgatttatattaatctttttttggccactccatgtggcttgtgggatcttagttccatgaccagggattgaacttgggccctttgcagtgaaagcacagagtcccaaccactggactgccaggaaattcccctatattaattctttaaaaggtaaaaaatcacctacagtggaaaagatttggattgaagaggaagtggagagacacagtagacaagtgagagagaagggaagtgactggaaagctgaggagcggtattttgacagcagttcctctgtgatatacgtgctttgggggaaataggaaagcggattaactaagttctgttgtttgttacatgatttaccactttgctacatctccaaaatttcagtgaagacaaacatttttcagagctcattatagatgaattcgtaattcttctgaaatgagataaaatgttcagatggacactaaggctggagtaagccctatcctaattttacaaatatgtacataataagactctcttgaggaaaatgaccagcagggccaccattacagcttttacccttgggaaatatgtcccattgccatatttaccttgggaaatatgttccactgccaagtcatgtcatattcgtagtaggtactgactggccagagatgggtggcattctacaatctggagtttttaactctaatgaaattcaattttagccttaaagaatctaggaacttagatgatcaaacatgaaagagtggggggaaaaggcactatgactgcttcagggaggcctaaggccaagccctaaacctagcctttgaggactgagagaaggcaagaccagactccagagagtgccatgacacccgaaggacaggcctcactgacagtgagatgtcacattcaggcttgctccaatctgacactgatctctctgtcttgttacagatagtgatgggtcggaaaatgcagaatctcctgctgtactcatgcataggattatggcagtgagtggtaaggaaacctttgcaagaaggtcatcatcactcttgatgacatcaacattttctaagcatagacatcataatggagaatatgtaatgattttggggaaggtaaggtaaaacaagatggaagagatcatcaggatagaaatgggaggccaggggaggaataggaaggctcaactattccctactctcctgtataacattagttcacaagatgtgctgtgactttttttttaaggttctgtggaaagctaattttggacattgcctagtttttttgcatgtgaaaggctctgagatgtctcaccaagaaaaaataaaatgttaaactattgtttaacaatagttgcccaaacttatttggtgaggcattgtatgtgccaagttgcttcagtcgtgtcggactgtagcctatgcgaccctatggactgtagcctgccaggctcctctgtccatggtattctccaggcaaggatactggagtgggttgccatgccctcctccaggggat

SEQ ID NO: 59081 - DNA, 907 bp, Bovine  19866880968004
  misc_feature (1)..(1): n is a, c, g, or t
naatgttttttctgctatctattgaaaaatctattcttttttaacattaatattgttgatgtggtatgtcagtcacactgattgatttgtggatgttgagccattcttgtacccttggaataaattccacttgatcatggtgttaatcatctttctatagaaaagaaaggttaagcttgctccttccttcataacacagaaatcactgtgcaataattcccctggcatcttatctgcttcccaacctaaaaacacatctacttgcatattactctaatctttcgaatttttttattcatttattgcataccctaccctcatgagcaaagacattcctcctcttattcaaagcttatttctgtaaatgtgctcaaaacactccatgacctctgtgaaactctccaagtttactatttcttgcttatatattccactcatccatctttacttactccttcctacaattcacaagcatttttttaaatcccttttcaattctatattttcttctaacgatctccatgaatctttctccttcaattcagagaaagcttttaaaaacaacaatatgcatttcatttactccactttccatctctcataagtcgactccctgaaatctggttccagtgccatcgctccatcaaaattattccattacgatctcctatgactttctagataacaaatctaattgatgcttttgagtatttatttttgtgaatttttgcagcatttggcccttccccattcatctttcatgaaattttcttcatcactggcttccatgacactgttcttccctgttctctaatcttctgcagtgccccctcacagactttttcatgggatctgctttcatgtccagttccttaaacactgctgttccccaggggttctgtcttgg

SEQ ID NO: 59082 - DNA, 819 bp, Bovine  19866881022274
  misc_feature (1)..(1): n is a, c, g, or t
ntcacagcagcatatgtgaggaaaaaacagtcaatgaaccctataatcctgggctattgacccagaagtgaggtattagaggaccaggttgccttgcctcagaaataacagtactattggccagatatcacagtgcacagtatccaaaaatgggcacacaacatatgtaatgaataagaaggctaaaatctttactattcaactaaatgagagtatgaatgtcaaatcttttcctgttccaaagcaaagcatccatacaagtatttcagaggagaccattttggttttgtattgctgccaaagattctatgagttcacacaaacctaacatggttatgctagatattttatcagtccaagtacaagaaaacaatttcctctttctacaaagggagcaatttagtgcagggaattccttataaaagtgatcaaggaactgagtcctaaacagtttcttacagaagagtgtggtctagagatcagcaacagctggaacgttgcccactgctagactggaggaacaaaaggaggaggggctgccaccagaacccccccacccccgacgaggccacagaaatgtgccggtgaatgtttatcgtagctctctgttggaagaggcttccctggtggctcagatggtaaagaatctgcctgcaatgcaggagacacaggttcgatccctgggtccagaagatcccctggaaaagaaaatggcaacctactccagtattcttgccccagtattcttgcctggagaattccatggacagaggatcctgcagtccatggggtcgcaaagagctggacacaactgagcaa

SEQ ID NO: 59083 - DNA, 1989 bp, Bovine  19866881075080
  misc_feature (1)..(1): n is a, c, g, or t
ntgaaaaagttgacttaaagctcaacattcagaaaactaagatcatggcatccagtcttatcacttcatgggaaatagatggggaaacagtggaaacagtggcagactttattttctggggctccaaaatcactgcagatggtgactgtagccatgaaattaaaagacgcttactccttggaagtaaagttatgaccaacctagacagcatattaaaaagcagagacattactttgtcaacaaaggtccatctagtcaaagctatggtttttccaggagtcgtgtatggatgtgagagttggaaagctgagtgccgaagaattgacgctttttgaactgtggtgttggagaagactcttgagagtcccttggactgcaaggagatccaaccagtccatcctaaaggagatcagtcctgagtgtttatatgttgaagctgaaactccattattttggccacctgatgcgaagagctgactcattggaaaagaccctgatactgggaaagattgaaggtgggagaagaaggggatgacagagggtgagatggttggatggcatcactgactcaatggaatcagttttggtaaactccaggagttggtgatggacagggaggccttgcatgctgcagtccatggggtcgcgaagagttggacatgactgagcgactgaactgaactgaagtgacattttagctcagtagtaatagtatgaatcccccaggttgtatagttggttctgatttattagagtccaaagacacagcaagggttttacattttgttcataatgttcttctttgtttcttgctgactatgaaagtatctaatatactgtatggaggttttgagtgtgcttgcatgtaaaaatcaccctatttcttcaaatcattggccataagtaggaggtggctatcctttagcagggactaagaccttgggatctattttatttagtggtagagacttcttggagaaggaatgcttgaatgttctatgggctgtggaccctcattcattgatatttgagagttttatctccagtaggtgggtcttgttagagcattttggaaactttccctgttctagagagcaaatatgatcctttaggatattgcaaataaataatgtcgtggatgtaaagccctcaaagttgaaattttaagtaatgatttttcctttacaaaaatattccttcagtattattgttctcaagcagcaaccaagggcattataatatagaaacattttaaagtaactttattttgcaactattatgtgtttgtacaaaagaaactctcccagttttattattaatatgccctttgtcagtttaagaagtgaacatcagtatctctttatggttatattttgtaccttttcattcctggtgaaaacgtagtacctttttacatgcttattgatctgtagtatttattcttctgtgaaagatgtatgattctttaccactttttgtttgaggtttgtttgcagtaacttatgtatcaagagcattagctgtcatattttttgttaatattttacctgctttatagagccttttaattatgctgatggtatttttaattgaaccaaattttatattttatgtggtctaattaatattatgattttttttttactattgtatttaggaaagacttctgcatcaaagaggagtttaaggattccccatagtttcttctactatgtatgttttttacatttaccactttgtccaggcaacaaaatggataaagcagaaaatttgaaaaggacaaactgaccattgcaacaaagttaatttctcacttttcgaaatttatcacttcaaaagtgtttattccagcctctcctatagaagcagtctgatcaacttctgtcttctcaacccaggtcccctcagtcattgctgtatttgaaacggcctgatctccaggccgaaacctgcagaggtcctttactaatcccttcctgggcagaaaat

SEQ ID NO: 59084 - DNA, 1483 bp, Bovine  19866881078925
  misc_feature (1)..(1): n is a, c, g, or t
natctgcttctttgctacttgcaaactgtcctgtgatttctactctctccctggcatgccaatgggagactttctgagatcaccggtttcctggaatgatatttgaggcacatttaaatgccttatgatattcctgggtttatgtgggcttggtcctacatggattggtggtaggtctctataaggcaccagcacaaatacgacaggaaccctggggtcaagggtcagattgggttgcagctgtccgcttgtcacttgaaaagactgcctaggaaagacactgtttagggggtggccctccaaagctgcctgaacttttacgtccagattctcttctgcctggagaagaatatcggtgaagtacggtttcacccctgttatggcattgatttcatgcgcgttgtgcctgtccgccagagctctcccggttaaaatgggctggaaaacacttgctccctggacaccactcacaaagttgctgaggagagaataccatatcccaccacttatcgggctcaaagtgacctgtggccataaactggccaggctccggagagcttcgcggttccacggcgaggcaggaaattcagcctctgtgtgatagagctgagaaaagtaaacactaagagtgatgtctggatactttgccaggaagttatacattttgctgatgcagcagtggttagcttcattgcacggggagttgctggagtacagaataatatgccggatgcagtcgttattgtgtatggccgagtcaaagtaaccgttcacctcaaataacattgattccgggtgggtatcattcccagtgcagctgctagcatgacccttttgcaccaggcttccagaagaagtttttagctcatagaacgtgaggtgtttcgttggaggatatgttggcccataagggaatccaaaaatctgataaaattctgtgtagggaactcttgcttcttcacctgtccgaatatggtaaggacaattagagcaatcgagagagaaactcagccagtaataaggttttactatcgttccgtgattggccaagtattcctcatataagggctccattgttagttttattgtcttctagctgcaaccctaaacaaagaagagaaatgacatataaaaccagtgcaggaaaaatgaaacacagcgctttaatttgccgagtcatatttttctttagaggaagtagcacaataaccatggtaacatcttttgactctaaaagatagtgctttactgtatacccatagtgaaagttcaagatactaatcctgagaattagacaaatgctgggggaggagacagaagggaaagacacaagaacatctttgtctgtttgatagaatctgaggcagaagaacaaatgggttaacagtgcaagttctagaaacagattgccttatttcaaatctgggctctgccgattaccagctttgttacttttggcaagttatagaacatctgggagcca

SEQ ID NO: 59085 - DNA, 1978 bp, Bovine  19866881126677
  misc_feature (1)..(1): n is a, c, g, or t
ngtgatggacagggaggcctggcgtgctgcgattcatggggtcacaaagagtcggacatgactgagccactgaactgaactgaactgaagatgggtatcttctggaactttgtaggtcagtgcacatgcttggttgtgtgagatgtcatccacacactgagagtcacatgttcctttcaggataaggaagaaatttctcaggttccaggatggggctaacactacacatctctaaattgctgatgtatcaagtttatttatttatttggctgtgtcagatcttagttgcagaatgtgagatccacgttgggagcatggagacttagccactggatggtcagggaggtcccaagtttcttagtatttcattgtaagggctattacttactttttcaatggattctgtcgagagttccaaatcaattcttgtccatgtttcaaagtcctggtttggggactgaactctaactttttccgtatcttgtccggctcttctcctcatgattgtgccatcggcactcccctattcccagcgctcccatgagagtgaaaaaatgctcttgttccctgcagtggtgactttgtcccaaggctcttctcctcatgattgtgccatcggcactcccctattcccagcgctcccatgagagtgaaaaaatgctcttgttccctgcagtggtgactttgtcccaacagaggtgcgcagtgacacatttaaattgggcatatggaatcttaaaaatatgtgtatataacaaataggtcattttccttatggaaatttccaaatatgccagagtaaacagcgcatgggcttagctgcttcaaggcatgtaggatctcccccagaccagcgattgaacccatgtcctctgcattggcaggcagattcctatccactgagccaccagggaagcccccaaagtacttgtcacccaacttcagtaattacagatgcattgccagtcttgattcattaatactcctacccctacccctgccctatattcttttgaagcaaatcccaggcatcctattgtttcaaggtgaggtcctttcaactaacgcataattgcttctctgtctatatgatctccgtgtgcagactggagctttctcctcttcatttcttgtttgtttgcttgacaatttcagttgcagacagggctggtatggggacaatgtctaatttccatctttgagcagatataataattctttcatcccagtaaacagtaagtgactctttagcattggcattacttttactgcaagggatttatggcctctccattctttctcacatcatatagggcctccaagtctcccctccagagtggagctcacactgggcacaatgagccattcttccatgacatgcaacattcggctctttattccttgtcattcagaaccatgaatgtctgtgttagatgttccttctcacatcagtggttcccaacctggggactctaaacaaccagggtttctcatagaccagaataaggatctggggactgttttcagtatctcttaagcttataatcaccctcaatatggcacaggctatgtatcgagtttctggacttctgcttgtattaatattattgttagtttggtgagatcatctcataatgatcaagagtcctgcttggtagctagaaatgttttctatgagcaaaaaaaaaaaaaaatagtgattttttttttttttttctcttccatttcttcaatagaggaggaaaataattaaatgcattctgtctggggacaagtttggctcctgctatagcatttgaattctgggcttctatttggtctgcctttaacctctgcagaaacattaaaataaaacccttcttattggtctcttaatccttcccttgtgctgctttaaatcagcttttcaaagtgtattgtcatgcagttgtgttatcatttgcatttaaatgtagtgaataaagatttcccagctgaa

SEQ ID NO: 59086 - DNA, 1412 bp, Bovine  19866881204529
  misc_feature (1)..(1): n is a, c, g, or t
nattgatattagttttattcagaaaaggaacacacacttacgttgatttgttcctgactgaaggagatcagaggacatgaacacataggttcatcagtgttactacacaagttcaattctgactggacaagttcagactgggaataatgctatcttttgtgtggccctaatattcaaagctcttggatatacacaacctcatttgattctcacaataagcccagtttatagatgaggacactaaaggctcaagggctaagtaactgctgacccagtcccattcatagtaactgacagaggacagagtccagcccagacccttcagactccaaagctatgttcaaaaagcagtgccacaacggctccagcagctcggacgtccatttgctctttgaaggtcccccatgtgccaccctctgcctcactccacacacgtcaaatagtgacagcgaactccacaccaggttctatgaatgaatcaccaactctcaagtcctgtgctcaacagcaagtcaaaattccccctgtggggtattgggagggaaaagacaccatcacaggcaaattaggacatagctgctccatgtcaccaaaactatttgcacacaaatatttaggcttcaaattaagagagtagaggttacagggctctaggaaattaaaactgacttaatcaaacaaaacataaacttctcttgtcaaagaggtgtaatggtcacattgccagtagtaattgtatgtctggattttcaaaaatgcattctcctctccctatttaaaaaaaaaaaaaaaaactgcaacattcccctttccaggaatgtgatttaacttaatagctaagctaataatcactggctgcttatttggtacaaacaaagaaaccactgtctctccaaggggacacaatggttctgaatgtgatttaagtatctggttgtgagtgaccattatgttatgtaatgaatgaagctgcatgaatacctattacataactccattctgcttgggcactctaattaaagtgaggggacttcccatcactttaaaaagctctcctcagtcacttctataacgtgtaagattaaaaaacttaaattatactaagccacggacacagtgtagccagctgttgcatccaaagtaaatcatgaaagaggggaataagaaaaaaatatgcttctggaagaagcagaaggtacctagggaaaatgtaaaatgtgtatagaagaaggtggactgaactgaagagctatgctttgcagcactgtcttaattgcagagaagtgtattgggttggtcaaaaaagttcattgggtttttccataacatgttacagaaaatcctaacaaactttttggacaacacaatagcttcttccaaatatatatatgtattctgataaacatctagca

SEQ ID NO: 59087 - DNA, 1244 bp, Bovine  19866881297557
  misc_feature (1)..(1): n is a, c, g, or t
nattttaagagggcagttgatgaggtcagatttgcatgttttaaagatccctctgatagcaatagagcaagcagaatgaaaggagacaagagtgaagtggagaaaaaaatgtggtggctttgcaatagtccaggcaatggatggttataacttgaatgatagtgactgaaaaagaagtaaagggagaattacagattcaggatgtatttagtaggtagaattctttggcattgataggttatccgggatttgagagaatgttgtcgtggatgacttccaggtgtctgcttttcacaactgggaagccatgatgcatttagtaatgtacaaaactctagaaagagaaaccggagatgagggtggaggtggatcatgagtttgtttcttgaatacagtcaattcttgaagaatttgggaagagagaaaagaagcagcggttagaggagaatatgggatagaagattttaaagtctgtgaaagtgtagggcatgtttaaatattctgtgagaagcatccaacagagggaagtttttaaattgttgaaaaaggggggaggtggtaattaaaggatcagaagtttttacaaagactagaaagagcatacctaagtggaattactggtcttaaataagatatacgcttcctctagtgttttaacaagagtaagaaagaagagggttctgtgaatatagtaagcctttatttagtaagggcgttgttttccctgaggtatggaactgtcctttgctgaaaagaattgagactcgggaagagggcagaaatcagcttgaggaggatggagatttaaaatagttaaagtggctagtgaattgagaaacacagaatttcctggcctcattgacagaaaaattttaatttaataaatgtcacttaaatgttatctttaaatgtattagatttgggagtaaacagtaagaaagtgaaccctacttggtagaagagttcatgatgaccctgtgaacgtctaagcaatgacatccgtttgctaagatcttactattctggatgttaaagcagggtcactgtttgcagtgccacaaatagagctgctatacattctttttttttaatttgcattcttgtcatacaattttacttaacttttagtgttacttacgttgggtaggcctagtttgtttctaattgatgttctttttcccttttttaggcaggcagaagtcctgaaggctgacatgacaggtactgtctgactcatttgtttt

SEQ ID NO: 59088 - DNA, 887 bp, Bovine  19866881347579
  misc_feature (1)..(1): n is a, c, g, or t
nttcccttggtgaatttgcagaaacacccttccgcttttggtgtggtttaaggaaaaggaaccgttttgaaatatactgagcattctgctcctcttaatgaggcttgccctcgagagaagttattttaccagagtttaaactactggggagcataatactagagatcatactagagcatactcaacatggagaaagggaaacacccaactccagccctctctaattatcctttcccatttaagggggaacgatgggggaagaggctgagaagaacttgtgaaattcacagtccaggggtacagacccattaaagactcagacctcatcatgagactatagaatgctttcttttcccaacaccttaccctatatcactaaaggcctatttactgcagttccttttacccaatacatcatgtcctgctaacaaaaaaaaaacttcaagactatcaaatagcaaaaaaaaaaaaaaaaaatacacctgccttgaagagacagaacacacatcaaaaccagactcagagatggcagagatgatggaattatcaggctgggaatttaagacaactatgattaatatgctaaaggttctaatggatgaagtagatactgtgcaagaacagatgactaatgtaaacagatgggtggttacaagaatgagtcagaaaaaaacacccagagatcaaaaacactgtaacagaaatgaagattgccattagtgcattgactacatgaaagcctttgactgtgtgaatcacaacaaactgtggaaaattcttagagatgggaacaccaaaccaccttatctatctcctgagaaacctgtatgcaactcaagaagcaacagttagaaccctacatggaaaaactgcctggttcaaaattg

SEQ ID NO: 59089 - DNA, 1285 bp, Bovine  19866881348673
  misc_feature (1)..(1): n is a, c, g, or t
ntaacacacattctgttcatcagctttcaaacttttttagccattgagatctagttcagatatgtagttaattatataattaaaaaattatgcaatcaagacaaaagtttcatgaaaactttactacttgtgatacactctgatactttctattctattccatttcttttcctcctcccccttctccttctccttgttcttcttctttccctgagggaggcagtaaggaagtaaggcaaagggaagaaagaataaaagagagagagagagaacagaaagagggagaagaaaaataaaactaaatagaatttaagtgtttcctaagtaaattaacgaattttacctccccccctcaaaaaaaaagtctaaaacccaactttcccaatcccaacaaaaaaatcttgcaccaagagtgcaagattcctaaatgccttgcattgagaaaaaaaaagaaaaattacatctgaaaattactctggactctataatgagctctcctggttttctttcagatcattctggatgatcagatcggaagagaagagcagagactgcctcaggacttgatgtataaaatagctctcagcagggtttggtcaatcctttctgacaggtatacacactgcaacaatcttcaaaggtcacttctgggagaccctcctaactccttttgatgatgctgccaagaaaggaaagagaaaaagtaagaagagaaatctaaataagaacaaaacaatggaaaggaagacactcacatgaaccccaaaggtgcaactgatgaagattaaaaatgctattagacttcattgaccatacaacccacgattacatggggttattactagcagagagtgctctctcatcaccagatactttgtttaaaccttagagccacattcataattgaatgctaacaccatcggtacagggctaggggttgttctctgagtaagaggtttccacaggacttcctaaaagaaataaggaaatccaactggggcaaatgatctatccaatactaccaagagctcagtggatgctttacaccaaatcgatttcctcagaaggtctcggaggaaaagggcgcagggaccacaacagtcacaatccagccacagctggctgcatttggtaatacagggatacggctgcttgtgaattaagcaaacaaaagtaaacaaaaggatatccttaactgtaaactcctctttctgacaaaacgagtaattcagcatttactctcaatactataagggatacatattaccaacatgtaatagaaagt

SEQ ID NO: 59090 - DNA, 831 bp, Bovine  19866881356272
  misc_feature (1)..(1): n is a, c, g, or t
ntaggtgcttcataaatgatactttctctccctcccttatagactccagttgaatattattaatatttggttttaatattccatttctcactactgatgataatgtctaccctgttgatctcagtaaaaatatttcaaagcatgtttatatgttaataagttcccaggcaggacacgtctatccctttgcctcatattaaagtttgcggcagagagaaaaagaaagtcattcagaatcacaaagaagaagcctagcactatctttgaaccacattctttaaggtcagcaaagagctggctcttcagagaggaataaaatgcacacccactgcttgtccaaatagtcatccagtttctctctctctctcttttttttttaattctctctcttcctgtctctcagatgagaatgatttaatctccaaactatgcatgatgacacatactatttcttcctccaagaatgtgatgttacaatgtgaggccccattccagaactggattgagagggagaggtcatatgtccagtctccatacaggcattcactagttgaatttcacacagagaacatctctgtttcacagccacagagaatattgcttatcttggcaggctcctcacaaatgcaagacactgagcccagataagcagtgcgtgatgaatgagtcagtgcaattgcaatcagtaaagacccaaacaaacaaacaaaaccccaccactgaccacgacccaacggccaatgaaataaatcacctttgtaccagagatggcagtattttggttgctgttaacctttatagaaacaacatgttactagaaatcagatcaca

SEQ ID NO: 59091 - DNA, 1029 bp, Bovine  19866881390035
  misc_feature (1)..(1): n is a, c, g, or t
ntctcaatgatctacgaactctgcagcaaaggcaaatattataaagactaccagcatcatcgtcttccccatgatcattttaataatggagttaaccttatttgagcctcttaaactctactaccattaaactgttttccagtaaatctatggcataattctcttttgttctgaacaagtgagccaaccagggaaattcttgtaattttggtgataagggagtaaaaggaagaggtagaaaaggagcaaggctcagaggctaacctggaaagtggtaacagctaaattgcattctttttctgctctttctccttcatcaggttgcctccacatgggtaactatgctcagacatattggcctcatataatatttaccagacagtaggagagggagtgaaatctagcccctagataagactaaatgcttatagtttttctctacccttggcccaatattaaattctcaacaaaatagctgagtgatccttgtaaaacgtaagtcagatgtaagtcagatcatgttgctcctctgctgaaaactctccaacggttccctattttgttcagggtcaaagtcattttaatgatttacaaggtctccaagacccgccacctttccccccttgtctccctacatcaacacatctctttgccatctcacttttagccaacctcactgacctcttgttttatccttagagccttcactgaatgttctcactgcctagaatgcccttccgccatataccccatgtctatttcactctctttgtccaaatgcaacctctcactgtctacttgacaggtcctgcttccctgatcacataatttaaaatcacagctcatacactcccaatcccctttatcatactctacttatatctttttctcttatctcttgtccccttttaacaaagacaaagtgaagtgaagtgaaagtcactcagtcgtgtccgactgtttgcggccccatggaccatacagtccatggaattttccaggccagaatactggagtgggtaccctttc

SEQ ID NO: 59092 - DNA, 1533 bp, Bovine  19866881538128
  misc_feature (1)..(1): n is a, c, g, or t
ntgaatgctgcccggggggaaatgggaaggtttcttagagaaagtgggatgaaagagttgtccttgaggctgggtagaactcctcggatgtataggtgtgggggagggaacagcctggacgagggcctagagggggaatgtgctggtgtgtggaggaaaaggggcggagaagacgtgcctggagagcctgtcagaattaggttgttctggacttccctggtggcgcagtggataaaaagccactggccattgcaggggacagcgggttcaatccatggtccagaaagattccgcatgctggcgagtaactaagcccatgctccaggactgctgagcccgtgctctagagcccctgagcccgaactactgaagctggcatctagagcctgtgctcggcaataagggaagcaacctccgtgagaaggatgcgcaccacagcgaagagtagccccccactcgccaaaactagagaaagcccgtgcaaatcagtgaagacccagcacagccaaaaatagataaataaatttaaaaaaattttttgttaaagattagaaaaaagaattaggttgtgctggcacagagcaggtacttaataaataattgtcaaatgattgcataggtaaatggcagcatcagacatggggtattgttttgtttatttattttggtaagaaatggtgaagttttaaaaagaagctggtataattgtattatgatgatagctctgtggagaacaaggtcaaccacaggcagggacatgatctaagaaaccatggtgattgtcctaaacgatggactgcgtgccctgccccccacttcccatcatcccggaaagcctgcttctctgcctctgtaagaagccaggctccaatgcttcccctcttttgaaatatttgtgggtcagtgaatgtcaacactcaggttacatgcagagtgtgtttaaacacacactgggaacatcaacacatatcctattcctaaggagaggaataaggtctcctaattgcacttgtgtgaaggttgacatggctcccaggaaggatctggggaggtgacacatagtgtggccgtcagccctgaagtttgtcgaagcctctagaagtcctgggcttggcgattctggtccttgcttcgcagaggaaagatggaaaaccatctgatattcctctcttcgtactcctcgtctgttccatattgatatcaataaacaatgaaatcacaggatccagattaagtaaatctattttccttgcatgtggtacaacacagtttgaaaataaaaaaacaaatcaaatgctctggaaacaaaatgaatgcaaattaagccccaaagaaatctgtcagcatctgaacattttattttgctttcttctcccctttaaattaaaccaacaccattttccaaagctcaaatatgaatcacagccccttctggaatgaatgattctggctgtggcctagtttaagcagatgatcccctacaagtgtggggagtgaggctctgctccatgaggtaggagttttgaggataca

SEQ ID NO: 59093 - DNA, 754 bp, Bovine  19866881758978
  misc_feature (1)..(1): n is a, c, g, or t
ngagtcgacggcatttaccttcgagaagatgaacctggtcagggctccagggagtgtcttcctgagtaaatgacgttaaaagaccttaaggatagggaggattagcagggtgaaggctctggggttatagcataggctattcctcaggctaaaggtcctgaggaaaatgcaaaacacttataagagtcataaggaaggtctgtttaaagaacaaggaaaggggagaaatggagcatgatgagatttgctacactcattcaatttcttagccaaataggaatcacacttaataatatttgactggaagacactggacaaatgtcttaggtgagaggtgtaaggcaacagtacaaaacttctaatcactctcagggaccttcaggtatgcaatgcagaataagaaggctgactgaggtgagcattaggctgctattacgctcaaaccacagatttttaacgcatatggggattttaaggtaaatgcattaaatcatttaaaaatcccacaggtaataaaatactctagaattggcaaaaagtttaatgaaaaaaaaacttctaggcatgaagtcattgctcccatgatatgaaacttccaagccaagaaataggattattatgacaaaaaaaaaataactgtccatttagagctgctttctctccctagaaatctatgtgagataataatttattggtacttaatcatcagcagaaaataagacatggaaacattttttttaaaagcagcaaaaca

SEQ ID NO: 59094 - DNA, 902 bp, Bovine  19866880139426
  misc_feature (1)..(1): n is a, c, g, or t
naactctgggagatggtgagggacagggaggcctggcatgctgcagtccgtggggtcgcaaagagtcagacatgactgggtgattgaacaacagcagcaagaactctaacatgaaacctccagcaaattccatgcggccatgccaggcagaacaaatacggtgtggggatggctattagctgaggtggagtaggaaatggcaaagctggagttacttctggaactcagctgagaactcagttcttcaggggtccctgagtgtagatcagggctcataagtttgcagcaggcagaggaatcaattttcctttggaaatctggtccacttaagggtatgtcctgtggtaccctaattcacagagtgttccaccctgcaagaaatgccccatcccaagtgtggctttgcacggccctacctccattgcctctctggaggatgggtcatcctgggagctgtcctcccagcccatgaatatgtatacattagctccgagcagccaaggcagattcctcgtcttattcatcttcattagcgaggcctggactccccagaggaccttgctgacagagtctagattgttccctctctgcagagtgggggagataaataccacattatgccacccacagggcttgtgcattatgccttgggagcccacagcagctccagcctcccccagagctcgatgacatcttcccggggtgtgagacccccctattcagccacagtgggactcattgtggtgtcctggttgaggctgccatggccggggaatggcctgaggtggggctgagcggggagccttttatcccaggagtcaggacccgtatgaagctgctcctttgctttcattccttattcccttctggtggggcctacactctccctccctgcatacctc

SEQ ID NO: 59095 - DNA, 1666 bp, Bovine  19866880507896
  misc_feature (1)..(1): n is a, c, g, or t
ntaatttttggaatgtgtccagatgtgtcaagtggggagcaaacattacagatgggcaggagttgaagaattctgttgctaatgcccagagcagaatggaacatcaccattgactttgcctcggagctgggaagggctctgatgaggggttaggtgtacctgaaaaagccagtaagaaggtgcagatgcagctctagtgtagaaacaaaaaaagctacctgatgatcgtgttctgacacttttttttctgccccccccacccccgccccgcaaaaagccttttttgggggatggaggggagaaacttttgcccttctaaaaacatgtccctttagtggctttatttatttttctgagagtggtttcatcttgttgcccttttcttttccctgagatgctgccaggtttggatgaacaggggacacactgctgggacgtctgatagtttcatcactagagagaagaggaaagaatgaggcaaatagaaaggcttacagaggcgagcaggagctgcccttagtatgtgatgcaaagtcaggactgagcccccacctctaatgggaatcacaaagaaacgtgcttgaggggttgacaggaataatctagaacaccagcatgctcagaaatccattctgttcacccttaggctttctaaaagcggaactcatcttcctaaatgtttatttggagagagaaaatactacgtgtaaagagatatgtatatatacagaaatgaggacatatttctacctacagttttgttattactttgccataaaataaatgttcattaatttccataccacatatggagggaactgccacatgtgaatatctgtcatcagtaattgctgtgcctgtgactccttaagttatatgtgccacagggatggtttccaaataagagcctggagagagggacagattcacagatgatagcagaaacgtctggaaattacagaccgattgaggtcagcaagaaacaagttattcaatatatcccctgggggctaggaccagacttttccccatggttccaaaattacttggcagtttcattaaggtgaaaggtagcacagcctcacaagtgaacgatgtcacttaaaatgcagatggacttgtcaaccaaacacttagagaggatggcattttgatggtctgtctcttcctgctcataagttgctcaaatttgtggcatagatgaatgggagtaatgaggattgtaattgaagtatttgaccgtatacgtatgtctctatctatttaaaaattcaggaaatcagtacggctaagaagtctgatgtccaggcagaattatttacaacgcgagggagctgtcctcaagttctggtgctgaaatatagagtcactagtttcatttgatgtgcctccacaatatgaaggaatgtctttttctggctctgagtagagttgctgcacaaccatccaggaccaatgtaaagctaagagaatacttatcccatggctagaggataaagttttagagaacattacagggaaatattctttggacctttttagtgcattaggaataagtagtgtcattcacatctggttcttctttcctttacaggcaccccaacactgagctttccagactccatgcagttatatgggctcctgcagttatgtgagccctgaataa

SEQ ID NO: 59096 - DNA, 1399 bp, Bovine  19866880558398
  misc_feature (1)..(1): n is a, c, g, or t
nccccaatggccagactctgggaaataactccctctggtcaatccttgactgcccctcaggccagtggcacagtctgaacagggaaggaacgtgggaaggagtccacacactgaatggggaaaggaacgttcatgcacatttgctgaccagtggttggtcccaccagaatcaccttctcttcttgcaatttccaatgaaaagtaggataagaagcaacaaaggccatggtcaagcccttggtttctggagtcagacccatctctgccacctggctatgggatcagcctctcagagcttcagcttcctcctctgaaaaggaggactggaaccctttccttccagtcacgatcgctgtgagaattaatggaagcaattgcaggtaaatggcgagggaaaggtttcataacatgactgtcttctccccttccctgtgcttaaaaatatccagtacttctgctaaaaggcatcgtaatggaaacagatcttaccagtcaagtacgttacaaaataatgttgggaggagaaatttcttggtacagggacaagtatgtatgaaataccacttcccaaaatattgctcaaacatgaaaaaaaatcccaaattccttaaggttttccactcatatatgtgaacatctcctgctcccacttgccaagatgcttcttggctttcctatgatgtcttcaatttccacacttgttttcagctcttctgccagagccatgtgcttgtttatttttactacatttttatgacgtttctgctatagcaataagttttgcattattagctttatcaaataacagaatgtctgggtggctggcagatattattggcctggtttttatggctccatcccagaatactttttgtgattactttcttaagttgttcttagatccattcttaactatgtgtttgtgcccttattaacacatttaagggctaattattatggtacaaacttagcatccgtgcaatgccaattgctataatcttattgttattacttaatcacatgttagtgtactcaattccattccacagatgtacgtaggaaagttgcttgtaaatctaatgtttatgaactgaatttctttttatattcattaggaaccttccccatccaacacagagtattacaccttgaaatatctgtttggcaagttcagtgtgtttggggtatcgagtttcctgaaactggagggaaaccttgttacaaaacaaagagaaacagacaagcagatctcatctctgcaatgtgtagcttcttctactgttcttatttgactggttaagtctatgaatgacttggttctatcttgagaggcatagaaagcatgtactccctccactaatcaagtgggaatctgaggcagaggacagggtgtatcttg

SEQ ID NO: 59097 - DNA, 1867 bp, Bovine  19866880744349
  misc_feature (1)..(1): n is a, c, g, or t
ntgccaggtgaagagcttattcatggcagggtactctgaaccattgtcacaggtcacctctcatcctgccttacccactgatgagcatttcctacacacaaagcattatgggaggtttaacagtatataaaattatatggtggctcagacagtaaagaatctgcctgcagtgggagacccaggttggatccctgcgttgggaagatcccctggagaagggcatggcaacccactccagtattcttgtctggaaaagcccatggacagagaagccgggagagctacagtccttggggtcacaaagagccggacacaaccgaaggactagcacacacacaagagaccagtggatctgtatttagagacgtgtgaaatgggaccattggtccacatgatcgctgaggttctgtaattatcagtggaaataatttggagaacatcaacgagaaacccacatccaggaagtggccttatcggggggtgtccaagggtggcctaggtctcccagttctgcccaacgaggggctcacatagcctcaggtttgtagcagccctgaacttctaggcccaaacacaccctgggaatgaacgggagactcagccccagccattcttctagaagtccctaggttttcatttgctttccacctttgagtgtggggatgtagacagaggccttttgttagccaagaaggaggctgccaggtggcccttctactccccagcagcatcctgtatccctaagaagattttcatccaggcgtcttccagtttcaacactggctttgttgactgactatcaccacgcatgttgaattacctctttttttcccctgaacaaagagggcattcaggtgaagttattggtctggaacagagaactggtcaatcattgttgttattatattaatggcaagtattctccagtaattacaattattagaaatagaatgcccaatagcatatgtcgtttatagtcactgtattccagttacaaggaatgattttgtttcaactaatgatggcattgtgataacaagcctgggtctttagatcagctgccagatcccaggtaccgacaagagtaggaagaggaagatgagggaaagctgaagatggatcacagttttcagtcttgttcttccagtatcagctgagactcctggcttcccactggaatgggctttcaccaggacagctaccaacaaggccatactctcgccttcaccaaggagggaggggctgctggtctccaagtggttttggaatcctctgctaggtgacctgagccccccatcaagcccacgcacttaataactatgattcttggggaacaaaggcaaacttccatgggaaagcacatgcattgagaagaatttatcctcaaaggactattttgatgttatttctcatctacactgaacgacagagtcagctatacttgatgctgtgttgttctggctccagcctggctgagctttgcgaggaaggcgaggctcacctagcgcccatgagcaggctcatagaggagcttcctgcagcccctctcttcctgaagttcaaccagagcctttctccagagaaccgctgtgagatcagaagaggcaaaatgaattctgatttccaaagctgtgcttgaaagcctctccccaagtcccctactaccccgatagcgctgagatgaatccattgccaggacaggtattgggaaacctgcagataccaaggtcagtcctccccaggactgcagaattagtaaggcagggaaagtccaggcccaggacaggctgctgaaataagccccatgcccagagataaggcaggccaagggcctgtcccccagcaggacttgaagaagctcaggtca

SEQ ID NO: 59098 - DNA, 951 bp, Bovine  19866880791245
  misc_feature (1)..(1): n is a, c, g, or t
nagaaggataggggaagcacttttcctcttaatgagggagagggagccccagagggcagcagggagcaaagaggaaaagcctgggttgtagctctgctttcttcccagctgtcaaagggtattgaggactcagctctcttcacagaaagtcaagtttaaggtcagtgtcagggatgttttgacatttctactatccctcaaggcctgtgagggcggaagctgtgaatgtccaaaagcagacaattgaccttagaagtgatggggaaatggaggggaagagtggattccttctgggttcttacagggtctggtggggtaatggctttagtgcttctggcactctgatatctcactagcccaggcaagagctgggaaatatgaaaagggttaatttatgacccctggtagggaggtggtgctgctggcttggatctttccttcaaaggaactacagggacttcccagagcatctttttgcattccattgtgggggcaccttgtgcatggcggaagaccctgcttcatccgttttccaggcaggactcaaatagagcatgccgtatggctttgagtttctagacaaccattcctgacagcaccagggctgcccccaccgaacacagacttgcaagaagtgggctgcagcaagacagcccaggcccgggattggagtccgaccctgctaagctcctcttccctctcccccttactccagtttctctgcagagggtcctccagccccattccagaggtgctaaaagcccttggggacaaaggccctggcccctggaggggttattattcaagtcagtggttccaatgagattatcctgtctaatgaagcagctcctaccgcctcccctaagcctgaactttcactgctggagagttcccagccaagtggaaaattagaagggagaggaatggaagaaggaagggggtgaggggtag

SEQ ID NO: 59099 - DNA, 1150 bp, Bovine  19866880837472
  misc_feature (1)..(1): n is a, c, g, or t
nccaccctgccctgagttcctttaatccatgacagccagatcatatcatggacaaacataattgggatgatggccaagacaccagaactttttcaacaacacactacggaagactggggcttgcctcctgggctgttgtctcctagagctcacgtctgaagttttagctttcagtagagtccctgcccaggagggatggtagactgcagtgaggggatggacagacagactgacagacagaaagggcaagacctagagtccagagacgtccttgacatcttctacatctcctgatggagagtctgtaaaagtataacatgatggtggcctttctcagccgaacctgggggtggggtgagtgctaggagagggcaggccagaatgacaatggtttcatgatcaaaaggcagcacttcgacccctccttccctgaagccaatctctctggcctccatctcataaaccagtctcccacatacagcgaacagaatgcaatcctgccagagctctcctctgctgatgggaatggaggtgataattccacgattctcccatggagggcaaagggcgaggctgggtctgttcccagctgtccgtatgatagatgaggtgacccaaggccatctgctcagcatctccatccttctcttccccttagagccaggaaaaacatctctgcttccttcttcctcctcaagatgccaggtgggaaacacagtgactgctcagtagctgctggaagagcccagaaggacggctggtgatgcttgtgtgatacttcaatgtctgttcactcggtaggactttcaacccagttggtaaggaggaaatgtgagccctacaaagagaacaggggcatggggcagatgacacagcctacttttggattttggtacccatgggggctccggggaccaacacttgcaaatcccaaggatgactatgcaatctcatgagattatccagttgtggaattccacattggaagggacctgagagatccattcatcctcttgtccagggtaggaagccagtttagtatgtggattctcctcatttctcctcccctgtgaaccatccagctgcagtgggattatccagaaagggggaagacatcaacaccacatcaacacttcattgccagataaca

SEQ ID NO: 59100 - DNA, 871 bp, Bovine  19866880896129
  misc_feature (1)..(1): n is a, c, g, or t
natgcctaaactcttttatctgatggtttgggtgagagaagaacaaacaacgagatctttgtttcctaagttgagactcgtcatttcacagattatgtcagaactcatcaatttaaaacttaatatagggtggccttatgccttaatgctaaaaaaaaaaaaaaaaaaaaaaggttctattttggcccaggaagccccagaatgaaagtatttgaaaaccacacaaggctgactcatttaaggggaatttaactcaagtgctttggggcagtggggcaaggagggcggagacttggaaatgaacaccctctggagcagaatgctggcttctgagtcacaggatcagagaataattagactttggtgattttagccatcagtaaaccaacccccttattataaaaagggaacactgtttatttagtgttctcctgccagactcagaatattcctattgttcatcgtccccagacttaatttctgataaagctcacggtcactgtggagggagtgagagacagaactgctgatttatgaagtctctgcttggggaataaggtgagggttttgtaatattgtgagtcactagaacacagatctggggcaaggggagatgcattttctaaaagattaaaaagaagcaacaagttttccttgtcctttatgctttccatagaataaaactatgctgaatataatatattttaaaaaaaatgatctggaatccatcaggatttgtcctgtgctagagtaatcatcccaaacatgaacccgtcaatgtaaatgtacagatatttctggtcaatagaaagacccagtaaacagaacagcaggaacaacataaagtactgcatattttattaatgtgttt

SEQ ID NO: 59101 - DNA, 1042 bp, Bovine  19866880934875
  misc_feature (1)..(1): n is a, c, g, or t
naaaacagggaacttttcatctgtgataagaaacacttacggctctgattaggctttcggctcagtcagggaggtcccctggctttaataaaatctcattttccccctaaactctcccatgtggtaggggcccagagtttaatggggatataagagatgatcccaacctgaggctcaggtggctgcagccccccaccctccagcccagcagctgggattgatcgcagagctgccggtacagccacacacaagccgctgcacatcagagaataatcatgagccgtttgatgctgacctgggccaggccaagatggcagccgggctcctgtgcatgcctgcttggaggatggagacgctcatcctcctggtctttattaagaggggacccaaggagtatgccgaccagttccaacatgtgatttattaacggacgtctgcatttgaaagcctccctggctttaatctacgcctgatcccttaaggttcccatcagcactggctgatcatgttcatttggaccggggcacagtggtccaattcatctcccctgtcagatgcaattctttcagggggtctcactctcagttctgaaaggctgattcacaatgcttaataccacccgacggactccttcacgagatgggcaggatgtcacaacggcggagctgttgggagatgccaggtctgagccagcagagtctggagggaggtggggtatgagcagctggtaattagaaatcaccggtgggtatcagaacacatccatcagaaacccacagagatgaacacgccccagtgtcttcaggagagatgggagctggtggttggttctgagtttttattccactattgcataaggagcaccacttgttaagcccttgaaccccagccctaagactaagactaagaaatatcacggctagcaacatgatcttcacttctggacaaatctgtgtgaagcgctggcaccaacagggaccatatcacttccatacagcaattttatcaccaattcaaacaggcacacttgctcttaaatcca

SEQ ID NO: 59102 - DNA, 1596 bp, Bovine  19866880958624
  misc_feature (1)..(1): n is a, c, g, or t
nccacatcctcagctgtcaacacagcatccgccttgtgggactgttaattaccgccttttattatatttatgctgcttaatttttttctccgcaatgtactcttccctctaattaggtgtagtgattagaatctcttttatgtgtgccaggcgtgaggctttgaatgttggaggcactcggtgacttgaaggaaagctgcagacctataaaaagccaaccgcctccttctcctcctgccagctgagccccccagctgggaggggggcacgaggagagtgtgaagccgggttcctctcggagaacattcggaagaaggaggaattagcggtcacacagtggcttccggctcaggagagggccgtctctcgttggtaggaggaggagatagagcaaagacccgtaggattggccctgaaggtattttcaggcatgcccagggccggctcttgaacattgaaagggcaaactgggtccagggaaggcaacctcccgaagacctgacaatgagccaggccatacccagtcacagactcagaagaggccctgcctgggccctcgctggcctgacctttggtggtataaacacacatatgcatgcacacacacatacagacactcggtactcaggtggtcactcatgccctcacacacctttacactcacacccacgcacacacacatttccagagatagacacacacgtgtgtgttcctcactcggcacacacatgagtgctcatcagggcttttggtgacagtatttcccagaaaggcttactgactcccctttcacacacattggtgtaagctcacacatattggtgcaggttccattcagttgtgttagggctgctctgccttctgaatcacttttcttggcaaggatcaccctgctccccatgtcagtgtgaccaggggtgcagagagagagcaacatcgaaggggtctacagtagcttctgaggggtcctgggacctccccgttgttctgtcaagcaagaagcattggtatcctcaaggctctgagctccagggtcacaggcaggaagtcagcacttctggggggcagtggggcccactgacagtgcctgggcagctgtgttatgatcatgtcatctgcagagcccactgggcacaggactggcatttcaagggccctggacctacactgggcttgtgaattccttctgagctcacaaagcatttttttcatacttttgtctgtataaatagaaagaagcattgcctaatcaacgtccactgcctgttctttgcacgtgtattttaatccatcttggtttggtgtgtgtgtgcatgtgcacacacatgtttgcatgcatgtgtgtacgagtgcatttgcacgtgctgagggagaagatggaggcaggaaggaccaagcacattaccgctgacagcctcctggagaggagggctgtatccaggacagagtgtgatcacacggctgtgtgataatgggtccatgtatggaactttctcggggggccatggaggttggtcttgcaacttcaggaccgtctggaggtctgggctgtccccacaggcagggtacccatctaagatcacgattcaccaccag

SEQ ID NO: 59103 - DNA, 1417 bp, Bovine  19866881101563
  misc_feature (1)..(1): n is a, c, g, or t
nctcagatcggccctccagccttatgttccttctgaaggaagagagctgaagattacttgaatgtgtcatggcaagacacctcccgcgtctccctgagaagagagtgccaaagccaccctggccaggatcctgggctggagacggctctggtgctagcgttagtcgctcagtcgagtctgactctttgtgaccccatggactgtaacccgccaggctcctctgtccgtgaaattcttcaagcaggaacactggagtgggtagccattcccttctccacggaatcgaacctgggtttcctgcattacaggcagattctttattgtctgagccaccagggaagcctagaaatggctctagtggggtttaaaatggcttgaggtagaggttctggaggcaggaaacccaggcctagcactgcccactgctgctggtgtgtgaaatgcacacacacacacgcgcgcgcacactcacgcccgactccccaccactccctctgtaccttccttgcactccagggccacgcgggactccaggttgtccatctgcatttgcagccgctttagagtcaggtcactctcgcgggacttgcgcttataggcgatgagcacggccacaatgaagatgataaggaggccgccagccacggcgatgctgacgatggcaggcaggctgagcgggctgtctggggctatgtacaccatccctggggagtactccatgccaccgactcgggcctgggggggacacaccaggggagagggagctgggtatggggacagagcatcccagggaacagacccaagccaccagtgagctgggcaccagggccggatgagggaaatggctccagggaggaggattatcactggctgtgaaagcagatgagcggccatcggggcagagggaggatggatagctcagctttcccccagaactggaaaaaccacacgttattttattcgggaacaaacatggccatcttcatgaggaaatggcattcaactggaatctaaaaaaatcctgctactgctgctaagttgcttcagtcgtgtccgactctgtgtgaccccatggatggcagcccacctggctctaccgatcctgggattctccaggcaagaatactacatgacctcaaagactggctccccgaagacacatcccatcctgaggactgatgactcaggcacaatacgtgacattatgtccagcctgggtcaacaacactcctccccgggaagcacctcttgcttctaacaggtgacttggcgtgcatgtctgctcagttgtgtctgactcttttcgaccccatggactgtagcccaccaggctcctctgtccgtgggattctctaggcaagactactggagtgggttgccattcccttcttccaggggatcttccgaccccagggat

SEQ ID NO: 59104 - DNA, 1680 bp, Bovine  19866881117989
  misc_feature (1)..(1): n is a, c, g, or t
ncaagaatgtggcaatctgcaagctgaggaaaggggcctcactgggagtaacactgctgacatcttgctcttggacctgcagtctccaaaagctatgagataagaaatgtctgtggttgacgccacccagtctgtgatatttcgttacggcagggaaagaagacaaagacctcatctcaattaagccttacaaaaccctgttgaggatgtcttttaataaatgtactggacttccctggtggttaagaatctgcctgctactttaggggacaatggtttgatctttggtctgggaagattctacatgccgtggggcaaggctttgtgccacagctactgaaggtcaagtgtctagagccagtaagagaagttaccacagtgagaagcccactcccctcagctagagaaaagaccgcttgcagtaacaaaaaccaaattaatacataaatattaaaatgattacttaaaatgtgctggccctaatgaaatgaccacatcattccactgagtgcctgccccacatcaggcaggtcacagacacgtgtcaaagctctctccttcgctgtctccgtatcacagacaaggatatgggggcacagagaagccaagatgcagccccgagtcacggtctgtcagtgccagagccaggggctcagccagatctccaccgtgctttccgctgcaaccttcgttaccatcttgtttctgactcacacaataaactctaactaaatgcaccatgctttactccccctaaagtaacttctacaacctttccagcacagtcactcttgcagcccatgtgtgcaaagtcacttccgtcatgtccagctctttgtggcccccatggactgtagcccgccaggctcctctgtccatggggattctccaagcaagaatactggagcgggttgccatttcctcctccaggggatcttccagaccctgggatcaaacctgcatctcctgcattggcaggcatattctttcccactgcgccacctgggaagccccataaatgcttgctcaggaaatggtctggggcagctctggccagggggttgccctcggtgtcaccccacctggcccagggagccccgggggcgagcggtgcatcatcctggagggatgtccagtcttccccttggtgcaggcgctgctggctctcgcccttccatccctgtgcgttgctatgtgaataacacaattatgaagacacaggacagggataagcagaaaacattctgcagcagagacagcggaagggagagccagtcacaatcagatattttgttattgactcatttcagggaagagtagaattctttaaaaccctgtgctattgcagaagggaggcatgatgaatgattagacagattgctcagttttatttttcaacattagcttttatcaaggatctctcccagcccacagtctctgttgggctccatcaccatctctagaaaagccagacagaagtgtgactgggactctgtagtcctgagtctgcaaccactgccctgccctgctcatggactcagcttacccatcagtcaaatgggaggtggggctgtccctgcagtatgtctggggcagaggacagattggttagagtgggcggagcagggtctgaatccggctttatacttcccaacggatgaggtgggaggattactttag

SEQ ID NO: 59105 - DNA, 1696 bp, Bovine  19866881169938
  misc_feature (1)..(1): n is a, c, g, or t
nccccctggtaatcattatcttcagtgccagagctcagcctgattgaccgtcatcatcatctttgtgctcgagagtcattactattcccgtccctgtctttacacgccgccttctttctccccggtcagtgggaacacacccatcgccgtgtggggtactcacctggacctcatacagaacccccagatccgggccaagcatggagggaaggagcacatcaatgtgagtcccgggctagtgggctcggagagggctgtcctagagggtgtggggctctctgggggctcaggcaggctcatctcatacactgatgactcatcgcgtgcaacgcccccagacactgggatagtgggatgcgggagcaggcatgaggccccttccacactgtggctaaaggcatggaggagccattgctcctgggtttctgaggtttcagatccttcttccttcctcctctgatctcctgtggcactccttagcttagagatagcctagtgcctgccacagctgccatgcagagcagaggtaaggaccagcttctgagcttgtccttgaatttccaggtcaggctgttgggacctgtctataacatcccgtgtcaacaccatgctgtacaacaccatggagggaggcctggtgggtggctggggctgtgggtgtgtggagacctgagacataaaccttctctggctcctccccagctctgcgaggttctgaacgccactgagatgacctgccaggctccagccctcgctctgggacctgaccaccagtccgacctgacagagaggcctgaggagtttggcttcatcctagacaatgtccagtccctgctaatcctcaacatgaccaacttcacctactaccccaaccctgtgtttgaggccttcagcccctcgggaatcctggagctcaagcctggcacacccatcatcctgaaggtagattgatgagggaggtaggaggtgtgcaaggggaggctttccatgtcccaggaagaggccaggagtcatggccttttgccagatctcacggtggtgtcactagctagcagaggctgagttacagcccagactacggtaaacgctccctacgagtctgtactaagatgtgcactctctttgtgggtcaccaaagcctagtcagggcagccggatccacgctggccatctgactcccagctttggctcgagtccaggacttgggaggtcaaagactcatactgcttcctcttgcaaagctctttgcaaaccaccttctaggacttctttgcagcatggataataaattaattttaactcatatgacaatttgaatcgactggtagtgactgactacagctctgtgttgagaaggatcctgaggctgcctttgggagaagctgaaaagagtaccttgattattgattcccactgaggaaacgagaatagtagtatggtagtataggtgttatgaattttttggacttaactagggaaagtggcctctccaccagctccccagatggatggggcctcagggtgggaggacatggtggccagccaatatctgtgctcctgactggagtgagaactcaggcgctcctgtccatgcagggcaagaatctgatcccacctgttgctgggggcaatgtgaaactgaactacaccgtgcggttggggagaagccctgcaccgtcacggtgtcggatgtgca

SEQ ID NO: 59106 - DNA, 1540 bp, Bovine  19866881211351
  misc_feature (1)..(1): n is a, c, g, or t
ngtttcaactgttaactagaagcctggggttcctgcaatgaaagcttgactgggaccaagttccactgagtgggacccaaactactgatggttttgccagtcagcaatgccaaggccaggggtctttggatcccactgagaaaggctttcagctctccgcatgtgtctgggtggttatctatgcccttctttcatcccttggtttatttatcaggatccgtttgcctccattgcacaccattgccttctttccacttctggagagtcaaatggagccagcaaggaagaggcacagggtgggagtggcaacaccagggcagagtttcacccactggtctcgtaaccccaggcacagggcactcggacagccagttgaatattcggacagccccaaggagagcctttaggtgctacacacttgaacttaaccttcaaataccagaagattctggggagacactgaagtctgttcagtgactgttgaatcactaatcacataaatgatttagcggcccatgtaagcctggagaaaaagagtccaatacctttttcttgctcttcagccctggaatatcagtctgcagtcaaattgcaaccacaaatgtccagagatctccctccagccccttagagtgtaatgatcccaggtgaccccatatcctgactcatcaccattcccacattgacatttccatacatttttatgggaagttaacaatttaaagtgaagtcagaacacaagaagggagataagatttacaaaggatataagggaggaagagtaagaaaagagaggaagagaagagagaggtcaaatggtaggagagcagtgacagagaagaagacgaagaggaagagaattacctggggatgtgggaagcaggaggaaactgcccagaggtactcacgtgttgtggagcacacaccagccacagtgggggtcgcccgagccaaggcactcgctgcagctctgatactgaccacaggactccacagggactctggtgagctaggacaggaccacaggagagacagaggtcaagattttgtagaacagcctgtagtctaccaggaattgatattatctcatcgggtgtatcatctaagactgtgcggtagcaggtaggggcctagaaccccagatccaaaagagacctggagggattgtatttgagcagatggctgcataagcttcggttattttcttagaagtccctgggaatagacgccaaataatttatatcacattgttatcaaagatatttatatcctgtacatttaaattttcccaccatccaaaccctcaaatatcgctacaaacatgcaattcatcacacatttctctcttatcaatgtaatcaccatagatgcttcttctttctccattcatgtttctctttcaccccccttcccagaccttctccttcaagtttcatcattttttgtggttccgggagagcattgcacccaaatccagtaccttcctctctctctgtaacaagggggtaatccactcgcttcatgctgtcatctgcccact

SEQ ID NO: 59107 - DNA, 1076 bp, Bovine  19866881219415
  misc_feature (1)..(1): n is a, c, g, or t
nagttattatccagccatgtccttgttcctggatggtagattctatgataccccaacctgggtctcacttccattatggtggccaaccacagtgggctgagatctgttctcaccaaacagttaaaacagctatgatgataaaggaaaaaaaaaaaaacacaaaaactaaagggctactcccttgcaggcttcccaggtggctcagcggtaaagaatccatctgcaatgggggtttgatccctgggtcaggaagatcccctggagaagggaatggcaacccactccagtagtcttgcctggagagtcccatggacagaggagcctggtggggtacagtccacggtgtcacaaaagagctggacacgactgaagccactgtgcacgaacacacacacgcccttgcaggagtgtgctattctgtgtttttcttgattcagagtagaagtgagaatataggaatatttaaaacactaacccctccacttttgttttctaaaaacagcattgaccgaacgcaggaagttcatctttaatatcactgtttataagctgttcagcaatgtttacagtggttataattggtatcattaagcttgggtgacattattaatgctgctgattaaattgctgtaaacctaactttaccattaacacagacagccacatctgagctgccggtgttcacactggagcactggggcagggaagcagactcggaggggtgcagtcgggaaggaaaaggaaccccactttctcacctacctgtaggagcttctaagaagttccagttctaaacatctttgctattagtaaagtgttttcactttctgtagcaattcttttgagaactggacatcctgcttctgtaaaagtgaaatgaaaatgttagtcactcagtcgtgtccaactctgcaaccccatggactgtagcctgccaggctcctctggccatggaattctccaggccagaagactggagtgggttgcctttcccttctccaggatatcttcccgacccaaggattgaacccttgtttcctgcattgcaggggagcatttaccgtctagccaccagg

SEQ ID NO: 59108 - DNA, 1748 bp, Bovine  19866881249942
  misc_feature (1)..(1): n is a, c, g, or t
nctcttggtctaaactggtctgtgagaaatgaattcaaagctcaactgtgctgattgttgggcttttctattggctcaactggtaaagaatctgcctgcagtgcaggagacctgggctcaatccctggtctccaagatcccctggagaaagaaattgctacccactccagtattcttgcctggagaattccatggacagagtggctggccagctactgtccacggggtcacaaaaagtcggacatggctgaggaactaacactttcaaccttttttttttttttttaattatttgactgcatcgggtcttagtcgcagcacatgggacctttcttagcaatgcacagactctctagttgtggcacacaggtttagttgctccacaacatgtgggatcttagttcccagaacccgtgcgtcccctggattgcaaggtagattcttaaccactggaccacaagggaagtccctaaccagttgatcttgaatgggcaactgttcctctgaatcccagttttcagatttgtgaactggaggttgtgaattggaggttcctgaccttctcaggtcatgaagtttaacagagaacgtagaggaagcagccaacttgtgaagggtaggcacacaatcctccttccttcccttcccccgcccctggtgcctagacctccactctcctgctggtacaataggaatgatatgtataggtgctcttctgattttataacaaggtcaggaggaagcatataactttaatgagagaaagaaggtgatgatggattgagttcggacaaagcaaaagagcgtttgatgccaagataaagaaattgaagttttttttttttttttttaacaaggagaatcaaaaggtgaggagtgacataataaccatcttcaatatgagagaggttattacgtgggatggtgaccagctgttccccatctccactaaggacatcagaaggaaaaatgcatttaaactgtgagaagcagtctgtagcttagttattaggaagagctcctttgccgtcagggtcgtgaaacattggaatgggaatttatcaaatttcctgtccctgaaggcctctccaaatatgataaactgcatccgggatcatgaatgagatgccctgaggcaggtccttccatcacaaaaacactgcaattcctggcagtgctcgcccgtgacagtgctccctgtaaaccccccatttgcaccgggtagtgtggtgctgacccctccactccccactccacatccctccccgtcttcactccatcccctgcccacctccacctccatccccccaccccacgcccagtttcagccagatctgcctgctctctctctcctcaccctaagtcatgggagagtcactgctcactgtttcaatagtgagtgatgtggtttctatacataatcctagcttataacttctttggcagcctccgggttgaaaggtgcttttaacagagagggagaaagagagctaaataacccttttatttaaaacacacacttttaagacaagctcaaatgtttggtcctttaattgatggcttactgtggccatgattgtccttggcagatcttttgagtttgggaacttggctggcaacttctgtttcaaggatgagcagatcaaagtgcatgtttggggaaggcacagcattaggatcaaagagggaacatctccaacttgggtactgctcccactgggaatcctgtccctgtctctctgtcatgg

SEQ ID NO: 59109 - DNA, 1303 bp, Bovine  19866881263159
  misc_feature (1)..(1): n is a, c, g, or t
ncccccccaccagagcacagctcccaagaaaacccacagggaggagagaaaggtaactataaatgcaaggcttggcggctgaaacctaatacaaggagccaggaatcccagcactgggtgagaccttcaggccacctaatcctgtcttctgttggatgaaagcaccctgcacagctagttactcaatatgtttgccagttataccccattcaaacggcaagtgataagagttgttcacatcattaaatgtaatcagacgtgacttatgaaagagtttgacgcagcattaaaccatgcttatctctactggggccctaatttgttgctcgtgtaccgtgataatctactcataattacaaaaacaaaggactgggagcattccttatgtttcttggttcctcagccttttaaagaggcctctcctctgtcactagcagacagataccaagagccctctgagtgcagggcgtgggctagacacctgtggagtgagctgagttctccaaggtccttctgccaatctggactccttgaagtctttgcacctgagtcttgggtcttctccctatagtggatggtggtccagagggagatgaaaactcagacctgtgcatggatgtctgtagcagctttattcataattgccaacacttggaggcaaccaagatgtcctttagaaagtgaatggataaataagctgtggtatatccagacaacagaatattatccagtgctaaaaaagaagcgagttatcaagccatgaaaagacacgaaagaagcttaagcgtaatttgccaagtaaaagaagccaacctgaaaatctacatattgtgtgattccaactgtatagcttctggaaaaggcaaaatgacagagatactaaaaagatcaatagtagccaagagccagtggggagggcaggatgaataggtggggccctggggatttttagggcagtgtaagtattctgtagggtactatcatggtggtcacatgtcattctacatttgtcaagacccacagaatgtacaagagtgaaccctaatgtaaactctggacttggagtgataatgatgtgttaatgtagcttcattgattgtaacaaatgcaccactctgctgggggatgttgatcatcaggaggctttaggcagggagaggagagcagggggtgaatggggactctgtgtactttctccttaattttattgtgaacctacaatggctctaaaaattaaagtctattttttaaaaaaacatacctatgctggaaaagaggcaacatattgtccctccgtcatttt

SEQ ID NO: 59110 - DNA, 1806 bp, Bovine  19866881539608
  misc_feature (1)..(1): n is a, c, g, or t
ntatcttgcacataggaagcttaaagtcatttgatagactgaatggaaacttagaatatgctttcatctactaacttcactttcctagaggggcaaaaggggagtgagggattaggttactaattgtaaagccatggcaagctcttttgaaaggaggaggaagagaattccaattggctgggaggaatggccgcctgttacgtggggctccaaagagagccaagctgtggactcacagctgccataaccaataaccagacaaagcccacagcctagagccccaaatatctttggtgatgttaactagcttgtcctatatggagaaggaaacagaacattatgttaaagccagcagagctttttgagatcaggctctgtggctttcaaactgtgctctagggaaccctgggagttccatggagcttttctggagactgtgtgagacgtgagggattcctagacagaggggtccaggtgcccttaactctcaaccatcttctacttccattcattttgtttctcgggctttcacacctgattttagttgaagaaaggtttctatggtgaaagaaaggtttgtaccttctccgtatggtccaaatccatccttttagagaggaaataataatataataacagtaaagtgcacagtgcctaaacaatgggccagacatggatctaagtgccatccttgtaatggcttttttagctctcacagccaccagtgggggctggcaagcaatcagcaaagtaccagacaatgggaccgagccctcaccatgtcagctgttaagtatgtgggtgacatccccaggaggagaactaccgcttcctcgtttacagaagacactgggcgcagaatagctatgtggactagctggcctgatgccacagcccgagcctctgtcctccgtggcttccctcaggaagtggatgctccagtcaaacagagccagagctggaacctgagcaagagccagaccccgccccaggccaaagccttcctctgacccttgccagctgagtcttgacccctctgcagggaaactgtgcaagctgagcattcgggtgacttgtgggaccacctgctcacacacatgggacatcctctcactccccagaccccttctctcatctggggtgctggctgctctgttctgcaggtgaaaagcaccccctcctcaaccgatggtggaaggtgaatcaggttagacagatttatgccagagaagatgtatgggcgagggacctggagctccccagctcacaggctctcactctgctgattctagcctcttcccattaaccccatgggtgccagaggagggaggtgagaggtcaccttatagggccttcggatggtaagacggaacaagggtggggcctcctatctttggatgagctttgaccccagaaacagggagttgagtgagactgggggacacttacgaattgtggacgctgcagttgtagaagacaaagctagtgctggcgaaggtcatgcctgtctccttcgacttgagctgcagctggacaacgtggtggtcccctgtgggcagagccggccatggggtcaggtggagggccacaatcacgtgtcaggtcccactgagagcagcacaccttgggaaagggctgcccactccccaggaggtgtggggagctctaacaggacttggaatcagctgggcccagtccagggcagaatggaataatccaagaacagaacagctgcagacagtagttctagtctattcctttttcctcactctagtcccagcatccacctctcatttacttaccagg

SEQ ID NO: 59111 - DNA, 709 bp, Bovine  19866881597617
  misc_feature (1)..(1): n is a, c, g, or t
ntcctgggccactacattcagacgctaatttcttttttctctgtctcttactgttttaccttctccatccgctcctgtcataattcttttcttctttatgtcaatactgccacatgcttttctctcttctctttctctctgatctctcttgccctccctctttcttactttattcccatttcttctcccatttctctcttcttctctctccccacactgggctgttcacagctggtcctggagacatacaatgtcccggagctgacagctggcgtcaactgcacctttgaggacctgtcagagatggatgggctggtgataggcaatcagatccagtgttactccccggcagccaaggaggtgccccggatcatcacggagaacggtgagcagtccccagaggcaaagctgggcggcaagtccttcctcctgctgcctggaccatgagaactcaggacagatgcaggggattggggaggggggagcacgcaggaggggagggttggaggaaaagggtgtaccttggtggggatgctctaggaagacggggatgggagtgtccctccactgcctttggaattgaaaccgggtgagcatccaggagtcagcctcaccatgggtgaggagcaatgccaagagggcgagggagggaacagccagcacagcatcagagagtgccagctttaaagatcttgctgcagcatgggag

SEQ ID NO: 59112 - DNA, 586 bp, Bovine  19866881677162
  misc_feature (1)..(1): n is a, c, g, or t
nttcatgaatataactacatttatacacatatacaaccttacacattatgtacatacaacagcatttgtctgtgtatacatctgtgtgtgtatttatgctgttctatgcttagtcgctcagtcacatctgtctcttttcgaccccatggattgtagcctgccaggctcctctgtccatggggatttgccaggcaaagatatttaagtgtttcagtcatgccctcctccaggggatcttcccaacccagggatcaaacccaggtctcccacattgcaggtggattctttaccagctgagctaccagggaagccccatgtgtatgtatatgaatatgtaaatgtaaatacacacacatatgcatattcacacacacacctacaaactgcactctcaaatatattggtagctcagccattatatgctgattgtgcagtggaaaataagcacttattgtaccatgttagtagcgttgtctttgaatacaaaggatggcatgtcactgcagatcatttcaatggcaatgattgcagactatgcccatcctctcctttctgattaatgagtggatgctgtagcgatctccat

SEQ ID NO: 59113 - DNA, 737 bp, Bovine  19866881480260
  misc_feature (1)..(1): n is a, c, g, or t
ntagtggcaagcagggaaaagggtggaaaccttatgacctttgcccccaattttttagaacagtgataaaataaatagcatgaaattattttaagtgtaccagtcagtgatattaagtgcattcatattattgtacaacaggatgtggaagatataaagaaaaattgaggctcagagagggtacataccttgctccaagtcacacagcatgtgaataacaagattgggccttgagggtttctgcctgagctgggagctgctttcattagaaatgtggccaagtggggcattttggtagatggagtggggtcttaatattcccttcatctcaaacagtcaggaaagcccatctacccacgggatgctgccaagaaatttccacccgaagctcagcagatttcatattcataccctggctagcctcttctacccccaggatctctaagatgctgggaaaatagaaatgactcaaaaatgagttactttaattggatttcccccagtattggtatgcagaggttatcgctgggtgatttactgagtggcccatctcagagtttactgtggcatcccaagtgtgcatgtgtggtgtatgtgcgtgcgcaagcacatatatggatatgtgtggtgtgtgtgcacttgtgtgcttctctgcctggtgtgatgtagacgcacatacttctgtatggacatacatgtgtgtgccccacactttcagaagtgtcacagactgctct

SEQ ID NO: 59114 - DNA, 1127 bp, Bovine  19866880739274
  misc_feature (1)..(1): n is a, c, g, or t
nggttataaaagataagtggcttctatataatctctatctctttcttcatcacacattctgaaagaaaccggttaccatgtcatgaatagactaatgaggtgaggaactgaagcctccaattaataaaatgctaaagtatctagtcccttcagtttatacatgtgactaatcgtttatgtcttttccattaatgttttcatagatctgcattcaatgccactgtttccttaataataataatacaatagttacccttattctttaaaataaagtaacatatcttccccagtatattattacactctgcattttctaatgctactatgctacctttatcaacataagcactgatggtctttaattttaaagtagaatttaatttaaaaatagtgcctatttaagatagatgatttttgagtgtgtgtgcctgtgtttgtgagtataaagtgtagataatattctcaactgtaaaaaatagaagcaatttcttgtcatatatatttcatctttatgtgaaactgtttacacgccaaggtaaagaagaaaataaaaacaagaggaatactttagttaatgtcaaaactgtgtaaattactcatttacaacacatctaaattttaccataaccaaaaatatcctagattaccttagaagaagataagagctagttaagcatttaatgaagataaaaataggattgacctacaaaattagtgagatgatgatggagataagaagttatagttgctgctttaatgagcttttcaaatactcagatgacacagatctattaaagcaggtatcacaaagtcccagtatcatttaccctagctttatgagtttcatgactgagctaaactcaaattttactctctttgctatttgtcactttcatttttaatttgcaagctctaagagataatatttgcaatattaaattatatgtttccctttttaatgcagaaatctgaaataaatttaacagtccccaccccaaattaaatacgctcattaacatctgtgaatctacatgatctttgataattttgcatatttttgttcaaaatgaaaatggcagttgggtaacatgttaagtgtaacacatattttcagttaaggataccat

SEQ ID NO: 59115 - DNA, 1067 bp, Bovine  19866881023078
  misc_feature (1)..(1): n is a, c, g, or t
nagctgagtgcatgattattccttttatgttggtattgttattaatagttcattattcattactccagtaaatagtgtttgtcatttaatattattacttcatgcacaagagaaaattttctgtctggagtctgtggtctgtttcccatataccaatgaattatctatctaccacttgaaaacctgggtatgaatgagtcactggggttaaaatctatagaaaattaggtgtaggatcttctttacctttacaaagacttctgctagctaagaaactgaaatgaaattattgggtaatgtacaggaagttctttataaaattgatcattggattatgcctggtttctacatgggctgtcaaatattaaaaatggcttaccctttttcttatatctctgttttcaagtcactttcacattcactgtcttcagtgatcctcaaagcatctctgtggaaagtgggtaactttctcagttgcacaactagtaattggtttttttagattaaaatttgtttcctgtttcctatattagaattttttctggacctccactttgccacactatcagaccatttcactaatcattgttttatacgcaccaagaaattgtttcctccttctccataatacaaatgcatgtattttatgtcatgttctggggccaaatttgttttaaaacaataagtaaaacatctgatataggtgaaaatcctcatacctcaattcatattgcacactctatagttaatagagaccctggcctaattaccagatgtttgaagatattagtttcaggaaaaattgtctcttgacacactaattgaattgggaaagctaaacatggtatgagaaatactttcaatgttgctccctacaatgtcacacgaacaatgtgaaatgaaacctgtaatattcaggaaagcattactgtttaagacaggaatctccatttttagttttcaaaagtagtatatgaaaaaaatatgtttttgaaattgttgtatttgaagtggatatcctatttagaaagagtgaagtcgtaggcacattacaaaatatcagtgca

SEQ ID NO: 59116 - DNA, 1359 bp, Bovine  19866881106745
  misc_feature (1)..(1): n is a, c, g, or t
ntggcagagatcttgatgataagagatgttgatgcaaaggaaattttcaaaattccagatttcataatatagtcatttcaaaaatagaacacacgttcacaggcaaattctgactatattaaagcctttacttgtgggaatttcttcttttcagagaaagagaaagagacatatttccaagtgtttcatgaactgatattaaaaacaatgtataataaattgggtcattcaaatgatatattcttttcactttcagttttataggtccaaacctgaatgtaaaacttagagagctataagatgaaatattttgattaatcagttttttttctaaagtcaaaaattatttccataataacttctgaagaatctgctttttcagtcttccagaacaaatatcctatttgctttgtggaactcagtgattaactaaactaatacaaacttcctgttgactctacatatagcaacaatatattaaataaactacctagcaccgagatacatacacttataaagtttatcctttctttttgatactttgctggtgagaaaaaagtaagaaaacagcttaaagtcttaaagatagaaagtggctaaagatgtatgtatatggctctaaatgacctttgaattgagtctttctcaattaagagtcactcatatattgttttagaataaaacaaggacaaattatggggtttatttttaaactaaatatgttgaatttaaaggaccttattaattttttaatttaactctcttctcatttttctatgtagacatttatttgcttttacagtgcactagggttttgtgtgtgtgtgtgtgtgtgtgtgtgtttttaatgcactcacttgttaaaataacaattgagacagagtaaaagggcatttctctgtatttattctgtgtagaattatgaactttccataagttaaagttctattctaagttttgtgaactggtagatctatcatgcttttctttttggagccatccttgttaaaacatatggacacaagagagaattacagaggaaacttgttttctactaccagcccccccaaaagaagatggccaacccctcctgctgtgtagactagagcacactgaattctaactggcaattcacaaaagagctttctgtaaataggagcttaacatttaactgccaacataagaaatttagagtaaattgaattttctatggcctcccaggtctagcaatgggaatcaacaagctgaagaagccacatttagctgttgctaagttacagtgaataccattgtaatgtacgtggatgtacattattccaagtgctgtcattaggcactgcggtatacaaagaagaacaa

SEQ ID NO: 59117 - DNA, 818 bp, Bovine  19866881578146
  misc_feature (1)..(1): n is a, c, g, or t
ncatctgaatctattaaataggaaaaactagcaagagttgatagggcacaatatttatgtgcttatatttaaatggaattttaagcactattaatagagcactattttcatgtcacagtttagcttaatggaatagagtcagttatgtaagagcactggtagtgtgtgactgataactagcgtattttaggaataaaaataaattgtaaggaaatttttgtaaaaaaatctgttttgaaaggctgaaatatggtgatttaaatgaaaattctgtagtcataatacttatatctggttagactgagtacaatttttaggaaaaggagactgaatcaactttgaaagtctcttaagaaccacatcacttttaatcactgaaaaaattataggaataagttactgctaatgagttcaacttgtataatattctgaagaagttaatattagcagttttgagtattattaagccaaatgtatacagtcctgcaaaatctgtgtgatgaaaacatatctgaatttaaaaaaaaaaaaactattagtcctgagatgctgaaaatcttaccttgttaatacaccctgaggatggtgttaggattgaagtttagttgtactcatctgaagtttccaatttctaagttaatgaagagatcccaacagcttttctgtaatgtcagtaaagagctttaatgacaagagattaatcagtttccaaggcagcaatctttggggatatctaccccattaagacaaggaaaagaagtggcaaaaatttatgtcattaacaaacaaaacaaaacaaagaaaaacaggcgagagca

SEQ ID NO: 59118 - DNA, 1698 bp, Bovine  19866880420587
  misc_feature (1)..(1): n is a, c, g, or t
ngaaaccaaatcatggaaagaaatccccaaggagcatcggttagaatacccttccgatgtacacctttaatcaagattcaaaaggaagacagccagttccctttggaaagttttatgtaatgaaatcaaccctgctttgtactcccagactaattattggatttattcttcttactcaatttattgctaggtatttgggcatttttcattaatattctttattttactcaagaataatatataaatagtaataatgatctgacctgacctggtgtgagaatgattttagagctaatattaaagactaaaatattaagggagttttgtgtttcttaaatatatttaactataaagagacttttctgatctattttgtgtatcattgtgggtctaggacttgtaataataaagctgtgtgcccatgtggtgactgtcatcctggaaagaaaaaattgggttttaaagcctcatggtgataaggcggacagtaatgcctgtatgttccacctaacgcagcataaacattggcaagtttaatttctgtttccacatcagagtcttccgcctttcaccatcttttccattcactcacactttgtgcttccctctcatcactcattatttccacagatatttattggtaccatctatgaggcacactcggtgcgaggaactaggggaagcagacaaaagccacagtgctgtcctcagtgtgctcccaggctggaggaggggaaggacctgtaaacagtgaagtcgagcagatgagatgtgaaagcacagaggagcaggcattaattctgcctagggtagaaaggagccagagaacagtttacaaggcagatgcttttgcaaggatgtaacatatttcctgaatgaccagcttatgatggagggaaggaagaagagactgggtagatggttgagattcatgacaaaaaggtctttgtacatgaaacaaagggatttggatttaatgggaagccattggaaatctttagcaggagagtgacataagcaggtcttagaggggaggaactgagagagaggagtctaggataaatgaaggtggggtgaggggaaatcagtagagggggccacttaggatgccactggtatccaaaagggtgataagggactgatgtaaagcttgagcttgtagggggaggaggagggggaaagaagaccatactccctctaattgtattccttttaaaaatttgattttttattggaatataattgctttacaatgttgtgttagtttctgctctacaacagcttgaatcagctatttgtgtgcgtgtatatatatcccctccctcttgaacatcgctcgccagccctctatgtcatcacagagcaccaagctgagttccctgtgctgtacagcagcttcccactcgttatctcttttacacatggtagtgtgcctacgggcttcccaggtggcacagtggtaaagaacctgcctgccaatgcagaagatggaagacacaggttcaagcttaggtcgggaagatccattccctggagtaggaaatggcaacctgtttcagtgttcttgcctgggaaatgcctggacagaagagcctggtgggctacagtccgtggggtcgcagagtcagacatgactgaacacacgcacaatgtgcgtctgtcaatacaactctctccgttcatctcccctccccttcc

SEQ ID NO: 59119 - DNA, 1766 bp, Bovine  19866880452391
  misc_feature (1)..(1): n is a, c, g, or t
ngcccagtgcagcccaaaaaataattttaaaaagcagcagcagctccaaacactctacaattccaagatgggccactgaaagcttggcggcagcacaatgaacctctttgatgattatctgttgcctccatacctccctccttcctaatcgcagggattcagaaggtcaggagaccatcctgtttgtctctggggcctatggatctacatagtgcttggcttattggaggtccttgaaactcaattgcacagatgtgcaaagcggatgccgaccatcttaaccgtagccacaagacagatggacagtggagtcagttctagaactctgacctcacagtccattgattttttgcaaccacttggtgtcagaccaaacagaacaaagactctgatctcatccaggggcgtatgcattcctttccaaatccgtaccaaacgggaactgccacccgacacagagcatcccatgtccccatcctccctctcggcagcggcatccacactttcgcatggagaagcagacacaacactcgaaacggctcttaagacactttcctgctatgtgatgtataaacacaggaaacggcagctggctgggttgtgggtaacatttatttgccagtcagggtgctagagctctgtgtgtgagtttcaagcagtgatccaggaatgaaaataaaccagtaaagcagaaactgaggtgtcctgattgtggttctaatggaaaaactcagattggcaacccagctctgccatttaaatgcatgttagataaccttctaagctcccattttctcatttgtcaacaggtctattaataataggctttcagtgaagagtgacttagtgtttgcaggagctgaggctagtaactggcacataaaggaggattaaaaatggtatttaccatcatgttccttgcagtttatccaaagcagttgaaaactctgtccacacagaaatctgcacacagaggtttacagcagtttagtcataattgccaaaaattggaagccaccaagatattctttgttaagtaaatgggtaaataaactgtggtacatccaggcagtggaatgttattcagggttaaagggaattgagtaatcgagacgtgaaggaacattaaatacacacacacatgcatgctcagtcatacctgactctttcatgactctgagaactatagcctgccaggctcctctttccacagaatttttaaggcaagaatactggagtgggttgtcatttcctcatccaggagatctttcccacccaggaatcgaacctgtgtttcctacatctcccacattggcatgggattcttttaccactgcgccacctgggaagccctcattaaacacatgttagcaagtgtaagagaagccaatctgaaaaggctgcatattgtctgattccaaccagatgacattagggaaaaggcaaaactatagagatagtaaaagatcagtggtttccagaagctgcaggggatggagatagataagcagcaagtggatcatagaggatttttagggcagtgaaaatcctccgcaggatactacaataatggacacttgtctttatacatttctccaaacccataaaatattcaacaccaagagtgaacctgaaggtagactacaagctttgggcgattatgatgtgctgggctccaaaatcactgcagatggtgattgcagccatgaaattaaaagacgcttactccctggaagcaaagttatgaccaacctagataccatgtt

SEQ ID NO: 59120 - DNA, 1692 bp, Bovine  19866880542294
  misc_feature (1)..(1): n is a, c, g, or t
ntgttttgcatgaaatgttttcaagacttgaattcatttctaaagcaaataattttggtttttaagtaacaaacaggccatttctcctcatgaggtgtttgccagtctctttgtggagtgtacactgtagtgtatgcaagccacgtgtgatgactaagggcaaggctattactgcccttgtgtatactgtagtctccacgggcatcaagatgaaaacacaggaaacagttaaatggtggttcaggccttgtgagggaggaggccaacatgtgccctaggaattcagaggagggacatggctccctgtgggcaacagtcgtcaggacaggtcttgaggtggaggagggacatttccagtggaaagtcacaaggaaagaactggtccaattctcagccctccatccctcccactctgaccaccctacgttccttatgagcagcaagtgggctggtgggtaggtgctacggtgttagtgtggacgcaaccctgtgactttggggaaacctttatgcaactcagggccttgaggtgcatgtcaaaaggaagatctccttgtgaaaagccctgcgacgtcggaaactgtgagtattgcccaaaaagccacctgaaaaggcttccatcccatcaggtcaccagcaatacttgccgctgcaccggccttgcacttgttaataagacttcattttattgtttccatgctctgtaatttctcccatggccttttagatggaacagttaactttccacatttgcgttaattacatgggggagcctccaggctacactgcacaataaaaagaccaactagatcttttcccaccaccatctttttgtttctttataatccaaacacaatggatcctgtccttagaccctcccgagaaacaaccagatttgttaatgccttcgaacaaagatgcgaagaaattcaacgcagatggagcagaatcacacagccatgcagatttgtacaggcccgcgggctggacagaattaatacactgggagctggaaatttttaatataaaacagaaaatatcacctatggcactaaagttccttttgtgatgagacatgatgttctggttaaagtggagcaaacaatctcccagggcctgtccccaaggcacaaagccccttgttaggagcagtttacagttttccccaaggttaagcttcccctcacctgtcaacaataggcttccaaatcacttttcaaactgctacctcaagatcaggagtaaattacaagagctaacaggataaacacacaaaaacttaaattgaaaaaattaaacgcaaaaaaatgtggtttatcttctaaactctaaagtttaacaaacaatccttaacttagagaaagatttaaaaaacaaaaaagcatccaccaactgttaactctggtcagggcccaaaccaaagtggagacaaagttctcttgtccactcagcactgcagcccccacacttacttccaggtcttgaggagtcagctctcaaaccaaatctgcagaaaatcacttctggctccccagctaaccaccgaggactaacttctcactcacacagcagaactgctcaaagaagcatcatggcgggtatagggtcttccggcttcccaggcgcatgcgcgctgggcgttctctaacaaccttgcctgattcctaataccgcacacttgttgccgggctg

SEQ ID NO: 59121 - DNA, 1516 bp, Bovine  19866880888543
  misc_feature (1)..(1): n is a, c, g, or t
ntgattgggttgatggagaagagagaggaatcacttggtgaagatgtttaatactcacatataaggtcaattaattctccatcactgttggaaagaggcaagatagtgtcttgtgtggtactctgattcctatgcgtgcctagtgtgggctgtcagccttaaaaaggaagggttaagaaagtcttctgttgtttttcactctgctgcattcacattctctataatgagataatcagataaggagagtggcttgggcacacatctaaagctggctggcccctgggaagagaggtaaagacacataccaaaagactgcaagggtttccctgatggctcagcggtaaataatctgcctgccgatgcaggagacacaggtttgattcctgatccgggaagatcccacatgacatgaaacaactaagcccgtgcaccatgaccactgagcctgtgctctagagcttgggagccgggaagcccaagcagcctagagtccacgctctgcagcaagagaaggcaccgaaacgagaagcctgcgagtgacaactagagagctgccctgcttgcctaaactagagaaaagtggcgcagcagtgaagacccagcactgccagaaatagataaattaataagattactaaaaaaaaaaaaaaagactacaagcacagattcacctccaggctcaaattccctcaggattattgttgtttagttgctaaattgtgtccgactcttttacgacctcacagactgtagcctgccaggataagctaagctattataatgggaatgaatcttaagtctacaaacccaggtgtgcaaaacatatcaaatttcttaatttcctttaaatcaaattgcttctgactcaaaatcgctaatcaatttgctggcaggaaattaagctgcagtcattactggagttcctctccccaagaacatacacaggtccaaaggtcaccagtgctaaagcactggcgaggcccttccggtcactgtctgctgagtagcccagtgtctattagtttgtcccttcaggaccattgcccacctgtctctacgctacatgcagaacacaggaaaaacttctaagacttgagatctcagttattggggttcagcctctttaggttcacattggaagcacattacaagaagcatctgatacatagttggagcctcgaaggcttcttgaaagaatgctctttctgctaaagcattctgctttgtctgttagactcccttcttcttctcttgaactagctaatcaatttttcacttttttccctccccttctggtcactccagctctggtccctcaggagtcatctggcccactgctcactcactctgcagcttgctggtatcattcctgcagagataaagtaaatacctccaccatgcaagcaatacattttttccctagggaaaaagtattatagaccttccttggtgggccagttgttaagaatccacctgtgaacgtaggggcatggggttttgatccctggtcgagtaa

SEQ ID NO: 59122 - DNA, 731 bp, Bovine  19866881066657
  misc_feature (1)..(1): n is a, c, g, or t
ntaggtagaaattcaaagaggaattgagacagccccaaggatcctgagatacctacatcagagcaagatgctgtactctcagggttaactgagttttttacgtaagatctacatgaattcagagggaggagaaatccttagttttgagcaggagcatgataatgtataagcagtaaggcctcgctgaatacttcgtacacacaactctcctgactaatctcaagaaaatgtgtttgtattttgatgtgaggacttgctatgaacaaggttatgggacggaagaaacagacacgtgccagatgtcaacaaccagaggaaacgatgggaccttccactctccagagtagggacagtaaaggcaaggagttggaaagacagaaagtgagcaaaaggtaccctgctgggcaacatgttgaggaaaaatagtgccagtgactaattctttttttttttaatttggttgctttgttactttgtaagttgcttaaagattactcaagcctttgataagttcccaacatatccaattttctaccatcacatcttcactctatcttttccagaatttctggtcttccttagagacagaagaatattttgttttaatatttatttagctgctccaagtcttagttgtagcacaatggatcttcaatcttcattgcagcaggcagcatctgtagttgcggcatatgaattcttggttgcggcctgtgggatctagttcgctg

SEQ ID NO: 59123 - DNA, 1838 bp, Bovine  19866881230787
  misc_feature (1)..(1): n is a, c, g, or t
ntccctcaagcctccacctgggcttcccttgcctgtgcagagacagcactgagctctaggggagtggtgtgcagcacaagctttctgtgtttccagagcccaccagttccacctcccaaattccccaggatgcacttcctggggccaactcccaccctcatcacttctgctttagtacctttactgtcccagttgtggcctggccaaggtcggctactattaactgcagctcaagatcacagagttctggaggcaaaggttggggaccctacaaccagctggacaaggatttcacttctggctccaccacttttcagatagggagcttcaggtatggggctacatgtctgagccttctccttgaaaaatgggaggaggctggagctgcccagcagaggggtggggacacagggggagaaaacacacgcgaaggacagcagcaggcctggtgtggcatcagcctgcaaacctcggcccccaccatctccccagctcacagcacaatcccgggcttgttcttcctcctgctcccagatgtcttctctaaactgcattcataccttctaactttacttctgttagtctcaccttcccttgttgtggggacctggaagcccagactgtgtcatttactatccatcatcttacatctatgagtgagaattctctctcaatcccagacaagtgaatgaatgaatgaacacaaacaaaaaatggcttcaagctccagttttctgagaccttgtgataatctcttccaagtctctgggagaaaaagctgggtggggactcaaattccccatttgcaaaagccgtggactagagaattccactcaggatgccagcagttcgtggtgaccgctgagcacaggcacgcacctggacacattaaccatcagctgctgaagttattttcaccatccttaacaaggaatcgaagcagcaggacacacaatgactctctagtccttcccacacccacacctgttggccttctccttctgagttactgaagttaaagctcatgtatcaggcagcacacatggccagctctactgggactgatctgtaagtgatgaatccctgctcgtccctgacaccttcactcctgaaatcccatcattcccaaattcttgtggaatagatagcagtgttgccctctgactgaagcttctcttcaagcagcctacattttacagtaaacaccaaggtctggtagacaaaaaagcagaccccccaccagaaaaaaaaaaacaactggcttaaaactcagcattcaagaaactaagatcatggcatccagtcccatcacttcatggcaaatagacggggaaaaagtggaaacagtgacagactttattttttggggctccaaaatcagtgcggatggtgactgcagccatgaaattaaaagacgcttgctccttggaaggaaaattataacaaacctagacagcgtattaaaaagcaaagatatcattttgccaacaaagttctgtatagtcaaagctacattttttccagcagtcacgtatggatgtgaaaactgtggtgctggagaagactctggagagtcccttgtactgcaagattaaatcagtcaatccttaaggaactcaaccctgaatattcattggaaggactgacgctgaagctgaaactccaatactctggccacctgatgtgaagaacaggctcattagaaaagactgatgctaagaaagattgaaggtaggaggagaaggggatgaaagaggatgagatatatagcattactgactcaatggacatgaatctgagcaaaatctgggagacagtggaggatggggagcatggtg

SEQ ID NO: 59124 - DNA, 987 bp, Bovine  19866881411478
  misc_feature (1)..(1): n is a, c, g, or t
ntagctataaatatttggtgcatggattgggaacagtgagggtgatgagacagcaaatgaggagtgaacaataggaactgcaggtgaagagagccaagcagacctctactctgagaaatagcatgaactaaggagacacgcagagtgcttacacatgtgcatgccatggcagataaagacgatcatgtcctcatctccagaccttacacagcaaaaaggacttcacagaagagtaagccaaagatcttgagttggaaggatgtactcataatggtttgtaagggaaagagagagggagaaagagaccgatgggagataagatgacagaagcacaagttggggtgatgcattttgaaaacggaggaagcggccactagccaaggaatgcaggtgggtctagaagctggaaacatcaagaaacattctctcctagagcctccagaaagaatgcatctctcttgaaatcttgagttgagcccatactgccctgttgggacttctgctgtccaaactttgagagaataaatttgcattgttttaagcccctgaacttgttacagcagcaataggaaactactatacatgtttttggtcacatgtgcttgagttcacgaaatctctcattttcacaaaagacactttctaactcattatgattcatgtccctgcttcctaaaaaaggtgaagtaaaaactcaagtttccagaaggacatgtttaccctgacggaactggcctctcaaagggcttctcatgttccccactgtgaattagcttctctgggagaacggagcttggttagtgaagattagaacaacctaccagaagtcacacaaaaccaacaggtcacagactttctggaaaagcctcaaagtaccaggacccaaccattgataacaaatagtagtatcgctttacatgtgcctgcctttttgggtttttattacgtttatatacattgctttatttgattcatccaacgtataaa

SEQ ID NO: 59125 - DNA, 5111 bp, Bovine  19866880493873
  misc_feature (1)..(1): n is a, c, g, or t
ngctggatagaaggtatgtctgtggtatttctaactttttgttttaaagacaccttacaacagagcaatttccacttgaaaagaaatgcttacacaaacaaaaaagacattttctgagatgactttgatcccttactcaaattattggcttaaagattttgtatcctcaataactgctctttattgtccttgttcagctattacttttcaacttatcatttattaaccttttctttgtaagtaaccacacctggccttatcaaaaaaaaaaaaaaatggtgcaacaaatacttgtcttctgtggtaatgggtttccctgggggctcacaagaacccctggagaagggcatggctaaaagaaagctgagcaccgaagaactgctgcttttgaactgtggtactggagaagactcttgagagtcccttggactgcaaggagatcaaaccagtctatcctgaaggaaaacagtcttaaatatacattggaaggactgatgctgaagctgaagctccaatactttggctaactgatgcaaagaactaactcattggaaaagaccctgatgctgggaaagattgaagacaggaagaaaagggaatgacagcagatgagatggttggatggcatcagtgacgctataaacatgagcttgagcaagctctgggagttggtgatggacagggaggcctgccttgctgcagtccatggggttgcaaagagtcagacatgactgagtgaccgaactgaactgaactgaacccactctagtattcttgcctgaagaattccatggacagaagaaactagtggctccagttcatggggtcacaaagaatcagaaatgacagagcaactaacactttctcttttctgtggtcataagacacataatttagttcatctaggctatctttccatgagaggtgatcctgttattaaatgccctcacagtaaaaggaatccatgccagacacctggaaggcagagggagaaccacttacccagcatgtcgctgcttcagaccaaccttgacatgactgtgtagacactcctgccccaggtgttcctcatgtttactcagcctcccaatcacaactgtacctttcccttacaaacatgacctttcacttaagataacaggacacattgccaggctgaaaggatcaccctcagcccctgtgaaaagaccttgagaaacagactctgtgctcctcctgtgagaactctgacaggactgttacattacctggatgaaatcaagaaatgtcaggggcagcaagtcatccatatggccaatgtctttagagaaacgattcaaaattcttcctgcaagaacaggacacaagaaattacttccccagataagccctttaagagaaataattcatgaacaaactaaaacaatatttttaaactatatgcatttattatagcgtcatatgaaataagctgatgtcagtggtaaagaaagagaaaataggatgatatctaaatagagataaaattctaccaaatagcagtgggtgggatgttgaaattgagccctgatttttaaaagaatggggggaatcttgtggcagcatcaagaagagttggtggatttgagaatcttctctccttttagatccatcctatctaagactcattccaagtgctaagtcagtgaataaacacttgcaaaatacttcaattaatcccaatcattatactaattttgctttagttatcaaaattaattttgacgtgatacttttaaaataaacactattataatctctctgtaattttttttcccccacaaaatggttcccaacaactcacctttcaggaaattgtagattcctgtcgtcttcatgttgtgagtttactatcatggtaatgtcattattttcacaggtgtacccgatgtgacaaacatagactcatgcttaagcatccaagaagaccagagggacgtaggcaggaaaatggcaatattatgtaatgactaaagatcacttatcattattgattttatttcccttctcaaaatccactaaaacagtatatcctaaaggctgcaagactggaagattagaattgatttctaatgaatatctagtcctttcatgatcaaatttaaagaaattgaagctacacacatgcgtgcagacacacacgactttggtatagcaactcctgttacctagacccctgaatttcttttataactgagactccaggaagccaggctgcaggtgagacgtgggaacctgacctgctcttcctgacctctgtcagagatgacttcctcccgaggcctgcacagcaagccatagcaagaccatgaatgagcagcagctgagggctgaatttatgtggcctgaatgtggctctgcttcctccacagggcatctagctggcagaagcacagggtgtgcccatgccaggagctggagctgctggaatatttcacccttggccaggccatcacagcctgtgtctcaattttcctttctcaggtttaggaaatacagactccagaaactgtctctcagtgacacttttgcaggcccagtgacaacttttctgagcctctaggaatgcctgctttagagggcaaatctcaggatttaacaggctcatgcaggtgaaaaaacccagtcatgatgccacataaattaccaagtgctcaaccaccaacgtgagatgatgactctgagccccaggttctgcagcatcacgtctcctgggaaagtccaccaggagctgcaggaaggtcaacctggtaaaatgcagattctgactcaggagtgctgggggagccagagagtctgcattccctccaagctggcaggtgacgccctttctgctattgcccaggcggttttgaggggcaagaaactggttattatttaatcagttgtgcttcaggaacattaaaatcagatgggcagttttgcagatactcttacaaaagttgtgaccactctggtcatttttatacttctcaaagtagcaatttttaaataaagaaaatatatgtcaaaaatatttaaaatgtggtttaagtgcttgtaattctttgaaaaatgcaactttttaacactggcaagattcagaaacactacaagtatgatttggcttagaaagtgttgaaggaagtattgaaaactttttaagattaaatgaacagtgtgtaagactcagcactcagctaggtgaagagcctttcccctatggctacagaggcactgggaagaagtccaccaatagctgctttgaaaactatggagacaagtttgcagagaatgatgtaattggctgctttgcatggctcagaggataaagcgtctgcctgcaatgcacgagacccaggttcgatccctgagttgggaagatcccctggagaaggaaatggcaacccactccagtattcttgcctagagaatcccatgggtggaggagcctggcgggctacagtccatggggccacaaagagtcggacacaactgagcgacttcacacacacacacacacacacacaccactttatctttctctggatatgtgaaccttaaggtctgagagaccaagggttggcaaagagtgcaaaatacaagaacagaaacaatgagaaaaaaacatctccccacacggtgaccacacaaactgaacctaatatcaaagctcatcaaaaaactaagcacttattcagcagtgagctgagtgtaaagtaatgtgagatcaggaagttcaacagtttcttccttgctctaagaaacattaagagaacatatggtgtttgcagaatatttcctctggctttgggatagactgggcttcctaagtggctcagtagtaaagaatttgcctgccaatgtagggagaagcaggagacaggggttcaatccctggtttgagaagatcccctggaggagtaaatagcaacccactccagtattcttgcctgaaaaatcccatggacagaggaacttggtgagctacagtccatggggtcgcaaaaaggaggacacaactgagcgactgagcacattttaactacagctgtgatttcaagcccacagccttgtagtaataaagttttctcagaagtctccaaatgaaatattaaatccttatcatgaattcctttctcatatatgccataactcttcatccaaataacatgaggcccctgatggaagatctccagggatgtagagggaagaggaattcagatgaatggtgggaacacaatccatttttggactgttctgtgttcgaggatttctcacattaaactgaatcttgtcttcctggaacatccctacttattctgcctttatagccgcacaaggtgaatctaatttctcttgatatgacagcctttcaaatacttgaatgaaatgaatcatattctttctagcaactattccttggtgcctcaatgctccctcataaggcatggccctatattgtctgcagtctcttgaccagactcagagagccagtctcagctaatgccttgtgcccaagtcttgattactttagggtaaagtggtatcaccacctcccctcgtcctgcatagccggtcacaaagctacaaccacagtaaattctacaggccagatcacttccatctgtaagcacaggtcgatttttgggaacaattgaacaatatgtgtaaatcattctaagagtgcatcccttctgacccagaaaattcatgtctgggattacatccccaggagtcagtaagtgcatcaatctgttgaatgtggcatatttataaagtcactagtagaaaacaacctgaacaagtctgaaacaagtctgtaatgtattacgcacaattttaattttttttctttccattcttatttctctacactgtattacttgtgtaaaaatgtaaagtagaggggggacaagaaggaggagaaagaaaggggtgatatggaggatcaggggaagggaagagagaaaggcagagagaaacaggggtagagagataaccccccttgaagaccatgacatccaagaaccaatcaaggtcctcctaactgctctggttcacagttttctgtcttgtccataagacagaatatcacaaaagatgccattgaa

SEQ ID NO: 59126 - DNA, 798 bp, Bovine  19866880541216
  misc_feature (1)..(1): n is a, c, g, or t
ntgctggatgaaggtgaagcctgggaggacggaacagtaaggctctgcccgctgcccaaagttgaactccaccgcacagttcttcaccaggacgtgagggtagagggcctgaccccctaaggcttccttctggattcggaaggcaatgcccatccacttcccatttttggtgaaggaaagttccacgtcatttccacattcaaagtcctaggggaaaaaagccaaagaaaggtaagttccaatgctccaatgcataaggtaccaggaaccatgagtcagggagcagatgtaaggggtggaaacagcttgcgccccagattcaagtgcagccctcctcaacatataaatgtgtctgccagccccaaggaatggctcagaccatatgcagcccaaggccctctttggccataacccagaagtgaatgtgaagtgtgtaacgttaggaagttccaagtatttgaatcttgtgcctagcctgagatggactggaagctgtcctgtccattctcaactcccacaagataatggatggaaagaaattcacagcagggcctgttaagtcaagcctggctccacaagtgcatccatttatatgttcaacacgtgctccctgagttcccgctcttcttgatgcacattctagtcatctgagcctgacaagcgttcagagcctagtggggaaccagacaaggacattatcctaattcagtgagaacacccatgcaggatcaagattctctgaggaggaacctgtaagccaagtcctgaacaataaatggggaatgagccaagtttggg

SEQ ID NO: 59127 - DNA, 1253 bp, Bovine  19866880602164
  misc_feature (1)..(1): n is a, c, g, or t
ncctggctttagaaatctagtctctccctccattgtcttctcacacagctcatcacttccaacagtaaaacatgtcattacatttgttactgctgtgttcccagtacccagccaggtgtaatgaaaagttgtcagtcgatgaatgcatgctcatctcaccttcgtgcttttgtaggtgctggtctctctgcctgaaacactgttcccctaaccctgagtctcagctcagactccccatctttcaggaagacctcctggacaggctgggccaggtgcctcctccgattccaccagtcccagggcttcctgcaggccagccctgatctttctggactgtcactatctagtgacaagtctgtctcctcctgacctgtgcgctctgggaaagcagggccgaggctgtttattcactgctatgttccctggagcacccagcactggcctcctgctttcaatcttaacacagagactcgtttgtacattttgagagtttgcccactaattcccagtgtctcaaacgctctcccttttcctcccaaccctgcggcttcccctggagcagcaataactctactacaaccagataactgagtgctgactttgagcaaccttcagtaataggtaataggcactgttatcattccattttacaaatgaggaaacaggcccagagaccctgaaccacgcacagaaggccacaggccaataaatggtggcaggctctgagtgaagggacccagcagcctccagctccccttgtgactcaccgtggctatcaaaggtcccgtccagcgttgccaccgtcccccgcccgctgaactcctcggcctgacctcccagggcctcctgcacagcctcatgcccaaccaggaccaccacgcgccgccagggtcccaggtacacggtgaacactggtccgtacttcttactcagctgggagcagggagcgaggagcgtgagtgatgcggggcaggctgctgcctctcaaagtctgtctccatcgcgaccccttgtctctggatgaaccacctaagaggaaccccttctgcttctgcctcaccccaaatggaaacagtgcctttgggagattcagttcttgttttgtaccaggctcccagccccctgcccccgaaagctctgcatccccaaactccatcacccaacacactctctggtccccatccccttaccctgcagagccctaacttctgatgccaggatgacccaagacccaccattactcccacaactca

SEQ ID NO: 59128 - DNA, 1359 bp, Bovine  19866880672548
  misc_feature (1)..(1): n is a, c, g, or t
ngtatgcaccttcagggaaacaaaggtgagaagcctttcaagataaaacaaggaggcagtggcagaaccaggcccggggctggggaattgagcaagcagtgctagctggcgacaggctagcgggatgacagagggaggagtcagtgtcctcagggagccggcagtcccagggagaggtgtggccctggccctgtgcaaggtgagcacaggcctgagtcagacagccagccccagctcagtttcctcaagtctctcctccccagggcccagctttacagtcagccagccccacctctgccactgaccctccattatctcccatctgtgaagtgggttcacagtgctcctcttcccccatctgtgaagttatctgcccaacgcagggccacacacatccacaaagctgtctagaaatgcccatttctgggcctctgcctcttgcacccaaaccgcagccacattccaaggctgagctgccgaaccaaaggctctgcctgctcggggctcctgcacttgttgagcctcaaatccaagctcagggtcagaaatgaggtcaaagccataggctctggagtcagatgggcctgtgtgtgaattcagcctctgctgccttccagctgtgtgaccttgggtaagcgacctcccctctcttggccttggtttcctcacctgaaacatgagaccaggacccagctgctaggggccttgagctctagaaccacatggcttgggcttatgtcctggcactgccagttactggaagtgtgagttgtccgtgctgtataaattgcctgacacagtaaacgctcaagccgtgtttgctgttcctacaagttgacatctgtcaagcagactaggagagggtgtgtacatggccatcggcaaggagggcaatcagtgagattctggaggacttcctggaggaaaggatacagagccagcatcgctgacgacctgcagtaccacagttatggaggtgcgggggtgcagcgctcccagcaccaccgcttcgcatgtgtttctgatcagccgctcccggctcttctccgctacgcctgcggaaatcaggggtgggtttgggctgtcaggctcttcctgtccagctggctcacctgtctccatatgccccacccaagcctccagaaaagggcctgcagtcttggcccgggaagaatttgcgggaatgagagaggagtcccagtgggagggaggcagggcctaactgccacccacttaatgcctgccacctccagcgcccaccaagggagcctcccaggggaggagaacctcagagctctcccatgtccagtgctgctgtccattcccatcccagtgcacccagccctggggagtgagggg

SEQ ID NO: 59129 - DNA, 1068 bp, Bovine  19866880745378
  misc_feature (1)..(1): n is a, c, g, or t
ntccctgtccctcaccatctcctggagtttgcccaagttcatgttcattgcattggtgatgccattcagccatctcatcctctgacatatacctgctcttttttagattcttttctcatataggtcattacagagtattgaacagagttctctgtgttatacagtagggtcttattagttatctattttataacagatgttttaaaatttttcattcatttaagcactatactcagaatcaatgcattgtcttagcaaattatctcctagagagcaggcatggaaacattattttttttaaattgaggtatgtttgacttacagtataatgttagttttgggcgattctatagttttatagattataatctaagggagctgacctaacaggtgttttcctctttgtatgattttctgagattatgaaatttgcattaaattgtgggtcataggcatctcttttggaaccagctaagcagataagcagaaaaggttttctgatactccagtgctatgtggtaaagccagaatttaaaacaacaagaaacaaacaaagaaaaatccatgcacgtgctaactatttaaaaccatgtgaactaggctaatgtgcttttcctactgtgtgtgtgtgttggttgctcagtcatatccaactctttgtgaccctagactgtcgcccaccaggctcctctgtccgtgagcctccagggaagccttttcctactaagtcattacaaaaatattatttatgcttttcacagtagcagcagcaggcctatcgcccagaagtgaagacagagatgaagcaagaagcacccaccagcttcctcccacccgaagcatctcaacacaaaccagacagcaattccagagtcgcaagaggccttatgaagaaaaccggggacgagggtactttgagcaccgagagaataggagggggcgatctcctcagcctccggctgaagaggatgaagatgactttgatggcacccttgtggccattgacacatacaactgcgacctccacttcaaggggcctgagactggagtagtggctacccgctcacg

SEQ ID NO: 59130 - DNA, 662 bp, Bovine  19866880777369
  misc_feature (1)..(1): n is a, c, g, or t
ntctttacagcagctggtcggggcaaggggcatctcccaagaggccctgagtgtgagcaggagtgtgagggcagcgagggagtgagccaggggacagctggggaaacaggaaaaaacgagcccagaggggctgaagtgatgggggtcatgctgctgaccttgaaccacacacacacatacatgcacacatacccacaccaaggctgagggatgaagagacctgctcaggtcccagggcaccattttcccatcccccacacaggtcacaatattaactgatttctctctcttccctcctagtctccctcttaactttctggaccccgcccaccactgcccagctcactattgaaacgatgcccccccttgctgcagaagggtcggatattcttctacttgcccacaacctgacagagaatcctctagcctatgcctggtacagaggagaaagggtagacaacagccagctaatcgcatcatatagggtagacactaacgcaactaccaaagggcctgcacacagcggacgggagacactttaccccaacggaaccctgctgatccagaacgtcacccagaaagacacaggctcctacctcctgctcattacaaaggatgatttacagacagaaagacaaactggacacctccatgtactccgt

SEQ ID NO: 59131 - DNA, 683 bp, Bovine  19866880783053
  misc_feature (1)..(1): n is a, c, g, or t
nccctgatgacctcaggtttctactgaaatgtcacttttttggcaagaccttcactgactgtccacttaaaactgcagcctgatccccataccctcctccttccctcttaattttcctgcacagctcttggaaccacctaaccctcttatttttactaattatgtttccatttgtctgctttccccactgaactgtcaatctcttgcttcgggtggtctctctaggtctagaacagtgccaagaatatagcaggtgctcgctaaatgtgaaacaagtgagtgagtgagcactcattccctgccacccactctctatcccctctcccatccctggagtgactgatctcccctctccccacaggccacacagagcccagtcctgggcattggggggagctgagctggacgccggtcctgcccagaccccaggacaaggcggaagcagcagagggaacgccaagggccttagatgctgacccccctgaggtggaggaccccggcggtgagtgccatgctgcacgcggtggctgccagccgcctgcccgtgtgcagccagcagcagggtgagcccgacctgacggagccggaaaaggtggccatcctgggccagctgtaccacgaggaagccggttggtgttcctggagcgcttccgcacgggcctccgggaggagcatctggcctg

SEQ ID NO: 59132 - DNA, 3137 bp, Bovine  19866880828284
  misc_feature (1)..(1): n is a, c, g, or t
nccttgcctgggctggggctcacagccagctggaatgaggcctcgaatgagtgccttgggagccctgccttctcctcccctgggctgaccttacctcttctcactgtggccagtgctggccatctgtcctggattggggggtgaagtcttctctattttttgttgttgttgccactggggatcctggatctagttctgggtctggtttagaactgtagggctttggccaaatgaaggggtagggatgaagtcagggtctctgtactggggtgggaaaggattctcattttctggggccccgttttcacagctcttctcacccttctctgtctcttgcggtttgtctctgaaattctgtacgtgtctccgctttggcctctgcatcttcttgtctcttttttatgtctctgttgctccccgtctctcttcctctgtgtctctgtctttcaccatctcttctgccccctcattttctttgtggcctttctctttgctccctgcttctctctctccacagtttttctcagtcgctctctcctcctgactgagtgtctgtctgtctctcacgcctccaagaggtggagtgcagtggacaggactgaagccagactgaggatcaaggaaaacttgggagaagggcagggcaggcaggaacctcactagacagggcctcagatgtgaagggtacccccgctactgcccacctccacttctgcctctctcctaagccccccacctgctctgattctatccttgtctctttacccccagaaactgaccacactcaactcctagctaggtcagaagggcaggttgcaaaaacctgaagggggctaggactctagttccttggagggtaaggtgtgcgagagagccccagaggttaagagtctgcaaggccaagtggaggttttgttccgccctccacctcccaggcaaccaggtccattggtaaacaccatggtggttgtttttcacatggagggtgggggaggaagtgcttcgaggtcctggggaatttgatatcccagatctcaggcccctgttagggtggaggtggggcctgtgttactgtttcagtcccagaaaggctggttagggcaggtcctggaggaggggtaaaggcttgattatgggattatggatctctagtttcccttggcatgaacccctacttcttggggagaggagtagtacttgatgtatgggaaccccacaagtgacttttctctgaccccagaactgggttgagaggggcctcttgggacttgccttagtggggaacttgagactcctgagaaagggagttttaaggggctttgagttcttcttatggtctgacttgctgccctgctgcagaaggaaggtagggtagggaggggatgtattgtgagtttccttagcctcaacactgttgacatttgggctagtaattctcttggggtggaagctgtcctgtgagtggcaggatgtttagcagtatctctggtttctacctcctagatgtcagtagtaacccccctgccaggtgtaaaaataaaaaatgaccccggatattatttaatgtccacttgggggcaaaggccaacccagttgggaagtgaaggtgtaatgggagaaactgaaagacacccaagggcagctgaactttcctgatctccaagtggcctcttcttgactttcaacacatacatttaaatttttaaaaattaatttattttgtttttgggtgctctgggtctttgtttctgcacctggcttttctctagttgtggcaagcaggggttactctcttcgggttcgatccctgcagttggaaagaacccctggagaaggaaatgacaacccactccagtattcttgcctggagaatcccatggacagaggaacctggcaggctacagtccatgaggttgcaaacagctggacatgactgaagcaacttggcatggcatcgggttactctctagctgcggttctaggcttttcattgtcgtggtttctcttattttggagagtaggcccgaccagggctcagtagttgtgaatagggcttagttactctgtgtcatatggaatcttcccagagcagggatcgaactcttatccccagcattggcaggcagattcttaaccactgaaccactggggaagtcccaacacttacattattctctgccctctcaaacctccagaccctttcgtccctctgttgacggtctcatctcttatcccatagaaaaagcagcatgctcacccacctaccagaatctgagccacatatgtagccttgctttcctgacagagaaaaggcaacatttccttcttctttttttttttttttttgtgtgtgtgtgtatgggatcttaattccctgaccagtgatggaatccgtggcccctgcagtgaaagcgcagattcctaaccactggaccaccagggaattcccaagtgcagcttttcctgaaggtgacagggcatcccacccctgtcactagctggatggctttctttctctttattgcattgtgttttgtgtggatgtgggcagatggacttttttcctggtttacaattctttaaggtaaaatttacatgtaatgaaatatacaaattgggactaatagatacaaactactacatataaaatagataaataataaggtcctattgtacaacatagggaactatgttcaataccttataataacctataatggaaaagaatatgaaaagaatatatatatacacacacacttatatttatataggggcttccctggtggctcagtggtaaagaatccacctgccaatgcaggagacacgagtttgatctctggtctagaaagatcccacatgccttggagctactaagtttgtgcaccacaaatattgagaccgtgctctagagcccaggaaccacaactattgaacccatgcatcaccactactgagcccgtgagcctagagtctgctcctcaagagaagcccatgcatcacaacgaaaagtagccctgttcaccagaagtagagacaagccctcagagcatgaagacccagcacagcaaataaataaatgaaattatttaaagaaagaattgaagattgaaggcaaaagaaaaagaggacagcagagg

SEQ ID NO: 59133 - DNA, 1350 bp, Bovine  19866880857919
  misc_feature (1)..(1): n is a, c, g, or t
ncaccacctgggaagcccacggattacattattaatacatgaatagatcatcaatcaggaaatcatgcctagagagcagtgatacaggacctggtaaacactccagtgtcagctactcattgcacattaatgtttatgattagtaagagctttggacttggcctctcgttccattctccctccctcctcctctttgtctggcgctggctgggactaatctttgtcagcttttgttgccagaggagaaacctattgacaggtactaccacctcttttctccctctctcccaagtctctgccttgggagaaggggacagaggagcagggatttctatacccctggctcacacccagacacctcttcatgcccgcctaccctctccagggacagtgcccacacacttccatatgagcaagggacacctctgactgcctgatccaccacacttcagctccacatcccttcctcaccgaacttcccacagcccacccctgagcctagaagggtgcctcacatctgctggtgaatgatccccaaggacggaggcaaggagccaccctcagatcccacccacctgagtctcaccctcaggaaggatttgagcaggccttttctgtccatctgcagaaggttccccaggaagggcagaggacgggggccaggcgggaggcggccatgggcctttgggcggcctctggccaggaggaccaagagtccagtgagcagagcaaagagaaggagcacgctgagctccatggccgaagtctgacggtcttccaacctgctgggcttctggctgagccttttatactaagcctgcgccaacacccagttatgtaacaccatccattccctggtgtccttcgagagtctgaactcaaaagagaaggagcacacacttcctgctctgacagtcagctgaccttctcccctgatacctctacagcccttccctagatactggcagagacaccatggtagcaataacaaggtccgcataagcctgtttactttgtgggtatggagagaactcgttgtctccttgctttagctgtgttagtgggtttgtgtttacatactttggtacatacctgcttgcgtgattcttacacatgaaagagggtttgtatttatgtgaacatgcccatgtgtgtttctgtacatgagtgtgagtgtgcttactcatgtgtctctgcacgtgtgtggacttgtatgtatttgtgtggtgtctcacacctgaaggtgtgtctgtgttttcatggtggtagtggtggggtgggtccatgtgtgtgagtctgtgtgtatgtgtgtgtgtgtgtccgcatcagacagtccctgtcactacaggg

SEQ ID NO: 59134 - DNA, 1702 bp, Bovine  19866880960105
  misc_feature (1)..(1): n is a, c, g, or t
ntgctgccctctgaaggtgaggaagctgaagctgctgtctcaccggggcaggggagagtccgagaggaactccagtgattgggttggctcctcccttcccttctcagtccagccaggtttgttcttacctcctagcgctaaaaaagtctcaacccccagccatccaccccctccagggccctgtttccaaccacatccaaggcactgaaggagagattcatgaggagattcacgtattctcctttccttcctaaagtggccacagactagctaggcagttaacctggttttcctatcctgtgataagcaaactgaggttcagagaagtatcccgccttgggctattcagttcttgtggtctccccctaacccccctcctgtaaggatggatgaccctggggagaaggtgctgggcaccctgtggctagggagattcccactgacctcctgcccctgaagggctgcctctggctctcaactaccaaggtaacaggagggagagcaaaatgggacaaattccagctggggtggggagaccagcatggtttcagcctggggggagccctggtccctgagccagttcctgcctaagaggaaagctgcacagaggcagaacccaagatgggatctgagggaagagggcggggacgccaggagcacagcctcatgcctggagggcagagcacggcctgtgccatcatccaggcatcactggtgcagggcagcgggcactccctacagtgccttgtccaaccaccaccaaaccatgaactccaggccagggccctcacacccctccatgaaagacaagtaatgtgctggcaggctgaaagggcctatggactattgtcttgtgcagggctcctgaccccagattcctgaatgggcagctggaagcccagaaggcctgatgactgcccataaactccaatcaaatgagcatttttcttaagacagggtttggttttgagcagattaaaaaaaaaaacaaaaaagattagtaactactactctaaaacaaaaacagggagtcaagaaaagacccaaagacagaagaccaagtaaacagaccagagccagacaggaatgaagtgagggacagacagaacagagaagatggaggacacggactaggatggggcgggatgggcgggatggggtcgtgacctccacctgagccagcacacagccacccctggggaagccggcgtgaggcagacatcacagtacagcatacaggggtgcagtgcggcccagcaccaggcatgctgggcatcttccctcagcctggcacggacctcaccactgccacccacccctcccggttcctacctgggagacagactagacaaacaagacatgcacagtggacaggatggcctagatacacttggatggatgaaaaaataagggaacaggaagaacacaagacgggcagacagagacacaaaccttgtctgcttgctctaaggcccatgaacagacatcacggggctgctgaccccaccagggctcagacacagatgcagggctatgaatggcggcacctctcttcagggtctttgagaggatccccggcaaggtcaagaatcgcggtgactgtgggccaaacccacagcttgcaggtgcacaaactaaggcccacagggcacaagagcccacagcgagctctgacactccctgcaccagggctgcctaaact

SEQ ID NO: 59135 - DNA, 3191 bp, Bovine  19866881005012
  misc_feature (1)..(1): n is a, c, g, or t
nccccagcttgcacctactctgctctctccttaaagaggaacgacagtgttggaaacgctgaagatttatggcaccacatgcacacttcctccttgtaggatctgaaagatgcaagcgggagggtgattgtcatcttcactacataaagttactgcagatagcacatgggaacatggggtctctggacagtcccccccaactcccacgatagacaactgatgtccccactctgagctttattttcttcctgagctgtgcaccccacctgacttagcaagcactcagtaaattccacagataacttgccaagtacctaatacacaccaagtactgttgtggtataggatacacagtagtgagtgaaatagacaagctaattgcagatgctgagttctgataggaatacgactgacatgatggggtggtggagctggggaacagtaacgggtgatcaagggaagcctctgggaggcgacgtggatagagctctttgatgctcgcatggtacttggtgctggatgttgcatgtgtggagacagcttaggcctagtctttgaccaggaggaatccttccccacctcaagcctgtgtgtgtccatcttcccctaaaactaaagtttggacttgctggctagaggtgagaatacctgaggaacgagatgggtcttcaggcaagtgaatctctgaagtgtggttttaggtaggagacttgagttcacatcctctgccactgtttcattctggccttgggcaactgacagctccaagcccagtagtgatgggtaagcctctccgcttacactaaccttggacaagttccttaagtttctgtgcttccatttctacctaaaatgggattatgacggtcccccttcaagttgaggcagggtatgcatttgagctaattaaaaatatgcatggtgagttctttactaaataactagtatcccagatgagaaaggtgaggctctgagagtagtttagcacagtcaggaagtggtttctgagaagaaatagtgattgtggttggacatcgcctagcctaaggcccgacatataatattcactccgtatttgagagctggggctatttttggcaatcaaagggctgccttgttctgctgctcctcagcacaggaaattccaaggtggtttttccatactggcttctcttgttctgtctctggggacacagccgaggggcctaggtgtccaagccaactcagaaaagatggaattgaatattttaacctgcctgtctgggcccttctgttgaggggggtgacttgttacttggagtggcctgggctgccttgggtctctctggatatttccttgtgctggcaactctcaccctgtccttgaaatggttctgcctgggtagcagcctctaggtggtgtgggtgaaatctgggactggtttaaggaggggaccagacccagaacacaggtttccttatgctactgccaagggagggcaggaggaagctggagaccccattcctgccttagccactgtcttgctcagagtccgtgatggcttggtccttggtgtttctcggtgtcgtcttgctgtctgccttcccagggcctagtgccgggggccgccccatgcccaagctggctgaccggaagatgtgtgccgatgaggaatgcagccgtgagccttaggggtccgggggggtggtgtgtggagggcttgggttgctagcctgtgtggggggtgccttcactcccttctatattccttctccagaccccatctccgtggctgtggcccttcaggactacgtggcccctgactgccgtttcttgaccatacaccagggccaagtggtgtatatcttctccaagctcaagggccgagggcggctcttctggggaggcagtgtgagtcttgggagaacagaggaggaaagggtagagagctggggtgggagcgtaccctacttttttacctacagggcaaatctgagggagtgaactgaaatagagtcggcagggggtggctgctgtgatccactctttttctttctttagcaattattcgggcatgtcctgtagtgccaaattgctatagacaccgaaggtatgataaagaatgacgcttttattctaatggaaggagacaagccatcaaaataccaactcgtgtgctgctttaagaattagtataaagtgactgggtgaataattcacatggggtggtcagggaggactttccagcaggcgactttaagctgagattggactgacaaggatggagccagctaagtgatcagggaggagtaagtgtgcacaggacttgagcaggaatgagcttgccatgttcccagaacccggcttttaactccttccccaggttcagggagattactatggagacggagctgctcgtctgggctatttccccagtagcatcgtacgtgaagaccagaccctgaaacctgccaaaaccgatgtgaagacagatgtgagtatcttgggggctggcaggaatctggaaggaggatctttgggttgtagtgacaggcgaagatgctcctaacctcggctccctggcagcctagctgcgtgcactggaacagactctctgccttttcttatctgaaagatgagtgatttctaaatcctagtttgagagctgcagagttgagggctccaggctaatttgcatagcacttgtgcagccagacctggtccctgaggctgcagcatttgctaaaaccactagatcctttgtggtgtgaccactggttttctccccactgtttcccctttctctttttcagatatgggatttctactgccagtgagctcagtctatgctgtcattgctgttgtttctccccgactttatgcaaatacatcagccaagtgcaaactgggtgtctgtggtctttgtggtggggatctagaaaaaaatgtttcccccgggtttctgaatctagccaatcaacccaccaactgtggtgacaaaagtggttactaggcagagtttcatggactgaaagctccaagctcggtcgagttgggctcctaagcttagctattacagacaaataaatgagaagatggaataactgaacagccaaattggggaattatagtgtcctctctagaccaatacgagaactattgaactattgggaatgagccaatgggaccatgaggaagacaaatcacagag

SEQ ID NO: 59136 - DNA, 1209 bp, Bovine  19866881103204
  misc_feature (1)..(1): n is a, c, g, or t
nccagcaagctctatttcccaggttcccctgccagtttgggtgtagcgggaatctggtgggagacaagagaggaaggagaaagcagcatctgggtcctcacaggagtttgaggcgtatcacccaccacagtcgtcatggagaaagggtggctgtggacctcagcagccaggccagagccagactgtctgttttcatctagatctgactgctcccatgtccccaacagcacccagcaggagctggcttcaggcttctcatctcagggggggcctcccttcttcccttttgcttcttcagctcttccatcacggctgttgtgaccagttccctgcattcagttccacttgcccaccccccgtctgaagctctcaaggggtttctttctgctttcttgactggatgtgactgtcacagtcctgagcagataactgggaataactggagcctcagcacactgtgaacttgagccactgaagaagaaactcttaagtttttgcttttctttttgaacctcttaaaatcaactcccttgtcactttagcgggttagagctggtaccagccaactgttttggagaagcgaggcccagaggaggaggagagggagggtgcctgtccagggcctttcaccaccccgcccttcatacttaccttttcctgtttagcagtagggtctagcatgagggtcccatcagagtccagagcacaagtgaccccacagaagagggcccgcatgggcacaccagcgtccaccagggccatgcaggcggcattcaggcaacaggccaggagccacaggcagtggttaagtttcttttttcatcttttgtttttctttgaccacactatgtggcttgtggcatcttagttcccccaccagcgactgaacccaggccctcagcagttacagtgcagagtcccaaccactggatcgccagtggatgttaagagtttctactgaaagttggtcagcagaacacatccatgcctccggttcaccaggccagtgccgtgaacaccagacatctaatgatcacagaaagccagagtaatcctgggatctagtatccttgggttccaaacctgaactgccaccctaagctgtgtgaccttgaacaagctacttactctctctgagtctcagtcagggatcacaaggatacttagcaggtatgcaccttcagggaaacaaaggtgagaagcctttca

SEQ ID NO: 59137 - DNA, 1089 bp, Bovine  19866881196645
  misc_feature (1)..(1): n is a, c, g, or t
ntggtgaaaagagctacagaggcagaaagaagctgggagaggaagggggacaaatacaccaaagagatggagagacggattgcaaccaagcaaggctgaggcaggagagagatggttgagcatagaggaaggaaaaagggccagatgacgtgagacccagaaagaggtggagggacccagagacatgtatgtgcagcagggccccagtctctcctgacatgaaccctgcgcctctggacccaggagaagtccatcttcaacagcaagtgccacgagcgcaacctcatcgtcactgctctgttgctcttcttccctggccctgagaccaccagcaccacactccgctatggattcctgttcatactcacatacctgcacgttgcaggtgggcggactggggacagccacttgggggaggggcgttctgacccctctgggggctgcagaaatgggtctagtggtcttctgtgaaccagaaaggcagtgttcccctcttataccagaagcactgtagggtttctttccctctttggccgtaccctatagcaagacaatcatatttcccccaccagggattgaacccatgccccctgcattggaagctcaaagtcttaactactggaccaccagggaagtcctggagcactggaggttctgaatgactccaaaactaagccagcctagttggtggatggatgatgaagaatctgccaatgtagggggttccttggtggtccagtgtttaggactcagtgcttttactgtcttggccccaggttcaatccctggcagaggaactaagatcctggaagcaggacagcatggctaaaaagagagaaagagagagaagctgtcaatgtcttttcctccatcacttaaggatagacccatccatttatccatctgtctattccttgattcaccaattaaactaattcatcatctgattctttcatctatgattcatctaaggacatacacttccattctttatttggataattgattcctctgttgatcttttaaaataattattcactgaatgaattgtcatcgatacatggtcccttattcattcattcatccaca

SEQ ID NO: 59138 - DNA, 1176 bp, Bovine  19866881201341
  misc_feature (1)..(1): n is a, c, g, or t
ntgtctatcttggtgggggttaggtctgtgtcagggtggtgttagctggcctgtctttgggggtggaggtctgcattccccatacatcacctctctttttgacactcccttcaagcagacaccactgggggctggactgatcctggggatggagtgtggtggggcatgctcagccgggccccaaccccctccttcccctctctgaccgagccccccctcacatgactccccaggcctgaacaagactgcgtctttctcctgtgaagcccacaatgccaaggggatcaccacatcccgcacggccaccatcacaggtgacaggagagggagctgaggagctgggtgttagagggtatgggcttggggtcagaggtcagagctggggtagagggctggggaaggagcttcgggcacaggatcagtccctcccctcatctgtccacagtgctcccccagcggccccacgacctccacttggtttccacccagccgacggaactggaggtggcttggaccccaggcctgagtggcatctaccccctcacccactgcattctgcaggtaggtgagaccgcagcctttccttgcctccatctcagccctccttccacccagagccataagccctcatcttctccctgggataccagcctttcccagccattcatttgagaggcagtagaaccttgggataagccagatgtcctgggtttaaatcctagctccaacaagctgctggctgcatgagcttgggcgggtgactcaacgtccctgggtctcagttctctcatctgtaaaatgggcataacggtagtcccaacctggtagactggctgtaggaattcagtgagtgactgcatttaacaaacttaaaatagtatctggaacttggaaagcatgcaataaactattggctgcttttggaaattccctagccatccagtggttaggacttcatgcttttgctgctggggggaacgggttcaatccctggttggggaactaagatcctgcaagtagagcaacgtggcaaaatacaaacaaaaagctattggccgttttcattttttaaatgttggtgaaattgattctagccagaatagaaaccctgaaacagcagggaccagggccatctttcaccactgggtgctcacagcccttgggcttctcccatcc

SEQ ID NO: 59139 - DNA, 986 bp, Bovine  19866881413634
  misc_feature (1)..(1): n is a, c, g, or t
nagctcatgcacagcaggaagtgagacctggagagggaagagggcacacttctgcttttcttgggggacattggatggatgtgggttgggggtacagctggtgtctgacctggcatttgaggtcttcccaaatcagcccagcttctgggattgaaacagttttagcctttttagccactggggaaggcaggtcacttcccttctctgggtctcaatttcttatcttgaaaatgggaagatgaataatcattactttctggggttaaaatatcaagtgaatgtgaggttgtccccagggccagggtcttataagaaaggtagctcctgtttaatcaagccccactggctctaaatggcctttcagaagtgccctttgggtttggcaagacaagggtttggatcccacctctgccacttcctggctttgtccttgggcaagttgcttaactactctgaaacttagtttctttttgaattttttggccgcaccatatggcatgcgggatcttagttccctgaccagggattaaatccatcccccatgtggtggaagagcaagtcttaaccactgggccaccaaggaagtccctgagccttagtttcttcatctggaaaatgagtgtatccatagactctactttacaaaacactcaaacaagtatgtgttaagctgcaacacaaggcccagcacatagtggctgtgttattgtttttgttctttagttgcgtctgactctttgtgaccccctggactgtagcccaccaggctcctctgtccatgggatttcccaggcaagaataccagagtgggttgccatttccttctccaggggatcttcctggcccagggatcgaacctgtgtctcctgcgttggcaggccgattcttcaccactgagccaccagggaaacctaagcacatagtggacatgcaataaaaattggtcattgggaatttcctggtggcctaatagttaggatcctggg

SEQ ID NO: 59140 - DNA, 779 bp, Bovine  19866881549982
  misc_feature (1)..(1): n is a, c, g, or t
nttccagaaggtatagtgtgtgtgtggtgtttcctactcaggctgttttcagtatgtgtgtgtaacagttcccagtgtgtctgtgggccagcggcttctgggttacattgtttcgtgatcagtgtgtgttgctggtatttctagcatgtttgtgtctgtggggtgtgtctgccacatgcttgctgtcctcgcggtgtgtgtgcgtgtccgtctccgggaccggtgttctcagcctctgtggtgtctgtgagcaggtggtgtctgcattgtgtccccacatgtgggctgatgacttcagtgtgtgagcagctgcgtgggtctctctctattttgtgctgtcgctttggagttttcagtggagtgtgtgctcacgttcacgggcagctgcctgtgcagggctgcatttgtgctctggtgtctccagggcaggggggcatcctgtgtccccagtgaagccgctggcgtcccaagcgacacgcctggcggcctccgtgccgagtggaggctggctgtgtctgcggccgcgtccccttgcaggctggtgccacgttggctcggggctggctgtggcgggcagggcagggcaggggctgtggtgggcactggacccacgcccagacctcggtataaatatcttgagttgccggcggctgtgtttactcggccccagcccgggggcggtagcagcccggcaggtccttgggggcggggggtgaccaggccacagcagagtcacttccttctggccagacaggccacagcctcgctgccccttcccg

SEQ ID NO: 59141 - DNA, 1700 bp, Bovine  19866881556753
  misc_feature (1)..(1): n is a, c, g, or t
ncctcgcgtggcaatctccacatcgtcaccccaaggaccactgtcaggggacagaagggagaaaattagagggtctctcctgcacaaagacgccctcacccaacacacagatacacacacacttacatgtacacagatgtctttgtgggtgcatcagagctagtcacagaaacactctggtgcacgtacacacttacagaggcaatttgtgtgcacacctagacctgctcacccatgcacacacttacacactccatggacacgtggtctagggtcaccctccacaccctagctatacacgtgtatacacttgccactgcctctcccaacctaagctgtctgcacagtccatgtagcaacctgtcaccatgcacacatagccatgtgcacacccccccccgcagcatgtccacaccaccgttcacagacgcccaccacacacggtccatgtggacaggcccctgctcagggaagccctcgtgtccccaggagtctgggtcggtgtgggatgatcgggccacgccctccccctactcctgccggggtacacgtactacatcgctcttgctggtatagacacggtccgccaggctctcgatggcaatccacttgaccggcatcttggcgatgcgtccctgacggtagtagtccccattgtagatcttcttggagagcccaaagtcagccacacacaccgacatgttctcattcagcctgcccagattgggggagaggaacggggtcacagcattgccccctccaccaggaagcctgccctcactctcagacatgtctctgtctcctgccctggctgtcctgcttcggggtgaggatcggtcagcccccaaacctgggagggaactatgttacttcttataccctctgtgaaaggtgggtctgaaaagggctgctagggggccttcccagctctggctttttgccagattctaaggtccttcccaggctccttgggttggattctctgatatttttaaaaaatttttaaatagttatttgacttcactgggccttagttgctgcactcaagatcttcactgcggcatgcgggatctagttccctgaccagggatcaaacccagtgcccctgcattgggagaatggaatcttagctactgcaccaccaggggagtccgtttaaaaaaattttttgacgtatactatatgtatacaaaaacatgcacaaatcttaagtggagagctcactggattttcacaaacacacctatgtaactagaaccaagattaagaaagaggatatcatgcggcagctgtgcaatggaataccacacggcaaagaacaagaactacagatacgtccgagaacatggactgatctcaaaaacttcacgctgagcaagagatgccagacacagaggagtcaaaattgcaattccatttacatgacgtttaagaacaggtgacagaagtacagaatagttgttatcccttgagggcagcggctgggaagggcaggagagagcctgtgaagggccaagaaatgttctttatcttgatttagtggtggtttgtttccatgggtctgtgtgcacgctcagttgtgtccaactctttgcaaccccatggactgtagcctaccaggctcctctgtctatggggtttcccaggcaagaatcctgggttgctatttcctctaccaggggatcttcccaacctgggga

SEQ ID NO: 59142 - DNA, 751 bp, Bovine  19866881579172
  misc_feature (1)..(1): n is a, c, g, or t
ncccaggggcaggctctgcaagatgcctccagggccctactagtggctgtgccaggaccagtgaggcggaaccatggggaaggaaagactattctgctgcttgctaactgactggatcctttctcagaggacaaatgtatctgggcacaaaccaggtgcggcccaaagggaggaaagtcacacagatcacgtggttcgctacaggtctgtttaccagggctgaaggaagggttgcggggggcataaaaggggctcaaaggattttgctgtaatgggtaggagagaaaggaagacacagaataactccttaattagaacacagggggccctttcataccatcgcgttcaacacacaacatcgtgtgttgttcttgccacaaaagcctcatatctttctttccgagaatctctcctgcgctcacagaggaagcctcgcccagagaagcttatgattctggggcccttctctgttctctaaaacatttacctcctaataacaggcaggcccagtgctaagccccttacacatgtaatctcattcatccccaagcagggaggggggcactattattatatcccaattttacacacaaggaagccagagctcagaggtgaagtgacttgcccaagacaaaaatctgagtctagagcctgtgccgtaaagcatatcacttttctttggagacatttccagccactggcattcctgccagggtcttgcctgccctaggcaggtacagggccactcctc

SEQ ID NO: 59143 - DNA, 3243 bp, Bovine  19866880116122
  misc_feature (1)..(1): n is a, c, g, or t
ntctgacattgtttccactgtttccccatctatttcccatgaagtggtgggaccggatgccatggtcttcgttttctgaatgttgagctttaagccaactttttcactctccactttcacttttatcaagacgctttttagttcctcttcactttctgccataagggtggtgtcatctgcatatctgaggttattgatatttctccaggcaatcttgattccagcttgtgcttcttccagtccagcgtttctcatgatgtactctgcatataagttaaataagcagggtgacaatatacagccttgatgtactccttttcctatttggaaccagtctgttgttccatgtccagttctaactgttgcttcctgacttgcatacagatttctcaaaaggcagatctggtggtctggtattcccgtctctttcagaattttccacagtttattgtgatccacacagtcaaaggctttggcatagtcaataaagcagaaatagatgtttttctggaactctcttgctttttccatgatccagcagatgttggcaatttgatctctggttcctctgccttttctaaaacttaaaaagtgcttttttaatttatcattgtttagagtaccacttaatgccccattctagaatttaacaaaactaagagactctgttgtaacaagctgggctggtagcctgatgataaaagccctctcattttcttaagagtgttatgtgccatttcctctcaagcagctgctattgctactgatgcttagctttgcctgtttgacctgcgctaattggctgctgccattcaggtctggaagagtagattaatgttatctctgcccttaaaataagagagaacaggcactgagggagcctaaggatctcttctgtgttgaagacacaagtgcggttgttgttcttgtttagttactaagtcatgtccgactctttttgcaacgctatggactgtagccctccagtctcctctgtccatgggatttcccaggcgagaatactggagtgggttgccatttccttctccaggatatcttcccaacccagggattgaacgcacattctcccatgttggcaagcagattctttgccactgagccaccagggaggtccatgcaagtattagcgcatcgtatttgtgtacatacactcatgtatcttctttcacctttgcttctacctcttcatttactttgctggctttttagggtgttgggtatatttttgacatgtacttgaacacatgaagattagcaagtttagtggagtttcttttctcagtgatggaaggaatttaacttaaaagttcctgatttggttgcttatatccagcagatatggagaaggtctttttctgacacttggccttggcctggcttggaacccttttctcaattcatgaaagttaatgaactacctgctgtgtgcggggcactgaattagcttcagtgatggggcacaagatgagtgagaaatggatcctgtcctcatgcagcttaaactccaaaagaataaagacaatgcaaactgagcacgcatgcatgcaaactgtcctatgtggcaaagttggatgatttttgtcatgaagtcttaagttttagaagaactcaagagaagaaataatcaattctggaggagaccctcctgcaggtgtgttggggtatttctgaagcagctggaggatggctgggtctctgtggttactggttaaaaagaaggtgggccaaagagagagtcttgaaaacagaagctaagatgtagggcgcagaggtgcacatttgtctagggaatgaggagaattttcattcggttgcagagcagactatttacagagtaatagtgacagctaaaactagagaaatatgatagaccaggtctgaaatgccagcctaagcaagatctgtcttctggtaacttcagagcagatttaattctgcttaaatcctggggagggggaattgaatgggctctacataagcaaatggtggtgctggacagggtgtgtgcctgtgtttaggtgactgcagaaaagagtgtggagccacacacccttttcaaaggcattttagaggaggaatatctggggcagcctaactaggatgctagcaaacttgtgaatttcgcatagaattacccttgtaaatgtgtctgttccaggaagaacaacatacatttgtgtaaagtaccacataattaacttaattcagactcggcatttggatcttgatgttccttctataaacccccatttctaatgcctttttttctgttttgttttggtttctttatcattattaaagtcaccttttaccttcttctacctttgaggttatagtctcataaatcgaaaagtcttcttagagtacttagcagaatatttaatcaaaatgctgaaagccatatttcagcttgaaatggtattagtgtcactgggaatgtgacccagattgttgggggaatgctattcagccaaataggggttcatgacactgttctagacatttagaaagtaatgagatatatttagcatagaaatagaaacaaaaaccatactcaaaaaaaattctgtattctagaacatcatgagaaatagtttgtgtgtgctctctctctctctgtctctcttgatctctctttctctcttacgtatatatatatattttttttattatatatttatttatacacacctatgttgcccactcacatataatgaagcaatatggtaaagtatattcagggagtttgagttcaggagttgtgggagtttcattagtttgaaggctctgaattagtttgaatctcaattaggattgtcaaatttggtataattacatactgtcataaatggcaaactctttagtggtgagaaatgctcagatattcagctattctaataaatattttagttagagtttctaaacagaacctacttctaatgctggttttcaaataattggtacatcaatgtgattgtgtcttttaatgatctagaagagacaacttatttatttagcacatcgcagtgaccattatacaaattactattggagctctctggtactaaccaattcacattgctggtaggaaaaaaaaaaaaagatatttagatgatgtcactttcttgctccaatgctttcgatgtctgcccattgtactttaaaatctaaagtccttaacttgacctttaagaccctgtataatctggcccctgacatcct

SEQ ID NO: 59144 - DNA, 1185 bp, Bovine  19866880276695
  misc_feature (1)..(1): n is a, c, g, or t
nacgtaaatcttgaagctggatggagtcaaaataatagaactgttagactatttccccatataagtaactgatattaaatctgagcagcgagaattcatcttcttttgtgttttgtttctagttaagaataattttttggaaaaaccatagccttgacttgaccgacctttgttgacaaagtaacgtctctgctttttaatatgctgtctaggttggtcataacttttcttccaaggagtaagtgtcttttaatttcatggctgcagtcaccatctgcagtgattttggagccccaaaagataaagtctgccactgtttccccatctatttgaataattgtataatttggggcaaatcatatgatttctttgagtttgatcatttctaaaattgaagataatacctttcccatacatactaattaaagattgaggattaatgaaagaggaaggatagaatgagagatgttactaaaaatttctagtctactatctggcacatagtttgtattccataaatattaactgatataatgataatatttcaagaattttatatgattcatgctttataaatttcattgactaaaaattgttaagtagttaacatttctgaattcagttttccttttttaaagacactaatttcataccttggccacctgatgcaaagagctgactcatttgagaaaaccctgatgctgggaaagattgaaggcaggagaagaaggggacgacagaggatgagatggttggatggcgtcactggctcaacggacatgagttttggtagattccgggagttggcaatggacagggaggcctggcgtgctgcagtccatggggtcgcaaggaatcgtacaagactaagtgactgaactgaactgaactaagtactaataatatagcataaagtattttctttgataaaaaaaacatttggtaaaatgtacaccagaaacaatttattttttttttcagaaacaatttaaatggattctttcctaacttccttaattacttccttaattactctcagttaaattcaacaggtatttaccaaatgagttcatgaacctattatagataaatattgggtaaaggaatctaataaatgcattattttaaaagtaaaaaaaaaaaaagaataatttttgaaggaatctaaagtctttaataagtctt

SEQ ID NO: 59145 - DNA, 1105 bp, Bovine  19866880391746
  misc_feature (1)..(1): n is a, c, g, or t
ngggctaagttctttgtcaatatgaatgatgtaaataaaatttagcaactaacgataaatttaacaacttaataattatagttatttaatagtataacctagaacaggaatgagtttatgtttaaaataggttctatgacttaaaggaagattcatgttttcagattgtaatggaggaaggttttacagctgggactcctgaagaagaacttctccatcctgaattcccatatcgaggccagactgaataattacagtttttattatatcttgcaacaatgaaatcataacatacatttttgataactctttttgattctctaaaaacagcaacgatttatagttacatataatgaatcttatccaaaaggaaatttattgcacaataatgtggttaggatttcatttataaagcttattttttccttcccatatgatataaatgatgattaaaattctacttctggatttcaataggggactgaaatctttttttctgggttttttagagtcaatattttgattcctgtgggtaatgaggaagatgcttggtacaattctccatgctaggttgggagggtctctgtctagagacattgtgcaaaagttgttaaccacttcaaccatggaaattcttgaaattttaaaaccacaattttggttttagtctgattattcagtaatccccatatctgctaatctgtggaagggaggggagtagttaagatttcaacatcttctttactcttgtttataatttcatatacttaaactttaaatatgaattgctttccctttttacacaagttataaaaataagaggccctgtttacacagtttgcatttttatgaaatttgcagtttgaaaaaaaagctttttaaaaagtggcaattaatgcttttctttgaatatgctgtaactttagatttttttttgtttgttttctgaaacagtttctgaatttaatccactaaacatctgaagatagaatttttatttagcactagagtaaaacataccaaggacgaagaaaaggaagtttttttttttttctggtcctgcttaattttctttgtgcgtggcaccccctttagacagctaaca

SEQ ID NO: 59146 - DNA, 3576 bp, Bovine  19866880401437
  misc_feature (1)..(1): n is a, c, g, or t
nggctctttagttcttcttcactttctgccgtaagtgtggtgtcatctgcatatctgaggttattgatatttctcccaacaatcttgattccagcttgtgcttcatccagtccagcatttctcatgatgtactctgaatagaagttaaataagcagggtgacaatatacagccttgacatactcctttcctgatttggaaccagtctgttgtcccatgtccggttctaactgttgcttcctgacctgcacacagatttctcaggaggcaggtcaggtggcctggtattcccatttcttcaagaattttcaactttgggggtacatcatctaataattatggcagaacaagagtcaagcttttgatgccatcactcttgccactattaatcttgctggtactcattgctgtgtgtataactaggcaagttcccattttaggatcttgacaaacaggtcccactggttcttcccttcttaatccagtatccccacaggtagtgtgtgttattaagtaggctgtactgatgccagttcctatgcaccttgaatgaggctggtgaggataaagtcagagcttggccctgctgactggacagtgggagggtaattgctgctgacttgcagcaatcctcagagactccttgatcctcggagacttcctactccctggatcgctcccctggtgaggttttcagtggggctgatgtttgtacttctcctaccttttaattatcacaaaagaaaaataagagtgcagagataatattgttgctgttagtggttatttaatttaactttactttgttattttaggtttgtatcattggcttaactaaaccaaagcttaaattttctcagcatagccccaagggatagaacaaggatcaaagagaagaaacggaaaaggaggcaagctttagcatttctaaaggcaccaatctaagagtgaagaagcaacttcctgaaaacaaagttccctctctctaatagaagtcaagtactagcccaaggatcctctgttaggattttatcacctgcatggaaagatttggggtaaagtcagatgtgacttgggccacagagctagttgactaactagagagtttaccagaaggtggcattaattaagtataatcaccagatttccaggaagggttatactctttaaaagctcataaattgaattataagagcaccaagatatgattgaaagctgagagacatatatatgaaaactagtgtgccatacactcactccctatgagaaatgtaactgcacaacatatggatatgaaaaccaattgactgcattatcagttgtgggggtaaaaacacacacatttagacacatctacagaatcctggaaatacactgtcaagactatgtataattagggattttatcacactcctagttctctaggaatagaaccagcctcataacatgtaagactatcgagcgattttagcatagtcaccttctggaacatgtttccaactttcaactccagttaactttcaagaataggcatgcctttatgtgtgtagtagaaacatttgttttgaaagaggagggctcacagtctctctcttaggtcatttcctcagttcctgagtttatgcctcacattttgattctcgctaatgctcttctcagacagttctgagttgagtcaactgtgagaaaaactggcagctcacccgcctattgaccatagggtgtgtgtgtgcttggtcactcagtcatgttcaactctttttgatcccatggactgtagcccgccaggctcctctgtccatggggattctccaggcaagaatactggagtgggttaccatgccctcctccaggggatcttccccaacccagggatagaacccaggtctcgtatcacagtcggattctttactgtttgagccacgagggaagcccattgactatagcgtagcactcagttgttgaatgggaacctgtacaaatgatctctatggtccttctcaaccctgtggttttacagtttcatgaacctattcataagggaatggaggaagggataggaaagcttacagttgaggcaggggactaaggacagggttgaatctgatttaactaaaaaaactgtttttactgagggcagagatacgggattatatgtgttgaattttctctactttcattcctcacaggcgcttccatatttggctaaaatccaaggagagtttcctatgggacaaggtaggcagcagctcaagaaccgcgtctgtgcagcagcctcactgtgtacgggcccacataccttgcactgaattattgtacactctaattccacacaaaaattggtttggccacagtttcactcagctaagtaccttgctctatctagtcattcctttgttcaaacaacttttactgagcactaagccagatgctggcagagagcaataagctggatactgtccgctgctgctgctaagtcgcttcagtcatgtccaactctgtgcgaccccatagacagcagcccaccaggctcccccgtccctgggattgtccaggcaagaacactggagtgggttgccatttccttctccaatgcatgaaagtgaaaagtgaaagtgaagttgctcagttgctcagtcatgtccgactcttagcgaccccatggactgcagcctaccaggctcctccgtccatgggattttccaggcaagagtactggagtggggtgccatcgccttctccgagatgctgtctactcacaatctaacgaagaagtaagatatgaaaggaatagttttaaaactaaaaagttttgtgttttgttaaaggaacatgcaaagtactggggaagaaatccctccaagaactgctttagttgcatttcacaacaaaaaagttgtatttttatttatttcaagtgtactatttaattcttcttgagacttccttttttaacccaggaattatttgagttgatttgttttaagtgcttggagttttttctgtaatcttttgtttattttgatttcactgtggttagagaatggactctgtatgatttcaattttctgaattttgttgaggtttgttttatagcaaacctcataggttatgtctctcttgatatataatccatgggaactcaaacagcatgtgtgttctattgctgttaggtaaaataccctataaatgttgattagatcctgttggttgatggtgttcctgagttcttttatatccttgctaattgtttgtctaggtgcactatgaattgttgagagaagtatgttaaagtctctaactataattgtgaatttgtctatttgtcctttcagttttataggttttgcttcacatattctgtagcttgttgtttcatgcatacatatttagcactgctgtctttttagtgcagtgtcccttttatcattatttattgtccctctctgtctttggtaattttctttttactggagtctactttttctgacattaatatggccaataatgctttcttttgattaatgtttacatgacatatctttctctttttgctttcaacctacttatttcatta

SEQ ID NO: 59147 - DNA, 1471 bp, Bovine  19866880484933
  misc_feature (1)..(1): n is a, c, g, or t
nttcatcccatcctcccttccctctctgtgtctacatgtctgttttctacatctgagtctctattcctgccccggaaatagatttgtgatttttaaataatgtggtcaggagaggtctcattgagaaggtgtcttggacaagttgagagagggtggcagtgccagtatttgggggaagaggacagctccagggagccatggaggagtggggtgagaaggaagagtggcaggtgttagtctggggtcatgggtgtcgccaccatgaaggtcttggaggccactgagaagactggcttcactctgctccaatgtaggagttctcagcagggacatttagtcacttttgattgctcagaagaggcgctgatgaaaaaagaccagaaaaatgccaggatgtgacatatgttgttgtttttcattactctttggaagcttgttttgattcctcatgtaccatgctaaaaataaaagatgggcttcacatgggctaggaggtggaaagagagtttcaactaggcaaagcagaaatcggtccacccatcttgctttccctctgtgttggccacttcaggatgaatagctcagattggcatccgtggctttgcaccactgctgtgctggtggctgatttgaaacgatagttcctaaggtccatgggcagttagtggctgtcctttagacaatataagagacagaagaaaatctcaccttcattcttttaagaaatgaaatttcccccagtctctgaggaaacattttctgatataattaatatgggtgattcatactccaaggtttttttctaaaacaattaaaaagtatatccattgctgtagattatttctggcactaaaaaaaattctccttaggaaaaaaggaatagatacttttttcttatactgctatacttaattttatactattattcatacatgtgtagaaactacttagtataaaaataaatataatagtataagcgagataataaagtatccatctttccttctcaaggtcaaggaccataagtgactgaattctgagacttcaggtaagaaaacagatatctcattaggatgtataggattaggggaagagaattacaacaaaaaactggcctccacagaacacaacacattaataaactttagaaaagagcctacaaatgactcctgtaagagaagaaacagtcgtttgtattgtttatccatccaataattgagaaaaacttggctttaattgaaggggaaagatgaaaaatttgctctctgtacaaaataatgcaagggatataagttgcattataccacaatgaaacaccaagttccatatatttcccacagtgaagagcttccttttgtctaatcaaccagcaagtattgtctaagtacctgtattgacatgccattcaatgtcatagactccagaggaaaggctccttcaaggcaagagtaagcaaacttcgggtgcaggg

SEQ ID NO: 59148 - DNA, 947 bp, Bovine  19866880495599
  misc_feature (1)..(1): n is a, c, g, or t
ntctgtagaaaagtggtaatgataagaaatgtaggctctgaaatttaaatctagctagtatttaaatctagcgtctgtcccttgctagctgtgtgactctgggcagatcattttagctcaccaagacttgggtttgtcatctgtgaaactgcccttaatacattgagttgtttttgctgtttatttgctaagtcatgtcttactattttgtgacccccatggactatagccccccaggttactctttcagtgcgatttcccaggcaagaatactggagtgggttgccatttccttcaccaggggatcttcccgacccatggatcacacccaggtctcctgcatggcaggcagattctttaccactgagccactggggaagcccaccagaaagttgagttactacagaataaaaataaataaggtaacagcagtattgatacccacaaatgcccaattgatttgaagtcttattgattctacattttactatttcttttgtcttggatctcctccacatttctagtgcctagaaaaaatatacctcattacatacatgcatagtgccagtgagagaccaattattacatattcaggctaccccttgtaagtacacagagaaactgccttacttagttttctaggaatatctttttttttttttcaatatattggttgaagcttgaaataaatcctgatatcaacttggattgatataataaagctcaagaagtctttctttaaacatttagaattataactactatgtacaattatcatctacaatggtgaaatattataataaatattttataaaccagtattcagaatactaatctagcatactgtaactcataaccattatgaaatatacctatgttgacaaagcttacatttaatatagattgcacacatctaagtcaataaaaataatgctttaaaacttcag

SEQ ID NO: 59149 - DNA, 3364 bp, Bovine  19866880583436
  misc_feature (1)..(1): n is a, c, g, or t
natctcccttttctgtgtttgatctttctgtgggttattgtaagatctcttttctcttactctaagcttcatggttttcacctcttaccactgtttctgtcatcagtttctgtatgaaacactaactgatgtaaacctaaaaggtgtgaaatttttttgacacttcttccttttaacccttgggatgtgtatgcaaatgtaacttggcatttaaaaaaaaatactagtaagctttttttttttttaattactgtctaaaactgagcaatgttattatgatagagctctttctttgcagtcttggctactcaaaacagcacaatatgttatctcttagtggtttgggtgcagttatttatagcatgtcagcagtgaatgaaggcattattcactccatatgccccttcccttgtcattaaattaaactcttgtcacagtcctccatgaagaacactttaaaaatgaccactaagtaaggggtggaaggaaacagatcacattcccatgcttaggaagacagtccatcaatcagtatacgtcaaatgtgggcctgactgggaaacgagcagtcatattttgcttctagtgggaaaacagtcttgagtttgggttgcatagtgtcttcacatgcctgagaaaatgcccaagtactggggtacagtgcttcctcatcattttgagcacccaggaggagactccaaaataaaggtgaatgaaccattccttagagctatattaacaattaagtctttctgcctattaattcttcatcatttttcagtgttatttgtatgtttggtcttggtaaacttgaccgtggacagttaataaaggaagttttaaatgctcatactagtgccagaggaggagtcctcctccatcatggtgatggcataggtaattggtgagagatccccaaagagaggaaaaacatagctgcagccacccatcttcccattgagaagctagacaattgttcattcacttgtgattttaagcaattgctaggataggttgctgctgctgctgctgctgctgctgctaagtcgcttcagtcatgtccgactctgtgtggctccatagatggcagcccaccaggctcctccgtccctgggattctccaggcaagaatactggagtgggttgccattgccttctccataggataggttaggcgtgaacaattaaatactagaggttattttaccatctgttagtaagcaagatgttaagtctagcttaagagttagcaagtattttctataaaggtccaaagctgaaaataataaatattttcagctttgcagacctataatctttgtcacaactattaaaatttgctgttatcacatgcaagcagccattgacagtctagaaatacatagacaaaactgtatccaaaattttatttttgcacactggaaacttgaattttataaaatttttatgtcactaaaaaggattcttcttttgattggttgtcaaccatctaaaaatgtgaaagctattatcattagttcactggctatatcgaaacacagaatagggaaccagtcagatttggtccatgggccatagtttgctgattcctaaattagctaaacttgaaaatatcatgcttgtatctttttgcctaagacttgaggaaatgagaatgaatggttatttacctactaaaggggcttagcgacaaacattttcattagagggaaaatgttatgtttgagatccaatgagtgtcactaccctcttttcttcttcttgtggcctctcctaagctcaacacctaccctggaagaagtaaatgcctaagcttaattatttgacaagatggtaatcactccaatgggaagaaatgcttttcatgaaaccctccaaaagaagccagtggggagtaaaaaacacttctctggatggcctgtaaggaatgtatatatgccaggaactatgccaggtactcagatgcaatgataagcagtcagatcctcagattcagggacttactgtctatcttggaacatcagggaaaattcctagaagagatggcaccaagaataagctgcaaagcccaaagggaatcttatggccttctaccatctggagtatgcggtctccaaggtactgcagtagaagggaagagctattacctcctagaagtacttgcttctcttgagttctgtgaaatctcttctaccctgttggtttttcttctaccctgttggccaattcttcctagtcttttatgctggccatctttctcttcttaatctcaatatacagggctttgtactgggtctctttcttttcccagctgacctcattcaatctcatggctctaaaactagataggtaggtaaagagaaagaaagaatatagtttctgttctggagtctctccagaacttcagatttgtactccaatcacgtattctacatcttcacttagatatcaacagatacactaaacctcacatagccaaaaaaattgttttttctccaatgcaaaatgctttcagaatgcctctgtttcagtctttcctttcgtggttaatgactctaccatcttcctagttattcaagtcaaaaaatggagaaattatccttaaattctccttttctcccattccctcataccagcattgagtctcctaaacatattcaaaatctattcattgcttccactgctactctgactatcctagtttaagctactttctcattagaaaacataacaacaaaatgaacacttacaaactcatcattcaagttaaatgctgtaaaattactgatgtattcttaccctgtcacacttccccacaggtagccactaccctggattgtgtgtttatgtcatcatcacacttttctcatagttttcagaaatgtatatacttctaaacagtgattagtgtcacttgttttaagcttgatcaaaattatatgcagtatataatcttttgcaactcactttttttccccatcaggactctaacatgatgcctccattgattttaggatagaggaaacatccctgcttctgttaagaaataggctcttcacctgtgatctggatgttgaaagattatctttcttaaaaagaaaaaaatagatggtggagtattcagctatgtcagatgttcccagtaaatccactgaagtgagaatagagaagtaatcatcagatttgacaaagcagcatcaatttctgaccaggaacagcataagtagagttggggggcattgaatgagagtgaatgtgaggtgaggaaataaagacagtgacgattcacaactcttcaagaagttctgtgaaggggagcagagatgttgggcagtagctggagtaggatgtagcattaagaaat

SEQ ID NO: 59150 - DNA, 2592 bp, Bovine  19866880652600
  misc_feature (1)..(1): n is a, c, g, or t
natgctgttggagactcagaagataggcagggtgaaaggaggaaatttctccaagagctggacatagatggaaggcttcagacacagacatgacattgatgatgtaatgaccacagagaaggcccagaaaggcatgacccaaagttggagacaaaagttactgaattaaagaattcgttgaagtaggaaaatgctgggctctagagccacactgtgcaccttattatgattatttttaatggtttgtaccccaaagatgagctgtcacaagactgtctgagatttctctagccttcatgctgacttatactctatggttcccaagttcttatttaggaaccactcctggatttgatccctggatctagaagaccctctggagaagggaatagctacccactccagtattcttgcctggagaattccatggacagaggagcctggagggctacagtccatggggtcgcaaagagtaggacatgtcttagcaactaaacaacaacaatagcaatgctatagttatcaatttgggagaaactaagggtagaggtttggagaaggcaatggcagcccactccagtactcttgcctggaaaatcccatggatggaggagcctggtgggctgtagtccatggggtcgctaagagtcagacacgactgagagacttccctttcacttttcactttcatgcattgaagaaggaaatggcaacccactccagtattcttgcctggagaatcccagggacgggggagcctggtgggcttccgtctaaggagtagcacagagtctgacacgactgaagcgacttagcagcagcagcaagggtacattgggcttccctggtggctcagtggtaaagactctgcctgcaatacaggaaatgagagttcgatccctgggtcaggaagatcccctggagaaggaaatggcaacccactccaatattcttcccccggaaatcccatggacagaggaacctggcagattgcagtccttggggtcacaaagagtcagacagactcagggactgaacatgtatgcaagggtacattccctaaggtactggacagaccaaaaatttgacaaacctctactactgtggctaaataggtaacattggcatcactggtggattaaaaaactagatcttttgtcatttttttcagtaatcataagtattaatatgcctttcacacttaggtcattaatatacaattagatgatcattaatttcttactttgttaattatatttctaaaagaaaagtagcaatcattgacttaaagtttacaaactaaatactggtaatatttatatttgatgagtaatctgtggatttaatttttttatcttataatggaaatgtgtaagagagttcagtgagtagatcatacatacagattttgctactactgtgtgataaaaatagtctatttttaagtcaatctactactttggctcttttatttcacagatgtaatatattgagcactttttattgtgctaaattgtgctatatgttgggatacaataatgaatgtaagtcttttaaagaaaattttacactttctgaatttattaggatattcagactttgtaattttggcttataatcagttatgtaatcagtttcttttgatctttgactcaatctattgtttggtatgctgcttatttctgggcatggaaacctaagaaatgccaggacaatgttccatgctaccaaatgtcatattacccagtgacagcaccaaacatttctttacatctcatgctatttcagaaagaattttaggaggccagaagttcagattttacccctaacattgcaacagagtactaagagaaggaagtgtataacacacaaggacatctttttgttaggtttaaatactattattgcttatagtaaaaacttctatgtagttacttttagaatattttgccattttattttatgttttaaactacttagccttcttgcctcaatagacagataacaaagactcttttccttaatccacaggggaaaaatgatacaaatcccataatgttccatgaggctggatatgtacaaatgttacttttgacaaaaaataggcttcctccccattttatgaaaaatggaaatggcagcccatatgaaagatcaaatgttgttttacaaagaaattgtgaaatgcttaaatctgtagctagagatcaatctattactccttccaaaacccaaagaactctgcctacaacacagaagaaagacataccagcaatatcttttaaagtcagcgatagggttgtagatgataaactaaggaagaaaactaggaagcagacattcaaaaacatatcatgggataaactctataatttttcacagacattttctagcttaacaaaaaaatttgtgggtttccttgataaaactgttattcaagaaatgagtgctaaaactggaaaatttgaaaaaatgttttctacagtaaaaccagtgagcgaattcagtgcctcacctttcaaatattactcaaagccttcaagaaatatactcaaagtccataaaataaataatgtaacaccactggatgat

SEQ ID NO: 59151 - DNA, 1938 bp, Bovine  19866880714398
  misc_feature (1)..(1): n is a, c, g, or t
nccccacggactgcagctcacccggctcctctgtccatgagattttccaggcaaggatactggagtgggttgccatttcatatagtagataataagcaaatatttgttgagaatcaatgcccacatccaagacatttaaagtcaagggaaaatataaagcccacactagcatgaactagaattatcaaagaaaactttattgaggagggaaatatacaaagggtagattttctcataatcagagaagaggatgacagttactgaaggttaaagataaaaagcataacgtgtagtgtgtgatgaggtggggaaaattaaatgtgttttgtttgataggaaggagaagcagtgaatgtgtgacataattaaatactttgttcttattaaaactcttctctttggtactatgtccagagattgttaatgaaggcaacgatcctaaaacttagtccttttggaaacctcaaggtgcatcaaaaccatataaaaatgtttcatttagacaaattatattataaacagtttccctgatgactagtagtaaagaattcacctgccaagcaggagacaagggttctatcctgggatccgggaaatcccctggagaggggagatggcaacccactccagtatgcttgcctgggaaatcccatggacagaggaccctggcaggctatagtccatgaggtcacagaagagtgggacacgactgaacgactaaacaacaaagattataaaccgtataggggaaaacatgagctttataggagggcaaatctacatttgaattttagtttttcccacttaacgatgttattagggcaaatcacttagctctttgagccttcagttttctttctgtaaaatgggaatatattgcctatctcccactgggctgatgtggggcttgaatgcagtaattcttatcagatattcagtgctgtgcttggtatatagtagatgtttagtacacatgagcactactgttatttttaataatgtgaattgatgcattgatgtgtgtgtgataagtcaaggtggacattttgggttgcgtatgtctggggataagcacacttgagtctacttgatctgagggtaatcggaaatggaaacaactcaagaaaaagataatgtataacatggtgccccatagctgtttgcctctttaaaatgaagtaatgccaacacctttgagtctattggcaattgtatgatgtgaatgctcaaatagaaagctaataattttgtctactaactacctgctgtacaaactgtcatgcaaatactgccttatgatttatgtaaacattgaaaaatcccatgactttattcttatgcttggatttttttctatggtagaatacctaattcgattaatttcaagtgtgtttgtctgtaaaccagccaaatatttccttttaaatacttgagctctatgttgaatatacagttatggttcttagcatattactttgtttcagtaattagatttcatcctataatcacttaatgaggttttagttccacatatactaggctgtctccaatccatattaagcgaagatttttcatcttatacaggttcttccaggggacccagccccctaaccatgggagcccaggacaccctccctgttgcagcagcatttacagaaacggtcaatgcctacttcaaaggagcagatccaagcaagtaagcctggggcttagtccactacattctccaaactctatgctattcagcggggaacgctccacatataattatttcattccacatcctaagaccaaaaaaaatctagtcagcaataacaggtgacatacttagaattaaattaattataaatattaactcactgctttctttaaaatatatacccttctcatgctgggacccttggggaagccagtgccccactgggctcccccaaggcc

SEQ ID NO: 59152 - DNA, 1186 bp, Bovine  19866880784849
  misc_feature (1)..(1): n is a, c, g, or t
nccttgactgggaataactttaagtcaaggcagcccagtaggttgatatgcaggcttccggagcagtgtttcaatgcatctttaaactttgctgctgtttaacttatcaggccttgaaagcattaatacagcttctgaaagagtccagcataaatgaggagggccagaggtgccagcagcagaatggctctcaggtccccaccaccagtgatgcagaagaatgagttctctttctggattgttcaggggaactttggcctctagcttctacttctgcctttagctggtaactgctgccaaaaccagggtcagattagccttttggaaagacaagtataagaattagtgtcatttcttacatgcttttggcctaggtagtaacagtttgttcatctgtgaaataaaaaattataataattgcactgtctatggaagcaatgagatgtttgtaaagaatttggcacaactctcaataaatagaggtcactggcattaagaaggttgctgtagtagttacctgaacagagtaattttaattgttccttgtctaaaagaggacctaccctcctgatatgatgcatgatgttttataactaaacattcacttttggggcttccctggtggctcaggatctctggtggtgagcagggccctaggcaaatgggtcctgggcaaaccagccctttttggagggagtaagggagggaagagaggcctgaagagggcattgttgtgagggaaagaggtcctcacagcccgtgggaggatccctggggacagatgcctcccccacctttgaatggccttgttctttcagcttttggtggaaagatctctggcctggagaccatctctagtcctcatttgctttatgaccttgggtgagtcactacttctctcaggacccccaatatccctaaaacttccaccaacgctaaaactctttaattttgcagaaaagcttgtgcagttacaagactggttgatctactcaggccacttagctgaagagacccggacttgagtgaacctttcttcagtcatgggtggaatgaagcaacctatttattgagtcacttttattcctgtatcatcagttgcaaattacatgactcaggctattaatatttttctaaaattatcatgggattcctgtcctaattccggctgtctttaaaaattaga

SEQ ID NO: 59153 - DNA, 1948 bp, Bovine  19866880789260
  misc_feature (1)..(1): n is a, c, g, or t
ntaatgagaggaagaaggaagagaaagcattcaaacttaagtctaattctgctcatttttatcaagtttgcaaattaaacgttaggaaagaaaatgcattgtaaacatttgctaaagggaaatggggacacaatgtgagtgcatgctcagtcactcagttgtgtcccactctctgtgaccctatggactgcagccagctaggttcctctgtccatgggaggaggcaagaatactggagtgggttgccatttcttcctccaagagatcttcccgacccagggatcgaaaccgcatctcctgcattctgcattggcaggctgattctttaccctgagccacctggaaagccctagggacacagcacaataaataataaccttaaggattctccatacctcattaagagttgcctgaccatatatttatacttccagaatacatatcttttgaggaatttcaacagcttttaaaattagaacatttctagctcaagggaattctggattctgttaataatttaagggctctatttcctgctttccctcaatcaccttttacccctttcccctccagctataaaatgtcccttgcaaacagctttttaaagatgcatttccactagtaaaatccatgagttctttttttgtttattttgagaggaaatggttaagaaagtaaaataaaacagagaaatattcagtccccttggctgcctgccaggaaaaatgccaaatgtcagatgagaggccttgctggaatctacccagccacaaaaccgaggggttggcccaccacaagataatcctccagggaaatttataccaacagcctaaaattggatgcttttaggactcttctccaacaaggtcttgcaaccagacttcatagtaaaatattagggtcctaagctcccagatcactcagtaaacaagagcctgagatctcaggtcacataaaaaggattcaaatatgtgaatactttaatccatttgggagaccatatagcataatgatgaaacacaggccctggggctagagagacctctgttttgatcctggccctcttatttaccttcttgatgatttgcacaagttgcttattctcaccaacctatttcttcacctgtaatatcagaaataaaacagtagttagagggttgatcaagaattaaatcaaaagcccctaacacatttaaattccttgctcactaaatgttaattaccactgctactagttttgtcagccttcaacattgataggtggaaaccagcaccttctagtacagaggctgcaggactctgtacaccgttagagtgttcacattatgtctacaccagtaagttgccctaaagattctagacaggtctaataactcaaccatgaatttggtaaagggaacctaaaaggtaataacctaaatcaaagacaaatgatacacttaatgataatggtaactatttgagcacctaatacattatccgacttcatcctcacagtagcccctaagggagtatcattgttgtgttgattcgctaagtcatgtccagctcctttgcaaccccatggactatagcctgccaggctcctctgtccatgggatttttcaggcaagaatactggagtgccatttccttctccaggagatcttcctgacctagggattgaacccatgtctcctgtgttagcatgtggcttctttaccactgagccaccagcgaagcccaagggagtatcattagccttactttacagagaaactgaagctgtcagttttccctacctacctaagtgatgaaactgggatctgtccaagaagtaccaaacactgcacctcttttctttcatctccaccataagaccttgggtttgaaacctgcaaaatttagcaatgtaatctagaaaagctcagtatttttactcaacatgaactgtggcagaaactcaaaa

SEQ ID NO: 59154 - DNA, 886 bp, Bovine  19866880824859
  misc_feature (1)..(1): n is a, c, g, or t
natatttcttaccgctgtgtgacttcggaagttgcttaaccgtctatgcctcaattcctgtctgtaaaatgaggctaattatattggtcagggtaaagatcaaatttcaataacttattttaaaaagtattatatactttaaactataatattaatgtgcctaagcccttttaaatggaaccttttgataaaacatgggattattttgatacaattccctgctcctaatgtcactgccccaattgtgaatcattgtttgttactataattattaagaaaaaaagaattgttaattttaaaaatacttgctaaattcaatgtgtgttcatagtatcctgaaggtgtttaagttactatagtaatatgggctggcttgtataattatatacttaattcttggttctactattacaaaagaaaaatgttaagttcagtactgttttaatctagagtttcattccctacagcatctgggcccattttcagtgaaagatagagggctttggatctttgctatgttccctttctccatacttttgagaatccaatctgagttcttcctcatctccagtcctcacctagacagaccaagtctacctggccacctctacctgtccctaaagggagaagaaggaggcttttttgtttaaagtaaggccattgtcctgctgggcacctgaccaacttgcttcaagaaagaagagctgtaggaagtagcagaggtgaactgaggaaggaaattaataggttttggagttaaagaaaaaaatttaggccttaaaataataataacatgctaaacttgccctaaattgtgggaactgaaacctcaagtagacatcttatctgatgtctgaggatttcttagcttgtccgcatcctcagg

SEQ ID NO: 59155 - DNA, 1388 bp, Bovine  19866880852120
  misc_feature (1)..(1): n is a, c, g, or t
nctcgtggatctcacaacaacacacatcggatgctgatgaatgaggcttgacgacaggacacctaattttgcaatcacaaatgaaggctggttgagctacaatgttaacagctgacaccatttgacaagtaggtaggagaagaaaccttttcatctatgcatgcaggatcactaaaaaaccaaatcagaggtaacctaataacatcatcattgattgatactgcatgttgattgggtgctctaaggattagcagtagttgagtgaggggaaatagtgtgtgaggaatagataatgtgtccattattttcctgtctcttcccatataccaacaccgcactagaacttacaaatgcacaaattctgtcctgcctccaccaaccaacacactgggacaaagggcccatgccccatatccctcttctttgtcttgctcctgacaaagattatatgattaatcagactacatcattttaagcttctcatagaattgccttcattgcattagtgcttcagtgatattctttgctatttgaacgaaggttgttttaaaaacttgccatatcaactttgcacctatataagctatgaagctacttttgaggacatgccatctcataataaaaaaatctctctcgtggtgaatggcatggttcttacttcctttttgtcatacttgttttcttttaaaatttctactttaacaatgtttgcatatgtcttccttgcaaaactctccaaatcctcccttataaagctgctgctgctgctaagttgtttcagtcttgtccgactcttagcgaccccatggactgcagcctaccaggctcctctgtccatgggattttccaggcaagagtactggagtggggtgccattgccttctctgccttataaggcatatataatatattcaaaatacaaatgtaatttagggtaatgtgaaatcaaatgaactaagctgatctcaaaaaactaaacttatgaattctgtgatcagtatagtactattaatagatcttttagtccttaattctttattacaaagaattgctatctaaaaaccagagattagataaattattgagttcaaaatttttgaagttctacacgtttgcttccatgataatctcatctctgtaaccaaagcctttcaagaccaggatagttgataggttcagctaaataaagacaaaatgagtgtgtgtatttctttactgacaatattagaaatacaaagttcctcaattttttgaattttctagatctgggctgagggaaagtttctcagtttccatggaaaccaatggaagattgtgataaagagaaagcaaagcctataaaaagaaatttcttttaaaataataacactttaaacataaatactaca

SEQ ID NO: 59156 - DNA, 895 bp, Bovine  19866880859172
  misc_feature (1)..(1): n is a, c, g, or t
nggccgaatccttgaagtcaatcatggtcattcttctctttaaaacactctaatagcttctcatctcaactgacagaagagctgaaagcccacgcagcttgactctatcacccaccgccccccttcatgacagtttcttctccaacctcatttccttctgattttatctcccactttcatctccccttgcttactaagctccttctacactggcttccttacctgtactcaaaagcagcccagagcttcttttcttaccctatctgtcccctccactgttcttcctgtctgaagcacacttcttcaaattaaacccacagcccctcactcaagcccaccagatctttgctcaaacatcacattcctgcaagaccttctctgagcacattgaattctgtctgcatttcccactttatttctctccaaatggtaacacgatctaaaactataattcacttatttattttacttactgtctgtctccccatgctagaatataagcttcatgaagactagacaatagaacatagtatgttttcttatacactgaattttcaagtccattcctgcattccttccagcactaagttgaaatgtcactttgagaaactgatgaatgttgagtactggagtattaaaatggttgtcctaaaagcataatttagaagaacatgaatcagtgattgaacaacaacagtcattgtttggatgtaccagcaaatcccccctgagcacataaacataaaaattgaagaggagtatttaaatgatgccttttaaattaaaaataactaaatattaaaaaagaacaatgtggtgccactggcataaaaatagaccaatggaatagaagaaatatcccagaaataaactcatgcatatgcgatcaagtagt

SEQ ID NO: 59157 - DNA, 1064 bp, Bovine  19866881011790
  misc_feature (1)..(1): n is a, c, g, or t
ncacatcactctcactttccaaatgagaaaacatgttcactgacttcctaaggtcacacacatgagatttaacctaggtctgactgactccaaagtcagggctcttaaaccttctgctacttggccttgaagagttagaattaagaactaagtcagcacagggcagggagcacctcatcctcaacctaggagaatgtgggaagacttccttccttgaaggggttgcttttgtttgaccttgaatgatcagaacagactgtcaccacacagagaaggaaatagacagtgtatgcaagggaaagagaaggcaaggagctcctgtctggcccaggcgatgagacacgagggtgtacagtagcccacaagtgaaaatgttgcccagcacacaaagacatttggagcttgcctttaaagcatgaggaacaatcaaaggcaggtgaggaaagtgacctctctgatggctgtgaagaggatggattggaaggtagaaacagcaagatcttgtcagacgtggtagcaggggaagaaaaagacagatcggagtcaggaaggataatcaacagctcctgaggacctcctgacatgagggagtcagaaaggaagaattggaaatgaatcccaacactgactctgccttggctactttgtagacacagttctttgaattaggggcacaatgaggctaagagaaacttaatgattaaggtcaatagcacaggagtagggttctacctgctgcagggcttacagaatactttctatcatcgctaccatataccagtgctgtgggcaatttttcatacgtcatttttcagtgactcactaagggcatttataaaggctgggtgtactggctgcacagctagaccaccagtactctagttttaggccctgtatttcaacttagggaaactgctcattgtaggaaaagcaaagtaacatcatctcaattggcagaggtgccctggaatatgatgttgagataagtgctgaggccagagagaaagatgaccatgattgattagtgatgtctgctacagccaatgaagggatagtacaggaca

SEQ ID NO: 59158 - DNA, 2008 bp, Bovine  19866881015410
  misc_feature (1)..(1): n is a, c, g, or t
nctgctttcatgctataaatacagagttgaatatctgagaaagagatcttatggcctgaaaagactaaattgtttactatttggcccttgaataaaaagtttgccaataccctgatctagcttcatcagagatttgctgcttctgctgctaagttgcttcagtcgtgttcgactctgtgcgaccccatagacggcagcccaccaggctcccccgtccctgggattctccaggcaagaacattggagtgggttgccatttccttctccaatgcatgaaagtgaaaagtgaaagtgaagtcgcttagtcgtgtctgactcctagtgaccccatggactgcagcccatcaggctcctccgtccacgggattttccaggcaagagtactggagtggggtgccattgccttctccgatcagagacttgagtcaccagtaagtcatttacttaaacttatagtcaagacttccctactttactgtcactgcccttggaaccattaaaggcaaataatcatactaatagttgatgtgtccaaatattatccgtgtgaagcagacattataaatatcaatgtaaaaacaaaaatgattatggaatagccctgtcttccaggggctcacagttaaaagatgaggaaatacacatgtaaactgagcaaatgctcctgagatagggcgcataggagtgtgcaaggattgccattgagaattgtgagctcaaatttttatgcaaatttaaggtgtcaggaagacagctgatgaagataaccaaagcagatattctccccatggcatcagccttgcaggttcacctgaaggactggctaataccttgtaatatgtatgcagcttagctaaaaacagctgaaaacgccctcaatgcactgattttgattttcaagtgggcatccttggctcaaccacacctgctatgtggctcttctggaggttaagatgaagaagagcagtaacaatcagcattaactatattccaggttgtgggctagcttctctcatcatttggatcattcccacaaccacatgaagaaaagtatggcaatccactccaatattctttcaggagaatccccccatggacaaaggagactggtgggctttagtccctagggttgcaaagagctggatatgactaaagcgactcagcatgcatgcttgcatagcatgcacaaccatatgaggtgggtgtttatcttattcttcttttaagtatggcagtaatgagactcagaaaagctaaggaacttgcccaaggttgtacatttagaaaatgtcatagccaggctttgaactctagagcctgtgcacttagccacaaggctttctgtgtaactgcccaccactttgaagtaaagaacttccttccaacaattatctgatgcaggcagagctgaggtggaagggcaaatccgtagtcctttgtatctgcctattcttcatgactctcatttcccatctccttacaaggaggcaacaataacattttatgcatgatccagatgaaattgatgggtaacacatgtggaaaacaaagcttcattctggcttttaccaactggacttgggtcatctctgtgagtagttacatttggaggaattatggtaaaagggataggatacagattttagattgaaaccggttccttcattttccaaaaattttttgtgcccaaagtaatatagggtctatgagaggtacttagttactgtactaacactgtaagcttggagaacctggctgaagctctttcaagccctatgtcttcatttctgtgatggagctgagattacctatcactaaagattgtgatagagattaaatgaggtaacaaatattctttcagctccttcatttgcctgcttctgataaaaagaacattttgaggagttcaaatttacctctaagttaccaagtttcacagtggcacatgtagcaccaccaggggggagcagagaacaagagtttcaaccaaaaaatggtttctgaaaat

SEQ ID NO: 59159 - DNA, 1813 bp, Bovine  19866881093588
  misc_feature (1)..(1): n is a, c, g, or t
nggcacatattgatccatttaaattagcaaccctccacaattttaaccatactacttgactgtattagtggcagattcttcaatgagttggatttatattgctcttcttctggacaatgatcacagaaattataagaagtaattggaaattccacaatttttattggactatgccatatgtgaaaacacccacccaattacagttgataagcacatttgtatatgtgcacacacatgtacaaaccacacataccacatatgcatacaggcacatcacaaaacagaaagtgagttcaaggagtgtaatttacttccagctgaaaaaccaaagttgttttcaattcacaggaggggccagattgccacggaagctcccaaggctcctcccacttctgtcagctcccagcagtgctcccctcgaatgggatctgttgacaaggcaccttctggacacttgctgactgggacaagaagcttatgggttttgaatggaaaggatttgctaaataaagcttcaatccaagacttcacccctttctcctagaggtcggggcactaaagtccttggtagctttgaaaatcactagatgaaccaatgaattatttacattttagagcctgctccttgacatggatctctaggtaaacccagttaggaaattaaactcttgcaattatatttttgcaatgaaaatgcagactgaggaagcttcttttttacaaccatattagtgtgcctctgcagtccattgtcaaagactaattctcatttaatctaaactgcaacacatcatcctggtgaaattaagtctactcagagccaaggctctttttcatctctgagtaaattttatataactctaattcttggccagtatgaggtattatacatttgaatatctttgatttcttttagattcctctttgcatctagtatatgatttatttagtttgtaatggtcattaaaaagaaggtagtgaataccagtaaaaaaaaaaaaaagctacccttttaagatagggctggcttaattctttcaaggaatgattttatcttataaaattctgattattgctcttactcaatctatgcttttgaataagctgacttattggctgttatttggctaatgacctttaaaaaaaaagtttcaggtctcatagagctcttgaagaataaatggtctcagtagctttaatttcactgtctctcatctccggatccactctcagcactgtttgatttgcaacctctcggctttgtcttttgcttccaacacttcatttgctccttcattgtgctaacaggtcttaattttaccgacttttgaccttcagcacttcctgggttgggctgaatcatttatgactcctttgcaaatgagaaaaagcacttgcttgggcaaaataggaagttattggttcctgtaaccatgggaaggtcagaagcagtaaaggaaaaaagggggattgcaagcaatagggctatctctccttctctctctcaccatgtcagttttattctctcttgcacacagtcttctttcaggaggtgagggacatgccatggcttcaggtttacattcttctaattggaatacctaacaggaaaagactcctcactcacaggtttagtctcttgactcttgaagaagaatcttcactgggccagcgtgggtcatgatctggaaatcaggcggtgctggctcagcttgagtagccatctattcctcaactaaatactatggataaagaggcattgtcatgttgagagatgatagcaaccattacttcatgatggagtgtgacggga

SEQ ID NO: 59160 - DNA, 1138 bp, Bovine  19866881269653
  misc_feature (1)..(1): n is a, c, g, or t
ntctttaagaccttatgtcagtggagccagtccacttttacgtggctaagtaagctttaaagtgatttctttctgaatatctgaagttgaaatttatggtttcactaacgtggttctacaaactataggtgttggtgtacccacttcatgcttataaatgactttgtcaacacaggagttacacaacaggtttaactgtttaaattcagtttctgcaaatccagtgaagcccatctttggtgacaaggcttttgaggttttgtctacagaggctctgtggctgggctgcatgtagcgagatgggcttgccctgctctccactggtcgaatatgcccactcctggccaagctgtctgtctcgaagtttgagactttaggcatctgtgtggcaatgcagtctaacccagagacaaactctgacttgtgcaggacacactctgagtttttcctaagcagttcagatttccatccacccctagaccaggggactggatgtcacgttcattgctatggggagatctcagcttatcctgaacacgtgtgcaggaaagggtccagatttggagctggcagctgtgtgtgctctgtcttggtgtctccccagaaggctatgatccagggaaatatacagtggagctagccttttcagactgccattagaaatccaactatctttattcagtctctggtgtggcccagtgtttggtctctacctatgaattaagtgctggctgaataaggactggattcacatcacccctggtgccggggacacctctttccccttctcccttcttctcctggcctagccacactggcctgctgaatagagcctcattatgggccccaaagtccactcttttcttcgagaaccctgccaagattggtaggccctccaatttggcctagatgttgtttcctctatggtatgtttgctgactccatgtgattctttatatgtgtcttgaagaacaaacagatcctttaacaacttttttctacatgaaaacaatcaattccagcagcccagcccacatgaaccaccctacaataacaaagcagagtgcgcgcgtgaaggaggaaaaaaagtttcggtaaggaaacagattttagtttaaaatttccaaggggttgtaga

SEQ ID NO: 59161 - DNA, 1511 bp, Bovine  19866881346485
  misc_feature (1)..(1): n is a, c, g, or t
ntggtgctgggcataggagatcttccaaatctaattgttgcatttttagtaaaactcacacagaatagatgaagcaaacactatgggtaggcttgacatcaatatgagcttcaatcatgatctgctatttttagaccagggagcacagtctgtcacaggtaagaagtcagccatggaacttaggcagtttttcaagttactgaattactgatttaattactgaacatcttcagtaactagcttgaatttgatgatctgtgaggtcatcagatgagattttgtttccttgagttctcgtgactagtgttttcccagtatttcttatgttgaacatagctggcgttttcacatcataccagttttagaacatgagtcaactacatccttcttggcttcctttttgctaccttctgaaaggcgcttgttcttgccaaccaccatgttgctgctcagcatcctttccctttgatggcctctacacctgaagtgtcccctgtttggattactcttcctctagctcttttaaagatatatactatgggatatatcattcacaaaagattatactcacttataatatgcaaactgtacatattcacatatataatgtttaaaaatggtatagagatgaacacaatacaagtttagtttttgcgcatttgaagtctaatgaatatcaagcagctctttgccatttggaagggaaaaaagaggtatggagagcatgtagggtgtctgtaaaggccaggcctgggaaattccactgccttatttcattcatataactccatccagatgcaaggaaaaccaacaaatgcagtcttcctgtgtatttgatagagaaaatgctgtgattaatacatgtcactatctttgacacaattttataatttttatccttaattttttggccagcatccataaaacagtattaagtattaaataacaggcataatttaagtcttatttctgattttaataaagattgttttcaatatgtctccatttaacaagatgacagatttagggaagagatttgcttatctcatcataccaaggaacttttaaaaatatctttctataatagatttttatttatttaatgagtgataaaagttgaaatttatcagatatctccttagcaattatggagataataacataatttttgttttcaatagcttaacattgtgaataatactttagatttcttaatgttgaattactttttcttacccctaagataaagtctaacttattagcatatctgtaatatatgtgtattaaatatatataaatacatataatgcttttgaaaagctagatttcatttactgttattttatgtaaaagttttgcatcaatattcagaagcaagattgagcttttttaattattttttgttagattttataattcacgaatgaatttcagagctttatctttttactttctcaaactgttaaacctttatctgagttaactgattcttcaaagagaaaaaaattcca

SEQ ID NO: 59162 - DNA, 1294 bp, Bovine  19866881526926
  misc_feature (1)..(1): n is a, c, g, or t
nacagaataacgtttaaatgactagaaaattaacagaataatattaagagcagtaaaatatctaaaaataaacaattgctcagctatgttatactgagaagagaatttaaaaatctcatgttgaagtgttttaattttttatgtttactttgcatatagtaagtaatcaatctttattgaataattttgtgtctcctaaggagaatatatgttatcagaatggcctaaatagtgtactgtaactcttattaaactcttttttaaaacaagggttagggggattatatgcctgacaattacccaggatatttgacaacccccatcccctctacctcagatcatggactcagacactctgggagcagccatagtgaacatgcataccaaacaagcacccccagctggttgttatatcttgaaatatttgagaaccattacataaattgtagtcagccttaacaaaatcaaagcaaaataacaatttaaatgttatcacctgccccagtcggttttggtgatggatagggaagcctggcgtgctgcagtccatgggggttgcaaagagttggacacgactgagcgactgaacttaactgacttgccctagaatagttttgtcaattttgatagaaatcagggagaaaaaaagagagaaacttagaagagagacaaaagtcaaaagaaaagccaaagagattaaatatagaaatacactcacctatttcaggagttttatgaaaaaagggtgaactccagggctgccagtactttttacctgtttcttgacatctcacttgaaatacatacatagcatttggctgcaagtagaattctgactgttgctcgtatgtaaaattggtatcaaattctttaacctaaaatagatgaataaccatagtgaagtaccataaagaaataatgcagtaggcttttaaaacaaacaattattagcggaaacatatggggcacatattatgttccagacacttctcaaccctgggaaaacagaaatataatactttgtataaaagatagtcataaataatcaaatacatgttacttaaccttaaaagtcaaatacacattgcttaatgtttgacaactctctcaagcttttaaatctcaagaaattccaacatgtaatatactcttaattttgacctggctgattttaataggataggaggaggggagacctgatagctactgtttgaattcagtccttcttcctgcccccatctgtctgtccctgtctctctgcagttgggtatttagatcaaaattctttctaaac

SEQ ID NO: 59163 - DNA, 993 bp, Bovine  19866881557872
  misc_feature (1)..(1): n is a, c, g, or t
ncttacaactacaatagttggctgtattaaggtgagttgaaaaggtactatattcttttcggtgcctgctttatttgaaaagtgttcttctaaaataagtctgactgtggccttcaccctttcattcttatttcctcacgtgttgccttgctggtttgacaaactgtggtgatggtttctaaaacaatcctgaagaactcagggagaacatgatctccactttcaggcagcttaggtctgaggagtgagaaaaggagaatgcgtcatctcagaggggaggaaggagagtgatattcagccctgtttctgacaggaaaggtgaccagcttgaaactggtgggtttgtccctttaactcctgacgagaattattctcttcctcgctgagctctggctgcgttgtagaaggatgcctgccagaagctaatcaagagttttcctaagcgtgagccaagccttaaatggcccactattaaaagctgtgtctgacattaccagtgatgtcatttcctcccgatccattttatttgagggaggctcatttgtcttcagccaggagagccacattgacttgaatattgagctgcagttagcagcttgaagcctgaggcctctttcatctgaatttgtgattctagtgctttaagatccaagaggccgcagcatccctgaattccaaaagcattagtgaggtaggcttgctttctttttaaattttttttaatataaatttatttactttaattggaggctaattacaatattgtattggttttgccatacatcaacatgaatctgccacgggtatacactttctaaaagagcacaatagagagaggtaggtccttgatcatttggaggaaacagcacagttccccttggggcttaacttctggtgcctcatttgtcagtcatgagggaagggattgcagagtagagtttgtcctggtgtgctgtgtttccctttgtacccgccaggagttgtattcataga

SEQ ID NO: 59164 - DNA, 1405 bp, Bovine  19866881701820
  misc_feature (1)..(1): n is a, c, g, or t
nctagagaatcccgtggacagaggagcctggcaggctacagtgcatagggtcacaaaggtgtcagccacaactgaagcaaataagcatgcaagcaccacatatgtagaatggatgaacaccaaggtcctactgtgtggcaagagaaccatattcaatatctgtggtaaaccataatgcaaaagaatatgaaaaagaatgtatatgtatgtataactgaatcacttggttatacagcaccaattaacacaacattgaaaacaagctatacttcagtaaaacaaattaaaaaaaaatttcccaatagaattgtttctaaacctaatataatcatcattattgtaattctacgagctaaataactataacaaaaatggtcttggctacatatcaaaagattaacaaatggatgcatattttcatattctaaattaaaataaaatagttatgtatgtagttttctatgaggcctgtcttaacagactttatgagaaatgctagtgcttcacacattcaataaataatttttactgtattgcctgtaaaacaaatatattattttctttattatttccatatttaaagttttacataatataagaggtgaaatcatttaaaattttgtccttctgaatcttaaaattcatttgaatttcagatttgtagaaaaatgcataaaactattagagataatctgtatttctattaaataactgttatgtatacaaattaaacctacctcaggtatatccttaagataatgaaaagatctaatagatcttgattttagatattcttctactggctctaaagaaagaaatccaaacataaatgatatttctatattattagattacttctaatttaactcaacaaaccattttctctacttgtaaatatttttggaaatgcagcttgttagaactaaatatattctagaataattttcttttaaaacaaatttctattaacagaatataactttcagttacttactgttacataataataaagctctattttcgtagaaaaaaactgatttctaaataaacagaatcatacttgatagtcaaatcaatctcttcattaatttctttgaaaagagaattattgccttcaacatgaatcccccaactccaattaggaattttcctaatttggattatcatttaacagattttttaaaaagtaggtataatgtagggtcaagcatacagactttggaggaagatagcctgggacttcttgggtttgcaggagacacagaatcaatccctgagtcaggaagatattctggaggagagcatggcaacacactacagtattcttgcctggagaatcccatggacagaggagccctggtcagctgtgggtccatgggattgcaaggagttggacatgatgaag

SEQ ID NO: 59165 - DNA, 1037 bp, Bovine  19866881953273
  misc_feature (1)..(1): n is a, c, g, or t
nctctttgtttggaattgggcagtccttttttttctctgatgttggttttcaatctgtcaaggaagattctggactaggtatgtttaactaaggtctcttcttgctacaacatagaatgttcctccaaataacccaggactcagccaaatggacagccccaagtcgcctggcctctggaacacttctcagtattgaagtagaaacctcttaaggcccaaccctgcagatgacgatactcttactgactggctcctcagtaccttcaaggtttactgggtggggcataatcgttttaggcacatcttgttcagatggtctagtgtaaaatcaaattcttgatgtgcttttccttttctaactcatttttatttcctctgtacttcatgctgatatttcaggacaatgtctgcttccccctcaatgtcccctaaatattacatattaaagagtagtggataatagattctaacaacaacaaatagagagtaataatgcaaaggttatattattactaagtgggttacttaaaggggtttcccaggtggtactagtggttaaaacacacacacacacacgctaatgcaggagatttaaaaagagaggtaggtttgatccctgggttgggaagatcctctggagaaggacacagcaacccagtctaatattcttgcctggagaacctgatggacagagtccatagtccatggcctatagcccataaggttgcacagagtcggacatgactgaagtgacttagcatacatgcagcttacttaaaattgaattttaaatatttctactcttaaaaatcacaagtcattattatcacagagaatcttccttctgtcagatttcttcattgttcctcagctcctcagtctattgcagatcatagctcactacagtcctttcaaagtcctttcctgggcaattcctggatatttgaattttttccaacttccttttatagagcaattcagttccctctcttttctaatgatgctccttggtattccctggggccagctttccacat

SEQ ID NO: 59166 - DNA, 1529 bp, Bovine  19866880418921
  misc_feature (1)..(1): n is a, c, g, or t
ntcagccactccacgggagtcctgggaggcagtagctcagcatcggcatctgtgcaggctcagggtcccccatggtggtagaggtggtggtgcgagtcctggggatgagccgcagtaaaccacgtttggtggctggcactggctcttggactgctttctcgctgcagacggacgtgctgaaggcctgtggaataggcgagggaggagccctggggggtggagggtggcggcggtgggtccccactttacaccgccttcccacctaccactggggcctgggcaggtcggaggaggagggaccctctccgccaggacgggtcagggcaggagagaaaacgcagtgtctgggtggacagaggaaggggaaggagggaggaaggggcagagaccagggacagcctgggagttgatgacgatgatgacacggaagcacaaccacaggacaggcaagtctccaactgcctgggttcaaatcctagggttcccctcgctgggcctcagtcttcccacctgtgaattggggatgatggccatgcctgtctcacaggttaggggcaagggtggaatgcgattagacacagagcaggcccgggcacactcgtgtctccgaggatgtggctgctatcgttccgagaactggcggggcccggactcgggttaggccagcctggtgtcttgagtccactctgcttcccaagctgtgtgtgccctctctgtgcctcattctccttgtctgtaacacaaggcccaagttggccccttcctccggggtcgggcgtgcagactgtgggtcgagtgcttagcagaggggccggcgggaccgctgttactgtcagggtgaccgatgtctaccgcccgctcccttgttgtgtgcaccggccctggggccaggccatcgcgctgggttctctgtgactgcttgcaagaactcctggaaacaggtactatctcggttctcctctaacagaagaggaaaatgaggcatagagctgctggcccagggccacgcagcgtgcttcccccgtgggctggctcagcctcgcagcagagccggcctctgggccctgtgctgtctgactcctgagttctgggcgtgcctgggaacccagcgcccactccttgacaccctgctgctcctggccaggcccctcccttcacatgtggcagctcctctccctcccctctgtggctccagtaaagtcaggtgcttggggactgctggaggggtcaggggagcccgcggtgctcagagctgcccggggtggggctcccgcctggccattataaacacggccagttcctctgtttgtcctgccctctgtgcagcgcccagagggaaggggtggccccaggcaaatatccggaggtgtgcccctctctccccatccgcagggggcgggggctggggggcctgggggctcgcgggtgggcatcctgggttggctgccccctctagcaagctgcctcctgcccaccccgtttggatcctaagctcctccctctcccgggtttagtgaggggtcatgcgg

SEQ ID NO: 59167 - DNA, 1042 bp, Bovine  19866880422794
  misc_feature (1)..(1): n is a, c, g, or t
ntattttacactaaagtacatctcaggccacacaagccacatttcgaaccctccacgaccacacgtggctggtggctgccgtactgagcagaacagcacagcgagacccttgttactcaaaacactggcctcgcttgggagcttgttagaaatgcagaattctcagtccccctccccagacccactgattcagaatctgcattttaacacgatcccaggggacttatatgtacattagtttaagaaatatgggtccagttctgcctgaaacacttctgtggcttcccactgccctcatgagaaaccccaggtactggccctggtagtcattcattcattcgctcattcattcctgttactgcgcgcctgctgtgcgccaggccgggtgctgggtgatcctgggacacagcaggaacacagacagacctgagtcatggagcccccaggcagttaaaggtaagtacccagatccctgtttcctttagaccgtgttaaacacactgtgctgaggtgaagttacggtgtgcatggggtgtaacgggaggttgacctggcttgagtggaggggcggccagaaacgaacccaaataaggaagaggccactatcgcggcagagagccacacgcaggtgaaatgtcccgctgcaggggacgggctgccaggcaactctgccggcctcggtcactaagagggatcgttttcaggcttcagggccatgtggagaaatgcccggaggggatcgggttacggggaacgagccagtgatggggctgcaatactgtcacaccggcagagatgcctgcatttggaaagcccacggggaggagctgggctcgggaagatggtcagtgtgcccacagcgggaggacttagagcaaggaagttaggtcccttttgctttgaaggccatgtcttctgataaaacacctgaattgctttaaactaactgagcagggagggaacgtgtgcgggatgtggagggaacaagaatggccacgtgctgtaactgctgaagctaggtgatgggggcacgggcactcat

SEQ ID NO: 59168 - DNA, 1125 bp, Bovine  19866880440357
  misc_feature (1)..(1): n is a, c, g, or t
nggacagaggagcctagtgggctgccatctatggggtcgcacagggtcggacacaactgaagtgacttagcagcagtagcacttagcagtataaagacttgctctagaagttgacagactggctggtaccaagcctgcttcctgcacggcagccatccctagagctgaacaatggtttccactccgagacggcaggctctacgctcggtcacagactccaccccctccctgctgccttcctccttacagctggcccttgttcccatatatattacctaactggcctccagacatttgagtttacaacccctaaacagtgtcatgtgtaaagtatgtggcacaagcctgcacatagtaacaccatttataataatatccatccactcatgtaaccctgactgtaccagacactgtttcaagtgctttcctcttatttattcatctaagcctcaaagaaccctatagggaagatactattattatcccattttaccaacaaggaaactgaggctcagagaactgcagtgacttgcccaaggaaagcacagcttggaaatggtgaagtagggattgaacttgggaagctccggaacctgtgtccttaactcgtaaatgttcaacagcctctcactctctgcacatctctccccacgtctacccaggcctcactgccgaacctcctttgcctctctctccaggtgagccaggctccatgactgtaacctggaccacacgggtcccggtgccctctgaagtgcagtatgggctgcagccttctgggcccctgcccttccaggctcagggcaccttcagcctctttgtggatgggggcattctccggcggaagctctacatacaccgagtcaccctgcaggggctgctgccaggggtccagtatggtgagaggtgccctggggccgggtgttgaagggcgaatgcgaggagaagtgggatgtgggctaacagctactattggcaggtggctcaggcaggctggtaccctctctgcttacctgcaagcctattgtatgagaccctgggatgaaaacggaaggctggagacctggggtgaaggtggtcagaaggggcatgggttagacccattcagtccccccaccaattgaa

SEQ ID NO: 59169 - DNA, 2175 bp, Bovine  19866880593656
  misc_feature (1)..(1): n is a, c, g, or t
ntttgtgttggtatctgaagagtggggttgtgtatgttcaaatacgtacatgcaggatgatatgtgtacatgtgcctgtgtccttgacataggttgaccccacttatgagcccagtgagatgggggcccgtgtggcaagacctgtggtatgctgggatccatggacacaagcgtgtccacatcctggaccaagagcctccagagggcgggggcacatagatcatgctactctgtccatgggaattcagatacagagtcatgggttgtgggcccatgtgggttttggcatgtccacatgtgctggggtgaccatggtctgatggcgaagatgggaacttctgatcctcccccagctcctgctactgtccaggtctttgaagttgggggactgggatgtggattctggaaggaggaggctgggagcctagcatcctgggtttgaaggagacaagagagctgagggaccagactcctggatcttgggaaaggaggaaactgagacctggactgttgggtctaagggagggggagtgtggggatctcagtctcttgagcccccagaggacaaaggactaaagtcctagactcttgggatttggagggtgaacagtctggggctcagactccttgatttccagaggtgacttcctgggtccacctgagcccctgtagaacctacagcaggagggctgagagagtgatcacggcaggggcttcctgggctgaggtggtctctgaggagggtctcgggagaggagccagaagaatactaaccgtgtgcttttgttcctttgcaggtactggcccaggccctgactgcctgaagagaggtgagtggggtccctccggctggggatagagatgtgaagtgattgggtttactctgagagagccagaggcttggagtgatgccttgtatgaattttagtggcaagtatggtagtgtcctgagggccaggtgccctgcaggctggggttggtgacaagatcaggaatgtcttgtttgggtaagagcttcatagaacgatggtgtggtaggtgggctctcaggcctggaggtagccccttttaggctgagtaaagtggtcagaaaaggaggcaagagtttcctgacatgaaatgaccctgcatttggatggtggcatgggtatggtttaccattttgtgtgtgtatgtgcacgtatgtggggacatctcctgataatcagacctactggtggctgagagagagccagagcaaatgatcacttaacgctaacagcagctaacatttatatagtgtttactccatcagcaactactctaagcatgttgcggcagattatctcatttaatcctcacaataatcttatgctatcatccccatttgacagatgaacacactgaggcccaaagaaaggaagtcacgtggcaggaatttgggtgtgaacctgggcagttgtgggccagattctgtccctcaatgccatgctgcctctcaataaatgttagctgttttcattattagtattacattgtttcaacttgagtcccaccctggctgtgggccttctggtttcatagatagtggttctgagccccagagagcttacagccatgcaggtgcagagctgcgtctcctacttcaggagcaccacctcccaggccaggattttctgttggaggtagagccgtgtccagagggagtgcacaacaattagtggggcggggggaggggggcgtcgctcagagatgaagcgatgctctgactttgcctctttttctttttgcagccccatcactgtcttcttcagtctctttcttctggtcttcgtctgtgtaacactcttgtttcctcttcttgtctctccctctctccatctcagtgtctcagtctctcttttctgtgtgggtctcctccactcaatttttctctctttgcctccgacttgctccctgtctcttcacctgtctttcagattctttctcttgttgtctctttgtctctctctttctctgttgctctccgaatctgtctctgtgtccacagtccccctttgcccgtgggctgaaggatcagggccacatgaggccacagcccccaaactgcagattcctgggaggtgggccagcagggactggggcatggggtggggtgaaaacagtgtcagggacacccccttcccatcctttcct

SEQ ID NO: 59170 - DNA, 1610 bp, Bovine  19866880658563
  misc_feature (1)..(1): n is a, c, g, or t
ncgggtgcggtggcttccccggcggcgttagaggcgatgcaagtgaaggtgccgctgtcccgcaaggtggtgatggttacatccagggtcccatccccccggacccgggtccggctcgagttccccagcaggcgcccgtcgggtgccacccagtgcaccacgggctcagggtcccccacggcgcggcaccgcaggctgaccgcctggccctccaccaccagggcccggccgcccgcctgccgcgtgatcagcggaggctcacacagaaactcctcctcggggatagaccagaagtagcggtcggtgaggtgctccggcgtggcacacgtctccaggtcgtcctccctggtcagccgccgcagccacagcagctcacagttgcagtgcagggggttgccgccgaagctgaccgtgagcggcgtgggcggcttgggtcccggaccttgggacctcaggaagagcccatcagggggcagtttatgcaggcggttggaggtcatgtccaggcgaaccagtttgtgaagctgcacaaaggtcccttcggcgatgtgatcgatgaggttgtggtccagcgtgagagtgttcaggttcaccatctggcccacggcctcccagggcagggcctccaggttgttgtaggacagatccaggtcctccacggtggacaggaaggcgtcgaaagcagccgactccacccgacggatctggttgttgcccaggatcaggtggcggaggttgcccaaaccccggagctggtcgcctcggacctccgccagccggttgctatcgaggtgcagggcgcggagggcacgcaggtccgcaaaggcgccggccgccacctggccaatggtgttccgggagagggtgaggtgtaccaggctggtcatgttggcgaagtctcggcggcggatggccgcgataaagttgtcggtgagccgcagctccaccacgcgccggtcgatagccggcggcacgaagagcaagccggtcttggcgcacagcatggtcagcgtgggcgccacgttctggcagatgcagcggccaggacagggctggccccgtgatgcccctgcccagaggagcagcagaaagggcagggcagtaggcggcagcgagaggagcgctgaggagaaggggcccggagccatggtgcagaggggaggcaggaggagcgggaggtgagatctgcaaggaaggagaagggtcagccaggcgtagggcttgaccacctgcctggccaccctgggatgtcccgctcggagcctgacccacatccgtcccttcctgacaatggggtcctcttggacagtaacaggactgaccatcaactggcatgcactcatgaacagatcacatcacttccatggtgcttggtaaattaccactgccccacctctgagtgtctaacccccacttctgcccctcttccaggagctcccagacctctcatgacctctcagccagagggatgacatctggcctggcctgcaccttctagtacccactaaatattttgaaaaatcactgctgactagggtttaaagtcatgaatttcaaagccatactccctgggttcaaatcccagctctgacacttactagctgtgtgat

SEQ ID NO: 59171 - DNA, 1526 bp, Bovine  19866880665682
  misc_feature (1)..(1): n is a, c, g, or t
naatctggtgagcctaaaatttggggatccgtggtatgaggatatgggtgagacagaagggcattctggctagaaagaactttctgagcaaaatccctgagatgagtgagaacagggaccagaaatccagggcctgtaatgctggcagagagctgggatttttctcctgagggcactggggagccatggcaggtttaagcgggggagtgactacttgtgttgaacctttcataagacccctttaactgtggcccgtgtgtgtgtgtaagagaaggggctgaggaccccaggagtgagatagtgtggacaccatggcaggaggggggcagacagaggaggggtgttgatcctgattctacagatttcctgccttttttttttttttggtctctggctctgagccactccctgccctggattctgacctggggacagctctgactccactagacagacactcctcctcctgactctgtcctttcttcctcctccgatgaagacaggcaggcagccaggcaagggtgtgggtctgtgcgcttgcagtggtggtgggagtgtctccagttatgcatggatcatgggctctgcaagtatttggaaacctcttggggacttctgggtgagcaggaatattgcacataagttagtttgtccccttctgtgggtcctgcctccccccagggccctggctaattcccagctttcccaggataggtcacttcacctctcttgcctctcagttccccaatcagtcagtggaggaactattaccagtgcccacctcccagggttgttgtaagacataatgagttaaaggcagacactcaataaatgtaactatgttctcccatctgtttccctgtgagccactgtctctgggggtaatttgaatctgtatccctgtgtatcacatgaaactccgtgtctaatttgccacataccagctgtgcaaccttgggtgagttactagacctctctgagtttcagtaactgagacttctactctcagttacggagacttctacaaaagtagaagtctacaaaacgggtataacaatagtacctatttcctatggaagatatggagattgaattaattactccacctaaagaatttagaacaatgcctggcacacgggcgttaattacatgagcatcatttgggtgtgagctccactctgtgtgtctgcagaatgtgtctgtcagcatcttgtgggaacctggggcgggaagcatatggggttatctggggtggtatgggaccaggcctgtgagggggccctctagtttttcatctgtgaaatggggataacaacagctccctactcagggttggtgtgcaagctggcccgcaactccatgttcattcactattatcttttcttatgtataaaatgcccgtaataatagcacctaagttgttagaggatgaaatgaacttgtaaaagcttaggacaacatctagcaagcagaaagcattcactgtggcacttgttactggtaacttatgtgggactgagcctgtg

SEQ ID NO: 59172 - DNA, 859 bp, Bovine  19866880692694
  misc_feature (1)..(1): n is a, c, g, or t
ntggtccgactgctccaggaggcaggagccgacctcaacaaacccgtgagctgccccacggagaagatgtggcagggtgggaggtcgtccccgcgtggggcagggccccagtgacctctctgctgcacccctcaggagcccacctgtggccggagccccctgcacttggctgtggaggcccaagcagctgacgtactggagcttctcctgaaggccggtgctgaccccgccgtccgcatgtatggtggccgcaccccactcggtagtgccatgctccggcccaacgccatcctcgcccgcctcctccgtgctcatggagccccagagcccgaggacgaggacaagcctggcccctgcagcagcagcagcagcagcagcagcagcagcgacagcgagagcggggatgagggcgtgagtcaggagagagcgggcagcccagctggggggccagggtaaaagcgggcaggtggaagggggagaggagacattgtgcagctcactgagacccgctgatgttggggctgctctgattggagagctcaggcagccatgcaggcagtatcaggggagacctggacaggggtggtggggagagctcaggcaccagccggtgagaagtgaaggcagtggcagaggcagaactcaagcggagagagagataagacctcggtcgtagtggttggtaaacataggcagcagaggatggctgcaggagattttttttcggggagcaagagcgggagaacgcaggctgtgggaaggtgaccttgggcagcagtgattcgaacactggcagcagtggggaacgacctcagccagtggtgaaggggcttccttggagagcccagtcagcgagaca

SEQ ID NO: 59173 - DNA, 1585 bp, Bovine  19866880715929
  misc_feature (1)..(1): n is a, c, g, or t
nacctgccaatccaggggggcatgggttcgatcctggatccaggatgatcccacatgcctgggagcaactaagcctgtgctccacaactactgagcccatgctctagatccagtgagccacaactactgagcccaagtcctgcgactactaaagcccacgtgcctagagcctgtgctccacaacaagccaccacaatgagaagccagagcactgcaaccagagagagccctcgtgaagcaatgaagacccagcacaaccagaaataattaattaatttaaaaagaagatagaaagatgagctaaagactggaagaaaatacttgcaaaccacccgtctgatgaaggactagtatcttgaatagataaagaactctccaaactcaacagtaggaaaattaaacaatccatttgggaaatgaacaaaagacattaagagacatttcaccaaagagtgaaagttgggacataagtatatgaaaagatgttggacattgttagccactagagagatgcaaattaaaaccacaatgagataccattatacaactatcagaatgcctaaaaaaaatagtgacaacatcaaacgctagtgaggatacaggaaattgatcactcattgctggtgtaaatgcaaaatggtacagcccctctggaaaaacagggttggtcgtttcttaaaaaactaaacatgcggggctttgctggtggttcagtggtaaagaatctgtctcccagttcaggagacatgggttcaatccctggcctgggaagatcctacatactgtggagcaactaagtctgttagttggtaattggtaaaggactacatattatttaatagagtgttattaaatgatatttattcatttactaattataaaactattgttcatttgctgttgaaaattggaattgcagacatgtttttctcaaccattgttaacaataattatagctgatacatgctgagcacttcctgaatgaagaatcccatggacagaggaaccaggcggactacagtcagtcagacatgattgaaacaacttaacatgcacacacatgaaataatactctaaggaagacagaatttttctaagacccagatgaggaaaaaagctgaaaaacagaagggagggatgtttgtgcaaggaaagagaaagaaaaagacagggagagaagacaggatgtaatgacaaaagagcgtgatggaagagcaagcagtagaaaccctagtatgagctcctggagggcaggcacttgtattggtacctctgccaagcttgctgcttccaattgaaggcagtggtgtgttttcagttcatcactagagagccaaagaaagatcaacacacagaaaatacagagtcctcactgaggaaaccagaagggaaagagacacgtgtaccccaatgttcatcgcagcactgtttataatagccaggacatggaagcaacctagatgtccatcagcagatgaatggataagaaagctgtggtacatatacacaatggagtattactcagccattaaaaagaatacatttgaatcagttctaatgaggtggatgaaactggagcctatta

SEQ ID NO: 59174 - DNA, 957 bp, Bovine  19866880728731
  misc_feature (1)..(1): n is a, c, g, or t
nctgcctgatacttgtggggtaagtgcataactcttcctctcactccccaaaggcaagggtctccccttacccactgattcatatctctgttccccgttttcctttgtggctttaccataagcctggcaagatgcctgatcacaaaggacgcgggaagacagtgagttcccatcacgctttatggactatggatcatcatggctatatggacagtaaggccttatcactccgtggtatccgacacgtacctatgtgccaggcacaacacattggctaaactgggaaggaattaaaattcttgcgatcagaacgccccctgcgggacagtatcttgtaagcccatttcgtccgtaaagcgaacagccaataggcaaagcggaccggccccgcggtggttgggccgcgcaagcgcactcacgatgccgggcagatccttagaccgcaactcccccttgcggagatccagcgcgcgcgcggcatcttccgggtatgcgcacagtgattccatatccagcagagggagcgcgctgtagccctcacgcgcgtgttcgtacaggaggttccggtcctgtctctccgtagcgaaacttctcttgaagctctggttacagacacagcctcctcgaagccgcaggccccgaccagctactagaggacccaagcgccgcactatggacgcagccatcttggaaggcggacaaggagtcacgcacccccctcgtcccgcccactactcatttagaccaattacaaagctgctgttctgctcgagactagccaatcagaccctgggaggggtgaagcccttctatgcctcaaaaaaacacaattcaatgagaacagttgcccgagattgacactaccgttgtccaatcgttctctgttccccgcagatcgagctagagatcggtttcagcgtgtcggcggaccgggctagggtcggtaaagtctacgga

SEQ ID NO: 59175 - DNA, 1139 bp, Bovine  19866880752265
  misc_feature (1)..(1): n is a, c, g, or t
ncaggtcacagaggcctcctggggaagtccctgggccaagacaacccctctgttctgtgtttctgggtctgcccacccagccccacagaggggaggttctggaggcccagagagagcctctatacctttgcggatcaaatgctgcccaccctgtctgccctccctggtgctgcctgcatggcccaggcctaattccagatcctagctctaagcccgcctcctccatgaagccttccctgggtctccctttctcacaccctccctctaacttgaatactgagtgtttgtcactgtccccctcactgagctctgcttcatcccaggctcacccccaccaccacgtttgctttgcctaggccactcatctggtctagcttctccaatcaccccccatccaccaaactggacttcagaagcccagccccagcccatctccaggaagtctctgatggtcacccatcccgaatcctcaacccacctggtcccaccacacttacctgagccctgagttgttccctgccccacaggatccctcagcattcccacagccacaactttagctgccacccactgggtctgctctctccaacccccatcacctcatcctacttcagggccccagatgcaggctggagacttccaggaagccctccctgatagctagcctccctgaggctgctgtgtcatggagccccagacaggggactccccgagtaaagtatggtccaggatgaggcaggagggttgatactgacactacagctgcccccattggcacacgggttcccatcacagggcccaggcccaggtacgaggcatccagtggtggcagacgatgggcccctggagctgaggcagctgctgctggagacagggattgtgcagaggggcccagtccagccctccaggcatcgacactcatcaggctgctcacagaagccgtgctctgggctgcagcctgctcgacacaccgctgtggggggaaggagaggcagaggggaagaggaatattgaagggcagagtcaggaggataggaaatcagagacgattctgagcactttccctgcatccctcctctatctttgtactacaacccactgggctaccggtattagacccccagttacagacagggaaa

SEQ ID NO: 59176 - DNA, 859 bp, Bovine  19866880752972
  misc_feature (1)..(1): n is a, c, g, or t
nttagccccaaaggagaagtgaaaaggccccagcagggatgaatcatcagtcctggggaagaccccaggcaccttggcctcagctccgggaagcagaccttgaggaggaggcttcaggaagagtgtaccccactgggctccccacttccctgagaggcagcttcagggagctcagccatggccgtcaggcctgggcaagtgtagggcggagctaccagctcaggcccagctggtggggtgtgaaaggtccaagtgactcagcctggttgggggacggatggccccacccagaaccttctgtaccctggttcccatggcaccgcctagaggtctgctgtcctggaccccactcagtgcagaacacccaggaccacggagccttgcaaatcacccagagcccaagtccccacgctggagttctgggaaatggccagctcttgtgtgtgtgtgtacatcccagcagttccttccctttctccctgaccttcctagaagtgccaggcacagagggcaagctccaggcagggcagcagacctctcgggcacaagctgaagctgctgtccacagggagaatttcttctgagaggaagccacagctctgcccatttatctgactagatcagtcccccacccatgtgactccccacatcttctaggataatctgcttaaagtcaactgattatagacttgaatcacatccacaaaattccttcacagcctcatctagattaaataactgggagctgtagcctggccaagttgacaaataaaactgaccatcataaccttgtcagtttggcacccctacacatctccttaaccacacttaatctccaaatcaacacaaaaacaaagtc

SEQ ID NO: 59177 - DNA, 1133 bp, Bovine  19866880798835
  misc_feature (1)..(1): n is a, c, g, or t
nccttggcctgaaggaaggggaactggacctcagcgctgcccacctgattccaaagcttgtaacagcggtcactgcacgtgctattatacacgtaaaagcatctggtttaatcgtcaccaaatccaacagaggggatactgtgagcggagttattttttttctggtgaaggaaattgaggccggggggatgtccagttgccaagaccacaaagagggtgaataccacacaagaaggttcaggtcacaaaccttgggggctggggtctttattgcaacccctccccagaagatggcagtacagagtcttgtcccagcagaagaggttgttggagccagcatggaagccaacagtgttgggagaggggcgcccaggacccctatgggttaagggtccactgggctgggctttgaacccagaccagctacttctagagctggacttgcttcctcagggcactgcaggtgcaccaagggaaagaaagttctgcgtgatgatccacccaccgggtccccacagtcacttcttcttctgcacgtggccacagtcgtacttgccgcgcacgaccttgagcttgacacccggcaggtcctgcgtgcggccgccctgtacgaggaccacgtggtgctcctgcaggttgtggccctctccagggatgaagcagacggcctcccggccagtgctgagcctcacgcggcaacacttgcggttggctgagttgggcttcttgggcttgcggataaaggtgcgcaggaccacacccttcagctgtggccggccctccgtcgggcctggtttcgaaggcggaaacttcggggggccccgacggtgtagctggttcagggtggccatgggacgcgtgccccaaggccggggggccagggctaggcctggagagacaccaggagggcggaagagagattattatcccagcgaacagataacagcatcagccactcgctcttttgtttgaggcaccgttccaagtacttcccagggctatatttgtttatggctggaggtactcatggctgagagtaatattaataacatttatggagcaatcaccatgtgtcgggttcttttttaagcatttcgtaagaattaacttacaggtttccactgtgtcctgta

SEQ ID NO: 59178 - DNA, 1699 bp, Bovine  19866880803483
  misc_feature (1)..(1): n is a, c, g, or t
ntgaaaagtgcaagaagcaggacagaatacaaacgtgaagagtcagctccatgtgagcaaaacaaaagtgggagaaaagatgcgcaggaacaaatgtccaggaaagaagagaaaccggaacgaggctgtctctgggaaggggccaaccactggggtgggaaagagacctacagctgcacactctctgtgctttgcgtggcttctcaactgtgaacagatcatacgtgccgctggggcaaaaatgggccttcttaaaattaaaatgcaggaaaagagaaatgaggttaataacaccccttcctcaaggctccgggccgagctgctgagagatgcttataaagcacacatctagctcttagcacttgggagctgggggctggcacagtgtcctgaggggctgggagcaggtgaagaggaggctgcagcccagagcggggcacatccgatgagtttactgtgtgcctggcaacatgcaaacatgtcgacatcagtctcctccaaccctcccaatagctcatttaacagctgaggagggcatccccagtggcttagctgtaaagaacctgcttgagatgcaggcgatgcaagagatgtgggttccatccctgggtcgggaagattctcctggagaaggaaatggcatcccactccagtattcttgcctggagaatctcatggacagaagagcctggcgggctacagtccatgtgacctcaaagagttggacacaaccgaagcaacagcaggagcaccatgtgagggaggagaggcccgcggcggcccggcctccccccagccccggggtcctcactaggggtcgggctgtggggtgtggggaacgcgtggccctggcaaggaagctgccactgctccgaggacggcagcagagcacgtggcaccctggggaaggtcagggtgggaccagagggccctgtgacaccagcagcggtgagtggtggcttctgctacatctgccgtagctggctcccctgggacctggaaaagctccccttctgaccctccttgcctccccctcaaccttcctgtgggccagggcagctgtgagacaataagccccagccccggatgggtggctgggccgggaagggtcccatttccctggtcgtgactgggaaggagaccgcttcctgctggcagcatctgtggccgcctggctggggtgatgggagaaacagctgctggggacaccccgagcggcgtctggccaggaagtctggctcactaggagccagcaggacaaggaggggtgacgcagtggaccagaaggggaaggagctgtgggaggtcctgagggaggcgcgggcccagggctcagaaactacccaggctgccccctaaagagtttctgtccaaacaggaatctgggttaagaacaggaagtagcctgcttccaaatcactggagggccactgtgaaaacaagcagtgactctggagcccggaggcctgaagttcaagccctgcctctgccacctgcctgctgtgtgtcccaggcaggtcacacgcctctctgggtctcattctctcatccctaaatggggttaataaccatacctatgggcttcccaggtggccagtggtaaagaacccgcctgccaatgcagggatgaagagacatgggtttgatccctgggttgggaagatcccctggaggaggaaaggcaacccgctccagcatt

SEQ ID NO: 59179 - DNA, 1221 bp, Bovine  19866880856885
  misc_feature (1)..(1): n is a, c, g, or t
nacctaaatgtaaagtgcagaactataaaactcctataatgtagtataggagaaaatctagggaactgtggtgatgattttttgtatacgctgaaagcacaaaacatggaagaaaaaaaaattgatgaattagaaaaatttaaaatttcagatgacagacaccattaaaagaatgaaaaagttactccctttctctcccctagtcttaaaaagcatgattttaacaaaagactggaaagaatatcaatgcctaccaataggagtttgggattggttattcaataatcccattagattggaagccttactagtggtacatgcaaattgtcttccatctgcccctccaagttcattcttcccacttctctagcctcctctgggccccagaagctggcctttggcttctgttgagtgcagccaatggggagcctagtaataggccccgagagagggaaagtagaatacaggcagtgtatttacttctctttccctccacctgtgtgtatgaccctctttgtcccaggtcagggaacccctccctcccctatccgctttcttcaggtttagggatgacagatatacaccggctgggcccaagaccttgaactactcctcctctgctccctttaccatccaatcccttggtaaacactcctggtattaaaccacttcaaattatcctaaattgattagggcatctttcctgcaggggacctcactgatacagtatgattaaagatgtgggggaatgcaaaggagagataatggtaagacacaaaaatcaggctaccaaactgtatacagacaagctccaacttggcagaaattgttcatagagggaaaaagaaaaaaggaggattagcaactaactgctaaaaagattacctccaggaagtgggattaaagacttgtttaactctccaagttgtatgtttttttaattggctgaatctttataacgaatgtgttacttcaataatcagaaaacatacacacaaatcagtctatgtacgtttctacacattggaaaaactgttccagagctggggtgaggcgagacagggtgaggtgggtggtgaattgacagattttctttttctcccttacgcatgtctctatttttcaggcgttatccaatggccttgcattactaattttatcgggaaaagtagtaggttttattatttatttatttaatatttttatttatttatttggctg

SEQ ID NO: 59180 - DNA, 1105 bp, Bovine  19866880872490
  misc_feature (1)..(1): n is a, c, g, or t
nccccacccttggggctccctgcaagggtacaggatgggggcagagtgtctcccggtactgaccctcttctcccaggtgtgggctgtcacctgggggacctcgggcaccccaccccccggaactcctctaggtctgtctcctgattagctgcacagagaacatcccctctttccatcagaaatgtgtgagacagagccctatggctgtcggtccactgaagataatggcctactgcttggggattttaaaaagccagaggctgggaagatgaggtctagtcaggaggtgagggacgaggaagaggaggaggaggcagcagaaaggacccacaagtctgaggtgcgggaacaggctgtccgtgagcagctccacagccggctccaccaggaccacgaaagaggagaaagaggaagaaaagaagagggggcccgtggagaccttggagggcctgtggaagaagcgtctggagggcggcaggggcccccaagaagcaggtggcagagcaggccagcgatgaggagacggcccagttcgaggcagaggagaagggagtgcaggtgctgggcgagggccgcagcctgtggcagggggtcgaggcgggcggagagagacgtgagggaccgccaccactcccgccaaccagaagccgagccccagcaggaggagaaggaagaggcttcagacaggcaggtgagtggaggcgacaatgggggagcagggtagaccagatgtcagtggacatccttccaagtagtcaccaacagcaacatccaccatgaataggctgacacaaggagtaggtagcaacacctaagcggggccttcacctgaccaggagggcttccatgcctactccccatacagcaaccaagaagccacccttattgcccagaagcgccagagttagctaccattgctggtctgtgaccagtgtgttggccccatgaaaagtagcagctgtgcccagttcactgggccataggcggacaccactggtgggtcgtggagagtagagctgtcaccacgatcaacagcagtgacagaaatggccctcacctcacagatgggtcatggcatccaaggtgagcgcctgtgctagccctc

SEQ ID NO: 59181 - DNA, 1135 bp, Bovine  19866881009004
  misc_feature (1)..(1): n is a, c, g, or t
natttacatgtggaagataatctggctcccgtagcctctaattcacggatttcctctcaataccctgagcccgcagcggttcgtttggctgagcctccatgaaactggctgactttccagacccggttaaagaaactcacgcaagaaagggctgggagaaggggagggaaggcggatgagggctctcggccgctcgtgaggaaggtgtgtgaagctggcttttagtttttaggacaaacccagcagcaattggttcccttccttgtggcctccgcttgacctgggagagtgggtgtcccgccccgtcctgtggcgtgggcgttcctgagcaggacgcggcggcgggagactcccagccctagctggagcgcccgcggcagtgcacccgcggccctttgtctctctcgggctcccgtccacccgccccgcccctgcattaccattggccgcggccccggcccggggcgggggggagagagtgaggaggcggggccgcgtggcgtcagcgcaagatggcggcctcggcagcggtgttcctgcgattgcggagcgggctccggcaaggcgcgcgggggctgtgtgcgaggctcgcgacgccgccccctcgggccccggaccaggtgagccggatggggttggccccggggtgctggggctccttcctgtggttccaggcggaccggggccgcccggggcttctggaacgcagcacctcagggtgctgaatggaacgccacccgcgttttgagtctctcccccgtttcccggggttagcagcgcttgcttccccgggatagatgcttggggactcaagtgtgttctctgaaccttccttacctcctctggatcccacctcttctggaccccaccttctcgaccccacgtgggcgcgggggaaggaggggtcacctgctctcctgtctctgtgactgttcaggtaatacttgagggggaggggcccgggacactggagtcccagcctggcctcccgggtattttccccgccatggtggtggtggtgttgctcgggcttctgattcgacctgcctccatcttgacaagagaccctgtccttctgacctccgggtgcattacttctgtgccctgctccccaagtctcagcaagcgattgccc

SEQ ID NO: 59182 - DNA, 1022 bp, Bovine  19866881311245
  misc_feature (1)..(1): n is a, c, g, or t
ngggccggtggaccgagcacattaggtagtggtgggctccctcctgggcaagctggagcgcgaatctcccgtgtttaaccctattatatcccacagagggcttcagaggctgggaggtggagcacggcgggaatggctgggccgtggaaaagaatctcataatgatgccgggcgctccttcccagacctgcttcgtgacttcgttcgagtgagtggcccttgatcactggggcgagggagggggaaccctaccctacggtcctcatcctcaccctcacccacgttcacactctccttcccacatgcatgtactcagtcattcgactaataattgtcagccttttgaattccctcttttgtcagttacctgttcctatttttaccacttactttatttatttggctgcatcaggtcttagttgcggcatacaaactctcagttgcagcatgtgggatctagttccctgaccagggatggaacccaggccccctgcactgggagcatggagtcttagccactggaccaccagggaagtccctgcctgttcatatttttattaaggttgatgtcttattctcgttgatacacaagaattcctatatattctagatgtcagttgtttgtccatcctggacattacagaaatctcccactctaccatatgaattaagtgtgtccatggtattctttgttattttcatatgatcaaattcatctttttgctttagaatttgtttttgaaattttgtttaaaaaatccttccctccccttagatcctaacagtgttcacttctactcttttctagtaacctcatagttttatcttttatatttagatctttaatccacctttgaatgtgatgttcggtaaggatccagttttttgtttttccctctatatactgagccagttttcccaacaccatgtactaaagaatccttccttttaccatggaatgtcagcgccacctccatcatttatgaagttcccatacatagctagatgtgtccttgagcact

SEQ ID NO: 59183 - DNA, 702 bp, Bovine  19866881417989
  misc_feature (1)..(1): n is a, c, g, or t
nacgaggagagagaactccaacacacacacacacacacacacacgcgcgcgatagtaactatgaggtaattgatgttaaacattgtaattatttcacaatttacatgtatctaaaattattttgttcaccttgaactaacagcgattatatatatcgcaataaaactggaagaagaaaatccaagatagaaaaatatggacaaagagacagtgtcatttacatagtttgctgaggacctgacactgcctgacacatctacaaaattcttaaactgagatttagaccgactcaaatttccagacatctaagaggcaacaccaccccctggtgacgaagaggaaaactgtacctccccacaatagaaaacactccctaaccgatcgtagccagagtcccaggattctttccagcctaaaaattccgacgatcgaaatgtttattcttttaagtgacgtatatgtttcggttgattaataagaacaaatttataaaccggtaagagaaaaattaaaaactgctccaggtgaggatcgaactcacaacctcggcatcgctccgctcgcactgccctataagtaccgcgcgctaaccgattgcgccactggagcttcggccgcacccctgtgccgtgaagtccttcagtcattcatggccacgtgaccttggaggctagctccgcctctactttgcatatacaaata

SEQ ID NO: 59184 - DNA, 1241 bp, Bovine  19866881558797
  misc_feature (1)..(1): n is a, c, g, or t
ngttgggggcggggcggggcgggggggctcggactcctgcgtttgagagacagggtggctgggaaccaggactcctgagtctggtgaagccacggcctgggaaccgggtctcctgggtctgagcgaggaggcggcttggaaacccgaaccccttgatctaagcaaggaggggcagaggtcggggctcttagtacccccgcccctgttagtgtttagacgggtgctcagtccttcggcgcgcaaagccccttccagtctctcttgagaatctcccaatccgaagcgccctggccctcgagccgatgactcagcatatggaagaggggagggggtcagcctgagtcagggatgggaactcctccccgtctccagggaatcgaaactggtattccctcctccaggacagcggccagagccgagccggcccctaggaaccccagaaagcctcccatctctcgttctcccgccccttagtccgactacgagcacagggatttggagcccaactgggcggcgggtgccgggcatctcccttttccctccttttcccgtagtcctcaagcctctgtttacaggagaccaaaaccctggttacagagaggaacccgggcgtccgggtcgagcctcctcgtcacggcttccaggaagccccccccttcccccgccccttgtgagtgagtcactggcgagagggaggctgcaaccgtgccagagccgcccgcagccgcccagctcacgggaccggccgggaaggcccctcagcccgagaaagcgccgcaccagggattcccccgtgctctgtcggacgggcagatcagcgagcctagcagaatctcctcacctcaataaaagcccgcagtccgcggtcacaacctgcaagaatgaactttccaccataataactgcactccgtggcaatgatttatttctaccaccgttttttcagtcagggcagccagctctggagaccccctttaaaaattagtgttttcaccgtatcttaagagagcatcactcagggcaactccttgacaataaaagacttgtcaatgaggggagtcatttctgcaaacgcagagttctttcaaggcacatccctttatgagagacccatccgaccatcagttggggatgatccgttccttccatttgagacagctttccagcaaagaaaccctccaccataataaaagatttccccttttccaatcttgagttttcgagtgcaaactttttaaaat

SEQ ID NO: 59185 - DNA, 745 bp, Bovine  19866881892185
  misc_feature (1)..(1): n is a, c, g, or t
ngcagaaaaggctcaggaagagagatggctgactttcagaggggtgcaggggctggggaaccctgccagaaatgcagagagaatgaagacagtatctcgacaggcacaaaagaacccttcaacccagaaaggggtcattttctagctgaagcagctcacttaacagacagtgctgctcagctggggtacctggtacctctgaacttgttccgtgtctcactctgggctttacccgtctctcaccccgaggctgcctgcctatccaacttaccgtgtctgtgaactggtaggcaataaacttgcgcatcaaggaaatggctgtggcccgttcctccccaatctggaagaataaaggcaggcttatgagagatgacaagacggagaacaggccatagaaaagtgggcaggagagagcagcaaggaagacagagacggggagggcaggatagggtatgggattaagagctacaaactactatgtataaaataaagttataaggatacactgcacaggacaagggacatagccaatattttgtaataactacgaaagcagtatctttaaaaattgcaaatcactatgttgtacacctgaaatttacataatattgtaagtcaattacacctcaattaaaaaaataaagacagtgtcattgtgcaaaagataaagtaagacagcaggaattttcctggctgtccagtggttagaaaggactcagtgctctcactgccaggggcccaggtt

SEQ ID NO: 59186 - DNA, 2021 bp, Bovine  19866880791580
  misc_feature (1)..(1): n is a, c, g, or t
ntattactattaaagacagtcatactttgctgtggccattgtgatctatttctcaaaagaagtttcattagcttggattagcattttctttaaaaaaaaaactgaatatgaaaaacatagttttctctttccagagtctcttccagagagacctatttacaaaaggtactattttttcatatatccctaagcaacacggaattacacataaggggccagactgcctcccagagagtaaagccatcagaggttggatgtctgaacagcatgctgagtctttgggaaaaaaaaaaaaattttttcaagtgtaataaaatcagctgggtcttaaaaacctctgggcctttcagcatccaagaaaactggttaagtgccctctgttaaggagttttgttgagcagttgacaggaacgagacccagctcctgtgtcggacagtgcagaaggtatatcagcctgagatgggagagctgggtgctcctgtgccaccagcacttccaaaatgccagtttggcacttcagttacagtgctgtcatcaagccagtgcttgtgcatcatcttagtctggtcacctgtaagatgaaaaggttggacttttcctgtgtttttgtccggttccagcagctcaatagtctgatgggtctgaatggagtctggtcccagccgatgccactgcagttaataggtgcagcatctccgtggaacacaatgaccacagcaaagaggagaaagtattaagtctccacatggccagattgaggcctgagtgcaaatcttttcatcaaagtcctgtatgctatttaattaaaagtcaccatttaattaaaagtcaccatttaacctggagttctattattcacacaaaaaagacttattagaccatgtaattttcgtggcagaactagattgcatatctctctgagattaacttcacattttcactcattgggtttctccaatcgtacagaagagactgagcattaaggctggatttgggcatgagagaaacaaaggagaatcttgacatgagcaacccctcatttagggtgagattttgtgttttttctttttctttgacggctatatagaaagctgcccgtctgatttcttctactggtatatgacatgggagagtgcaagctggcaagacttcagctggaaaaaaacgctttttggcaagtaaaggagacacattgtcagagctttaagaaatctaggagctactgctcagatgcagtagaaaagtaatttcattgtgaaatgataacatttcttttacctgctaaagtttggtcttcagttttactgtatatactatatatatatacacacacatacatacacatgtgtgtggtgtatatacatatatataaactgtaaataaaagcaactgaaaagtaatcacaaaaatagaaaaagaaatcaaagagcaattcaaaaagaaactggctctgaagggcatttagttgttcttctccagggacgcataataatctgtcaggactttccatgctttgggggccatgaagccatctggaggattttcgccttcccgggccagcttcctcatacgagttcctgagatgaagtcaaactcgtcgtgcctgtcatagggtagcaacaaagaactcagcgtaggtaaataacatctacttcaaagaccccaggaggatgttatgggttctgaaactacatttttttctttctgtaaaatgcatctaagttaagcagttcagtaaattttcagtaaaggaacttgcagaaggcccggacatcgtagcagctctgcagtcagcgctcactgcaccctcagttcatagggcatgtctcctatagctctgactacttggtgagctctgagcacgggttgagtgctctattaacacatgaaatctttttctgtatatacaaccctttcatgtaacgtgccaggcactcaaagcatgcccaaggaatgtgtgttggaaaaggaaatacttaaggaccatttaccacaagatgagctacatctttgggggaca

SEQ ID NO: 59187 - DNA, 1269 bp, Bovine  19866880858451
  misc_feature (1)..(1): n is a, c, g, or t
ncttaaactggtaacaagttgaatgttttctttattcacctttctttcattcccttctgagtcttgaacttggcaacaccccccaaattgcccaaatattctttagtgttacacccttaattctgtgcccccattttctaactgtaagtacaacagaaagtctgacatacttgctggagtgttggggcaccattacaaaagcggggaaacagctgtgtaatctcttatgttctctggcttcattaaggaatcacagacctcccttcccatcttcagggggttggttccaggagccagtgcatatagcaaactttgtgcatgctccagccccatggtccagcctctgtatctgtggattcctcattaacgattcaaccaaaggtggatcctgtatgaggcttgctatctgcaaggtgatttaatatgcaggtgcaggatttgcagagatgccaggcagtgcctttatttggtctaattggatttttaaagactaagctccctagtgtgtggaagtcaggacggaattttccaaagggaactcagaagggagacaatccctcctgggcctcccagtcacttactgaagccatctccacaatttgaaacaccccacttttcacaaacgctccatctcttgctttgagaagcctcttcttaaaggattgatcacagattctagaaaaactagtgcagcagcacagctatgttagaggaaggtcttgatgccttttgcaggaaatggcacacatgggagtcccctttaaaggagcacatgcctcgtaccccacgttcacacaccacatggctctttccacagatggagtgatcaacatgagcatccctatagtactccccatctctgcggatgataagacacggctggaaggctgcagtaagtttgtcttgacacacggaggacggagggtggctatcttagaagatcctgaattctatgaacatagaaaagaggagcgttgttcccatgtgtggggcacaacgtgcgcaaagcacccctatatcaaagtaagtggcaaaaccttcagaaggctttctttcagcttggggtaaaaaaaaaaatcttttcaattccttcacgaaggacttagaaaaactgtggtgagatggaagaatgtgtttctaagggaggtattgcaagctttgcctggggagatccttttcattagggaaaagaaatgactttctgtttgagggttggtctgaatggtctcttgtgatggccagtcccctcagctaaatgggtaacaaatg

SEQ ID NO: 59188 - DNA, 1733 bp, Bovine  19866880891485
  misc_feature (1)..(1): n is a, c, g, or t
nacaactaaccttttttttttttcttttctcaaacgttgggctaataatggatcaaccaaaccagtatttgtgtcaactgtttatggccagggatgacacacctcatgccatcctatctcagaaatgcatattgtgggagaggggcctagtgaaactccctcagccttgaggtgtctctcttatctgattagcagctcactaacagacataaaatgccttgctaaaaactagcaaaggggccttctttctgtccccttctgatgtctatgtcaaaagctttccctatctctattacactttaataaaaactctgctgcacaaaaagctccaagtagtcaagcctcgtctctgaccccagatggaaatcctctcctccggaggtcacgaatcccggagtaacacacggcttgcagaagcaactgagaccgtgtgccacaactactgagcccccacgccctagagcctgtgctccccaacaagggaagtcaccgcagtgagaagccctcaccctgcaatgaagagcagcccccgctcgctgcaaccagagaagcgtaaatgacacactttctggcaaccacagccattgttatgaacacgttgctcaaattttctagaactaaacagtcacttgtactctccttttattttttaaagttgaaacattcggtggtgcaggtaaattccatttaagtttataacctgtgccacagcaaggaatggtgatgttccttactcaactctaataactgaaagttgattaactgagaaaagaaaaaaaattttttaatttaaatattcaattttaataataataaaaatattaatactttaatcattatggacaaaagttgttcaagaggagctactgaggatgtgggatggtacagggcccaattgtaaattttcttaaaagtgcatcatcaggtgttcagcggcatccctggtttgtattcattggatgccaatgtgtagcccacccaactcccactccccctagttgtgaaaactgaacaacactgccaaattcaaaactggcactggtcaagaaccactctactaatgaattagtgactaattcctgtgtaacacaatatccctcccagtacatctaatgagaataacataaatcaaagaaataaagcttttcttgtttcaaggatcagtgaaaagccaagtcacagagatacatagggtcctggatccttttggtcaccccacaaattacttctcccagacaactgtctgttttcttcttgcattcacagccagcactagagttctggatcagaggtaaggtcaatcagattcataaacacacacgtacacacacttggttaaattgcaaactagttgaatttggcagatttcattctatagtggatgccaccagctactcacctgctggaaactaagacaatcaaccaagaattaaaataaaggcatggctttgctcttacatgggacattacatctatttttgaatgattaataattatcctctgtgtaaaatggttgattctgttatactgaaagaaaatacccagtgcattctaataggtaaagagtaagatttcctctttgttttatttccaatattttccctgattttcccgtgattggctcaaagcagcaaactaacataatcggaagacatgtattggggttgtaaacatgccagggagaccctttgtaaagaagccaataaggtctcagctctcatagctccctcagt

SEQ ID NO: 59189 - DNA, 1101 bp, Bovine  19866880956184
  misc_feature (1)..(1): n is a, c, g, or t
ngtaaaagttttactgtagtatagtagtcatcagtgcagatttaacattgcttattatacactaaagaaatagtaaatataaaatatggtgagacataaccacgttaattttaaatatagttttagatagagaaagatgcatttgtatgtattaccttttagaattttaacaacattgaaggtaactggtgatattttaattcttgtgtggtacagtataatatctgctttattccataaaccacgaaaaaaaacaatacagacctcttaacatcacaaaatactttttggaagtctgattttcagaggtcctcattttgagatttgccccatttgctatttgttcatgtggtgatagcttaatactttgtaataatttttaagccacttaagtaatcacttcagtgacttttagtgtaagagtatttattatgggaaaatcagttcacaaaattttgacattaaatcactctcagacattctattttaaaatttttacctcaacctttctagtgagacagcagcgtaggaaatgtttttatattgtatgtgaaattggagtttgtaaaaagaaatttagaagtttgcacgtttatgacagtttttcacttaacttgaaatgttaggccttggctgtactataagaagttagctttcagaaaaatgttattaatgaaagaaatttatttggtatactttttttttctgtagacactctttgttccgaagttctatttgtatttcatagaactgtcactcttttttctgtttttctgttagataaacaagattttaagtaaagtcaagagtcttttgtggttcgatttctgttaggatttattctaaggatagtgacttaagatgtatcagactgtgagattcgggtcagaaattatttcagtaaatattcagttttacttaaaatactttcatttgtcaggaaaggtgaaattagtatattggatttgactattcacctactattccctactttttggaattttttcattggctacaaaaaagctatttgcagtttggtacttttaaaataatttgcattggaattaaaaagactgttggaaaaatactgatttaaaaaga

SEQ ID NO: 59190 - DNA, 1447 bp, Bovine  19866881166874
  misc_feature (1)..(1): n is a, c, g, or t
ncatggtcatttatatattgtctaggtctgctcttgactataatagcagaatggcatgattgcaacagagattgtatggtctgcaaatctaaaatatttatcctctggtactttattggaaaggttcctgacctcagctctggaataaagcaagccttgactatagcattcatgcatttttataatcaagtagacccaccctcttcagcagggattccagcccagatatgtgctccctcttcactcaatcaccatggtctgagtggcttgaaaataataacgtacttcagctctaacggctagcaatgcatcagatctctatctcagatctatgaaatttcaaaataacttattcctctttgcctgttgggcaaattgttaaccctacatctgcattccttgtaattttatttgcactgtcctttgagaaggacacccagttctttcaaaggtgggcattaggatactgaatttttttctttctggaagaaatatataattcttagatattctgagttctgaaccaaagatatttccatatttctaagaagttgaaaagaatggtggtgtttcagacttgcaacgtaaacattgactcagtccatcttcatagagaataaacaggtgaatgaaagcacccaaaggaattgtgagaccaataatatgcactccatcctgaaatgtgactgcattataaaatgcaaagtgggccataaacaaaatgagaatctggtcatcctaccccctttccacctggattcacaactcacttctctgatcacattggcatgcgaaatttttgtctccattaagatgagccagccatgttgggaatgttttttgagcagaagcaaaaataaaatgctaataagttgaacatagatgtacttgcaccataaaaaacatctgtgtctaataggagttgtgaaactatatttataaaaatctttaaaagctattctaataggaagcaattattttacctcatttgtcacatgacaagctcagagaagctgatttaggtagattcacactagatataaacatcccccaaagggtggagatatgaaggtctcaaacttattcgtaggacttttttccaagtaagtattgaaaaaaaaatcatctgtggaattctgtaaacttttccctgctcccacccacaaaatactctcaaacttagtcctccttatccattccattccttaacctatttggccatggacacccttcttcatattagaattctgatgagaaagcattagctaaacatatccatggtctaattactggcttcttttacaaatacaaattgccaaggagtgcaaaaaaaaaaaaaaagggaggttgagttgttaagattaatttgttgttttaggcccaacgcccagtggctaagtcatgagagaagctaatgcacgtagccctgacacgatcctaagcgctt

SEQ ID NO: 59191 - DNA, 1423 bp, Bovine  19866881306437
  misc_feature (1)..(1): n is a, c, g, or t
ntgaactctgggggttggtgatggacagggtaggcctggcgtgctgcagttaatggggtcacaaagagttggacacaaccgagcgactgaactgaagttatcttaatctgcattttatctccatgagatgctatcatttaagatatgaagtaattgaggctcagagggatgaactggcataatgtagtccagctggtaaatcactgacctttaaccatgaggcaacactacctccctttcccgctcgttttcccatgctctctcttgctgtgcttgtctctccatggtccatcttggatacattactgttactgtttgtccccacccactaacagttaatatttgacattctgattcttctctgattccccattcctcttctcctcccattggttgtggttgtgttgtgttagtcgctcagtcacccctttgcaaccccatgggctgtagcccaccaggcttctctgtccatgggatttcctagccaagaatactggagcgggttgccattcccttctccacggggtcttactgacccaggaatcgaacccaggtttcttgtattgtagactgattctctaccatctgtcagggaagccccttctcctcttgtatttcatgcttttcccctcgccttggtctctctttcactcttgctacattgatttactggctttcctactttgggtatcagccatagattattattttaaaggactctttttttttttttccctcaatggtaaccaaatgcttaccagctgtatataaaaatgtagcccctgcagatctgatagctaacctactccctgtttaggaggggctggtggctggagggatacagcaggtttacatgttcaagtataaaaatacgaaatgttgttggagccatgtaaattccattaaggaggattatagtgatgctgaggataacaaactttgagaacagcaccgtattttgtgctggtagcataattttctggattactgttattctgacattatccacatctgactctaccagcacatattgttcagtagtgaagcttgagcatattttcctaaatttaccctttctgattctatcccaggaataactttagagagagcttgcagctgatcctccaacagtggctggctagaataaaggccgtgaactttgttctgaggcaagctttggaattttaggcaagtcagtcttgagaggagttctgagatgatggtgggcgggaggaggagtggacaatggggccattttcaacatcattacactggatgaagtaagacttttcctataaagcgtccttgaggtgccctagcactcttttctggtaactttcttggatagaaaataaacagaggacttctggctcctgaccgccacagcacctacagaaagcagctttttagaacttgcgagcta

SEQ ID NO: 59192 - DNA, 747 bp, Bovine  19866881560756
  misc_feature (1)..(1): n is a, c, g, or t
naaaaaaaaagtctctactcgcatgcttgcagcaagaggtgaaacaggtgtcgatcacacaactgcctgacaaccattcagtgctgatcaccgaacaagcatgtttatttaattatcccaacaaccataattgagccacatctaagtttctgatgtcactgacttcaactattcaactccagataaatactcaacttaaaaaaaaaaaacctgaaataagtgacaactagaaatggctgaatcattgtacgttttagacacaaccattaatcttagttttgctatatgctatttggtactttttgattcagtagttgggattacaaaaaaaagtttctgtattcaaacctatctacagaatgtcaatataaaatgtgtgactatatacatttaatacacacatacacacatacacatactctcacatatctagaaaccagcacttaagcacgtctccaattctcactaatgactcaataaatcatttgttaccttaagaccagcttagacactataaggctgcaacatatggctaaagaggtcaaacacaagcacccacagtcaggctgattaaattgttcctcctcatgatttttcacaagtagtaataccatttatataacaactatgtctcaataacttagaattcagagtataaaaccagtgtcatgaacataaaactctctcgctgttgaaagaacactcctccttcagctatttccactgatgataagagggcacaccaaa

SEQ ID NO: 59193 - DNA, 774 bp, Bovine  19866881695948
  misc_feature (1)..(1): n is a, c, g, or t
ncaagatagagatggagagttttttgaacacactagagctgatgggaagaactcttttgactctagagaaatggcctttgcaatacgctgtcccttcccactgatggaaacagtgacacacagcacttcctttcaagggccatggcaggaggcgtcctgcagctcctgggtcctcattagtgtgcccaacctgcttaaacacagggcttcctcccaaaccacagaaaagacaactagaagtggtggggccacttctcaaacctgaagccaccaagaagaagctgaggccataggaatgaggaaatggcaggatccctcctgcctcgttctggttttaagaaaatcaggagtttcacataggaactcgaagtgacatgctcagggtggtaggataagtagattgttctctgttccagtgtacctgagctagggagacaatggagacgaaaccctctgtttgtcaaggctcgttcccagggccagggaatggacagcaaccccaagaaggacattttttttccccctaatttacacagactccatatgagtaatagcatccctggaaaaattcaaaaagatacttctaatcaaagctctaccaatggctcagatgaggggttccttatctttaagatgtgtaattccacactctcatatatttggagtatacctagaaacatgattctgtttcctgagtccagtaagaactttctttagtgagtatttttttaaagcaatgtctctgataaccaagaaagaatccacatttgagtg

SEQ ID NO: 59194 - DNA, 2897 bp, Bovine  19866880195635
  misc_feature (1)..(1): n is a, c, g, or t
natgcattcagtttagttcagtcgctcagtcatgtccaactctttgtgaccccatgagttgcagcacaccaggcctccctgtccatcaccaactcctggagttcactcagactcacatccatcaagtcagtgatgccatccagccatctcatcctctgtcgtccccttctcctcctgcccccaatccctcccaccatcagagtcttttccaatgagtcaactcttcgcatgaggtggccaaagtactggagtttcagcctcagcatcattccttccaaagaaatcccagggctgatctccttcagaatggactggttggatctccttgcagtccaagggactctcaagagtcttctccaacaccacagttcaaaagcatcaattcttcggcactcagccttcttcacagtccaagtctcacatccatacatgaccataggaaaaaccatagccttgactagacagacctttgttggcatgcattagattagatctatttaataaacattgatttcagaatctgttatatgtcaaaaactacatctgaaacacagaaatataaccttaagttgcctgtggcctactgaggtcagataattaataagaagttgaaatgcagtgtggtaagttctctggtggaatagaagtagcctgtgatgggaccacaacaaggcccctccctcagcctggggtggttaaaagacacttccaagaaaggctcagcctagagacaaggaggtctgggcagagactgttcaaagagcccaggacaaatgggtatattcatcagacatgaaacaaccacccaatctggctaatgtgtacaggaataaaatatattttttcaattatacaagtaaccacatacacaagtttagtataaaaatccaaacaaaaactaggaaaatggaaagaaagattttaaatatatgtttccttcacctgaaaatcttacagacaataatttttaaccatatggttacatagactttcataattttttctaaatgtatatatacatgcctattttacataatataaataacctgatacatgttattctgcaacttctcttttcattgaaaatatcttggaatgcttatgttgtctatgaaagtgaaagtgaaagtcactcagtcttgtccaactctttgcaaccacatggactgtagcctgccaggctcctctgcccatggaattctccaggcaagaatactgcagtgggtagccattcccttctgcaaggtatcttcccaacccagggatcgaacccaggtctctcacattgcaggcggatttttcaccctctgagctactagggaagctatgttttctatacatatagatatcattctttttaatatctatatggtatctattttttcagaaatgatatgtagttacaggttcatattaagaaaaataatattaaacctaaaaagtgaaaatggaagtaccctaatcctcccagaacttaccattctcattctcatttcccagaattaattaaccttttttaatgtctccacatactgtcttgtaaatgctgtggagtgtgtgtatatgtgtgtgtatgtaaatattttctccattctcttaaagtcaagctgttctcaggaactcatcagtataaagacaccctacttttgctatgctaatccacccctcggaagagctgggagtgaggtatagagaggtgggttgtggcactgggcttcccagatggcattagtggtgaagaatctgcctgccaatgcaggagacccaagagacatgggttcggtccctggattgggaagatcccctggaggaaagcatggcagcccactccaatattctttcctggctggtaggctcagtccatggggttgcaaagaggtttgggccgactgaagcagcttagtacagcacatggctattcaccacaatcgagtagaaggttctagtcaacatgcggtacaacctcagtaaagaccagtcagaaaagaattgcattttctgacatgaaacattcttttactagggtaacaagctaaaggaaaacagaaaatgctcttattgctactgttggagagggaaggaaagttttctttgtaaattattcactctcttaagccaagttattcagaacatgcattttaaataaggcacaggaaaaccaacaggatccataggtagagaatctatttgaattgccacctgccacaaagaaacaaatactgtatcctctagataaggacattcaactttacatgctgcaaggttaccagtgatcctagctcctggctctgtgataatttatagcaaatgaggcatgtctttgtaggaattatttatttactttgaagtaaatctgtgatctgtgaatgaccctcttacttgttaatagaggaaagtacttgtgactggaatgaaagcaaaagcatgtaccatgttcaatgtgcagttttcacaatttctccccaaaaggttcatttcagtaacattcacaaggaggtaagcaaagcaaaactatcatccacacttgagaggtaaaaaaatggatcccctcacacttagatacctgacctgtccagttttacctagaaagttcatgagcaagccagaactggggggcttgtcaccccaggggctctcagggtcatattcaaatatttaatcattatgaagctaagattagcattgcagtttatatttgataaagcaagtttacaacaaacaatttcatacaataactcagtttaaaaagagtatttgaggtactatttacagcacttcttcagaacaagaaaatataatctcgggaaatttaaaaatttgattcagctcatgcccctaaaaagtgacagtattcaagtgacactgcttctgcggaaacgttcacttactcctatcca

SEQ ID NO: 59195 - DNA, 1626 bp, Bovine  19866880487214
  misc_feature (1)..(1): n is a, c, g, or t
ntgggaggctgagggagacagaaacagctctcgaacggtatttattgagtgccaaatgtttcctcaacactgtacaatatacagggaaagacatggtccatgccccatggggttaccatctaaataggactgatgagatgaggcataattggctgaattcttactctgtgttgatgacttcactatgggaacccaaatcatcctctgtggagattggtgctattcaccaaaccttaacaagcgcgttatgtcctctgagagcctggcaccgtcagcccatcaggagggagagctctgtgtttgtcataactgcttctcgtattcagtatctcaccagacacagtcttcaatggcctcagcagcagtgggatgtcaatagaaggctttgtggatgatccaggagaatcaggaagacccttgtcctggagacaaagctcagcctaatacttctagaattgctctcctggctgccattttcaacatatcgtttcaatggttatagctccccagtggctcccctgtttcttcctacattcaatggggacctctgaacactgccgcagatttgatcctatcctcccgatcgtcagattataccctgtggccagccttgcagtctctccttctgcatatcccagccaaggggcctcacaagccaaggaaaaactatttcttcttctccctaagacaacactgatctctttctataaacctgtcctgagaaactaaaattaatccagtctgtgtaatctcatctgccatctcacaactgacttttaatagtgtgattcttcatttctaaatcttaatctatttttatctattttgagttttaattttatcttataaatattatatctagagctatggctgatgaaatgtgtaaatacaataaaacctatagaaagctcccatggtagaattcaggaattattttattttctgagcatttcatttctgagtggtttttttttttttttttactctctactactttaattctaaaatttatgcattatcctctggggtttttattaatctttaaatataactgagataggtgtaagaactgtgggttagtataagccagagaggggagaaagtccaagactattctaactctttaaatcctagagcctctgaagttgcctgaactcagatcactcaactgccagagctcccagaaatgtgaccagtgaagctgccctgtatctaacaataggctgtatctttgactaaccgatatgttaagcaattaactgggtaaagtcataagcaaagggcttacatcaatacaatcagaaaaaaaaaatcagaagaattcatctgatcactcaaaaaatacacagtgagactcaaacaggtgccttttacagtctttcagggtattgatttttttttccattaagagaattttgtaaagatcgaaataaatggacatctgaaggtgcaatgtctgataaatacagcagatgaatcagaacttcccagacaagctgtaacagtttttgcctggtcatcaaagaaacatgtggtcttcctgtatcccgatggaaggctgtgcattttctggtgactaattctgggagcttttcgttgagtgctgcttttcagttggtctaatag

SEQ ID NO: 59196 - DNA, 1488 bp, Bovine  19866880507764
  misc_feature (1)..(1): n is a, c, g, or t
nttgctttccctagcttacccaatttgcttttgatcatgctctgttacaaattccctcacctgcttttgcagtgagttcctttcaaagggaaccagtgggagtgaaagggggtgggctgggtagctggatgcacagtgagatggttttaagtggatttttgacctgtcatatttccaagtaagcctccctgcttattgtttcaagactacctgaggtcttcctcgcactcctcactgggtgatgaacaccaggttgtttccttttgttccttttactctctctttcaagagactgcctattttgaaaaaggactgaatccttaatctcaatttgaatgcctcctgcatgtccaaaaccaatggtaagactaatcagtctgatggttgattttcccagtgacagtgcaatctaggatgccaactcttataacttattcatctgttgtcacatcttagcgctctgcgtggcacatagtagacgttcaataaatatttataccatagttatacgaattaatatttaataatggaactagacttagtttaaggattttaaaagaagatgagagagatgaaaatgtggataaaaaaagaaatatgtacagaaagcaaatgggttagagacaacatcagaggccagaggttctggtttattaaggctggtatgggcacctgattctgcagtttacaagcatcctgctgacctggatgtggatggtagcagacagctccttaaactctttgagaacactggtctaaatgaaaaaggctggttacagagtcagaaaatcaggtctcaggactagaactcaagttcaattccaccatttgctggttgaaaatgaacttccttgagattcccacttctaaagtgcctgcctgagccaaaggagagtaacaacagtatctatctcccagcctaaaaatgagatgcaaaagagaaaaggcatgacaaaatgattcacaaactgcaaaattagctatagttgtctaataaaatagaatggattagcttattaagatgaaatggatgatttaaaagatatattcagatgatcaggaaatagaataaaagctgatgattcaaacagcttattttattttatatttgatgttttgagaaaatgtcacgagatggtcttaatggctataaaagacattagcattggaaaatacatgctatgtcacagtgttcttgagataatgtttattggagctcacctgccataatgtaagctgcattatacacgtggtgtcggctgatttgtagggcattcacctcaccaacaaacataatgaatcatgtgagtaagaacatatcattcaagtcacagtacaaaggggccttgtctcaagaaatgaagacattgacttcaatgtggtttttctttgcatgggagtgtgattatccctgagcaacggctctgtcctaaacactctactcaggaaatagaagcagataaagaaagtgtgccttcatttcctcat

SEQ ID NO: 59197 - DNA, 2587 bp, Bovine  19866880624670
  misc_feature (1)..(1): n is a, c, g, or t
ntgtctgcctgtgttttgcctgacctacccaaatagaagccagacagcaagatgggaacacttggatgaagtccacagtgaccagtctcctgagtagataccaaaggcaagcagaacatatcaaatacctcctactccttcccttctgtaaattttagtacttaaaaccatatagccaacaagctaccactcagtccttctccaccacaaatcatgccttttctaattaattatgttttaactgaaagaagttagaatatttctaccaccaccatatatttataaagttagctttatatttttaaaggactccttcccaacatccaattccacaatggacacagtataagcaaagattaaggcttagattaatgtattctaaaatttagcttattagttaattttttttaatcgataacttactctggacaaagctaaaaagctcaaaaagaggttataataatagagcttcttttaacaatttcatcatttagcagagagcaaagatacattaccatccaagagaatgtatatgatattgacaaggatatgggttaatagaagacaggtaaattaattttcctagggaaatctgtaaattattcatctaaaatactggattagatttgtttattaaaaaaattaagcaagaaatacacctagtgcaatggtgaacatggtgtcaaatttcagtcacatgcaagtcaacttcatgggaaatgggaattcaaaaaggctacagtaaagcaaagcaggccttaataaccatatatcaaatgccccaataacatccccatatgtcaacctgaatctggcttttagcagattgtcctgcttacttggtagacttcctttcagcccttcactttcacactggcattgctccaggctgtattatttcctttctgtagttacttggtgagcttcctcatattggtcatcagaaagtcaatatccagagtaacaacttaaaacttagcttggtaaataccttggtaaaaaaaaaaaaaaaaaaaaaaaacggcttggtaaataactcttcctgcccaaccccttaaataaaaacttattttgatgaccagtaaaatgaaatgccccccccgccactttcttagtgtaataggatgctatttgtcaccctttccattcactttttgttgtatatgtacctatatctgtgctatgtgttagtccctcagtcatgcatgactctttgcatctccatgggctgtagcccaccagactactctgtccatgggattctccaggcaagaatactggcgtgggttgccatttcctactccagaggaccttcccaacacagggatcaaacctgggtctcctacattgcaggcagacacttcatcgtctgtgccaccagggaagcccgtatcttccttagggactcaaatatctttacgatctctagcaaatatgaccaattcaggtgagaataactacaaatcaatagcacctaaccaaaattttacctagaaaatatcctagtagaatagcactgccttgctgtctttgtcaaggctactttgaggagtcaataagctgaatgggaaaatttgggaactagatatatttgtacttaaactcatttcatcatcttactatctgtctaaatttggagctttctaaatattcaggatttgattttactgcttgtggtttttctgtaggataccacagtttctttgaaggaatagtacattcatatatacacacatgggagtaagtaacaaatttcccaaacctgtgttctcatctcaaaaaaagttataacacctatctcagatttaccgtgaagttgaataaacttgtggatatgggtaggagagggttgcaagtgttagaagtacagttcaaagtcccgtcttcattaataaggaggtgcaagtttatatagtttactctttggcaaaataggagaataacagtaaccatcacattaatttgttgtcgatttttaaccagttgatggagtttaaaagcttgctacagtatcagggtaataagcattcaatacaattgcttctttacatgaaagtctgataaacatctgtttcttgtgaaaatccttgcaatttccctttaacagtactgtaggagcagaataaatcaggtcactgtgggaaaagggaagttgttgctcattcttcctgttcctcccctctaattcctttgtggttccccacaccctgccccccttcactatctttttttttcttcttctctctctaggaattgttttgtctagcaagaagctaaaaagggtgtgtagcaaagaaagacttaaaagtgccttttggtgacagagcttacatgccagggggaggcaagctgccacagagatctcagccagctgccatgggaaactcatacctgcataatcagcctagataaaagtcaagagcttccttccatgatgcaatgggcgggggctggggcgggggctgaggggaagcccacattgaatcacagccggagaaggagaagaggaacacagggggagaccaaagacttattaaagctaattgtgattcaaagccatggaaggattcagtgtatctgaggagca

SEQ ID NO: 59198 - DNA, 817 bp, Bovine  19866880668066
  misc_feature (1)..(1): n is a, c, g, or t
ncgctttctttgtgtagtaaagacatactctttctttatgcttcagtccatgtcaatttcttggcatcttcttccctggagtgtttagctcaaccaacttgcttccacagtatctttccaaccacaatgagttaaaccagcatttgtagggtcctaatcccttcccctacaccccaatatactaggaatttcttaaaggaatatttcttctcatttgttttggaaggcttagagcataacatagtctatagtaaagccagtgcccacaaagtttatgatgaactgaatgaatgaatgaaggtagaaataaataaatgtgtgtgtttcatctgaattgactcctaacatgggctaatccttccctctcagatttcttggttgaaaggaaataccttgagaccaagtcaaaaaagaatattaatatcaaatattttagaaacagtcaacggcctcgtgaacttgggggcattttctagccatatgcttttcatctcctggctcagctgatagagtatggaagtaattgaatggccactcttttctaggatgtcaacatacatttatcaaggtttccaggcagttagtttctcctttgaaatcctaaaagatgtgactcttggcagtactgcataaacattaggttattttcctgatttttgcttaagaactatcatttgattcatctgccaagataacttcattatgtccttgaggcaattcaatataccagctatttgtgtctccatttttcaaattcaccaagcaaaaactcctagtcttgaaagtagccagcacaaacctttaggaggcaggggtt

SEQ ID NO: 59199 - DNA, 2154 bp, Bovine  19866880718890
  misc_feature (1)..(1): n is a, c, g, or t
nctgtttctctaagatgcttttgccgctagtattatgaatcaactgagctgacttaagtaaaataaatgacatcctttactttgtttaatttgccagtcagaaagaccaaggtctttcttaatgttcctgccaaagtttcctttaagttcattgcaaatcctttctcttcttgaagggacatggtcgcctattgtagttgtctgtgctgttcccaagagcagctcaggaagcaagtgaggtggtcaactcaagagtatgcagttgcccgcaaatacacaaggacctcagttcatcagaatgccatcatttttacagcctccagttagatatattttctcatgaatgaaagattaatcccatatttcttttggttcagctcatgtttaaaatcatgaagcagagatgaatttatatgcacatctaagtgtcttgtcagaaacaacaccttaaagtttcacccagaatgagtacccaaaagaaaactcaactattgaattggacttttgtttttcatacattcaattgggtgaatgatatttaatctctttacaatggagagactagtctttctcctctctataactccatcagtatcttctgttaataaaatattgctatgattacagaaatttatatatatatatatctttctggaacatttagagaatatagaaagcaatattaagaaattaaaaatacccacattctaactagaaatacatatcttattaaaatttttaggtgtttagttctttaaagatatgcacttttttttttttgcatattattaggcctgtatgtgtgtgctcagttgcttcaattgtatctgactctttgcagccctctggactgtagaccaccaggctcctttgtccatgggattctctaggcataaatactggaatgggttgccacacactcctccaggagaatttgacccagggaccaaacttgtgtctcctgaattacaggtggattctttacctactgtgtcacctgggaagcccaagacctatatattcaagcagattacatataatcataaatatgtgtagaaacatgcacacatagatccgtgtatccatagttcatgatacaaagctgatgcctatatacagcttttgcctaatacaactagttttagccaaggggtttttatatagtattactgattagaaataagagtacatttccagatatatcaaattatatttcattaaagactatgtatccactaattcatttacttatttattcaacatttattcactcaggcactatctaaaatcctgcggtcagcattgttgtaaatacacatgtgcagactgcataccctcaagtcacaaagagcttataaagtagtttctcggcttatgaaaaagccagtgctgtctttcactggaagcatcccagtagtgcctctgcattctatatttgcttacaaggcttatgagcctccagaattgaataggctccttctgtatcaaggaaagaatccaaaaggtactcaacttttgccatgtggccctatgcttctttttgtgtcttttaagaatattttggaaccatgtaaataaggaacttctcaataacaagttccttctttaatgtgtattttatttgaggacgtgggtgacaaaatggctgtatacttaatggagcaatttaggagctatagaagttcttgggccattcaacagtaaatacacagaagagatgcatcttccttctctggttatttcttgctgggactatgaaatctggaattcagtaaaatagagtcattctatgttttttgctgagggagagtattaaacaaagctgtgacttttgtatctatcaaatagtagcatcatgatctatttaccaatgttgtgtccattagttgtgggttggactattaggctgatttgtataagttcagtaaagtcatttttgaacttaatgtatctgatttcattttgaacttttttttttaatctttattttattttggaagcttggttcaatttttgtaatttattattacgtggggatttaacaaaatattttgtttcaatgttattactgactcttgatttcataggtagctataagctgaaggtctctttactctgaatgcttttaggaataatgccaagttaaagtctaaa

SEQ ID NO: 59200 - DNA, 2750 bp, Bovine  19866880764602
  misc_feature (1)..(1): n is a, c, g, or t
nactgtaataaaaaagaaaatccttgattttcagtaaataaatatggttaaaaataatttgtagctatgtcaaaagtacagctctcattgttctgagttggctggatatgcactaaggatagttcagtcactcagtcatgtctgactctttgcgaccccatggactgcaggatgccaggcttccctgtccatcaccaacttctggagcttgctcagacttatgtacattgagtcagtgatgccatggaacagtctcatcttctgtcatccctttctcctcttgccttcgatctttccagcatcagggtcttttccagtgagtcagttctttgcatcaggtggccaaagtattgaagcttcagtttcagtatcagtccttgcaatgaatattcagcttctctatataggttcatttatgacagaaagagcacttttataaaataatagaaatatattttattattaaatatattgaattatgaacacaaaatatgtccttctctcccactcaactttgacaacttctgttttttcacaagttttagaaatagcaaagtgaggaagccttctttccagtttcttgctttagcagtctgctgacaacagtggtcctactccctaatggtgcgttaagctctgtggtggtggtacttagttgctatgtcatgtgcaattctttgtgttcccatggactatagcccaccaggatcctctgtccttggaattctctgggcaagaatactggagtgtgtttccatttccttctccagggcatcttcctgacccagagatcaaacttgggtctcctgcattgtgggtgaattcttaacaactcagccactgtaactctgaggaaatcacttaaatcttctgaactttttttcttcttcatgggatgacagggtctgactgctgctgctgctgctgctaagtcacttcagtcgtgtccgactctgtgcgagcccatagacggcagcccaccaggctcccctgtccctgggattctccaggcaagaacactggagtgggttgccatttccttctccaatgcatgaaagtgaaaagtgaaagtgaagtcgctcagtcgtgtctgattcctagcgaccccatgaactgcagcccaccaggcccctccgtccatgggattttccaggtaagagtactggagtgggttgcaactagctggtctctaaagtccttgtcagagccattgttataagacaatatttgctagattgaagaaagatacaatcctgactcccccctagccgttacataaacttggaattaacccacacttccagcctgctgtctataatgtttcatacaccatattttagtgtattaattggataataacctttttaaaacaaggcattgaattggctgcttttttacatcacaagttgtttttgatgctttcagagctatgtattctctttagctaaagtataaacgtactatatctgagaaattctgacattaaagtaaagggttccagaataaaatcaataggcatcaacttttcttcaacatattgccttagattaaatgccaactggtaatttagtctcaaatctgtttatgactttaccataactgaaagtagcttcagaggatcttttttaccagctaggaaactgatctcatacactacgtctaaatagtttaaatctgtgcactattagtaaactggctaaggaagtcaccagtctgtacaatgttaattcagaaaagcttgaaatttgttagcacaataatgaggtaatagtttgtctaatctaatcttgacacagtgatatgtgacacttcaataatagctaacatgaccttaaaggttaatgatggcatagctcatctgaagtgacagactacttcaagtttttctacagtcgatctaattattattattattattaggtgtattacaagtataataatgaagcttcagtggactgttatctggaattgcaaacttggccaaattagttccaggggtcgtgtgatgagacattccactgtaaaagcaaatggcagcactattatgaaaatggacatgaggaactctaaatgtttctgtatagatcatataaggcaggaactcttcagatatgcttccatgtatggagctttctcatccatcaagatggagttttctcaggatattgtatcatttatccccctctctcacttgacacagcaccatatacgtggttgctgccctgtgtaaaacacagtgcttggctacatgcagaaaactgagatgaactagactatgatctaggctttgaggaatttaaaacctgcccaaggaaagacaacagacagaccaatccctgtaatcaaaggtaatgagaacaagtgcctgtctagattcatgggaggacaggtgaaatctctcctaactggacacctaagatcatttcctagattaccctcagaagcagggtagttaaaaaatgctctgattaaaatacatcttactcttttctgcagcttcccccaccttctgtatcttttgttactctactgtgattggtgagagagagagagaggcaatgaatatgatgacttgtatatatagatggatggaatggggttgaaaaggatggtttttggttatcaagatatagagggagtagcttcaaaactatgggtgaatgaagaatgaaaaatgaaatccaggtgaatgatattgaatgttgaagcaagtgtgtagttttctctgacacatacacaggagatacaat

SEQ ID NO: 59201 - DNA, 2208 bp, Bovine  19866880811351
  misc_feature (1)..(1): n is a, c, g, or t
ntgtggggaggtccccaaggcagttagactggctgggaagccaggtcgtgggcgggccaggcaacaggtccagagacggtcttactccacaggaccctcactcagaggatgctgcttggatcttgattcataaataattttaattgaaataccactatttcaacatttcttgatgcttcgggaaggcacgtcttttacatcgggagcgatctgctcagaagcccgggagtacgggttccataccttgtgcctcttctgggccagggttgtcctcacacgcccgcaaccagagcagcggcagaaactctgcaggcgccccgcgcccgcacctggggtttaaggcatcttccgtctgctgccgctgctgccgctaagtcgcttcagctgtgtctgactctgtgcgaccccatagacggcagcccaccaggctcgcccgtcctggggattctccagacaagaacactggagtgggttgccatttccttttccaatgcatgaaagtgaaaaatgaaagggaagtcgctcagccgtgtccgattcttagcgaccccatggactgcagcctacccaggctcctccatccatgggattttccaggcaagagcactggaatggggtgccattgccttctccgggactctcgagcagttgtctttaaatctcttcagacccaatagcctaaagaataaaacatgctgctctccaaaactgctgctctacaactcacttgagaggagattttcaactggaaatggtagagctgagtatcagaatctctgagttatttagtccccttcccctcattctgatatatgaccatattgcttcctactacacacttaaaagcatttatccaaaaaaagcaccaagaattttttaaaatgatgctttatagggaaggttctgtttattttcctaagcaaccaacatattctaatcatcattattgccatcaaaataagtggaatgagaaaaaaattactaccaggtgcatatttaaaagagcatccctttttcttattgatattagcatgcaattaatgaacattagtttctcagatcatttaagaactcagtgcttatttcttcacttcagaaaggaagttatgattgtgatgatattttttgggagcacaacagtaattctccacttctcatgtttccaggtagagaaacttcagctaaataaagtcccttgcctctgtcctcactctgctttttcgtcccagagctggggagaagtcagccagctgattggtgtggttagaaacaggtgaccattgctttctcagttgcctcctctgttccctttggggtcttcctgatcacatacaactctgtcctgcttttccatggagcaaatactttagtgggtggactctaccatgtagggcaaagtcttcagtcatgtagtactgcctatggttgagtgggatttgtctgctcaatttgagagtaaagtgttagcaatctcacttgaggtgcatagccagggtctacatttaccctaatgtaagtgaagcagatactgtgcttactatctctctgtctcctggatttccttttattctgaactaagggcagggaaaaatttaagttttcctaaagtccaatatatgcatgtaccagttagaaacctgagaaaagtcaagaagtagctttgcagaacaaaatatcacacacagagagaaagagattggccgagagctttatccttaaggctttagtaagtgtggcctaagtagaattttgcccttggtggatcattatggtttatgacagctttgttcacagtcaagtggtttcactgatagaggtagggctatttttagcaggcatagctcatagaaaatatagatctttagcaaacaaggcttgcaaggaccttagcaaactgggacagctccactttatagagcagtccatgttggccttgactttatagagatacagcttgatcttgaactccaaaagcatgacttgacctctgcagaagccaatgaggcatagatttagacatgatttgtaagatgatgctaaggtaaaaaagtataaaactgaaaaggtctctggcaagtctgactttgtcatccacacagtagacaggaaagaaaagcagctttttggatggggcatgttatgccacaagatcctgtccgagggaaggcaaaaagacccagaagatgcctggtgggtgtcatcttggtt

SEQ ID NO: 59202 - DNA, 1174 bp, Bovine  19866880859743
  misc_feature (1)..(1): n is a, c, g, or t
ngagtctgtacttagtaacaatgccacagcactcagagacacaagaccaatcgctctctccaccatgaatggattcagtaaattcacttaacatctgtgctcaactttcataaaaaaaagtaaaggaagtagttggaatagcaatattttctcataagaaaactatgaaaactgataggtttgcatgatttcgatatgcagggtactttcattagttagaaaaagacatttaatttaatgatagaaaggccaagtactttgtaacactgtgttatcaacaattctggataaaagaatatttgcaagctttggactacacactgtcattggtagattgaaatcaatagagcatttaagcattattgatttcatttcagatttaaaggtgacctatatataaaatatattgaagctgaatgaaaatatataatcttatattgtttaatgacattcagaatggggttggtttagagatttgttattagaggaacaaaaacataaatcttgtgttttatctcttttccatgtaagtacttatttattaaattatcaaaataacattaacaacagctaccacttggtaagtgactactttacagccaaagttatgtctggattttcttacttcttacaataatcttataataaaggtatggtattttttagctcccttttgtagataatatcaagtgcctgctagatgatgaatttgggctttgaaaccaagtgtagcagatctaaaagtttctgtagtgttcatgataacatacttcataatttatctgaggaggcagaaaaagatacgggagagtacagtggcttgccttgaaagatcttcatcctcccaactgatgaatcaagtcccttggaacaatgcacactcttgttagtcatctttctttgaatctgagaagacctctggtattagcctgtgattaagaaaacagagggcttcccaggtggtgcaagtggtaaagaatgcacctgccaatgtaggagaggtaagagatgcgggtttcatccctgggttggaaagttcctctggaggagaaaatggcgatccagtccagtattcttgcctggagaatcccatggacagaggagtcaggtgggctacagtccatggggatgcagagtcggatcgactaagtaacgagcacacacgcactgcaat

SEQ ID NO: 59203 - DNA, 1318 bp, Bovine  19866880955333
  misc_feature (1)..(1): n is a, c, g, or t
natactctcctatactcacctacaatgtggtttttatataagcatctcctagcctttcaaggtagagataattcaggctttcaaggtagagataattcaggcaaagaattgccttgaaagcataaatttgacataaattcaacctttatttctaatctccatttaattagtggaagaaggctggaaattagaagcgataagatatatatacaatttggagtttgtgagcctgagcacgtcaggctaaggtttaaatcctttggacatgtactcttaaagtgagtctgtttatcatagccgacttctgcagtccggcatattttcccccatctgccaagagtctgagcattttctaggtgtgtgccctttcgtcaactgattgcactgccccattactgctgactttaaaatattcaaaccactaatgtaatatgcagcacctgcaaatactgtgaaatattagcggagtggtaatgagaattgactgtacgtataatgacaacaggtgaaattattcatagcctgctcatgtggcaaacttaagatataaactcaatgaacataaatggaataagttcatgacaaatatgaaaatacctaaactgctaaagtaataaaagtaaatataataaatctttcctgcaaatataataaggtccctaactgcaaatgtaataaaacctatcaacagctgcaatatatttggaacatattatatagctttacaaagaaatataccccctgctggtatggcctcaacaatatcatgctttgtcttttgccagtgagtccagatctggcggaatacatgttgcccagtgtatattaaatatgacagagtgttaatacaaccaggtttggattgaaaatgaaatgctcaatccagatgtgctctttggccattctgcaagcagagccaaaggctgtggatctcccaccaggggttgaaatgcagccagaaaagccaagcatgggaggtgaggaattgatgaatcacaggataacctttttgttgcttggatatggtgtctgaatcaggaaactgagcagtatgtagaccaaggaaatgcagggcacaggaatcaaaagtgagaaagaaatatggagctgatgacattcgctaaagatcattcatgtgccaggcaatttgcaagatattttgtctctttcctctcttcctccttttagttcatttttctttccacaattcagcctacatctgatgaatgccccctagtttatattcagggagaaaaaagtaacttaactcattgtccttagctgcttaagtcccttacatcctatgggagaatcagga

SEQ ID NO: 59204 - DNA, 1074 bp, Bovine  19866881092631
  misc_feature (1)..(1): n is a, c, g, or t
ntcacattgacttgacaatgacttgacaaatgagttaagtggagatgagtcaaaagctctcatgctaatgtactttcccagcacatacttttaggaaaaataaagaaaaggttactttatcatttcgtattattttatttggttttatttaggaataatataggacatagaagaatctaataaaataatggccatagcagaaagcatattcattgctaatccatcacatcttagctctgcactccttgttgacaagtacagagcgatggcttcaccagcagagtaatgataaatatcttcaaaagggtccatttcctttgtcttttcagtgcctaaatggaaaaactgttttatgtcaactcagtggagttagttccatttctaccatggaacttttgtgttttttcttgttctttttgcttctttaaagctttattccttgaatgtttcataatacatacataaatgtatatatgaatatattggtatatatgcatgcatatgtatatacatacatgaaatatatatgtatatgtacacacatatatgtatatgcacgtatatacacacatgaataggtgtatctgtatgtacctatatatcctaagaataagtgttcattataattcactttttagtataatttaaggcccctacacaaaactagaattttaaaattggcagagacttttggtagctggcattattttctttcataaatatctttttcaggatttcctctaaaataacccactggtaggtgtgaaccctgctttattcctagccattatggcaaatggctttattaatgatgtgccatggaatttcattctttaatttctccttgattggagaagtataatattttggatccaaattatccatagaaggatgcaagatagacctagatattccttgaagtggaaagccacttagagactctctgtttaacttcacttcagagtccagaggggaaatagaggcattggagactctcagcagtgtagccaaggcataatgtgctgaatctgagttcaatccagtattgacagcaacacttttttctttttaaag

SEQ ID NO: 59205 - DNA, 1781 bp, Bovine  19866881136534
  misc_feature (1)..(1): n is a, c, g, or t
ncctagaaatggataccggtctgtacctaatattgagtgaccgaataacctgatgggctatttcaccttacagtgtctgctgcttaaagaatcttggcaagcaacagagggctaacaccttcaggagagctattccctattgacagaggggatttctgctttgccaaactcagtaccaaatgtccaggcctccctaattgcaatcttggctctctggaagtcaaagtcgatgactcccatgacagtcttcaagaacttgactcccttcttcaaaacccaaaggtcaaagtgaggcccattggcagctctatttgcatgcaggtaccaagaacagcagggttcttctgattagaaacgtagcacagcctgacttacatgctcagagatgtaaccaaatgttctgggaagagaagaggtacagcaaccaaggccccctgctaattttcgcagcctgatctctcatcacttcatgtgtctctgtctatgctccagcaagatggaatttcagccaggtcaccaaagatgtgttcactcattctgtttcttatttgcattgcttctcaactctgggttccgtgcatccactctctggtactcctaatgcttttatgaatcttactgtatttagaaaatactgcatcgatctgtctttcacaacttgtgtaactgtagtttccctgaaaagcggtcacagcttcccaaatctgtgccaggtgttgcttttccgtgctcccggttgcttcctgtaagtgggtctctcagagcactcaccacactgtatgctataactgcttgtgtatattacttgctggagttaagaccctcaaagacagagaccaggtcgtatttaaattttaggctcaagatactcaaaatagtgattcgtgctcagttgcttcagtcatatatgaatctttgcaaccctatggactctttgtgaccctatggactatagccctccaggctcctctgtccatgggattttcctggcaagaatactggagtgggttgccacaccctcctccaggggatcttcccaacccagggattgaaccctttagttcagtcactcagtcgtgtccaactctttgtgaccccatgaattgcagcatgccaggcctccctgtccatcaccaactcccgaagttcacccaaactcctgtccatcgagtcgatgatgccatccagccatctcatcctctgtcatccccttctcctcctgcccccaatccctcccagcatcagagtcttttccaatgagtcaactctttgcatgaggtagccaaagtattgggagtttcattccttcagcatcattccttccaaagaacacccaggactgatctccttatagaatggactggttggatctcctttcagtccaagggactctcaagggtcttctccacaccctggaagatggaaaaagccacacaatgcaatgtaaaaatcctggcactaagattcagatgagcagggtcctaatcctgactttcaagtaatggctcatgtatcagacattggatgtaaatcagggtcaaaactgagaagccttttgggcatgctggtacaatggcagtctaatgcttggactactcaattttttgagatggaatgtaaaattagctaaatttggctgaaatttgagtagtttgtttagtcctgttgtcttatgccaggatcctagcctgtatcatgtaaatatttgaatttgtgactcctgatttgaattatctgagtctaaatttcttcactgtaaaatgctgtgggtggaggcttag

SEQ ID NO: 59206 - DNA, 1243 bp, Bovine  19866881251828
  misc_feature (1)..(1): n is a, c, g, or t
ntgtgttttggtttgttgcagctaattcattttagtcatgggaaatggtctctctgatatttgctgtactctaatttcctgaacaatatgtcctttctttccatgtgtcttctttggaaggccttcctgaagtttcctgtggtattgtaattcctgtggattttgcaaagtggttttgtgatgttcaggacttcaggcaaagtaagaaaatgttaaccacttacttgcctcaaaggagcaaggaatgacttggatgatgataacaataatgagaatgataaacagtggaaggattttttttttttaatctatatacaattcagagtggaaagtttattctatcagctatataatgaattgtaggggaagaacagttgaattagaaaggccaagtagacaaatacagcagaatccagataataaataatagtgaactgaatggatgtgatagctataggaatggggggaaaaagctgagtaaatctgagaaatgttaaagagatgacgtgctagaactttgcaattgataatgtttatagggatagggaaaataagttctcaaagtaatacctacattttaaaaataagaactagaagaatggtgggcaaattactctacctctctgatctgcattcctacatgtgaagtagagatgcatacctggtgagcatattagagtgaaaggatgcaaaagcacaagaaagaggcagaagtaacacttactgaggagaaagttttcttattaaatacatataatttattgaaaaataaatgatcattttagcacataagaagtatgagaaggcttcttaaaataggtaaaaaatatgaacaaaatgctaaagggcatgaatgtgtatgaccaacccctattcttttttggaatcttagtggccagaacatgaatagtcagaagcaattttaatttatgcctcattcttgagaaaaataggcaaatgataagcaaatatacttctcataaaatacaagaatttgaggaacttcattgtcttaccccacagaagatcatgcttatattatcagagtaggcaagggggtctcaaactacgtatgctcctagaagaaccttaaatactgacaatttaaccaccattttctgtgtggagatcatagagactaatgtcgttattccttctgtgtctgcaggctggaatgcaaaaaaaaaaaaaaaaaaagatgacagtagaaggcattttctggctatggcacaaccatctctaa

SEQ ID NO: 59207 - DNA, 780 bp, Bovine  19866881277800
  misc_feature (1)..(1): n is a, c, g, or t
ntgtcttgtgcttacttattaatggaaagaataaaatataatgaacctgatatggacaaagaatgcaaagaataaaatatttctttctgactgtcagcgagcaatgggacaaatgagatttatggcagaatcagatatgtgatttatagtttcgcttgttcttcatttaagagaggaaattaaaaccacacttgcatatgattcaatctttgatcactagagaatagctgctatgaattaattattataaactctattatcctcgttcaccccaggtgctgcatccacagtactttccaacaagtgtctcaggggaaaacatttttgttttttggttgaaattctgcaggaatattatctggtgtttgcccgagtagtctttcattacttaagggactaattgaataatctcatggaaaaaacatagttcaaagaaagagccagattaaattcttagcagcttcttactcatgtggagactgtaagattttactctcttttcatcatctacaagtctaaaatcatgtgcttaaatttatgcataagtattctcagatcttcagctctgatagttcacatttaattctggtagtaaatgtggaaaatttaattcgtaaagaagatattttgttcacttagtttctatttaaggtaagaaaataaattttggatgtaaacatttcaagacaacaaaatataacaacaaatcatgggggagaagggcactaagacatggtaaataagaatctgtttaaagatgataaaacagatattcagtaa

SEQ ID NO: 59208 - DNA, 2264 bp, Bovine  19866881380313
  misc_feature (1)..(1): n is a, c, g, or t
ntgtacagcacaccctgagtggtttgcatcaaaaaacacaaaaattcagctgagtaaattttaacaatctaattggctttattgaatgagtcttgagttgggcggcatcccatctggtgagtgtgaaaaggaaagatttttaaaggcaagacaaggaggtcataaacagaaaagattatttcaggctaaagtaatgcccctgtgggggatgggatggggctgtgtggcagtgacctcatcttcctctgggggctggaggacgccccggagacagatgagctcattggtgcaggccgggaaattcctgacccaccacaggacactgcagtcagggaacgtgggcgctgcactctggtggtggggcgtagtgtaagtgcctgtgttttgggcctgtgggttttttttttaacatctgtattctgtgtctcagtctcttcaccttgtaatcactccttggccctctagtctcgtggtcccgtcatgtcactgaggcagccgccggcactgtcaccaggtggcctctgtgctgctcgccccgctgacgtttcccagtctgcacccaaccgagtcactcaccttgcctcctcatccttcctccttggctcctctggcctcacctcattctaatttgttactgttgttgggctgttctttctagatgtccttcctttgtttaatgttgccacttaaattctgaaagcttagtcctaggcctgtttctttctcaggcagtgctctcctttgggtggtaattatgtatgactagaacttcattgcattggagaaggaaatggcaacccactccagtgttcttgcctggagaatcccagggacgggggagcctggtgggctgttgtctatggggtcacacagagtcagacacgactgaagcgacttagcagcagcagcagcaacttctatattgggtgtttatatacacatttttaactcttgtagtcttcccatcacttttagggatattagtctaatctgtggaaagagaaactgtcttagagacagggagaccacatgacctggtttgtcaggacagtcctgacttatctgttgtctccgcagacaacactggttctttcaccatcaaaacttctgcctttggataacaagttatactgttgtcctacttgcaagttatacaaattgcctgatctttttttgttttatttatttttttgttctaaattgcctgatcttgaataatttcataagtggcatacatacatgatgtttgaatctgcaatattattattttattaaaaagacaaaatcaatgtttggagcatataggtagattaaatatttgcttagtattttttgtttttataagcatttggagatgaaaacttttatctttatggagtgcatctctggtatgatagtttgagttggagaaaacttgcttcaatatatagaaaatcaaatagttgtaagaatgtatctcttatacattcacctatactgacaaaaaagaaacttttaaaaatggcagcatatggaacatgaaaaatgtacacaggtatgtttgtggtgtgggtaaaggggcaaaaagttcaaccatttcactcatccttcagtcatgtttgaagactaatgttaatcagtagatttgtcactggctttgtcttgaacggtgatcacattggcctttttttgccagccaccataattaaccagtgtatacactttaaaccaatgaaagtataaccctgactcaaaaatttgttaagtgtcatggtacctgatttaagtcttgataatagactgtatccctttttcttttcctctcttggaccccacgagtgcctctcaggaaacttgatgttaattgctttgttatagattaggtcaagtgtgctgtcacttatttctgattatatttttcctagagctttttagtatccagacttgtcttgctctatcacacacaattgatgttatacatgatcagcaaattaacacattgcccaaacaatttcctgtgtttattaggcagtctgatcagaagctgcactaagcttcagcacaaatgagtaagtccaatttgaaaaacattttaaaaaatagatgaagcaaagcttgcagctctacagtgtagaatataatgttccttttatatagaggacatgttagatgtggcattaggtgtttctatacaaacaattatagttctgggagacttgactcttaaccacatgggctttaagggaatctgttcacagaagggcttctgcattgtgctcaacgat

SEQ ID NO: 59209 - DNA, 647 bp, Bovine  19866881416353
  misc_feature (1)..(1): n is a, c, g, or t
naatttggtcaatgaaaacacacacacagacacatgcacaatctgttcagttaaattttttttagggcaaaactttttgatcagttgattgactgagttctttgttgggggactagtgtgttgacacaaagagttggttagtttctttcctgctggggaacactaaattacatcccaccaacttaagcttccctggagtgactcacacagtggttgacttttaaagttcactgaaggtgagggttcaggctatacaaggtcagagtttctccacgaagcaggacaaacaaaaatttataatgccaggctgtttgatatactttctaaaaggagaaggccactggtttttcccttccctaactctttcctggaaagaaagtattggaattatccccagtagtgttgaaagacagaatttctgggtaagtagactttttttttttaatccccagggggattcatggctgactgagtagtaaattcagtctcagtgttttagctcacaaataaagaagtaataagagaagctctgcatgtgtattggctgaaatagaaaatggacgataagtaacaggagtttgtaaggaaacacatcttgctggaaaaaaatgtgattgctattttggaacaaactgcaaaattggaaa

SEQ ID NO: 59210 - DNA, 1917 bp, Bovine  19866881561129
  misc_feature (1)..(1): n is a, c, g, or t
ntaggaaccagaggatcagagaggttcggtaccttacttaaagcccaaagctagtaagtcatgggggagaatttaagtcaggttccatggcttcaaagcctgtgctcttagtttatcaaaccaaaagtgtcctagtatgaagtgagaggaagagagtgatcatttggtcaaggggaaggaaagtatcactaagtgtgtttagtgaactaagccttctcagtctccccaggatctcggttcagcatccctgctgggtacagatgcctttctgaattctggaatgccagagctaagtttttcctccaccttcatttctgaggcccatctctttgactcccctggctaggttctgcctgggttctgagtaaacagccacagccataaacctttcaagtaggtgcagagaagagctgtttttcatcaggtcattgtaggcagcctgggctgccaacttcccatcaaagcctcataaactcttttacgaggctcataaaacgctgcctactcctgttaggggagaggaggacggccatcagacccaaatcatgctggtttcaattgcttcatttccatacatcagactccttggaaaaccaaaggcaggccacagccagataataaagtggtccttgtgttcctgtggtgctcttttaccaggcctcccaagccctgtgatgcatagtagtgtttgattacccagcagagcaattctgggtggtgaagtcggcagcaaggatttcagggaaccacagctctcgttcagagctgaagtgttggctgccaactgggttctgctttctctctcgggatgtttagagagaatcttcctgacaatctctcatggcttttccactgcagttgggcatagaatctgccccattcttatctttgtcccttgcaaggattgtgggtgtcaaaagaaaagataaccaccaccttgttaattaggttcatagatccgccaagcctccaagtttatcttatctacctgctcacataatgcttcatcttctctgctttgtcacagaagtagtgaattttggattcaggaataggaatagaaagcaatttacaagtaatctaattctctagttaataggtattttcatcccactctactgtaagctccctcagagacaggtgttgcttctatttttttttcaaaatttacaaatgtctactcttgtacctggaatatatacagagaggatgcagaaagtattaaataaatggatcaccattattacatgtatcagtcagcatatgctaagttatgctgtggtaacaaacacagcactgaagatttatgtattattcttgatgtaaacccacctcaagtcagttgttccatgctgtctttactccgaagtaaaccagtaaaccagtaactggtttactccgaaacccagaccaatggagcagtttttaatgtttctagtctcttggaagaggaaaagaagacagtgatgtgaaccacatgctggtttgaaagtttctgtttgagagtgagacgtgttacttccactcacagttcattagttaactcaaatgaagaccaggtctgacttcaagggactggaaaattaaaattctcccaaacacaatccctttcttaatctcctttatgttttgtcagagtttaatatttacttgagtgatgcccctaagatataatttagggaacgcaatatctcattgtaattttaaacaggcatagctaatctgaaccttgaacagcagatatatgttctgtgctcagcatcccagtcttacacatctaggaggaatcaatgctcagaacagtggtgccacaagaaccagtcaatcattaaagatagtatctgttactgacatcagtttgtagttactaaagcaaagcaaacatttaatgtaccttaggaagattttcaacaaaaa

SEQ ID NO: 59211 - DNA, 2307 bp, Bovine  19866881655908
  misc_feature (1)..(1): n is a, c, g, or t
ntgaaattcttaggccaaagtgaacagcattttttactgaatgacacttgaagagttttatttctgacaatttctgtccagaaaggctgcttcctaaagtgagggccacctgacacaattctttctaaactttgacaagaaatacaacccctccctcagtgttggaaggtttatgctggtttcgagtcaaatttcctttcaaccagctcagtgaaagccttaagcaagaacctttatttaaaacaattaatgcaaaattcagtttaacataatctgaagaagactgacatctcataattctgaaatggggaatacaaattaaaagtaaaatgataccttcctaatgtcctgctgtggcaggcctcgatttgaagggggaaaaaaatccatctggccttaataaagatgcgtgctttccaggttgtgggggtatattgtttcctttacatttttacagtgagggctagtttttagtgctacggaactaaacaatttattttatttttaaagagatcactcttattgattccataagtcttcattaaagaatgaatgaataactgttgagcatctcctcagagacagtgggataagtcctatgccagagtgaagtgagatgtgcgcgcaggagagcactttcatccgacccacaagttaggcaaaactcccctgagaataaggacggaggtcgaattttgaaaacaggcagcaatgaccaggatgaagaatgggaggaaggacttctcaggcaggatgagaggtggacgcaaatcacattagtgaagcctgattatgatgcatctccatctaaatcctgtgctttctcagatgtcttgtgaccatctctcatctgcagcccagcacatgtgcacttccatctggattccccatctcaggcgaaaatatcatgagcacctattcctaccttcccggaagcatgagttaaactccactcttccctctcctttaacgatagtcttaaattagaagactatattatacgttccctattatatatgtgtcttcatctccagcaatatttacttatttaaatgtctttctctttaatctgcagaaatgctataaccagtttttattcaatgattgtctatcttgtaaattcagcaattgttggcagttataataaaatatgtacaaagtgttggggctataatgatgaatatgacactgtcacaggctccagtgggatcataccaaatggaagagatacaaatatatagagagaattttaatgcaaggtatcttaaagatgggcttctcaggtgattcagtggtaaagaatctgcctgccaatgcaggagacacaggagacgtgggttccaaccctgggtggggaagatcccctggaggagaaaatgacaacccactccagtgttcttgcctggaaaagtccatggacagaggagcctggcaggctacagtccatggggtcacaaagagtcagacataactaagtgtctgaacacatctcagagatacacacagaagacacctgaggatcagaggggaagactggaaagctttctagatagattaaaatcctgtggtgagactttaggataaggaggaaagaccacagagaaactattccagagaaaacagaattagcaaaggcatggatatacaatgagctataataaatgttgctgaaaaaacattttcagaggaggaaatgatgagaggtcaaggaacagaggaaagcagaggctaagtcatgcagaatcttgcgtgccatgttagaaagacaacaaaaacagtaataatacattaccaaatgcctattgtactcctgtaatatgattatgcactttatttcatcacaataactgtattttgaaagatatcattttcattttacagactcaaaaaaactaagacttgtgtaagttcaggtagaatcttaactttgagtgcatgggttctaatgcactcaaattcaaatttgatctacaactgaattctctgtcttatttctgcctttcccgaaagcctctttattttattaacaaatacttttgtttgtaatttcaattataccaactcaccaaggaagtgtattattctggcttttgatggttcaccttttccttttgcagaaggttcagatttcttaatgtggctttcactgtcgtttatgttttctccttccttcatctcactctctttatattcacctaatttctagatataattaatttcttaacttttctgaagttgtctctataccattgtacgtgctatttcaccttgttcaaatgcctacttctactttatttcttccttcat

SEQ ID NO: 59212 - DNA, 1075 bp, Bovine  19866880234592
  misc_feature (1)..(1): n is a, c, g, or t
ntccatggggtcacaaagagttgttcacgactgagcgacttcactttcacaataaaaactaagaacaaaaaggcaaaggaattttgaagaaaaaaacttcagggaggtagggacaacacaagcttcctctgaattcacttctcataaataactcctattttcattgctatccaatcctgactttcctatcacacttcagtcctttgcagactgtcattggcaatggagggcaaccaatcacagatcacagaattcatcctggtggggttccagctcagtaaaaacatggaattgctcctttttggtatcttctccctgttatatgtctgcaacctgctggcaaatggcatgatcttgggactcatttgctttgaccccagactgcactcccccatgtatttcttcctttcccacctggccatcattgacatatcctttccttccagcaatttgcccacctttctggaaaacctagtaaaacacacaaaaagcatctcctttgacccttgcactgtgcagatgcttttcaatttgacttttggatctatagagtgcctcattttgttggcgatgtcctacgacaggtatgtggcgatctgccatcccctccagtacacggtcatcatgaactggagagtgtgctccatcctggccattgcttgctgggcgtgtggatttgccctggccctggtccaagtaattctcttgttaagattacccttttgtggcccccagaaggtgaaccacttcttctgtgacattcgctctgtcctcaaattggcctgtggtgacatctggatgaatgaaatgttcctctttgctgatggcgttcttatcttagtcgggcctcttgccctggtgttggtctcctatatgcgtattctctgggccatactgaagatccagtcaaaggagggctgcaagaaagccttctccacctgctcctcccacctctgtgtggttgggttctactttggcttagccatgattgtttacatggttcccgacaacagtcaacaagaagaacacctgaagatccttttctgtttaactcttttcaacccatgctaaccct

SEQ ID NO: 59213 - DNA, 1638 bp, Bovine  19866880403500
  misc_feature (1)..(1): n is a, c, g, or t
ntcctcattctatctgccaattctcactactataatccaactggaaaccatctattaggtttttctgatggtgctcatatgaaaatataagcaaatatgaatctatatgcattcctattccttcctaacacaaaaggatgagtaataaattcaatgtactttacttttctcactttacaatatagaccaaagattgtttctaatcatttaagaaagagcttctttaatctttatagatagatattttattatacagacaaaacataatttatttaaccagtcactattgatattagttatcaatattttgttattacaaagatgctgtaaaaaagatgctgataaaattgtgctaatgacataagaaacaggggatcagctaggaaccaacatgctgattagaggaatgatgagaatggcaatgctggagagaaggaagaaagacaaatttgtgggaagctggaaaatagtgtggtaaacttggggtgtgtgaggggaaaaggaaaagaagaacccagaaatgaatcaaagacctggaaccacagaaagagagctacagaggggaaggaggaaagaaagtgccaggagaggatgaacacaattgctggtcgagataatctacaggaagtcactgtcactgttgaaccttggagcagaagcctcaataacgttgatccctgaagttggacttggtaccactcacggaagtaatacagggaacttccagcagtgagaaaaccagaaaatcacagaacaatgtaggggaggatgacccagcacccagaatcaaacacttaggtcagctgtaagacaatgaacaacattttgaatgcttttccctttcaaacatctcagtgttgttaataacttgtatatttacagttcttaaatttattttgtgagaagcattttcatatgtattaatgaatataagcacttaaaaaataacaatctaccatatacgaatgactcacttatcaattgaagcaatgtcagtatttaaaagttaaattgtagatcacaaacagtttgcagatgaaaatgattatttcagattttaatcagtgctttcagcttactcaggcccaaggtaatgagtccatcctcgggacacagctaatccttcaggagttgatagcagcgtttcatgacatttcgaaaggcctctatgaatttgtcattccggagagtgaagataaaagggttcagaaaagggttcaccactaaaaccatcagtgacgctaccctgttgtactcagcggcctgcgtttgcttgggtttcacaaagaggaacaagcagctgccatagccgatgacaacaaaggtgaagtgggaggcacacgtagagaaggctttcctgcggccggaagcagtggggatcttgaggatggtggatacgatgtaggtgtaggagacaattgtagggatcatcgaaccaacaataatgaaaacagccattaaaaacagaataaactctgtgaaaagactgttgtcacaggatagtttgagcagttgccctcggtcacagtaaaaatggtctagcacatttgatttgcagaaagtaagatgaaacgtggcataggcggccagatttgaaacaggaagccaaacacccaggacacaattaccacccagaga

SEQ ID NO: 59214 - DNA, 1775 bp, Bovine  19866880472380
  misc_feature (1)..(1): n is a, c, g, or t
ntgtaggttcaatcccttgttggggaactaagattccacatgccacagggcaactaaagaagcctacatacctcatgaacccagcagagcaaaacagaaaaaaaagaagttgttcccctcatcctcatgcctgggttcctccccttccctccttttccctgggaatcctcccttcctttcttataacctttccatctcccaccttccctgcttatttccaagctgcctcactcctttaattctcccctgcttcctttctagaaaccccaggttcctggcgcctggcccctggggaggagaaagcctttgaattctacaactcctgcatgaacatgagtgccattgaggcagcaggggccagtcccttcagacaggttattgaggaggtgagactggcacatctacttttctggattcggaaagcacacaagaccagtgtgtgctcagggctgccatattttcttccccatagaggatggatctctttcctaggagtttgggagggaggtggacatggcaatgatctgtggacatatcaagaccttggctgagggtaggaaaagggggacagagctggagccctagtaagcggcaggggactcagggtagaagtcaggatgtagcaatggtggtgagggatgtgctctgagagactatatccctgtgttgagtgctgtttcttttcttcccagcttggcggctggtcgatcttcggtaactggactccgttagattttaaccaaactctgagccttctgatgagtcaatatggtcacttcccattcttcagagcctatttgaaacctcttcccacccctccatacttgccagtcatccaggtgagggatgtgctggcaaaaatgcaggcctgtctcaaatttgttcttagaccaaaaaaatgtgcgattcaggaaagcaacctaactttgttgttgttatggttcagtcactatgtcctgtctgactcttagagaccccatggactgcagcacgccaagcttccctgtccttcactatctcctggagtttactcaaactcatgtccattgagtcagtgatgccatccaaccatctcatcctctgtcatctacttctgctgccttcaatctttcccagcatcagggtcttttccagtgagtcagctcttcccatcaggtggtcaaaatatcagagcttcagtttcaacaccatccttccaatgaatattcagggttgatttcctttaggattgacaggtttgatctccttggtgtccaagggactctcaagaatcgtcagcactgcaattcaaaagcgtcaattcttcggcattcggccttctttatggtccaactctcacatccatacgtgactactggaaaaaccatagctttgactatatggacctttgttggcaaagtgatgtctctcctttttaatacactatctaggtttggcagagcttttcttccaaggagcaagtgtcttttaattttgtggctgtagtcactgtccacagtgatttcagagcccaagaaaataaaactggtcactatttccacttttcccctttctatatccaatgaagtgatgaggccagatgccatgatcttagtttcttgaatattgatttttaagccagcttttttactctcctcctttaccctcaccaagatgctttttagtccctcttcactttctgctattagagtggtatcatctgcatatctgaggttattgatatttctcctggcaatcttgatttcagcctgtgattcatccagtccagcatttcg

SEQ ID NO: 59215 - DNA, 2227 bp, Bovine  19866880512661
  misc_feature (1)..(1): n is a, c, g, or t
nataggaggaggccgcgatgaggacctggcccatgtcattcaccatcaccgggaaggaggcttctccgataagaagcagttcacacgggacggcgtcttcggggacgtcccagcttgtcactccattcataagggcctcgaaggcagcagatggagtcgccatggctggaccggcttctgcagagaggaaagcaaagactcagcctggtgaagaatcggtaaacaaacaaacgagccaagcagttcactcttccctagctggggcagctcttcccactgagcagatgagaccgatgctgtgaacagactcaagcactcaagcactcaaggctgtcggtgtctccaacccaggagaccctgttgtgccctgtccattaacactcttactgtcaaactaagtgagctccacgcatttccgtcacagaaggaaacaaacaggagttaagaacaaaggcagaactgtgtctccaaagacatacgttcaagtactaactcccagtacctgtatgaccttatttggaaatagagtctttgcagattcttgcctgaaaaatcccatggaccgagaagcctggtgggctacagtccaaagggtcgcaaagtgtcagacatgcctgagtggctaagcacacaatttaatgactggagcctttaaaagaagaggaaattgggacacaggtacccagggagagatacacaggctatgagaacatgtaggcaggtatcagggtctctgtgatgtctcaatgagccaaggaatgccaaagactgccggtgaacaccagaggtaggcgagacacatgaaacagactctccttcagaacttccagaaagaaccaaacctgtcaacacttggatttcaaacatctaagcctctagaactgctacagaatacatttctgttgttttaagctactcagtttgtggcactttactgcagcaaccacaggaaagcaacacagaggtgcagcgcgctgtctccccacccccgctccatcccactcggcgctcacactgatcatattaatctcagcgtaggcccagaaaaccaaaagcagaaagtaatacattatgaattgatagcagattattacttgcacccagacatagcagcaaaaggtgtatatgtcgatggatgtgcagtcacaaaaaccctctgcttcttcaccttgagctccctgcttaaggtcactctgcactctgacctcctctatgtgccctttactgaagcacttccctcatggacagactgtttaacagtcaggacaaccagtcctcaccatcctccctgacaactcagtggctctggacaatgctgctccctggtccccgaggctcttaccacctctaaacttatggccaggctcatggtctgcaacctcttgaaccgcttccttcctggcctctccttccctcttctgaaaatgcagagattccttaggtgtttatctttggcccttacctctttttccttgtctcactcaaggtatgatggcaaagcaattattaatacacgcttaggctctggagttaggctgtctgggtttgaatctcagctctgctgtttattaactgagatcaggcaacacttctcagacttggtttcctcattcattaagtaggaaaaatggcatctaccacacaggattgttttgaagatgaaaggaatagcattggttaagtgcccttccattatttattttattgcctaaaattacttgatctaaagtatattttatatatatatatatatacacacacacacacagatatatgtgtatatatatctttgcttaaaattactagattaagagtaattttatacacacacacacacacacacacacacacacacactgtgtgggctatagtccatggggttgcaaaacagtcagatgtaacttagcgactaaacaacaaactactatatatataaaatgcatataaatgcatgcgtgtgtgcttagtcacccagactctttgcgaccccatggactgtagctcccttggcttctctgtccatgagattctccaggcaaaaatactggaatgggttgccattcccttctccaggggatcttcccggcccagggatagaaccctcttctcgtgcattgcaggtggattctttacagtctgagccaccagggaagcccatatatatataaatatatatatatttatatgtatatgagtatcaattacttattatacatatatatatatg

SEQ ID NO: 59216 - DNA, 2228 bp, Bovine  19866880573831
  misc_feature (1)..(1): n is a, c, g, or t
ntgggaaaggaaactctgcaatgacttccgtatcacaggaaacaataaaaaagaactgttttcagtcagggcttgcagactttttaaaaaaataagggtacagatagtaaatgttttgggatttaggggacatgtaagttctgtcacaattatttgcctttgctggaaaagagctcagtcatagacaatgtgtaaatgaatgggtttggctgtgttccaataaaactttatttacaaaaacagataggggaccatatttggccctggggcataatttatctacccattttagatgatgaacagtctgcttacacaaactgtttacattaatgtccttggataataaaaaagaaatttaaattgtgttaagtgttttccagtgaatgaaagtcatgaatattcgaaatactttgagagaatctagagaaaattactgaaggcaattttgatgcttaaaggcttccttgggcttccttgatagtgcaattggtaaagagtccacctgcaatgcaggagaccccggttggattcctgggtggggaagacctgctggagaagggataggctacccactccagtattcttgggtttctttcctgacttagctggtaaagaatccacctgtaatgtgggagacccaagctcaatccctgagttgggaagatcccctggagaaaggaaaggctacccactccagtattctggcctggagaattccatggactgtatagtacaaagagtcggacatgactgagcgactttcactttcacttttcatcaggtgcatagggccatcagtcaaccctcattcacagagcatttaccatgtgtcagggaatttgcaaaatgttttgcatttactactttaatcaccatagccaccatgatccttggatagacaaaatgaagctaagaagtaaatgttcagtaaattgtccaagaaaacacaaccagtttgggatagaggaggaattaaaatccaagtctaactctgcgaagatctttcaattcttcacttcaaagaattcacatgggacaaatatccataatttaaaatagcatcatcactaaccaaccatataccttcacaagcacttcaagactgaaaaacccagcttacgatatcatgcaggcaaaaacagcagatctgctggttacgatgttaaagaaaacaaagcccctttccttccatgttaccatgtcattttcaccttgaccctgagatcaggagagcatatatggcatgataggctcagattttaacatgaagacactgcgataaatgcagaatcacttttaaaattgtaaagtatcagacatgtgacatcgtcgccagggaaatgtacatctgattatctcatcacactgctttttacatcttcaagtgattctgcaccactgacagctaaatagtccagtctctgcagaattgctccaaagcgtcctaacggttcccactcttccctacaaatcccaggcttcagctgcacagatgacttgcagtttccacctgaacccacctccctgctgtgtgtctgcagctccatcccgcggacatgacctccagtttgcaccagtccatcaggctagtgaaatcgcccctcccgcagcaagccccccagcagcccttcgggaagctgccggcctgctctcggtccggggtaatcagactctccctctgggttctcctcatccaggccctcagagccgtcacagctggcctctcaccctgctgtgactctctcactcgcgcgtgtgaggttagaactgctttcaaggcagaaccaagtatgcaccttcatgttgtcccagaagcgtaataaacatgtattgaacgagagtgactaacgggatcccccaaaccatatggtcttctccactcgagacatttcctcattccattctatttttacaaccttaaacacaaataaccgtgtccaactttcaattcctttattactaaataataaacacagtggacatccccacaccctttctgacccttgccctgactcttattagggatgaacttcacagacagattaggtttcaggccaagtgtgaaaatgcctaataaaatgagaagctgaaacctgaatgatatgttttccagctctccactgtaccacatcccctcagatgacctgtccccttacctggatgctgtgtggcaagtttaacacataatatatctgaacttcatagtttagccatatgatgatgaaaca

SEQ ID NO: 59217 - DNA, 1165 bp, Bovine  19866880702892
  misc_feature (1)..(1): n is a, c, g, or t
ntaagaatattactggcatactctttgacctaactatccatttctaggaattgctcttttagatatacttaaacaagggtgcagacatatggtcacaaggatacgtatgcccttgttggaaacatacatatcctttgctttggaataatgaatctaggataactaggctactaactgaaaaggggctttaaacaagttatgctttacaataactttcaatatggaatacaataaaattgtattgcaatatacaatacaatatatacaataaaataaaattatacaataaaattccatgtagtcattaaacagggaatactgtatttacactcatgtataaaactaagcactttaaaatcaaaagataagttgcagaatattatgtaaaacagtagtatgttaaaaaggtacatctctgtgtgtgtattgtgtgtgtgtgtgtgtattaggatatgaatgggaaaaaacttagatacatatcacactgttacatcagttgattggagatttgggagtatgggcaacataccagaaactgttttttattttacccgtagcaatactatttgatttttaaaaattatttttaagtgtttagaaagaaggatgttgttgttaactcttaaaagttcaattgaaggaatagattaggaaattaaacccaaactataattgtagtaagatgaagtaataaaagcaactgagcttgagaatggtgtataataatatgtcttggctttaaaaagaattcctgaataggtggttttaaatcagttatagttgttcagtcacccagtcatatctgactctttgcgaccccatggactgcagcacaccaggcttccctgtccttcactatctcccagagtttgctcaaactcatgtccactgagtcaatgatgccatccaaccatctcatcctctgtcatccccttctcctccttccctcaatctttcccagcattagggtcttttccaatgaatcgactcttcacattaggtggccaaagtgttggagcttcagcttcaacatcaatccttccaaagaatattcagggttgatttcctttagaactgactggtttgatctccttgtagtccaaaggactctcaagagtcttctccaggataataacttctcctttaaatcagtagaagttattat

SEQ ID NO: 59218 - DNA, 1913 bp, Bovine  19866880961090
  misc_feature (1)..(1): n is a, c, g, or t
ntcacattagtcctgtccttcccaacactctcctaaagcacctttgacctctttgttcctcaggctgtagatcatcgggttcatcatggggttgaaaagactgtaaaacagggaaaggatcttctgctgctcctcatggtggcgagacttgggggccatgtacatgacgatggcactgccaaagaatatcccgaccacgcataggtgggaggagcaggtggagaatgccttcctgcggccctcatcggactggatcctcatgatggcggccaggatgcgtgcataggatcccatcaccaggcagatgggcccgactaagataaacacagaagcagcaaaaatgacaacttggttgagcttagtgtcagcacaggccagcttgaggacagacaggatttcacagaagaagtggttgatttcatgaggcccacagaagggcagccttaggatgagacccacatggaccagggccaggagggagccacatgtccaggaagcaacagcttgaacagtgcacactctccagctcatgatgacagagtaacgaagagggtggcagatggccacgtaccgatcatgggacatcaccaccaagatgagacactcagtgtgtgcaaaagccatgtacaaaaaggtctgcattatgcatgggacaaaggagatagtatttttcttgttcagaaggttcaccagcatcttcgggacattgtttgatgcatatgaaatatcgacgatggccaggtgtgagaggaagaagtacatgggggtgtgcagtctggggtccagtgagataagccccaggatgaccccattccccatcagggtgaggacatagaacagagagaagagcccaaagaggagcatctgcatgcttgggctgagcggaaatcccaggagaatgaattctgtgacccatgtctgattttctgtcatgccctggtgacagtgcctgtgctgatcacagctgctgcagtgcctgtgggctgagaaacaaaggcgggtctggattagccattaacagaaagagggaagttgtggtgtgcgctgtgttctgagtcagctaacaatcattttcagattcatcatgtcaagtcttttaatccacaataaagcagaaaggctcccataaataggatcagtgaacacagggtgtcatgcattatttccatttctacagaattttatgtaactctgattgcaaagtttatactcatacagtcaagatggcagccacagaataaattgttctccataatgactaatcgttttactttttaagaaaggcgcatagttacactctcattttgctttcttatttcttcagttctcaaattttgctcatactttatcatttgatttgctcttattttaaagcttgtgcagagtacattgcacacagcagttgctcaataaatgatcatgaagtaaatacaccaataaaacaggggatgagatgtacaaatgcaacttcaagaaggtatatttccttctgtgtccactaggtttaaagctttagcaaatgaaattgacaccaagttttttcttcctgatactatgcaggaaaatctagctttttccatgctgggcacgagcagagtgccatcactgatctggtcagcattcacagaagttgtttgtgatctctgatcagggcaaggatctctactatattcctactcctgtcctataccgccttcttacagggctgcttccctggttctagagagatgttatttctgggccctttgcagttgtacagtgcatttgttgaatggatgaatgaatggatggtaaaggatggataaaaggcattactttaggaataacatccagagcatattctggaatttaatcaagtctttcgactctcctttaatttttggctaccactccaccaaccttatggccaccca

SEQ ID NO: 59219 - DNA, 1498 bp, Bovine  19866881046777
  misc_feature (1)..(1): n is a, c, g, or t
nactccaggtctttctctccagtgaaagtgtacgttgctcagcaccagtgccaggccgcggggccgagactgcaaccggtaggcctggggaggggcacccgatgagaccgtcagcctcgtgaggacagaaactatgcctccccttccaaaatgagacatttcaagaaaattaagacgtcacattcttcttcatagtcccaccaggtcaaaatatagaaatgcccacaaaagacagtcaacaggcaatgcttttaggactaacaaggcaagaaggaaatgatgtacacacaagctagctacgttcagatgaggaaggggatctcatttcccagtgcctttcctcttgccatttccaagactcaccaggtggtggtgtgtttgataaaactcaggcgtgcagggcttcacctgaaggcagggaggaccatctccgtggtctagggagtgctccactgcatctgtggcacacaaaccagaaaaactagcttatagtctacttggcaatcttagtatcttcatataacttcaggtaccctttggtctcgctcactcccctggttcgtaagcactacagagacagagatcctgtttgcttttgctcattacaggatcctctgcacttgacctgcctatagtagtaggtgctcaacccaaagaatgactgaatggggtatggggtatctgataaaagtcttattctaatcagtacgctatcactgtgaagtaactcagctgtatacaaacacacaccaatcacgtgaaggaatctttggcccttgttgctccaagggccaatcaccattaaaaaaatcatctgtgatggaaggaaaacaggtccaacctacaccccacctaaactgtcctgctggttcctaacaaatgcactgaggaaagtgtgccagttataaacaaaaataggtatcacactgggcaaagtcagataccagtcaaggaaacagaagtcaatctgcaacaggggactggttggggcggagatggggttgtgctattttacatcatcagttcttacctggagacaggtggagccgcttgtggcgggtacaggactcacacaccgggaaagggagactcaggtcatagtcacagctcaactgtaagaaagcaggacccaccaagccaggctcaggggagctggttcagatcaagtaacacagaacccctagtcccccaaccccaacccatccccactgtctgaaagatgcccttcccaccaaactagcctttctcaacacacacagcctagggctccataccggcgggactacaggctgaagaccagacagggttctgagcagcagctcctccaggtgactctgcttggtctccctcagggccacacagaaggcatcaaaggcctgggggcctctcttgggcagcaagttgaggagttccacgttctggccgaaactgccagtcttggcctacaaggataaaacatgacgtcaccttactcacccaactgtatcctatttctcca

SEQ ID NO: 59220 - DNA, 1140 bp, Bovine  19866881082830
  misc_feature (1)..(1): n is a, c, g, or t
naacggaaagtaggatcctctctcttcccaccctccagttcctgagcccagagttacccgccatccattgtttcttgtttgcctaagatgttttctctatggttttgttgttgtccttcagtccctaagttgaatctgtatcctactctttgcgactgtggcgtgccaggctcctctgtcctccattgtctcctggagtttgctcaaattcatgtctttcccctgtggacacaccatcatatacctctctctagtctccttctgtccccacggccaccctatccctcaacccagcacatacacatgcttttagaataaatatacagagggagccataggatacataggctctgcaccaggggcctctttctaaagtaaaggactttgggaaggagggggaggctcctgcaggctccaaaagctcagagctttgtgatttcagcagggaggaatgggcgaagggtgcacagccaacagaggggggaaatggagcaaactttggacaatcgtgctaggaaataagccagactgcggtgaggtcatgcatgtgctccgtggtgtggttcattaaagttacaagacccttgggattcaaggggggtggggtgggggctgcccatgcagggagaggtggagtccagaggaacctggcttttgtggttgggctgtctctctgtcctgagtctcgaagtattgaagagggggaaggaaagcccacgtccagctgcattcgggatgaaccccaacttcacagttcctcattccctttgttgtgggaggaggcacgccttcggttttggcctctgtccttaactaacagtgcagctttttggagttatttccactctctggaccttagttttcttagacccagatgatctctgagaccatttccaggaaagacgatgggatatagagtcagaagatgaaggccagctcattcagtcttgtgtgtctctgtttccttagctacaaaatgcgattaaccatgcccacctcctagagtgggtgtgatgatcccaaggggagaaagtactttgctaactggagggtactgagcaaacagtactgggctcggagaatgacggaggccaggactttcctgaccttactcttacctgcctcccaggttactcccag

SEQ ID NO: 59221 - DNA, 1094 bp, Bovine  19866881150632
  misc_feature (1)..(1): n is a, c, g, or t
naacttgatacactatttacagaatagtgttcattctctgtttttctcaagatgattttttttatgagaaaatactcctgtgtaatcagattattctatcacatcagaactaaagtgcaataaattttgaaagcaacatggaaactctgccttcggggagaactatagttttcataagataagggactaggactacttttttgaggttggcagcttcctaccctgctgacaaactcattgggagcagtgagatttgggtcaacacaaaaagtaggatctattcaatcctgtagggatcagattcaagaagactgttgatcttattgctggacagtttcaaatggagaaggaaaatttagactttgagatttagattctatattcaaagatttagaactggaaagcatttgcattctgactgctttatactgtaacagagaaatccactgggaagctggggcgaaagctgctttctcaagttaaagccaatgactgtatttatgtgagtgaataacagtatactttccttcatctgtgtttgcaattttttttgttacatgtattactgtagttgagttttactaacctgttattttgagggaaaatcatcaccaacctttagtagcaagaccagactctcatggctctaacaagtaaggctgaaaacatttttgtttgtacaacgtatgtgttcgttctcagcctttctaagttagatataagcattactacttcttttatcatggcacttatataaagtcttgccaactcagtctcctcaaagaaccaaatattaaagcacataacaaaatatgccagtaatgcagtttgtacaagggtgactcaaagattattttaaaaagaaaaagcaatcaagcttattcaacaaatatttatttcccgagtgcccactgtgtgggagatgtgggggttggagatgaccagctttgttctttagaagaacaacataccttgctattagcccaaaagcaatgtctaacattcaagcatgtatttaaaagattaagacctttgctgtgtccagaaaatattctttgtgaaaatacttttttactgcggtaagaacacacata

SEQ ID NO: 59222 - DNA, 1035 bp, Bovine  19866881161109
  misc_feature (1)..(1): n is a, c, g, or t
nttgagaacagcagagttgatgtacaatgaagagggttgcagattgcaaattccttgcgtgtgtaacaagagttcgcctgtctctgccttctctcagtcccagcacagtgctcagtacatgcaggtaggatgtaggtaggtgggtaggtaggtaggaggtagaaaggtaagttaagtagacaggaaggaaggaaagaaagaagagttaggtcaaacagtattcatacaaagcagaaaagcttctcagagctaatatttgcttaaaacacccaacagtaatgcttgcaggggaacttgtttgaaccgtgatgagcagacatcaccgaagactaccccactggactgtctggagacggagttctagctgccgatagtttaagcttcttaagggatcctgactcataacatttggagacctcttgaactattctgtactatctctttggaataagtacatgaaagccataagggattttgcaggctcaggttaatctgaaagctccagtaatacagataataggcggccaatgggtctgatttcagaggatgaactttagattatcctccaagatacgcgtaagaagaggctcagcatcacaggacgctgaaagttatcaactcctgcagcacagaggtggacgcttgagactagcaaactttttgagttgttagcacacaaaagggaaaatccaaaagcagggcaaatgatctggaacacaaattactcccaagattttaagcccccagttctagagaagtgggaaactagagaccccttctcacagattctgttttctttagatgcttcacaaggaggaagcacaggaagattaggcaagaattctccagagcctcgggctgtactgagaactcaatgatactagctaataacgttagactcattaaaaaggaaatggagatgttgtaatcatattcatgctcattagagacacaccagactcacaacaagacgataactttccatgtcttaaaattgggaagatggaagttcccttcatcagtgttacgaaagag

SEQ ID NO: 59223 - DNA, 1785 bp, Bovine  19866881205079
  misc_feature (1)..(1): n is a, c, g, or t
nttgtccttgagctgtgccagtccgcagtgtcaggcagagacccaggaacagggcagcagcactggtcttgaagagaagctgaagagcatgcatgctggaggaatttggtgcccaagaagcctgtgttcccaaggagcaggatggttctttataactctagcacaatgaccctggagctatgaggacaggttcacttggccaaaatcatcacacctgagggatttccctcattgctaacttttccctatcgtgtgtgagaaaggtcaatgtttggctggaacttaattaaggaaagagaggaaggaatgaattggaccatttccatttgtttttcaacgttgaagtgttcctggctcattaagatagatcctgccttaactgttttaaacaggattctttccttttctaagtcctacttcttaatccttgttctacgtgtaaagatccatgagatgtcctttccctttgtcctgtatgtgacacatgtcttgtcttcctctcaatgcctcaaccctaaaatttgctatagattttagatgtagaatagatgccatgaaactaatgtccctactcctaccttctctgatttgcatttttggttcaatgaatcatctctgggtagaaagtgtgtttaaagagaatttaatccatgggaatggaaaaactcagatgagatgaggggagaccagatatatatggtgtgcatttctttttaaaaaaatttatttatttattttatttatttattttaattaatttattttaattggaggctaattactttacaatattatagtggtttttgccatgcattgacatgaatcagccatgggtgtacatgtgtatttctaatgatactgccaacaagcaggaagctggataaaatgcctttctgtgattgaattggtttgttaggagccttgaattcacattacctttgtggatgctgctttcctgaagtgtctcagaaaaggtcctgtcatctcagttctatgcttctctagcttcagttactgctctgtctgcttctaattgcaggaaattacgttgcaaggatagatttttaaaaagcccatttggaaggacttttatgatcatctctaattatctataagagaaaatggtatctgaggaaacagagaattagggtgactagggaactcatggaatttcccacctgctatccaaatgtgagaaccgtggaagagctgagggtccttgcgtcagatggggaggtaaagtccaagagtgaattagttggggcagctgagagtgcttcactcttactcctaaagggtatctcagagaactagagtgctgaagctaagcctgaccttgagatgccttaaggctagagcaagaccaggaaaggttgctttcattcctcatttgtattttatgcagtattgtctatgaatcaggaggggcctctctctaactccaggtgctttacagcaggtcttctgctgcctgggtcactatgcctttcatctctgttttctctcttgtggttcagtctctgatgtgtctgactctttgaccctatggactgtagcattccaggcttccctgtccttcactatttcccagagtttgtccatcctcatgaccattgagtcagtgatgccatccaaccatctcatccatttccttctccagaggatcttcccaacccagggattgaacctgcatcttctgtgtctcctgcattgcatgccggggtccagccccagtggatccagggaattcgaagtggggacggagtcggcgaggatcaggaaaca

SEQ ID NO: 59224 - DNA, 2239 bp, Bovine  19866881255688
  misc_feature (1)..(1): n is a, c, g, or t
nttataacattggactttacttccatcaccagtcacatccatcatctgggtgctgtttttgctttggctttgtctcttcattcttcttcgagttacttctcccactcttctgcagtagcacagtggcctgtcgcaggggcagggctctgggtggagcagacctgagacacatagcctgtggcataagcctcttggaggaggtcaccattaacctcaccatagagccaccgagcagatgactcacaaactgcagaacaattacaccaaatagtgactgtgacaagactcaaaacttggtcttctgactttatctggggaggaagaagataggagtacaagatgtcctgctaactatgcaaggatttctggtcatggaatcagcttgggtcttggtctttcctccatttaactgtgactttaggagagagttttaatctgtaacttgaggcttcatttatttcatcagtaaattatttaagtcttcttttactctgaaaactgagattctagtcttagaatctagtcttatcctgtgcattacaaaagatgatacttttcacatcttacagatgaagaaactgaggcacagagcaacctactgacatagccagtaactcacagtgatggatgtctctatgactaacacctgccttgatcctagcccagggttcttcttaccatagcactttggtgttatagctgtcatagagggtttcctacatgaaatgccctttgaaaatgaaagtcaagtctctcagtcatgtctgattctttgcgaccttattgactgtagcccgccaggctcctccattcatgggattttccaggcaagaataatggagtggactgccatttccttctccaggggatcttcccaactcagggattgaactcgggtctcccactttgcagtcagactctaccgtctgagccaccaggaaatccctaaagtgaaagttgttcagtcatgtccaactcttttcgactccatggactatacagtccatggaattctccaggccagaatgctgaagtgggttacctttcccttctccaggggatcttcccaacccagggattgaacccaggtctccagcattgcaagagaattctttaccagctgagccacagggaagcccagaaatgccctttgaaggtcactaataaaatatggttaaaaaattcacttgcatgtgccttgtgtgctcagtcatgtccgactctttgtgaccccatggactgtaacccgcaggtctcctctgtccatgaaatttttcaagcaagaacactggaatgggttgccattttctaccccaggggatattcctgacccagggattgaacatgcatctcttgcatctcctgcattggcaggcagattcttcaccactagcagcacctaggaaatcctttattatgtataatttgtctcctgtgttctatttgataataatgatccccacaagtaataggatttgagttagcctaagtagaagtgttgctcagttttatgcctgtcaaaggagttttctaaagtcacctgcttcatagggtcattgtgagactaagcacaacaaagatcacttagaacagtgcccagaacacaccaaccaaccacagatgtgagctccgactgtcaggtgggggggtgtgctcaccagatttcctcatggagcgcccagcaggtgtgtggtcatgtcttaggtgtcggcttagagaggtgtaagtttccacttgagggatgctaaatgcaaggacctgatatagtatccatgcccagtgtttacacgggcggaaagcaggcagaggaaggacaggcaaattcatggacaggcagggagacttctgaaactgagccttaatgatatttgcatctattctgagaagaaaatacctcttcaccctcctcagatagcccacatcctcgactttatcctctgtactggggcagctggaagggccaatattatccaggaccttccagaaccgccctacaggaagagaccttgaagtctgcaggagagatgagcggaggggacatggttcctggacctcagttggttgataagacagcccttgtctgcattattattttattccttttgttcctggtggcattggtaggtaatggcttaatcatcatggcactgggcagcgagtggctgctgcagagaacgttgtcgccttgcgataagttattggtcagcctgggggcctctcgcttctgtctgcaatgggt

SEQ ID NO: 59225 - DNA, 873 bp, Bovine  19866881328182
  misc_feature (1)..(1): n is a, c, g, or t
ngggactcctctgtcactgcccccaaagggtcctagcccactgtatcctcttaaccccaaaaggtcacctcagcagagcagcctgaagctcttgaacctgcaggatatcttttcctggccagactatgtttccgaaaaagagcctcatttccaagcgacagacaccttcaagtcacagtgatttactgtgtgactgacttagcttcaggagggtcatttacaaagccatctacattgtaaacctcacaagggagcctggagtgaagatggccctgcctgagccatttgctttaacattttcctttaacatcaaatcaccttcaacaaagatgagaaaatcagatctgtccggaccaacctgcaagagtacattgcgagagccagctaagccagccagtgtcatagaaaagaactccaaggccaaggtattattccaaaaggaattgggatgattttagcggaagtaatatgtataattgctttacgacgttgtgttggtttctgccgtacatttgttattgtcttttgaggtcagccctggctcaagggaatctctctaaggttcagaaaatgagacactttatttctcattagtttacaataaagttggtgcagttttcagttgtacatatttttatcctggtaatttgttttgacccttagctgctgtcatcttttaccaaattcatttcagacctttttctaagattggtttacttattttggaagtcatatgtaaacctgttgcttaatttttatattatgtcacatatttttgtttcttttacagatatttcaaaagttcaatcactggtcttttccccattctatttctcagttcttttgcctattctgccgcgaatatgggcttcc

SEQ ID NO: 59226 - DNA, 754 bp, Bovine  19866881345590
  misc_feature (1)..(1): n is a, c, g, or t
ncctggaaatctgaagtttcctggcgttcccccgtggtctcaggccattagacggagcactctctccaccaataagcaatctttaaaggggaaaccacactgctcgtccctagtagggtatccgggcttctatattttatcacaagccactgaaaggcatttaacgccttcggccaagattaaaagggaggaactcttggagaaaccagagagtaaacaggtagggcggtgactcactgcttagccagaaactggctgaggaccttgtgctttcggacaccgagcatgacttggcgatgcagatacacaaacacagctcccaggaacccacagcaaatcctgagggtgtaagccatacagaaatgaaaccctcatccctcggccctggccactgcagggaagcaaataccaggcctccacctgccctttctacccacctcccccgcaacagtttccaccttacccatgcccacgccaccttcccagcttgggtcctttccaatccaaagctttgccccagccctgccccgccccccccaaccccactcccagagcagccactgacccgataatcgcaaaggctgggagttcctgcaggtcaaagggggaagtccattcggaagttggttctgaagagggctgtgatggtgactacaggatggaaaggccaaggtcatggtgggagtgtcacagaagccatcgaggaggacccaaggtcatcagccttaaggtattaaagtttcctccaaaccta

SEQ ID NO: 59227 - DNA, 2526 bp, Bovine  19866881423808
  misc_feature (1)..(1): n is a, c, g, or t
ncgatctttccagcgtgagtatactctgctcctattcagctttaagcctttcacttgcttctcatggtatttagaccactattcagatcccctgttatgagctgtggggtcttacacgtgctggccctgcttgcttttcccccctagtcctcatttcttctccctccatcacagcaggcatggcctcatctcagtgcagctctctcccacctcactcttcagaaggctgggcctccggcatcctcctctgtgcaaatatcacctcctcagaggtcagagaggcattccccaatcacacgtgtatcatttctgttttttaaccttcatagaaaaggtctcaaattttattatgtgtttcttattatttgctgattaaagaaaatctcctccaagagacttttacctccaccccaaggacttcagtgtccacaagaagaagctcatgtccacttcctactctgcctggtccacagcagtcactctcctcgctcctgtgagcccattcttatcttttaaggccctgagatgggagaggagccctttcacatttactgtcatttatatgtttataaattttactttatatacaattttacttacattatttcatttgggttttgatccacattgacataagctaaatgaatattaatatttgcacttgcagaagaggaaattgggttttggagatgataagattttaaggttcatatagcaatttacgactgaggtccaggtttttaatactggaaagcctaactctccccacttcaccgtctcatgtaccttgcagacaatgacaggtttcactctgtctccatggatagtacagggggaaaagcattgtaaaggcagaacttccagcgctctgggtgggtggtaggccaggaaggccaggtgtatccttcacagttggcaatggtaatgtggaacatggttgtttgatactgtttaatttggatgtggttgtgaaaggcagtgtagggtaatagatacagcatggtgtttagacttagacttgaatgtgattcctgccctgctaccagtgggaatgtggtaggttactaatacttctctaaaactcaatttcttcattactaagatgtataaaaggactatgtgagaatcaaattacattgtgtacataatgtacccagtgtatgatctaacctataatgcactattaaaaatgatgttactgttgttactagtcaaagaaggcaaaagatggaaggttccaaatggaccatggaatctgaccagtaattttttctcccaggagagttaagccctgtgtttccaatatggaagtggaaaaccagacacgggtcaccaggttcatcctggtggggttccctgggagctggggcatgcgtgcagcagtgttcctcatattcctcatggcctatattctgacagtggctgaaaatgtgaccatcatcctgttggtgcagcagaaccgggccactgcacaagcccatgtacttcttcctggccaacttgtccttcttggagacctggtacatctctgtgactgtgcccaagttgctgtttagtttttggtctgtgagcaaaagcatctccttcgctcactgcatgatacaactttacttcttcattgcactcatgtgcacggaatgcgtgctcctggccaccatggcctacgaccgttacgtggccatctgccgcccactacactaccccaccattatgagccacgggctctgcttccgcctggctctcggttcctggaccattggctttggcatctccttggataagacatacttcatctctcgcctcagcttctgcggccctaatgtcatcaaccatttcttctgcgacatctctccagtacttaacctctcctgcacagacatgtccacagctgaagctggtggactttgtcctggcactggtcatcttcctcctcccgtctcactgtcactattctgtcttacggatgcatcctggccaccgttctacgcatgcccacgggcaagcagaaggcgttttctacttgtgcctcccacctcgtggtggtcaccatcttctactcagctacaattttcatgtatgcccggccccgagccattcacgccttcaacatgaacaaagttatttccatcttctatgccattgtcacccctgccctcaaccctttcatttattgtctaaggaaccgagaaggtcaaagaggcagtgaagaagctggcttattgccaggccagatctgactagtctgttacaagtgattagatgaagtaatttgatttggagcctgctcttcaacccccatcctttctcctttaatgctgcagctggatattaacatattactcatgttaatgtgacctcaccagatccacattaaccaccggctcttggttgtgtcctgagatctacatctgcgcctgtgggctgtgttttaagggcatgccctttgaccagtgtgttctctttgactgtgatccaaaatggggtttctaagattgtgagtaaattcctgagttgaggggagagaga

SEQ ID NO: 59228 - DNA, 1170 bp, Bovine  19866881561530
  misc_feature (1)..(1): n is a, c, g, or t
nttttgtgtcctcctatacagggttcttggtggctcattggtaaagaatccacctgccaatgcaggagatacaggtttgatccctgggttgggaagatcctctggttcagaaatggcaacccactctagtattcttgcctaggaaactccatgggtagagaagcctggcgggctacagtccatggggtcgcaaaagagtcggacatgacttagtgactaaaacaacaacaaaaaatacagggttatttgcaagacagacttgggagaatcaaaggataagtctgctggaagatggaagagtctgagtagtgtcaattcctggattaataaggatggttggctgaagttcagatctcaagaaaaggcaagagaagaataaagacctgggagaaattgctcttgagccctttagactgtgaggtgctatgggaataaataccactctaacagtttcaggctatgtcgcaattctccctgcgcttagggaaaaaaaaaaatcctatctctctttgcaatgttaacaaacttcaaagcattctgtttgttttggaggaaagaaggtggtggagaagctgtgagcctccatcgcattgcagcaagggccacagaggagcgcaaacttgaagaacggatagtagcagccaccaagaaggaagtcggattgtttctggtgctgatgggagagacaaagagggtgaaatgggaattctcatggggttatacattccatccaagtgcatacttaggtacaagcttgaccacgccttcctcattcccatgcttagctgatctcactccaaagtaaaaataaaagcaattcgcaatcatcctattatttcctttggcttctggagcactgacaggaacttgtggaggggtcagtcatacaaaggggccctgactcagaatttcttgtatactcataagtacgtgtgtctcatgagaaatggcgctgtttctaccttaccttgttggcttggctgcctgagaaactggtgttgctgacctcagaagttaatactctgcgtgaatgcttgggcaggtaggagggagggagcgaaggaagagaacaaatgagtctcagtgaactggggcatgtcagaaatttagtaagaacaagtcgagacaagtgttaaaccagaatccccgagagaagagagatagggtggt

SEQ ID NO: 59229 - DNA, 901 bp, Bovine  19866881625753
  misc_feature (1)..(1): n is a, c, g, or t
ngtcctggctatttgcacctgatatgggcatctcatacatttatcctagacctggctctggcataggcaacagttccctacaggacaagggtcattatgcttctctcttgctgagcacccacaaactagttgaaatgccttctttgcacatttgcatgttggtacttttccccttgtcccttagccccagtctctctcttttttgcctttcccgctcctcctcttggccccccacatccatttcctgagtctcccttcctggtccatcccatagccccacacctggcctctccttcctgcacatttcccacttctctcagcctctcttttgtccagatagaccagccagagcttgacgttctcctcaagcaaaaacaggaaccgaactatgcccaggtaagatggtgccgcagaccaaggtcctgacctctgactctggagaaaggcaggggtcgatggtggctgtgactgaggttgcctttcccccagatcctgcgggaatacctgagttacctgaatcgcctggtaaccttgctgggaggagacccaaccgaagtgggaaacgatgcctcctattccctcttcattaactcacagctgaaccagttcctgaggcctggggagcagcagcaggcccagggcaaggtcttcgagatggtcacaattgaccagttgcaggtgcctcgagccaagggctgggggaagatgggcataaaggtcttgctcccaaacttttttgatcttcatgtcttctttctcctcacttccttaattcttagtccaccccctaacttttctgactccatcctttccccaaccaccccctttccaatccctctctatcccaagggaggggaacccccatctcttttctggtcccccctcaacctctgtctctctc

SEQ ID NO: 59230 - DNA, 3518 bp, Bovine  19866880958117
  misc_feature (1)..(1): n is a, c, g, or t
nacttctctgctgtggattattctgaccctttgccggttcccagacctccgctcaccattcaacttctaaatgagtagctccacaacccagcttggctgcacaacactttgatcaatcggcggcactgtaacaattgttcaatctttgaccagggccagcttcacaagtgtgtaacctgggcagtcgaaaaggccctgcatttagaagggccctgtatttagtttaatgcttggctgtcactatgttgacattcttaattaattttgaacatgggccttgcattttcattttgcactgagtctaaaaaattacacagcctgttctgatcttgcctttcatcactagagcagaggttttgtgattacatggtagcagtcaggggaaagctacaaaagaagaaaaataaatgctggctatgcaagtattatgtgtcactgaacatgtacacttgcaatctgaaggacggcatgaagtccttaggacagttcaggaggaaaggctcttagaggtaataagacctaatacaaggctcttttttaaaattatttttgtttgtttattttattggagtttaattgccttacaatgtcatgttagtttctaccatacagcaaagtgaatcagtcatatggatacatatatcccttattccttggatttccttcccatttaggtcaagtatgtaagtgtgcttagtcatgtctgactctttgcgaccccatggactatagcccaccaggctcctttgtccatggatttctccaggcaagcatactggagtgggttgccgtttcctcctccaagggatcttccccacccaggaatcgaacctatatctactgcagctcctgcattagcaggcagtctttaccactggggaagccctcatttaggctaaagccctaattcagaaattagaagagaggttgcctctggagggtggctgggggttggaactaaatgagaagagtcacatgggcactgtgattacaatactgctgtatatcttgatgggactttgtatgcactgttcaaacctctggcaaatgtacatttaagatttgtgcatgtcactgtaaatgttgtatcaaaagaaaacctataggaacttccctggttttccagtggttaaaactcctggctagaactacactcatgtctgtaattttgatgctggaaatgcatcaaaaattagatggattacagtatatataaggggatggatgaatgtacaggtggatagacatacagacagacagacaggtatgtactaggccagtaaagttaaatggtaatggaggactctgggtgatgagtatacaggtgttcactgtaaaattctttcaaattctgatgatctgaactttttcataatgaaagttgggcggggggggaaactcttaaaaggaaaaagcagcttccgttcgtttttaagatttactagtgacaaacactttagtgggcttggcagttatcatgagtcagaacacctaagctaatagctgaactgtattttgcttaaattaaaaactcgaagatgctcttttcagatctctaagtccttaaaaagtttatgaagaatgtttgtaaaatgagagattgcttgtgctcatctcaaagccatttagtgcctgcaagggcctgaggcctcaggatgatctataatgcatggagtgtatgctctcagcggtgtttttcctcttctcttgacgtcagttgccatttgtaagggttgccaaggtaatgaccagatacatctaaagacagggccacgagaaaggacagcatatttattttttctcttttagcatccaatatatttaaaattcataacacattcagtttgatgaaattcgacttcacagagaaccaaacttcactgtatagaaaaggactcccctaatccctcccacccctgcccagtcctgtgtttgcagctctgcttttaatgactggagttatttgaaaactgcatacaggcttttacatatgccgtatattttttcctggggaaaaaagtcattttttataaaatcatttttggtaaagtcaacagaaagacttagtttacctcaaaggcaggcatgggaaaaattgagatctgtttcaaaaaggaagatttcaggttccttggaaagtatgtgatttttaaaacttaagaaacaatacttgggtttatcaatcagtatgattaattgacatgtttctaatgggacagatttgtcatgtcacactaattctaagttttccatcaataaaaagcatataaatgttacaactttccacgttgacaagtatatttttattttgtggcagcaataaataaaccactgtgggttgagaaggaactcatttcagctcagttgaacttcattatgttttgaaatgaagtcaccctaatattagaaaattacatgctggcatgaacttcaatattctatttctgttaatggctcatttatttcaaaataagttcttactattgtatacttttaagtctgtatattttggcattattgaaattcatttatttacctttaaaatgaagtccaaacatgaaacaaaagtcattttctaaggagatctttgcaagatgcagaaatctttttatgtgtgaacaaacatttttcaatgttttatatgagatacaggattttttgtttatgagcatgcttgtcctcttggatgccaattatagagggtgcgaaacaaatctgtcctcaaacacctcttgaggtttttacctttttttgagacaatttctattttcagcctgaaccacttgttgggcaaaagattccataaacttagcaccaagtttgtaagactgtagtatatctcttttttgtacatcttagaattataagagtcaagcctcaaatcatgtgcccttttgctatggagtttgatggaaaattctgcgtacacgcctctcctcatttcatgggatgggatcataccactttcctgagtcgccactagaggcccaggactcaaagtccaaacccctggaggtcattctgtctccttgggttattttggaactttgccaagtccacaataccttccttgagagtgatcagcatttcgggagagtgtgcaaatgggtccttaaaacaaatgtatgggttaatagatgctgaatgctaacatcttcatggggttgagaaattgctggtgtgggaattgggcggggaggagaaagttacaatttgaaataccaatgggttgtgttggctttctcaaattttctgaacctctgctttgcttgaattttaaaggtaagaaacatccattagtgcatcccttacaagcaaacttatgacagttaatcaattgttgagcatgattgagcccctattttagggtctggcactgctctggaatattacagagtttgtgccttcctgtgactttcccaaatatcaaacttcagagaccatgtaaagaaaacctaacggactctttgctgccgatacaatatgtgcttccctaagctcctattattcacagattt

SEQ ID NO: 59231 - DNA, 954 bp, Bovine  19866881821455
  misc_feature (1)..(1): n is a, c, g, or t
naatagcttgacaatgatgccaaatgacagattttatttattagtatttaattgaaagaaaaatgagatctctattaagaaggctttgtaatttgtcagatgctttcaagagccttttaaaacatacttgtgaaaatgaaagtctgtgaaaaagtaaatactataaaaatacgtagattcatataatatacgtttcttcttttaggtagcttctgctgctttttgatatgccctgattaagtttttttccttatataaactattaggaaagtttcattaattaaaattgctcatttttattaaggatattttatgtgctatttaaataaaaaattggctttctttaaatagttaaaattataaatattttactatttgatcatctattagctttttatttgtttttttttaactaaggttggatggtgtgtctattttttttacttattagtctatagaagatgttcttattggaaggtgtgcaaataaatcctactttttcttgagcatcataggaattatttatattaaaataccttcagtaactgtccatttactttatgtctgctttagtgccaattaattgtttctgctttattttttgagctgtgtctaagctaaagaataacattctcatcacttcctaaagatcacgtcaaatatggattccgtgggtcgcatacagatgcgaacgagacgcacgctgaggggccacctagctaaaatctatgctatgcactggggctatgattcaaggtttgtacctcccattttcaaactgcctgcagaattattttgttgactcatcacttgcattttccattagaaacaacctatatctatgaagtgtttgaaaaaaaatgcatctaatatgactgctttgctcttaataaaaatattcattgacactttaaaagtttagaaacctttaatatggaaaagaaatttacctct

SEQ ID NO: 59232 - DNA, 864 bp, Bovine  19866880734030
  misc_feature (1)..(1): n is a, c, g, or t
nttttccaagattctaataattgctggaaaccttgattttcatccttgtcaacaaacgctgccagtagttttccatgaagtgtgaggctcatttaattaatttttgataaaatgtctaccaagacacaagtttgcataatagcagcttgtctgtcagttgttctttcaagtaaaaatggtactgaaaaaaagcagccagttcagctgcaactcaagttgcttttctagaaagaaccatcatacatccatatgcaaagtgccttatgcatacctcccgatccatcattcagcatattaaaaaagtatactcaagggaggagactttcaataagtaataagtttcactgcttcatcaaggacattcttaattgaatttttaaaattctgaatgcactgtgggaaagaatacaaagattattagtacagtttggtgccactgctttgatttgtcctaatacaccagcaatttatccatcacaacttttgcatcattggtgtaaatgtcaacatggtgaaaaggacaaaaaaatcatcctagtcattattatgaaattagttttgttctcacagacttgcttaaaagggccttgagatcaaagcttcatagaccacagtttgaaaatcactgccctatatcaagacttttacaaactgtaaataacataataacttgataattattccattaaacaatgtaaacttgagccacagagaaaaaccttacttttgtgggatcttgtcatcctatcagatttagcagatgcatccttaactcggttatgatattctaaaaggaatgttcgttcatgctcaaagaaatcatctacatcctatgggatcaaaagaaaatatgagcttttttca

SEQ ID NO: 59233 - DNA, 1757 bp, Bovine  19866880971816
  misc_feature (1)..(1): n is a, c, g, or t
ntgcttggggctggtgcagtgggatgacccagagggatggtacagggagggaggtgggaggggggttccagatggggaacacatgtacagccgtggcggattcatgttgatgtatggcaaaaccaatacaatattgtaaagtaattagcctccaattaaaataaataaatttataaaagaaagaatttgaacttttataccgtaacaaaaagtgaatttcctgaaaaactcattattttcaaatctaaatctgcctcttcatgattctaaagtataactcatctttttcataaagttaaacacagcccaacaagttaaacattgtttgcagagacttatactcccaaaggttaattattagtacttactctcgtcttatcgaacagttctgaaactttaagaaaaaacctggaagggaaaaatatttcatcataagctatctttgaaataattttctattgcaaatgttcagagaacacaccgcaaaccatattaataataaacattcttatctcattataataataatgatttttttcactgcagatttcatctagttcgacaaaaatctttctttgtataagcacccatataacagattccccgtgatgtactgttatagaaaatcctcccatttcaaggtaacagtctaagccatacattaaaaactttgtcttgggaattccctggtggtccagtggttaagacttcatgctcccaatgcaaggggcccgggtttgatccctggtcagggaactagatcctgcatgcctcaactaaagatcccacatgatgcaagaaagaccccatgtagtgcaactaggatctggtgcagcaaaataaaaagtggggaggggaaacatagaggtagaagcagggttgggaatattctcttgcttctgctaaagtttgaagtgtttcccagctctggtggtctccacatggcatttctccctatgtaggtgcagaccacccagcttacacactgaaatattaccgtgtcatttgcactgagaattgagttcttgatctacctgtactggagtttcagacactggtcaagatgtcccacagacatagccatatttcagtccacatcggcatcagctttgcctcttgcctccgcctagacactagtcaatacccatggtgagttcacatcgtctctgatatctacgggtgccatgtgccccatcccaccccctttccaaacttataacccaaacagtttccatgctggacttcagatttagacatctccttcccataacctctactacgcagacattccacttgatagtatacctttaataggatcttttaggaattctgctaatgagaaaacatgacatgactttaacgtatctgttataatgttttagctttattcagttttgtaacatctgtctttgttattgctataatttaaaatacatataaatattactataattactaaatatattcagttcagttcactcactcagttgtgtccgactctttgtgaccccatgggactgcagcatgccaggcctccctgtctatcgccaactcccggagttttctcaaactcatgtccattgagttggtgatgccatccaaccatacaaaactaattattccttagtattactttgccaacaaaggtccatctagtcaaggctatggttttcccagtggtcatgtatggatgtgacagttggactgtgaagaaagctgagtgctgaagaattgatgcttttgaactgtggttttgg

SEQ ID NO: 59234 - DNA, 1630 bp, Bovine  19866880571279
  misc_feature (1)..(1): n is a, c, g, or t
ncttattgttaattcttttctgttttgtgaagtgtttcaatattatctagacctctgtagaatttttaaattatctattgaattatatagttcaaaattaacttaaaatgggaaagcaatgtattgcatgtaagcaaacacttaatctgtatgacatgatttcactgacttctgggaagatgctctaattccaaactaacttttctccaaccagtatgtgaaatccctttaacaagagatcaatcttttatatacctcaaaaagaaatacaacttcaaatgtctctttggagaagtaatatcttgaattcaattcttcttgggtaaaattaaataacaagtcctttgaaggtactaagagcttgaaaaggaaaagtaatggatcagataagctgaagaaaatgaacaaaaatataaacctggtgtgaagaaactctcaatgtgtcccagctctaatttaaaacaaaatctatagctgtatgaaagaaaatgtcttagagttgaagaacagaaagccaggtagaattcacccatagaatgattgtcaatcattgcctgctggaaaatcaccagcagcactgaatagaaattcaatgactatttcatcctcataagaagaaacaaacccagagggtataaggaaaccacccaaatcacagagataattagtagcaaatatggaactaaaaatattctatcatttgccaccattttgttttgcaatatacagtaaaaagttattcatttgctgtttttttaatcaaatcacagcaataaatcataataaaatcacaaaagcaaaatgttataaaatatacttgtcattttaatttcttggacttcaaaatcttaaaatgccacatttgaattctggcctgaaattgcttatcttgcataaaaacctattttgagatgatgggctgaatgcatagcttccccctgtctatttaaatgtgtagtattgattttaaaaatatatagttttgaatctctaaggcttttctggaaatctagaaataaaatagtcagtgacaaagaaattttgagaaataaaggaaataaattgcatgtactaaataatgataaagctttgaatgaaaattgtgtatgtatgatcaatataaagtatcagagacaaaacttatcttctcacctgaaacaacaacaacaaaaaaaatagacatattcaagataacaggcattggaaaataaagggtattattcactgagagaaaaaaaacagaagataagctatagagtatcctaaggagcaggaaggagagatctaggctcttgcagctgctctgaatttaatattgaagctgaaagaccaaacagactgcaggaactgaagttcacagtgtaggtatatatgggagattcttctcaaatggatttctagattcgggcaatcccagtaaaaaatcttagcagaagaatatgatagaacagagagtacggaaatagattcacacagctatagtcaacagatttttgagaatggaccaagaaaattctatggaaactttatcttataagtaaatagtccaggaagagtttgattttgatatactgatgaatggacttcgatctgacctttatactcaataaaatttaaacaaaaaggatcc

SEQ ID NO: 59235 - DNA, 1142 bp, Bovine  19866880693391
  misc_feature (1)..(1): n is a, c, g, or t
ntttggtacagtcatttctgattacacagtcaaatagttcacttagcttgtcctaattaaactgttttccttcctacttccatgctttggagacatgctaagttatttctaatgcattcaagtgtttcataaattgtgctgtcattctattacagagataccaatgctacttatcaaaagcacacacagtatattttatattcacttcatactccctaccttgcataagaagtgttacatgttgatagctataatttcatttctgtattcatttttaatattcaggatccactttgttttcagcttttacaacagttttaattaataccaatatggttcattcacagagaatacacgtgaaaatacatgtcataaaggaattaagtgagctacatcatataagtataatgccattccattgagcaagcatattattgtgtctgcattatacattaggaatcattaagtatggaggacagaaagaaaatatacgcaattcctttgcaagattctcagttgttttcaagaaaaatatacctaatctaagcaatattatcatatggaattgatatcatcattgtcaaccaaagggttaagggattgattaacccaacttttaaatcttggtaaaagaatatttgaagctaatctctgaataataaattgcattcctcaaagtgtaaacaagggtataattacccacttactatacattggcagaccatgaagtacttttacacatgcgtgcatgctcagttgctcaatcttgtccaactctttgcaaccccatggactgcagcatgcaggctcttctgtccatgggattttccaggcaagaatactggagtggatttccatttcctcctgtatggcatctacccagggattggaccctcatctcctgtgttggaaggtggattctttaccactgagccatctgggaagcttttacatacattatcccttcatagttccggataataactaattatcagatgaggaatcttaagctcctagaatgatcttacgcaatttacttccctcaatataagggctggatttctattatggcttaagttttaatgttttactcatttgtttaggtttgcatattttcttttactttctttttttctgtgtgt

SEQ ID NO: 59236 - DNA, 1841 bp, Bovine  19866880700042
  misc_feature (1)..(1): n is a, c, g, or t
natctttcccagcatcagggtcttttcaaatgagtcaggtggctcttcacatcaggtggccaaaggattggagtttcagcttcaacatcagtccttccagtggacacccaggactgatctcctttaggatggattggttggatctccttgcagtccaagggactctcaagagtcttctccaacaccacagttcaaaagcatcaattcttcagcactcagctttctttatagtccaactctcacatccatacatgactactggaaaaaccgagggaaatgattttatcttagactaactaatttgggttttatcagtgcctaacccaccctggaacgtcttcactgatggctgagtcagtaaagcgtctgcctgcgatgccagagacgtgggtttgatccttgggtcaggaagatcccctggagaaggaaatggcaatcaactccagtattctttcctggagaattccatggacagaggagcctggtgggctacagtggaatggaaccaccctggaagaaagaatatatgcccaactccactagctttcctgtctcacctacactggtaggcaggagcaaagttaattagtgcttttgaaggtcacaactcagggatatgggtcactaaaaactgagagctaattatatgattatagaacatttctccttcccctacaatttgctacgcatcaattgggatcctgtataataacaggagattgaaagacctgcaagccttagacactgtttaagaagaagaatctagggaaacccgataacaatggagaggatagacaaagacactaggcacattttagcctctgaccccatggctacaaaaaacagtaaaactagcctaactcctagagagcttaacataagacctcacactaatgctccgtttacctcagttacttttactcagtacatcatgtctgagtttcaacaaaaaagtactgggcattctaaaaggcagaaaaaaaaaaatcaatctgaagagacaaatcatgcatcagaaccaggctcaggtatggcagatattttgaaattatcagacttggaacttaaaataaataagattaatgtgttgagaactctaatgaaaaaaggaggcaaaatgtaagcatatatgggcaatgtaaagagagatgtaaaataagaatcaaaaggaaatgtgagaaatcaaaaacactgtaacaaaaatgaagaatgcttttgatgaactcatcagcacactggacatgattgaagaaagagtaagtcatctaaagatatggcaagtggcttccctcgtggctcagtagcaaagaatctgcctgccaatccaggagacacaggtttaatccctgatatgggaaaatcccacagattttttttccagcatctgggaaaacactgcagagcaagcaactaagccaatgtgtcacaactattgagtctctgttctagagcctggaaactgcagctactgagcccatatgccacagctactgaagcccatatgccctagggcccatgctttacagcgatagaagccacagcaatgagaagcccgcgtactgcaacaaagaatagctccctgcttgtcacaactagaaaaaactgcatgcagcaacaaagacctagcacggccatagataaataaataaataaataaagtatgccaagagaaatgtcccaaactgaaaatgtgatcaaattcaatagaatattcaagaactgtgggaaaattacaaaaaatgtaacacgtatgtaataggaatgacggaaggagatgaaagaaaggaaaaaattaatgagtgaagtgataaggctagaattttccaaaagcaatacaaaca

SEQ ID NO: 59237 - DNA, 921 bp, Bovine  19866880853150
  misc_feature (1)..(1): n is a, c, g, or t
nagctaataattattggaagattatgcaaataagcttagcacgtgtaaagcagaagtttttggttatttctatattttataagacacactgaaaagtattgcttgaggatatttctaagttcctttatttcttttatacatatatagtcaaatacatagatgttttgccaatacttgtaagaattctaaattaaattatagcaattctaccagcatatgcatgcatacttagtcgttcagttgtgtccgactctttgtgacctcatggatggtagcccaccaggatcctctgtccatgggattctccaggcaagaatatcagagtgggtagctatccccttcttcaggggatcttcatgacacagagatcaaacccaggtctcctgcattgcacgagccaccagctcctgagtcaccaggaagctccaccagtatatagggttccattttaaggaataggaatgatcatcataattcctgttacattttacagtaattatcactattactaaagtgaagagaaagagtaaaaattagcatgtatttccaaaaataaactgttgaatatgtaaagaatttttaacataatgaggatttattccatatgaggagaacctgagggataaagtcttttctcctagcaattcatgaaacattttatcctatgcaaatgtggcttgtgttatgagattcctcttttatgaattgtatttttcagaatttgagactattttgtgactattgtatttggtgtaaattctaggccagatagaaggtctgacacataatatgtatttagttaatattagttttcttcctctgacccttcattgttaccaaacccaggtctggttgctcactactcaaaatccattaaagaagccagattggtggaaaggaaagtttgctttattttggatg

SEQ ID NO: 59238 - DNA, 945 bp, Bovine  19866880874787
  misc_feature (1)..(1): n is a, c, g, or t
ntagttaattttagataaatatttcctgcaacttctagtaaaaatatgtctttaaggattttactgttacatataaagatgtcattataacatcatttaaacagactttcttatgaatttagatgtttcacgaccttttcaatgaaatgtttcatattaataccccttcactatcaatgtctcattaaagggaaaatactcccaggagtgtatagaaatcttgaatttatagggtcagaactacaaatgataaatggtagtaataggatagatactataaaatacatcttcaggaaccttgtaattagtggcacagttttcaaaatcaaataatatatttgccaacacaaataattacagacctgggaataattgtgaaattacagaactgttatatatgaatgatgcccaagaatgctatgtatttatcattactttccttttattttctaaagcatttaagcttatctgccaatgggatactacctaagagcccattaccagttcaaaaaattgaatttcaattaatctgcatctctacttttcaccttagccaatacgcctccaggaaacacttctcactgaaaacattaattcatgaaatttggttagatgacacttgatgggctcaaactgacacttcacctccttgagacatgttaattacacatttggtttctataaataaagatagctaaatacaactcttgggactttctcacacatcactggaaaccagggcaagactattgatgaagagaaatgaaatacttaactgtattataggctagggacatgatcagaataatattagttatttctttctcccagctagggatttttgaaaatgattttagtggtacatttttgaatataaattttgtaacctataaactggacatggaacagtagacttgttccaaatcaggaaaggagtacatcaag

SEQ ID NO: 59239 - DNA, 741 bp, Bovine  19866880882332
  misc_feature (1)..(1): n is a, c, g, or t
ngtttctgatccagggtttgtgggatccatgcccctacccagagattgaacctacaacccctgcattggaaggttaattcttaactactagactgtcaaggaagttgcaataacctgttttcttcatttattatattccattcataaggtaatagttttctaattttttcttttctaatctaaatcagggcttaatatataaattatgtttaaccaagtttgctttcatttatttgactaattttaattctatactcttaaaaagcatttccatacattgtaacataacctcctgattatatatcaataataaatcaagctgatgaggatctataaatattttaaatggtagccatttagagaataatactggtttacactcaaataaaattttaatgaaaatagaaatgaataaggcaattattagaactgatagtaaaaaatatatcaagtaagcaaaataatcacaataatataaaaaataatggaacttagtaccttcttctctccataatatgttagctactgcagcatgtttgaaagaaaaaggagaaaaagaaaagtgagtaaagtgagaatcaattacatagtaataaaaataactatcaaagaggtcacaatctctaagatagaacatgcatttaagaatagtgaaggtgaattcaacaatctactctaacaaaacattaaaatgctgggagtatgaataatgtttggctcatgtcgtgatagccaattctt

SEQ ID NO: 59240 - DNA, 945 bp, Bovine  19866880890884
  misc_feature (1)..(1): n is a, c, g, or t
ngccacctcatgcgaagagttgactcattggaaaagactctgatgctggcagggattggcagcaggaggagaaggggacgacagaggatgagatggctggatggcatcaccgactagatggacgtgagtctgggtgaactctgggagttggtaatggacagggaggcctggcgtgctgcgattcatggggtcgcaaagagtcggacatgactgagcttctgaactgaactgaactgatgctcaaaaccatgaagtatttagtgataataataacaggcttaaaactgggtaataaaggcctatgaatatatttctcaaaaaccatagtaactttattggatgagaataaatcagcattttactcaatatttggaaatatctaatagaatccttttaattaacaatctttctaacctaataatgaatgtgtgctcagtcgcttagtcatgccaaatttttgcaacaccatggacttgaggcctgccaggctcctctgtccatggaattctccaggcaagaatactggtgtggattgccatttcctgctccagggattctttcccacccaggggtcaaacacggatcttttgcattggcaggtggattctttaccactgagccaccaaggaagccgtaatctaataatagaaatgacctaatggaaaatttatataccttggtaacactgagctctacctttatgtcatccttaacttttcattctgtgatcttcctttagcagctgctgcactattgtcaaaaattatggcacattgtaggtattttggaagtcagattttatagttaggggacagaaatcactgacccaataccctgactgcattctaactgaaaacaaaagtgaatttaaggtgaattgtcaggtcacagggatgtaaacaaataatcgcggatatcttttttccttttctgatgccatatcct

SEQ ID NO: 59241 - DNA, 2790 bp, Bovine  19866880903986
  misc_feature (1)..(1): n is a, c, g, or t
nacttattgtttgtagattctttgataatggccattctgacagtgtgagttgatcccttattgtagttatgatttccatttctctaattataagcaatattgagcatcttttcatgtgtttgttgcgcatctgtatgttttctttggagaaatatctatttagatctgcctactttttgattggtttgtttgtttgttttggtattgaggtacatgaactacttgtatattttaaagattaatcctttgtcatttgtttcattcacttttattttctcccattccgagagttgtcttttaaacctgtttatagttttctttgctgtgcaaggcttttaactttaattaggtcccatttatttactttggttatatttctattattctaggaggtgaatcataaaggatcttcccagtggtttatgtcaaagagagttcagcctatgttttcctctaagagttttatagcttctggtcttacatttaggtcttcattctgagttaatctttgtgtatggtgttagaaagtattctattttcattttttgcatgtattaataactgtctagttttcccagtaccacttactgaggaggctgtcttttctccattgtatattgcctcctttgtcaaatataaagttctcataggtgcttgggtttatctctgggctttctatcttgttccattgatctgtatttcagtttttgtgccagtaccatactgtcttgatgactataactttgtagtatagtctgaagtcaggaagcttatttcctccagccccactcttctttctcaagatttttttgccatttggagtcttatgtaccgtaagtggaattgttattgtaatttttttaaatgctatagcaaggaaaagcttttccttttctcccatttaagtatttattcatttatttatataactgaattcttaaagtcttatttttatactccttcataactggtaattatcttaatgctcaaattattttgtatttggtaaatgaaagcccctttaaactggttttgtattttttgatatgtttttctcattccttaagggcctctttagttattgaaacaagatatcctgggcttaccttgtatttcacctggtacagtctcagaatagcttttgtccagggaccactggcatatgttagtggatactaaattacttagatttgcaaactgagaccttgtagaaatgcataacatcattaacatatacaattgctatttttctttgtttcagaaaatcaagtggcatatatggatactaatcattttcttttctgtttctaattttagttcctccagtaatccgggtgtatccagagagtcaagcccgagaacctggagttactgcaagtctcaggtgccatgcagaaggcataccaaatcctcagcttagctggctgaagaatggaattgatattacaccaaaactgtccaagcaactcacacttcaaggtgctttttacttgcattttttctcttaaataacaatgcagaaatttcatactaaaatttataacacattttacattctttgaaaaaaagagaaagtgatacttggtgacaatgtatgcaatgaatatgaaaaaaagttatgttagtacctaagacattatatttgaaacaatactttaatacttttaatgttttaaataatagtcttgtcataatgattagttatgtcattatttttataagtaaaatattgtttttcttctaaaacttatcctctgaattatagcagatatgctgaacagaataattgaattccttcattaaatacatttctgaagagacaatttatatgtttaaatcatacattaaaatatgttttacagaatatgtcaataatatagaaattctttaggaaatattttacagcacactttccaaatgaacaaaggaaaaaaaaataaaaatattgctaaatatgtttcacatttgtgttgttttaaagtgatgaagttcttgcattctaatatataaatattctacatgttctaacaatctaatatgcagttgtgattagtcattatacagattatactaaccacacatgtatggtattaaaaaacagataatctttatcatatcaaataatcaaaataatgcaaaattaattgcatatagtttgattatcatagtaagtaataaaatatacagatcttatttccattgtcaagagtagtccagggacagtcattttactggaatatctgttacgtggcattacatcccttattccatgcctttaaattccttctattcatactgttagaaatgaatatattttccttatttctatatgagtatactgctgctgctgctgctgctaagtcgcttcagtcacgtccgactccacgcgaccccatagacagcagcccaccaggctccccgtccctgggattctccaggcaagaacactggacggggactaccattcaacttattagcatacattttaaaataaatcttttaaaaacatttacttatctatttctgaaaatccagaatgacatataagagtatttttgatctttcaaagctgaatcctaacaatgttatgttaatataattaggcaaaataaatttacatgtttccttctctgattgtgtcttagtgtctattatctgagaagaagattgatctgattaacagaaatcaaattgagtaaaagtctaattagcttctgattttgcaatctcttgcccacttgatagcagcaaaccgtattctataaacataatatagcccttgttttagaa

SEQ ID NO: 59242 - DNA, 733 bp, Bovine  19866881200533
  misc_feature (1)..(1): n is a, c, g, or t
naaaaaaaggatataagtctcctgggattgttgcaacaaaattgatctctcactactttgagaaatgaacaacatagaagactatctctgtggctgaataaacattcttttaattactcatttggtatacacacacaaagatgtatgaattaattgaatggttcaagcatcaactatttcttttgcatgaatacaaacacttggtttaagcttattttctacctttaactgatcagaggatggtcacacttaaactaaaaggactcttctcccagcagtggtcatcgagagaaccctacaaaagcctctgagggtcaagaaagcatcattatacaacagtgatagaaatgactattttactatcataaataacatcaaatattgcccaatgttttaaattaaacctccttatattcaatacttcatatattaataaacaaaaataaaacagaaaatgaaggtgaatgagagggacttaaaatttattcacagataaatgtgtttttatttctttaatatatttctggaagttgaataattttccacaatctttactaacacacggcatcttttggggtaatatagtgtaactaacttagttttatatatttagtggcacataaccaaatgcagcaaaagaacagacggtattgaaaaacaggcaattaggaaatatttgactccagtccttcatttagattttatagctgctctgtgtttgaccagagaaagt

SEQ ID NO: 59243 - DNA, 960 bp, Bovine  19866881320730
  misc_feature (1)..(1): n is a, c, g, or t
naattgatataatgaagctaagttgtctttccttgattggtctcactttacctgccttctaccccatcccatcactttcaaaacaatggggacataaaccagtctgtgtttgaagcactgggaggaaaaacaaaacaaacacgggtattcacattaaaacactgactgaactctcaagggttaaaatgtaagaggtttattctcttttatcaagcagtgtctacagacaaagcagccacatggtgtaagctaccaaagaagggtgtatgagacagacttaggttaaatcattaggtcacagccactttatgtggttcatgttcacaaagaagaaaattgctaaaaaggaaagcaggtaagtagaaacataagctaacttctgttgtccattaaatctgcctcccataatgtttccttaagctaagaataaatctactgttatcacatagttcaggatgctatatatacataagatagtacacactataaaatttcaggtttctaagcagttttacacaattaagcttgagtaaaatttgtatttaaaaaagacattattggattaccttcaggaaatggaggtcatttcaacagtacattagcatttttagcaacaataaaacaaaaatataataagtaaaaagattctccaaacaacgtaagcttttactttaagcctggataataatctgcttatttcaataaaccaagttactagttttaatgcacttctactggccttttatttgccctggaaaatgaaagcaatgatttttacttctatgcagtgtctcaaataagaggattagttaggttttgaactttgacacacagtgagagagttgtttaaggattacagtaggagttaagcagaagtcatttgggaaaggttattaaggaacgagtcctttgagggattagtatttaaatagcaaaggcgatagagaagtacatcttttc

SEQ ID NO: 59244 - DNA, 1328 bp, Bovine  19866881493439
  misc_feature (1)..(1): n is a, c, g, or t
nttctttctcaagtacataaaatgtgcttgggtgtatacagtgaatccttatccctcatataaaaaatgtgatagcaatacattgagacacgtacataattctgatcacatccaaataacttggctggttcaaatctctcgaagatttagtatgttattttagataaaattacttgacccaattaatatgctatagaactctattgaaatactgttgaacaatttacatgcttcgcacgactatcccctaatgttaggcttgcatacttcaagtgcattagaggcacaatgtgagaatttcgtgagtgtgatttttaatgaaagattagaaggcctctttaaatccaaggcttcaaagaccaatttcataaatttatttattttaaaatctacagcgttatcttctaagaaatagttagaggtagtttacattactctatttaggtagcctttgcaggatactattgtaatcgcaaagggatgaaagcttaaatttttatcattttataactctttgtaaattaagccatgtttgaatagaaacccactgagaccagaataagtggggaaacatttcgattacctttctgaaatatacaagtggtattgaattcaaaagtttgctcaatggcttcatggggaaatgaattgtgttcgtggtataaaggggctgatgttttaacaattatttttgtggatagaatttgaagaggtaataattggattagaaactgaaggagatgctgggaagggaattgagaaaagccctgaagtctgagctgatcttagaaaggggaacaccagcagagagagaaatatggacatagcaaagagaggtttgttttcccatttctaatctcagtttcaatttcttgattcctgagtattctgcacactatggacaaactgtccctatgtacaagctccattctaatagagtgctaatcatattatttataaagacaaggcaattttcttacatgggaattctaaccctagataatagacattttacatcaaactttctgtagaaaatatgttcccctagacttaaagttgcatcaaaacgagggctagaatcttcacattccaaaacataagacccgtgcatgatgagggcctgagccaccacaggcttccctcgaggctcagatggtaaagaatttgcctgtaatgcagaagacccaggttccaaccctgggttgggaagatcccctggagaagggaatggctacccactccagtcttcttgcctgggaaatcagaaaagcctggcaggctgatgttcatggggctgcaaaaagttcaacatgactaaacaactaaca

SEQ ID NO: 59245 - DNA, 1458 bp, Bovine  19866881564373
  misc_feature (1)..(1): n is a, c, g, or t
ngtgactgacccccgactctgctccctgggtctttcacttccggagtctagcctggtcttacacaatgctattgttaaagagaaaaccacaagctttaagatgtcacttgtgctaaagcccaggataataaatctcaatttagtacctgacttattggcagttttaacctacccagaaatgtcaaccagttgtgagttttttggtcaacatcaatgaagtcatctgtcacatggatcctctccatccccctcaacaccctacctacagaagaagatgacttttgcatgataagacctttttattcccttacctgataaaagaagctgtcctggtctaaaaataattctttcttttcttctgctaataactcccttgctccaaacttctccctataaacaccttccactctgtaccgtgccttgtagcacccttctgttttctaggtgggatattgcctaattcatgaattcctgaataaagataattagatcttcaaatttatttggttgaattttgttttttaaacaagtggagacttcaggtgtccaagaaagcacaaagagacatacaagacccactgagtctgaaagtagaaagtaatatcatattatttacctccctttcaaacaaaaccagtcactataccagctcaaatgcaagcaataaagaaaatgtatctatctctttctgagacctgcaaagacactctgcaaagagcatggacataagaaaacatgaataattgtggctacttttccagtcttccacaagtggccttacatatttgtagagaaactattagctaaaatccccttagtaacctgttgctctggggtcttatttaaggaaccaagaagtttttatttacctcatcataatattataaataatttttatataaaatttccagttgcttgcatataatttcactcgtctgctatccctgtgacatattttaacaatttgtaccattaggttttgtttcctctgaagttagtaaactgcaataaactgcattcagtgctaccctaatgcagcagttcattgaatttcagtactagttaacttcgaccaaggtcatcttaaatcagcttctgctttgacaggaatctattagcatcaagaaacatcaagcaattaattactacattttaagtttggttcttttcatttttatctgcttacatgttaaaaaatggaaacacatatcaaactgtacagttatgaattagaatggctttcctagtagatgacttattaatgctgcagtgattaacctttcattaaaacttgatataaaattcttcccccatatatctgtgttttttactcaagtcccaaaggaaaatgaatcaaacaagacagcttggttttgtaaaacacttttgcaacttggagactcagaaaatcttggattttctaaagtctccactatgccatatacattatgatagaag

SEQ ID NO: 59246 - DNA, 1267 bp, Bovine  19866880596968
  misc_feature (1)..(1): n is a, c, g, or t
nattccggttattgaggacggcagcatgcacatgcgctctacacgggcaggtgatgtatgaatacggaccctgggctggagaggttggggcggctctgagacaggcaaggcaggggagggctgcaaccctagaagaaaacgcctgccaatctagtaactagagtgggatgagagcaataaagagcatccccagagggccaagtatagctatggagaacctgctggattggaaacaccaacctttcatattgagagtattaaaaaaaatgagcttgtcctaagaggacgtttttcttttcaaaaggggtgtgtgtatgtgggggtgggggcagggtttgtgcagagaggggttaaatatgaaaaaaagaaaaaacaaaaacaaaaaacccccaaagaatcccactagggcaggacctgtatgcaaagtatgcttcaacattatgtttagtattttgttatcagtttcagagaaacgtagaaattcttttctgatatccatacatcacctgctttttaccctgcacattagacatgcgataagatttggctgatcacacaagcatgcaaagtattattattcagcattttaagaaccaatgcaacacctcagaaaaacaagtcaatcaattctgaccaaagtaaacagagaaatgtaattaaaaaaaaaacacaaccaaaaatacccacaatgcattgctttcacaagcagagataatgagctaaaggttaaggtgattggtccaaggtccaagaattgaaaggtgcagtggggatcccagatagtaacaatataatccagagtgggaggagtaactggaagactttaagggttcttttttgaccataagaatattcatggaattctgaaaaatacagttgatacctgaggttctgggcatgacctgttttatttaaatgaataaaatcgagaaggtagcttgattaggaataaaaagatctattttcctgtttagaaaataaatttgtattgaacaacaaaaaaaatacaccattctgtttttaatcctaagtgacactaaactattataatcaagatatagacttcaagccttttgagctattttgtgcgtataatttccccaaaactttattttgggaccaaaagacagaatagcagtagagaaaaaaagataagagtcttttcactaaatcaagatttgggtatttaaaattaaaagatctgtttatcatttattcaactaaacaagctgggaaattttcactactaccttctctgctataataa

SEQ ID NO: 59247 - DNA, 1377 bp, Bovine  19866880648079
  misc_feature (1)..(1): n is a, c, g, or t
nggtgtacaaaaaagccaagaaattgaggaggatgaacgatatggggtctgagtcatctttacttggaggtgtgcacaaagacccaccaatgaggagggctgtaaaacctacagtgcactatgacacagtaaggcaggccactcacctagccctcacatctctgcttctaaagccaccagcaacttatttggaatgttgttactgactggtgtgtactctgctttagaagcttcttttttccaccccccattcagaaatcatttactaaatgtctgttatatgccactgggagtaataagaagagggactaatagttcctgccctcaacaggttgcaacaggttggttgcaataagttgcaacaggttggaagaatgtgtacccaaatataaatctcgtatctgaagatcactcaccaaagttcatctacttcaaatactttggttatttattcctgctggcatttggaaaaatatctaaacatacaggaactgagaacctttcttctctgcaggcaggctcagtgataatcaaggctctgtagacccaggtgggaaacccctaactgctctctctcttgctcatgcacagtatggtaccaaatgactgtcaaaacaagctctcacataaagagcatgagacacttctagctcaatgttaataccatctgaaacattctggaaacaaaaattccagatttcattgcttatttctcatttttatgtcagaaatcctttctttttgttttctccatcaacaagatggaactatccaatgtaaacaagatctatattaaaatacagcaattcagttcagttcagtctctcagtcatgtccgactctttgtgaccccatggactgcagcacgccaggcttccctgtccatcaccaactcctggagcttactcaaactcaagtccattgagtcggtgatgccatccaaccatctcatcctctggcgcccccttctcttccctccttcaatctcttcccagcatcagggtcttttcaaatgagtcagttcttcgcatcaggtggctaaagtattggagtttcagcttccgcatcagtccttccaatgaatattcaggactgatttccttcaggatggactggttggatctccttgcagtccaagggactctcaagagtcttctctaacaccagagttcaaaagcatcaattctgcggcgctcagctttctttatagtccaactctcacatccatacatgaccactgggaaaaaccatagctttgactagacggacttttgttgccaaagtaatgtctttactttttaatatgcagcagcagctcacaataatgaaaagcacaaataaatgacattaaccacgacaaatgatttttaaaaagat

SEQ ID NO: 59248 - DNA, 1318 bp, Bovine  19866880860841
  misc_feature (1)..(1): n is a, c, g, or t
naatgtaacagaatatcaatgcattatataaatcttcatcttggccaccttaagccctcacagtagtggcttaagacagtagccagaactgtcttgtgttcactagcagtgtgttggcatggagttcactcagcatcgcacgaatttggattaacactcctgcagaaaaccaaactaggagctcaagattgtagcgcaagactgcgtctgctgggctcacccctccccaccacccttgctgggctgaggctctcacatgtgccctcccttgtggtttcactgcctggtggtgagcagcagagctagttacccacaatggatttgctttctttgtaggagacggattaaaagaggttaattcaaagatgaaccaagtccaattgaatcaagggagaaagggagaagtaggaagaattaaaccacagttggcttctgaatgatggtaaacaactaacggagctgagcatccttcaccctttgatttttgtacggagggtgtctcatgcagtggaatgattccatagcaacaaataaatcctttgttactgaatatgggggagaaggagtgaagatggcaggttttgatttctgttgtttctcaaggccagcctacaatgtatatttttatataaaaagtggacttttataagttagttgtatcaggactttcttcaaagttgtgacgtttgtgttcctcttcttttttctgcctgtgacaggtttttttcgcatatacttactgaagaataaacagtggcagagcagcctgttcattgctacttagtaaaaatgtaaagggaaagagcctcctttgtaggtccttttctgacagcaaaattgactgtgaggtgtactaatttagtagttagtcatagaccaaagggacatgccattcagggtcctcaattacacagaattaaaacatttttatcagacaagacaaatatgggtgttgaaattggcaggctccagaagccactagaaggggaactactttagaaataaacctttgtttgcagtctatagatgtttaaatcccatgcattccatcatctccatcttctgccattacttacttttaattttatccttttttccctctcaacttgacctttgaccttcaacctcgtgacatctccttttaaagaagtgactaaagatacaatattgtttcatcaagaaatatttaagtaaaacgtaaaactgagccttggatgttctacacactaggaaaattgtttacaaagcgtcttccatttcagtccaaaagatcgtactgtcctgtttgcaaagagatactgcttaccagaaacatggg

SEQ ID NO: 59249 - DNA, 1590 bp, Bovine  19866881144164
  misc_feature (1)..(1): n is a, c, g, or t
naactgtaagagctgagataaaattttaggaaatgaaagttatgtatagaatagttaaattgatcaattctgtacttagcccagaggaacctaaggctctaagaaaattagcagacatttctcaaggttctggctataggtaaattacagagatttttcttatgttaaataaaaagttaaataaatattaagacctgtatccttcatatgatacttaaggtaatggctatcattaaaaaaaaaaaaaaaggatagaaatagcataaacactggaataagctaaatgtggattcaaacccaggctttgccatgtacggctgtgtgactggggacaagtctcttaacttctcaattcctcaatacttttatttgtaaaatgaagatagctacccagtggggtatctacaagaattaactgagagcatgtatacaaaattctttgcttttggctaaaaaaaaagtagtagaaataataaataccttttgtgaaggaagaagaaaaaagggggaaagaatatacagtccacgatataaacctaagagttgagttataactttaaagttcttcaagttctttttcacacaatagcaatatcactaccaatgttggggggtggtggtgtttggttcatattctttttactaaaagctttatataaaatataggctaagtgaaatgaacccaaacagaacacatatattcccagtttttccaaaatgtctcttggttcctcaagagagaaaatgataaaagcatatatttggctgaacttctgttcacagttactgcacaagtaagcgacaggcaaccattccaactcaagaaagctccacccagagtcacaccactcaccttctctagcaggtacatgtttagttcaacagcacccccgccccacttcaatgtctagataacctgaaaaccatttaaatagcaatggctgaaagcctaaaggctgcctactacaggatttctaaagattcatagatctcagaccagcgctcatcattttcactgaccacagtgcccagttttctccactgctgaagtaagcagatggtatgctgacttttctcccttcctcttctgctaggactgcaatgacagggaatccataggacaaaggcatctctctccttttccacaacagaccacaaatcatgctcaactacaaaaacacagaaacccgattcttcctgtgatcttgtccatgtattcttaaaaaactatcttcaacggtgattagatcagtcctagactctctctgaaattattccaccactgagtctcacttaatactcaaaaatttgcttctagatctacttaatatcttacctaacacacacacacaatatgccatagcttttctccttccctttctgccaaactcctcaaactaattcttttctcatctgaacttctaaaggtactttatggacatcatatccacataatttaccatattctatcttggtattttaattattcttttgcatcatatgcattctcctccaacactgcttgaaattactggtcagctgatttttcattcataaattaggaatacattaaatgaaatatcatgtaat

SEQ ID NO: 59250 - DNA, 855 bp, Bovine  19866881261843
  misc_feature (1)..(1): n is a, c, g, or t
naaaactagagtcctatgtccccaagtcttagctaacacctattagtaaaaccctgctcaggcatgcatctaacatctgaggcaacataaaacagcagtctcgtttctgctgtctttacccaggcagggagctcacatgagcacacaaaggagccacgtgaaatttacaggtagtcctactggatttaatactttggcaatggaaacagggctgaatttattacctccctagatcttctataatctgtaggtaaaagtcagaagtaaaatgtttaaagaataaaaaatggcacatctacttaccacagcgccaactccgtaactagcggcaggggcaagggcatggtaggggtcggcggtgtacaccctgccataactgcaaaaagaaatccaatcagggataaagaaaagacagtaatcaaacaaaaaacacaaaaacttaaaagtgtgtttgactgtctaaggatctgtgaggaacctggtcttggaatgctattaggaaactagcagaatggaaaaaaaatctctgtctgctcctaaaggcaggaactgaaaatctctgaagtaggtctataaaacggaaaagaagggcgttggtgatgagggagcgggaaaccggggtcagagccagaagggcctaagaacaagagggagggaagggtctgagctggtgggtttctggtggggcagggtctggggagaaggcctgcagaaaactcagctcagcagcagccctgtggcccaagtgcccttctggaaagggtgcgggcagggaagggggtggcgcaaggcatcggggctcgccctccctcagcacctacccgtcgctgtaagcggctgcagcggcggcagcgg

SEQ ID NO: 59251 - DNA, 1448 bp, Bovine  19866880673720
  misc_feature (1)..(1): n is a, c, g, or t
natatgcccctgctaactggattatggagatagattcagaggtgctgtgcttagtcactcagtcgtgtcagactctttgtgatcccagggactgtagcctgctaggctcctctgtccatggaggttcttcaggtaagaatactggagagggttgcccatgacctcctccagggagattcagagataggaaagggaaacaaagaaaggatgggttatggtgtagacagagtcggacttaattaaagaaaataaaatagacccacagaatttagctttggggggcttcacccttggctttcttgagctcagaataaacacaagtttctatttcttcctcaaagttcaatgttcattaatttgatgtatagaagtgtcaaagaatatttccactggaaaacttctcttggttaccattttgtataacacagcatactgtatattttgattgttttatttgtatgaaaaaactggtcaaaatttgtcttctctcttaaaaagaaatcatgggaaacaccagatcgcgtattgatttttttttttaagatctctttgattttatcatcttaagagaataagtcagaactttttatagatttgaatgtgtgggaatatttgctgctaaataaattctaagttagtagaagagtgatcttcctaaaacaatagctatcatttgttgagcagtttactctgtgcctggcagtgtgataagtacatgtgtatttccatttagtctgtagaataacgctatgcgaagatacatgctccattttacagatgagcaaatggagttttagagaggctaaatgactgatttatccacgttgagaaaaaccagtaagtggttgagcccattttctgctgctctcaacccaaacaggctttctttccattggaggtatttctatggctaaatccaattcagatcagtcccctcatggtagcagcaagtcattatgcttcatcttatccttgtatttacctttattgtacatcaacacttaatccaagaaactggaaaataccaagatcaaaagaaaaaaaaaaaagataacttttctcttcggtattaaataagagaagtgggacttccctggtatccagtggttaagaatctgtgcttccactatcagggaccccagttcaatccctgactggggaactaagatcccacatgctgcatggtgtagcatgcataataaataaataaatcaagaaaagtacttgaatttagactcattatactgttacgacccctaacagggtcttggtctttgcatgctcttggcaaactaattgcaccctcaaattcatctgagaagggtaggtcaaacttttactgtaggtttgaacatgatggattttcttattgttgtaactgaatgaatcttggaggcagaggaaaaattctgcagaaccggctagggaaaaacaagcgattcaacata

SEQ ID NO: 59252 - DNA, 1362 bp, Bovine  19866880695679
  misc_feature (1)..(1): n is a, c, g, or t
ngaatctagaaaaatacatgtgtgaggaaggtatttttaatattttccctggacttccctggtagtacattgaataacaatccacctgtcaatgcaagggacatgggtttgaccctggtctgggaaggttcctcatgccacagagcaatgaagcccctttgcgacaactactgaagcccatgcctcctccagtccacacgcctggagccttgccccgcagcaagagaagccaccatggtgagaagcctgcgcaccgcgacgaagagcagcccccacttactacaaccagagaggaagcccgcacacaacagcaaagacccaatgcagccaaaattttaaacaaaaatcaaagcattttgactgttccaactaagagacaggtgccgatagcataaggaagatttgaacgttttggtcattagaaaggtagataagggatattttcttgggttctacaatgtttcataaaacatgtctcataaaaataagattctccttactctctcctccccagatgttaaattattttgagttgttccttgatggcagagttgcaaaagggctgaatgggggcaggtagcagagtgtgggggcagaagggaagaggtggaggcaaaagagaggaaacctgaatagaggcttcagtacaaatatgtttatcaaaactcatcagacagatcactgaagatctgtgtatttcactcaaaaatttttaccttaataataggaaaaaacacctcttgtctttaaaagcaagagccctaattatgaatgaatgaattcagatgtagatttttgtactccaaggcttatgaaattggaccagtccttcagaacttactacacctagagagattaacaaaattcacctttctgagcatgcacagttggagatctgaccaaagtccagcctaactccatctactccattagcctaaaccctacatagctccagtttcctaaatgataaacctgtatagtgctcagagggctgacatatttttaaccccagatttactccacgcttatcagctgcataaaaatgagggcatcacagatgaatcaaatactagttggtagccttgtgctctccattctgctttcaaattttataaactacttcatgctcgcccatagcttgatttcctttacagtgggtcactgacttcaaagactcctgggtaatttgcatgcgcttcagatttatcatgtaatcatgtaaaccactttggagctaatttactgatctcatatgccttccaagaggaataaagcaaaatcacctccacagggtgccttcaaaagcaggatgttttcaaaagaatatctgaaatgaataggaatagagctataccctatgca

SEQ ID NO: 59253 - DNA, 1454 bp, Bovine  19866880732904
  misc_feature (1)..(1): n is a, c, g, or t
ngagacatgcccagtctaaatctccaaggtgtgaatgtgaccttattggaaaccgggcctttgcagatacagttaaggatcctgaggtggagatgatgggtttagagtggacccagtgaccagtgcccttctaagaggaaagggaggcgtgaagacgcagggcacacagagaaggcaatgtaagacagaggcgctaaccgaagctctgaacagtgtcagaccaatgagacccaactaactgagccatactcttagagcagcacacaaaactaagccacgtaccttgggacaatttgatcaacctgttattcaatcctccatctccatccacaatgtaaatatctcctgtgtcgtctacatgtaattccgcagggttatcaaactgcagggggttcaaaccagtgccttttttgcctggggttcccaaaacttgaacaagatcaccaaaggaattgtattttttaatagtatgaccatagaatcctataaagacaaatatgcatatttcacaaatataaccactgcacaaacatttacatttttcaagtaagctgagggcaaaaaaattgacaaaattaaacagcaataaaaagtttaaatgctaataattaaatatattatatttgacaagcaacaaagcttcattggttctattcacagattagaatctcatgtactccaaaattaagtagattctaaataaaataaatacaacgaaagtgaactgactcctaaaacagaaggctcatgatgtaaaagtactggtacatgacttttttaatcttatgactttcaataaacatgatttggacaacacaatcaagctacatctatacatataactgaatcactttgctgcacacctgaaacgaacagaacattgttcatcaactatactcaggtgtaaaatttaaaaagaaaaaggaatcataagaaaagaaaatcaagaagaacttgaacaacttatatctgaaaactgttatttcagttactcatgggcacatctccagtttcagtagctcaatgaaaaagttctttataatacagacacatatatctattttcatgctaatttttaaagcttctttttaaattgaagtaacattggcttataacaatactgactttttttaagccacattttctccaagtggaaacaaatacaacatttaatccattagcttttctttcctaaataaggaataaatctttccatagagttaaaattatcttacaagcaaagcataagctggaatattaataaacaagaaaaaaccataaagcggttaacagaaaccaacttgaaggcatatcaagaccaactaaattggtacgcattcaaatgataaactggaaacaatgtgaatcagcttgcattacatcctatcttgacttattattatacttcttttggagactgagctaaactttgtagcagaatgagagcaaaacag

SEQ ID NO: 59254 - DNA, 1550 bp, Bovine  19866880873206
  misc_feature (1)..(1): n is a, c, g, or t
ntgcaaagtacatctggaaggagttttccccatcacttttccttagggtcaaaggtagggtgcaaaaggccttaaagtaagagtcagaggaagtttctcagagagctagtttggaaactgtgctgtgaattaactccatatggagacattctaccaagttcaaaatgcactggtctgctctgctcaagtaaacacagattagaaatctatttgtttatattgcaaggattggctttcttttatggcattctgtggtgtcttggaggcaatgcaagaagataattttggcattaaaagattgccaataaactccaaggcattaaaatgatcactcaacttttcccctattgtagttcttactaagagtacagatgctgggatttctctggtggtccagtggttaagaatccgcctgctaatgcaggggacacaggttcaatccctggtccaggaagattccacacgctgaggagcagctattgttcatgaatagcacccatctcgatgagaagcccttgcactgcagcgaagcatagtcccgctcactgcaactagagaaggcccacagcaacaaacactcagagccatcaaaaataaatacaaaaaaaaaaaaaaaaaaaaactattgaaaagaatacagatgcttgagcctactgtcagagtttattgttcaagagatgtggtctaggggccataatttgcattcaaaaaataagttaaaacacaaaaagatacagaaagctgtaaggaagagcaagcatccatattaaccctatttgtacacatagatctggttcactactttcagctgttgtgaagagttccatcctggtacgatcctcatcactgtcaaggggatcaggtatgtcctactggggaaataaagcaccttgagtttgaaactcaagcgaatattattacaaatgagggactaaaaacaggtattttctttttcttcttcaaggagtagtctgtattgtcttctcagcaatatttactaatgcaggtgtggcttcctcatgtctttttatcagaaagcaatctagggtctttcctggtggtccagtggttaagacttcacctttcaatgcaaggggtgcaagttcgatccctggtctgggagctaagatcccacacgtgtcatgaccccccaccccctcaaaaaacactataaaacaggagcaatattgtagcaaatccaataaagacattaatgatggtccacattaaaaagaaaaacttttaaaaaagaagtatttgagaataaaattcggatttcattaggatagttttggtcacaaggtaaaaatgacggtatagaattctgcatgtctgctacagggttattgatcttcttttctgagcatatgccagctgttgtcagttctgtcttttcctccgtggatctgaatggaccccaggccagaacaggctggtttgttttcttcagaccattcatctttggtttggctcgatctcaggattctggggaaaaaaaggctctgatctttcctgttttgtggttttgcttctttggttctttttggata

SEQ ID NO: 59255 - DNA, 1475 bp, Bovine  19866880960575
  misc_feature (1)..(1): n is a, c, g, or t
ntccacaggcagagttatttttagtgcatgcaatgactcataaatatgtgattttgaagaaattaatcaatgaatataaactcagcagagcatggaccatttcttttctttctttttttttttcatttcttttctttgtatctacaggtcttcacatagtgcagaccttcccatagtacattataagtaacgtgttagtcgctcagtcatgtctaactctttgcaatcccatggactgtagcctgccaggctcctctgtccatggaattctccaggcaagaatactggagtgggttgccattcccttcttcaagggggtctttccgacccagggatcaaacctgggtctcctgcattgcagccagattctttaccatctaagccaccagggaagcccatatgataaatagctcttcactaaacaactggaggaatgaatatatgtgtattgcgttatacacatgtttgctggctccaatcctgggatgtgtttttctttcccgtcctttttccaccttttgtttctgtggaagatcagagacgttctcttctaaaggagtattactcatgaagagaacttacccagatcgaattggccagaaatgtagccacaagtctgccggacttcctcactgtcccagcccagagggtagagggcgcagccagcaccgatcaacaagcctgcaaagacaaaagacaagaaggctttagcaatgcccttctggagcccaagataaaggtaccagggacaaaagatcaatatcagcaatatgacaaaggaacatagggtctgcttttgggaaagcaccaaccaagctccctttagcgatctaaggtcaatttaaccccaagaacaacttcaactctgcttaaaaggagagagaagaaaaagaacaaccccttgatagacatctcagtctggttccaactttgccttttaaaacattaaaagccttgcaaatcctgtttaggaactacaatccagaagccctttttaaccactcttgtaaaaagccagcccaattccaccatcaatccatgtaaacaagtaattcgagcgccagcaaaagacctcatcggttatgcttcatcattcatcagattttttttccaatttaagtatcaaaacagaatatttcagcatcatcaaattttacccagggcagagacagtacaaagattttcatgcaccacttaggcacattgattgaactagtgaactgggctacggctctcgtgttctcttgagacggtgagaatcatcaagtgttcatgtgtactggaaatactcaagaagacggccgctggttgggatctcagtgcttattgcagcaggtttgctaattaaactgaagccagtgatggatttattttcatgtaagtcaggttatcatggcagcttactctgagccagtctttagtgactcattcagagccactgattagtgagtctttggtgttgcatcaaagcctaa

SEQ ID NO: 59256 - DNA, 1486 bp, Bovine  19866881002467
  misc_feature (1)..(1): n is a, c, g, or t
ntgaatcagttatgaaaagtgaaagtgttagttgctcagtcatgtccatgtctgcgattcccatggactgtagcccgtcaggctcctctgtccatagaattctccaggcaagaatactggagtgggtagccattcccttctccaggggatcttcctgacccaggatcgaacctgaatctcccacattgcaggcaggttctttactgtctgagccaccagggaaaccccgaatcagctatatgtgtacttatttccctcccttttgaacctcttctcccctaacaacaacaacaacaaaaaataggatttttgtgagggttttttttttggccatactgcatggcatacaggatcttagtttcctgaccaggcattgaacccttgccctctgcaatggaagctccaagtcttaactactggaccaccactgaagtccctgatattagctcctttgaatatatcattttttaatatacaaaacactctggtacagattttctcgtttaatcttaaaatcttgctgcagccttatgctgtgggtgccgtgggaaacaaaagaagtaaatataatatagggttgtgacctcagggagtttataaattcagggctttggtcactggactctccctcagaaagatgtcattgatattccaacaacagccagcttcagtattgtgttctacagctagatcattttttttttttatcttcacaaaatgaaccttgccagtgatatttgcggttgtatgttgcagtgatgttctctaagattaaagctcaattcagggcttgtagggcttttgtttcggatcctggggggggattgagcaaaataaaaagaaaatatctttgatgcttgtatataattctttaaaaactgtaccaagtgcattcttagagaaagataaaatgtgttttgaaattgaggctagagatggggcagaagaacatgctgtaaaacagtcatctgttttgtcatcagaggctgaatcctgtagaaggctgagacatcttactgccttgaatgttctatgagcaagtttatataatatgtaactgtactgagacatgttattgagacatgttactgcgatagtcatgatctctgagtgaccatttaaaaagccattaattgtgaaaaagccattaattaaaaaggcattaaattacatttcattgcagtgtcatggtgccctgtcacattgatttcaaatggctcagaggacccgtactgagtggccaatgtctgtcttttgcccgggctacgttcctgctcacctgcctccctcttgtccatccttgtggtgaccaagagtcatcttcttggctgggatcatggcccctcatgcttcccgtggataaaggctgtttacaaggtgcctcacgtgcccccagagaaggcaatggcacccccactccagtactcttgcctgggaaatgccatggatggaggagccggtaggctgcagtccatcggtcgcagag

SEQ ID NO: 59257 - DNA, 1937 bp, Bovine  19866881012453
  misc_feature (1)..(1): n is a, c, g, or t
ntctgggcccattctactagaccttattacaggacatgattgagtcagaacatgaagtgaagtcgctcattcgtgtccaactctttgtgacccatgaactgtagcccctcaggttcctccatccgtgggattttccaggcaagaatactggagtggattgccatttccttccccaggggatctcccagacccaaaatcacttaaaaaagtaacgagagtcaaggttgagttaccatgctgggcagcagcctagaacagtacagaaaggaggaaatcaatgtgggttccatttctaactctttatttcttgaactgtgattttacttcttggatgccatgccattttcccaatttttagaataatttgtagactaagctgatggtcaatgttagtgtccccagtggtggcaccattcttcagatttgatgcagatttgagggtcacttctcatgattctggactaccatgtttaacctggattcagtggagacatagctttgggtaaactcaggatagacaggaacatacaagttgacacctgtcgaaagcagtcagaaacatggcagaaggtgggccgttctacgggacaagtgatatatagcctttccaggaagccagtgtcatgagaaaaggggcataccttgagtaaggagaccttagagacatcagatgtaagacacagtcctgactggctcttggcgaggacaaatcagttgtaaatcatactttggaaacaattctgaagtttgtatatgagctggtatcgaattacattaaggaattactatccattttgttatacataataattttaatctggctacataaaaaatattattctttgagctatccactgaagaaattagatgtagaaagtaaggatatttgtaatttacattaaaatctctctacataaaatgtgatttattcatctaccatagggtgatacatccacccctgggagaggcaaacattttctgtgaaaagcaagacagtaaatatttcaggcttcatggactattgtgactctgttgcatttactcaattttactgtcctagcacaaaaacagccacatgtgtgctaagtcagttcagtcgcgtctgactttttgcgacccagtggactatatagcctgccaggctcctctgtccaatgcataaatgattgtgcatggctatgtttcagtaaacctttatttacaaaaacaaggggtctatgggtcatcgtttgctgacctctgatctactccatttaaaaatggatgctgggctcattgcaaacagatggttggctatagtataaaacacagcccaacatacggttcctgttcattttgagatccatgataaccggcaagttgttttcccactcagctagtcttttccccagcatatgactcagaaacttcatttgaaaacaaaacaaaagcaattagccaataaagtgaaataacaatgtcagaagaaaatttaactctcagaagactcttacgtcccaaatgaaccaggaacctctggctttggaactgattagcgtgggaccagcttttaaaaataagtgggaaagtctttgggcctttcaccactgggacccagtttactcttttaggtcttcaggacactggtacaactcagcaaatcaatgttttcatacacaaaggctacacgtgcccagtggtctgaaagagtaaacacaggttcccaacgggtctgggacaactactgtcggtggataaaccactgggaaaactggactcgattatcctgaacactgcataggtgaggtcagcacctcttacaaagcgggtacagcttccactggaatagaggtgtctgtctgtctggatgctcataaatgaacgatacttccagaatgatccccacaaactcagattgccatcaagatgactctagacatacagaagtcaagatcaaa

SEQ ID NO: 59258 - DNA, 1278 bp, Bovine  19866881031398
  misc_feature (1)..(1): n is a, c, g, or t
nttcatggttattagtgactattgaaataatttaaaaattatatttcattaattgtattcatttgcttcccagtgaaggattgttgttgttccagttgctaagtcgtgtctgactctttacgaccccatggactgtagcctgccagactcctctgtccatgggattttccaggcaagaatgctggagtgtgttgccatttccttctcccagggaatcttgcgtctcatacaagtctcctgtgttgcaggtgtattctttaccgctgagccatcggggaagccccaatgaagattaaaatgaatgattttctaatgtgagcataagagtgctggtgtctatttaaatttctcactttgttggagtcacaggaatgattctggtttccctttatttggttgttgctgctttacatttctgcctttaactccattcaacagcgttaattttttttcctcttttgtttaaaattacccataggaaaataaaataaaattacccataggaaaataatagttatacatacagccaagctggcaagtgtcaaacccattctcagtcaccacctccccaaagagcccccataaatagtaagacttgagtaaacaagcaattgtatcctcattgtctcagggaatccttcatttcacaggcctcacaaactgcatgggttgccctgtaagatgtcaccagttgacgaggtgtgctttgtctcataattcttctgtatccttcttactaatgatgttttgctagcccccatgcagagcctttgaataactttcccagaaaggaccacccacagggaaaatattaagcctatctggtggacttgaatgcatcccttatgaagtggaatctttatgtaaaatagacactcggggagcaattattattaattgcaggccctttcaacacagcttttgatccttccatgcaccagtgcgcaccactgttgttcaagttggtgacggtggaatagcccaaggatggtttcaaagccattaagaacaaagggactttttgcagaatattcagtttaccaattactgtcacaatcatagcctttgaatgtggctgtgtgtgttcctctcagttaatggattctacttatagtaatgctggcccctgcctctggacagtcttcaagggtacatgttttagctggcctggtgacacgggttagattcccatgtgtacaacttattttgatcaaaaaaccttgtgaatgagagaatcacattactgtttcagattcataagggaatgctacgtggtgc

SEQ ID NO: 59259 - DNA, 732 bp, Bovine  19866881064594
  misc_feature (1)..(1): n is a, c, g, or t
naaaagaccctgatgctgggaaagattgagggcaggaggagaagggggcgacagaggatgaattggttggatggcatcaccgactcaatgaacatgagttcgagcaaactttaggaggtagtgaaggacagggaagcctagtgtgctgcagtccacgaagaagtcgcaaagagtcagacacaacttagtgactgaacaacagcagcaacaaaaggtgaaagaactcaggctgagtcagttgcttgccggtggccatgaagctgttgaggggcagaattcatccctgtctgcccagatcctgctttacaagacaacgcacaaccacagaatcatgtaaacacaagaacagaaggcagcacttgaagctttgttaatagaagggggaaaaaggcattaacattttattttacttacagtcttacagaaacagtttcttctgagatccgaccacatgcaaaatcctgaagcatcccacgtggggaaaactgttgttattctaatcccaggctgcaagtaatgctacaaaaacaatctgccacaacttacaagcttaacaagctaaacagggaaagtatagagaaatgaaaacatgtccctcctccaatattttccaccatcttaaaaactcatcagagtcagatttccagatctgctctaagtagactgcaagaagattatggtaaaaaccacaccacacaaagcatgattgtctgaaattactctgaagtcaat

SEQ ID NO: 59260 - DNA, 808 bp, Bovine  19866881090553
  misc_feature (1)..(1): n is a, c, g, or t
nattggatgatgggtattcttctattaggcaacgctgagtaagcatgaaatccttaaaactcctggttcaattggtttccaaattatatattgttcatatttggaaactgaacattctgtttacacatataagtatatttttattctttcaacgcatattgagcaatttaacttgaatatccaaatatcacccttgcttctggcacttctaatcatccacggtgaggactgatgccacccgggaagagcaatacaagattctggccagtaacattctggactttctgaggctttgttgctatggaaaaagtcactctgctctcagatgcttatttcatcctgtgctgaatgccgtttgattgtgtctcattgtccactgaacaggggcttctccactctgtggcttcctgctgggaggagacaattgcactttgcttcctcaattagcccatcattttcacgtattgctagtgtctttcaaatttctttaactgcaccttcttgtcagaatagtattatgacttcctaagctcacatcatcaaattgggagttctcaatggaattcattaaggtctaatttcttgggcagatttaatgataacattgtcatttttatgtaatctgcagggttttagacattagcgagcctcactggaataaaaagctgatcactctgacatgatgaagtcaattggcacacgcttatacctccagttctgactagttgtaatttttttgttattgttgttcaagatgtcccagggcttggtgagcagcatctgatgtattaggaattgtataaaaaat

SEQ ID NO: 59261 - DNA, 1470 bp, Bovine  19866881124404
  misc_feature (1)..(1): n is a, c, g, or t
ntaggtgattcgtttagttgaacagcagaaactaatgcaacattttaaagcaattatactctaattttaaaaaattaaaaataaaaacttcctttctctgactgcacagtctgatattttccctcctcatggttgcctaaaacaaaagtaacaatccatttctgcaagagaaaaagaattatttttttcagaataagaaatgaatgcagcaggaatgaaggaacatgaacttcgccttccagcaggcctgctggtgcttgccccactaatgataagattctagatctgtcttttggaacactgttctgctcactagaggcacttaatatgtgttagctcacagcacttcacttggattaccaccctccttgtacagttaaggacatgagaacatcggttaatgaatttttatctcacttaaacttttccttaactttcttaaacttgcattgagtcaaaagtggatcagcaaggtataaaactagggatgaaagtaaaaacactaacacgtcaacttcgaataacttcctaataaagaataatgaaaaggctccccagtgtaaatatagaatttgactgtgagtgttggaatggggaatctataaatattttttgcaagcatccaaagaatgacaaacatttgagaattgaattgtattgaattgtctttttgtttaaccttagtcttaaatatgttttcttttgagaagccttgttgtattatgacattagccccagattcttttccatcatttttcaaataaagaaaaattgcttttatgataaaccaactgaatttctccggaactttccagtgcaaagatgttgttactgctacaagaagcacaatctaattggtaagggcacagactttgaaaactaggcaacctggctgtgaatcatagctctgctgcttgttttgtgacttcgggtaagttactttggacaaaatgtctttctgatcctctttcctcatgtgtaaagtggtgttaatactcttatagatttattgtgaagataaaatggcatgtgcggagctgagaaccatgcctgggacatagcaaacaataagcacgagcaatattagagacaaagaaagcttgcaactggagagggccatctcggggtttcactcttcatgcagatgcaggtacaaacgatagtaatctcaaactcagagaaacagtccgataagagattggcagagcttttatcaaacagagctctgaatactgcataggataaacagtgtaccaggaggaagggcaatgactaattcatgtgctgctggcatagacttcacaactggctgaggatgtaagttgcataatagagaatttgattggtctatgtgccaggttcctgggctggagcttctgaacccttgaaatttcctcagtgataagagtgtttttgtttttcatgatggatcccatgatgggtccctagatagtgtcaggatggagagcg

SEQ ID NO: 59262 - DNA, 1086 bp, Bovine  19866881126902
  misc_feature (1)..(1): n is a, c, g, or t
naaaagaccgtgtagggactgagacacagcaaggacttaatctcaataggccatctcagagcttcaaactccaaatcgagaagagcatcctggaccaatatccacagcgggaatgtggagagtgagtccaaatgtcattcttattattttgtctttatggagtcataccttttacctgcacattatacagatctaaaggctctgtgttaaaaactaggttaggatacagaactgaaagtcagagcaatcattatcacacagtcactgagctcattaatcagcaatttgtacaaaacaaacaaaaataacttaaatcaaggcatttcatcagggacttcaatcatgaatgggctgagggggggaacagggagcagtctgacattttattgaaaccggtattctcaacctcagaatgtcgatattttgggatggataattctgggaggctgtcctgtacctggtagggtatttagctgcatccctggcctttccgcccaccagatattagctgtatcgccctggtcatgatgatcaaaaatatctccacatcttgcagactattccctgggagggattacaaactgccttcttctcttgcttgagaaccactgtggtgaagcttgatatggaagtgcatttttgtcttttttttggcaggggggtgagaaggttctcatcagtttcatcatattcttaaaaaggtctatgacctcataaagagtgggaactaattacacaaagcctctcaaattaatagtgtaagcatgcacatctccatctgtagtagtaaaacaaaaacgtgcaccaccatggctaattaaaatggtgtaatttgaaaatttactatgaaatctatatctatccagcgattactttcaacttttgaaaaagcacaaaaactgtatgtggggaagtagctacttcacaaactgctattcccagatggcagggttcttaaaataccgccttcagcaaggactcccacagtctgctgaatgtggctttcaacttccaaaggggttagcgctaaggacaagcaaaaaagaactgacgtccagagagggaattaaaaccagtgttttctag

SEQ ID NO: 59263 - DNA, 2408 bp, Bovine  19866881203669
  misc_feature (1)..(1): n is a, c, g, or t
ngaaaccccttttagacagtattcctatgtagaaaagcatcacctttgcacctcatatttatttgtatttgcagctcaactcttttttttttttttttcctccagggacaagctgatatttgctaaagcttttctgggtcgttttccttagcagacactacgttttggtgacaggcttaattcttccagcttcagtttctgagttgtttcacctatgccccacttggcacttccctgagaaggatcaaaatttagtgaacatgttttgtaggtgaagatctggaaaacggaaagtttgcatgctgtgtagaaatgccttagcctgattcaaggtaaacttcgtgatgaactccagaatatggagtactcaggggcttggtctggaagaagtagattctatcccaaaaattgtaggcagaagatctacaaccggattggagagactaggaaagtcattaattccttgattggctgttggtgttcagtcgataagccgtgtctgcctctttgtgaccccgtggatggcagcacgcctggcctccctgtccctcagcatttcccaaagtttccccaagttcatgtccattgaatataaacaggcaaaaagatatgacactgaaagatgagtcggaaggtgtcctctatccatacaggatttttaaaggaaagggatatgtggaatccaattaaagaaacacaatgtctgtggaacccaaataaatacatttgaaacactgaaggatataaactctaagcttaatgtagacagcagaattctgttatgagaagaaaagtaaataaatagatgattttagtctagagatctgggctataagactgtctatttggagagcatggttttgagatccatgttgcctattgactgtcaaaacagaatttcctccacatgttgatgatgataatgagaaaaactaccctgatctgctgcagtcctggagtttatgtctaggctaaaatctgaggttgatattcagtcactcccagtggagaaatataatctcaaccatcacatgtcagcatgaccacaaaattgtttgaggtgatttggttgttttcattagaagacttaaaattacatgtgcgatgttttttaaaatgttatgttttactccagaacagtaaatgtttttgtattaagaaatctgaatgtatatggcatcgtaagtgtttatcatcactgagccctgtgattaaattaaaatgggcaattgactattcagactggtggttttaagttgaaatattaataagttcataaataatattgaaccacttgagataacttaagatccaccatatttaaggtttaatttgttatgtttgtaagaactgctgatgtgtatcgtagaatttgaattctaataattgaggcaatgaaggaaatcaaaggtagtaagtttgtaaatgtagtttaaaatgtttacagagtttaagttaatcaacagatcatagatcacttaaaagacattatcatttgctaaatttcaagagaataaagatattttacaaagtgaatttggaaatttcaggaatatttatttttaagaaaataacttctagggactgttaagacttcaccttccaatgcaggtgtgcagctttgttctctgatcggggaggcaagatcacacatactgcatagccaaaaaaccaaagcataaaacagaaacaacattttaaccaatgcaataaagactttaaaaatggtccacaccaaaaaaaattttttttaaaaagaaagaaaagaatttctaaataatcttaactgagcaaaaactaaccttggagatattaaaagtcacaccctgataatatactgataggattcttcctcaaatggtatattgtttactgaaaagaaaaggcactgaactggataatattttacaccatctcaagcccccgattgaaaaaaagtatatgttgccttttcagacacaagaccaaactggaccacaaagggaaattgagctgaacgctctatcgtcatttcccattcatcctgaactctggggagctcacttacaatacagaataataaattaacgtcagtcacacccatgaggcctctttaatgttacccattgcaaaaatagtttggacagattccatcctttgctttaataggatgagtcttgccattaactcagatttagattagggaaaaaagggctggagctgcccccaagcagcttggactaatcttgcatatcctttaacactttaccacatgccttccttcaccctggagctccctaaaatgtattcatcctcactctccactgtggcctatgaacattaccttaatctgtggcacctgtttaggttatgaggcagaagggcccacaagcttcttttggtgtgtgggttttttaatttttatttaa

SEQ ID NO: 59264 - DNA, 800 bp, Bovine  19866881205459
  misc_feature (1)..(1): n is a, c, g, or t
nggtcttttgaactgactgtgggaaagcggctctcgcagtctgagaggctggggctgtgactcctgagcaactcaaatcttcactttgattttctcttgatcaaagatggcacctcattatcgaaacagagtcaaaggctcctgggaagaattcccccaggagggtacacaatgacccagggagacagcaagataatttgataattacatcccagagtttccttaataatctctaaatccctagatactgagaaacaagccaaaatagggatcactagggtaggagacctgggagaagccacgctttgatcaaggggcaattcaagtcattcacagaattggacaatgaaagctttgccagtctagacaagggaacatccaagcagctctcctttatttccaagtttacgcctctgcactctctaaactcttgtgttctataaatagtcaggaaaggaagttcatccgtgttagagttctcatttaaaaagaattttttcctagcctcctctcaaatctttccaggcttagaggtgaccattatttccctgtcacaagtgtataattttctttgttgtttcattaacaaatatgtaataagtgtgatattgtgcatatacctgttggtttaaacttttgtgtccaggagtcatcagctaacatgttatgaagaaatgcccaagccacggtggcaagtgacattggatgagaaagcttccacagtctagaggcagctaagacaagccttgctattatctgcaaatcaatcaagagcagaaaccaaccatgccaactgcaag

SEQ ID NO: 59265 - DNA, 961 bp, Bovine  19866881231836
  misc_feature (1)..(1): n is a, c, g, or t
ntacattgaaggagtggggactcagggctggaagagtgaaacattttctgatgtgaaaacctggaagaatctggtctacaaagggaaggttagggctgggactcagtggagaacttggggggtcatgggccaaagagaggggactctcttgagtgaaagcaaccagaagcaagggctggcagttggaatcactgtttacctccagtttgtgctctagactcaatctctctctgcttccaggctccccatctgtgaaatgaaggaaatagaaactaatttacctcctagggtgtctacacagtgtaatgcattttaaaaaaaatggtttgcatggaataaatggaacaatctgaggatattctgggccagggttaacatcagttaggttgagaattaaagtacatgaggcttgaaatgaaagaatgcaaaacctaaacctccaatgtcccaccccaaaagaaaggatgaaaaggatatctataagaaagaaaactgaaaaccgaaagaagagcccaaggggcatgctaagcctcagaggtgtgatacgtctctataggtcaatgtccggtgtgcactgagaatcttcgggaatgtcggtatttgcaagatcaggaaacgtctataatcgtgggtggtggtggaagaaacacaacagagaaatttatgttagttcgtaaacagaaggagcgagacaggatcagaaagaaagaagagaagcaaaaagggtaaaggaagtggaatatatggaattcagttaaaaaataacccacatcctcccccctgctaccccctccaaaacaaaccctagagtgaaaaaagaaaaaaagaaaactaaactaaaacaaaaaagcctcccctctttcctccccgaccaaatagattgttggaattacacagacagttaagccaaaatggttatctggtggcttcttgcacacacagtcctaagagcagttttaaa

SEQ ID NO: 59266 - DNA, 1194 bp, Bovine  19866881250007
  misc_feature (1)..(1): n is a, c, g, or t
naaatatgattaaaataataaaaatgcaagtgacttcctggccttcggatattactctcagaaaagaaatagcttttataacaatttaaagccacaaaaagggactaaataggcagtttaaaatatactgcatttaccaatgtactatatttcatttaagtctattaaatacaacaatgaactaaatctctgaaatattacagaatcaaacttggttaaaacgagtgtggtgattctcttccatgagttggctgaagagggcgccagagagaaggggagcatcagttgggaaggagacatggcaagcaaccccatttcaagaaaggaggaggaaaagggcgggtccccgattccccagtgctatccgtgcccagtatcttcagcgccaatgaaatgagtgccaactaatggacaattacgaaaattgtggctgctctcctggaatccccagccactgaaggacctagaaagtcctagtctgtattgaagcctgagtgaaaaaccaccgcctggagccccagctacagccagtctgatgtggaatctgcatctggactcctgagaattctgcactgaggtggtcattgccctagcctcttaaaagacacatctcggtgtttttcataattgagtttctagagcccacctatgtggttccagtggcggggtttacagagttccatagtaagaacccattaaatagtacatctaaggtttgaattgatttcacaagtcacacccttctcccacatactgatacatccctaaatttatcttagcatccctacgcagttatctttaataggaaatgccaaacgcctttccagtcattgtgccaacttacattcccaccacttgcaccagcgtgtatgagaattccaattcctacacatacatttatgacatcttccatctttttcttaaaaaaagttttttttttagtgtgtatgtaccttttctaaaatctttattgatttctttacaatattgcttctgttttatgttttggtttttgggacagaaagcagggatcttagctccctggccagggatcaaacccgtaccctctgcattgaaaggtgatgtcctaaccctggatccccaggaaagtcaccattttttcttttatactgttccagtaggtttattttggcatcctccggtgttgatttatgtatgtcgaagccaaagatt

SEQ ID NO: 59267 - DNA, 988 bp, Bovine  19866881399815
  misc_feature (1)..(1): n is a, c, g, or t
nttatgaaaaggaactaacatgggttttaagcaaggaagattcctgatctccccattaaatacatactgcaagtctgtgaaatatgaatcacatctttggtctcctttttaagacttggcttctacggcaaatgcgcttttctacctcagtttcatctccattaccattttacattgcatctgaggcccggctagcaacagtggccagttcttgtctgaatcctgcaaactaggctcataacagacgacacccctagaaaggctgggctcaacccaggagacccaacttctgatgatggctttgcatgagaaaaatcactcttgtctcttgtcattttgtggttagtgggcaaaaaattaatgcttcctccaagggaaattcagatcttgacattagtggaaatgaagagcatactcaagtaaattaatttcatggtggcaaagtaataaacctcgaaaaccccagattggcttggaccttccctgtttaaaatacacagtgacagaatactttgtcaaaaaatgatatatcccctcagagcaagcaaatatttcatatggatatttctggctccatcaaaaattttccccaattcaactctttcataaacttagaccattcatttttacttattaaattatcagtgctaggaaagtttttaacattcactggcattaatgtgagttgaatttgatagactagcatgctattattagtatgattactatattcatttcatagccaacttatgattgttttacgtcatctgtctccaaaagcatattaaagaggaataaatatgtattttcaagacagttgtgcttaaacacaactatagtccaaaagtaatcatatgtaaggcctatctatttacaattgttaacagcatattattaactattaataattaggaaaaataaattgacctcctgcaagtattcaacagtattatgtgactgcacttttacttatactgaaaaatccatt

SEQ ID NO: 59268 - DNA, 1100 bp, Bovine  19866881406792
  misc_feature (1)..(1): n is a, c, g, or t
nccgggtcagggagctaagatcccatgtgccttgtggcaaaaaagaccaaaacgttaaaacagaaggaatattgtaacaaattcaataaagactttaaaaatggtccattaaaaaaaaaaaagctagtcccataaaacccaagacaatttgtattctcctatgtatacggacttcaatcttgcttacaaaagagaacaaacatttttaaatgtggaataaattatacagaataagggcttgtttctctactctgggacatcttgcttcttgcaaagcacaagcataatttcactgcctctcttcagtgagttgagactgatgtcattggttgggaccacagtgatctgaggtcaaagtcttttatatcactgaacaaagaaagagaggagcattttcaggcagctttggatgaaatggtttcaaaaccaatttggtattcccaccctcttctctaaaaacagaagtgaagaaaagtattataattcttatttaacgaaatgcactaaaaaattctcagtaaaaaactttatagccaataaattctgcattcactgtgtgtgaagtaagagttgagtttgtattctcaaattaattaaaaccttttaacttccactaaagctactgtattcttaatcccttgggcaaactggtttaagttgataattcctcctaaatcctaatttttattgaaatttttaatcattatgagttctgcacatagcagcctcaaattaaaaaaaaaaaaatacattcccctgccaacaaggaatttagaaatgatttttctttgtttcttggggatcttttcccaatttgaggcttgccaagacagattaggattaactaaaaggttttctaaagatatatttaatgtccctgacctgggtagagtggcacctggttggtggcacctgtctcataacagtaagggacaaaacaaccccttgtttatcccagtttggcttttgctctgtgcccatgcctggttcattccctggacacatggaaagaaaaaaaaggaaaaggaaaaaaaagatatatttaaaacccaagtacattttctaactggtaatagctggtaatatttctttcacagaag

SEQ ID NO: 59269 - DNA, 1159 bp, Bovine  19866881434683
  misc_feature (1)..(1): n is a, c, g, or t
nagaggatttttctttgtaaatattattatctgatatgatttttggtctgaggtccaaagagagattgggtctggtttctgctatttaggctttgtaatcacatcttgattaaagagactccccttaagaaaaatctggaaaagaaaaaaaaaaattgctttctttcctctgggaccacactgtttttgctccttcagatgtaaagagcagggctggctcaataacacatagtccatattccatcaggcctctcacaccaagacgctggatctcacaaacgttgctaccgacctattgtcgcgcctccccaggctcttctctgggctcttccttcctctgctgcaaagtgccagttggctttggtgttccatggccttgctgaatttcttttattcagtttattctgaactgaatttcttgttcggaataaaccactctgtctctgacactaggcagctcttgaaaaggattggccccaaactgcaaaccaagtaacccaggggtcagctattcatcaggatggatggactcattcataattctatgccagtggagagcaattccaattttactgcacagtcactgttgacagctctgcttttgcacctcctatgataaaatgtcacctgacttgggcctcactgtttccgtgtgattattgctttaatctgatgaaaattgcactgcattaatatttaaaatgaaaatcagtgatgactctgtagcagagtgacagaatgctgctgctgaatgctgttgagtttctcattaatattaatttgtagtttgtagagaaatggtttaacaatcattgagctacacacatgtaattcaaatattgatgaactgaaccataagtctataaccatgaaagaaattgctcatgacccgtctgtgtttgattttatggtctttcttaacacttttaaaatttatcatatttcagtaataacatgtactttctctagtaggttggttattaacaaatattttccaatttctgactggcatcaatttgtttggttgccaggaatgatataaagtttcccaatgagatctgtatctgaaggcacaataaccctgatatttatatttaatattatctacattaatcatgatttactgagtatattttaagaaccagggactgaactaaga

SEQ ID NO: 59270 - DNA, 842 bp, Bovine  19866881450490
  misc_feature (1)..(1): n is a, c, g, or t
natgtctgatttcctacttgtacaaaattttgtcaatatttttgctaaaatcaagaaaagtcacccagtattatttctctttcttctaattgtaatatccttatattttaatgtatagtccttcatcttgaacacatttctaatacatgatatcgaacaattttataatatatttatagaaacttccagagtccaaaatgatctaaacagcaggacatctatgttgcacaatgaacatactactaatttttcatcacatattcagtgcaattttgacattatattaatacaatggaacttcatattatcacattgtagcttcaattatataagtcccattatttttaaaaaaagcattcactaaaccgacactttcaaactacaaacatgtaaggaacaagtatgaacagggtacggtcagatctcttaggggtgctgagaggttgagaactataaatcctcaatgattaaatctccttttttaaaaaacaatttttttctaagaaatgtatgtgaatctttaccaactattaataattgggaccaataaatacttacttcactgtggcacttagaagaaagttcagctgtggcattaacaggttgtcaggagctgacagatagcgatcaaactgaacctaaatgaaacagagaaattcaaaacacaaagtgcacatatctgctaacagacctccctagtaatcattcctttttaaggattaaatccttggaaaaaccccatattccaaataacgaggtctttgtgatcaaaatgagttatttcttatatattccaactaaattgactgcaagtgtcaactctttaaggtactcagtatcag

SEQ ID NO: 59271 - DNA, 1254 bp, Bovine  19866881564761
  misc_feature (1)..(1): n is a, c, g, or t
nccaatgaaaacactctctcagagcaaacatatagggaaaatgagattaattgatttaaagtgtctggcacaagataggtattcaagcagattcattttgatatttggcaaaactaatacaattatgtaaagtttaaaaataaaataaaattaaccctatggaaaggggagatgagaggaagaggaagaaaaacatgcagagctcagccaactccatctcttgataccttgatgagtccagtgttacgaaatggggcacaacagatcctaaagaagacttgctcaaagcccagcacttcaaaactgcacacatgcagtcgcgtttatacctcccaaatgcagagaaggaccaaatgtttgagtgccaaagaaagatacccctcctccacacaagactagtaattcagcagtctgcgtgctaagtagcttcagtcgtgtctgactctttccagccccatgggactgtagcctgacaggctcctctgtccatgggattctccaggcaagtcctggagtgggttgccatgaacagcacagagctacagagaagtgtacagcagactggatacagtcaccgcaggaaggcaagcaatctgtcatcagtgaaaagcctaatgacatcccattttagaaaacatttgcccagctggccacttcggagatccagaggtcactcctgccctcagtgtttccagtgtctggctgggcatgagacactagtcattactttccaggaaaccccacgtacagcgtgatgcccagaggccaggaccacagaactggcagcatcaccgcagcgcaggttgcaggtggctgcctgacacctctgtactacccgaaatcctaacctacctgaatccaaaatgcagaagcccatctcaaatctaattcctggctaaaaaaactgtggagccagaaaaagaaaattgagcaattagacttcagtagggaatctggacttagtgatagatcatttcattcatcatcctgggcaagtaaactgctttccgaagctaccaacgggctttcggccaaacccccacttattgcagtctccgcaagaggcagaccggggcatgatgtcaggttttatggtaatgctaagcaaaagtaagataggaaattgggtgatcactaaaccatggggtctagttactggcactgactgcgaacactgtagggggaggtcaaaatgaaagaggtctcaaggagctgattttcttcttattcatgggctctatgtcattaacgtca

SEQ ID NO: 59272 - DNA, 1565 bp, Bovine  19866881877071
  misc_feature (1)..(1): n is a, c, g, or t
ntgggttctttaccactagcaccgcctgcacactctactaaaattatttaatggaaaggtttcagacatgctgaagtcagcaggacttcagaagcattcacaccaccagcagtttctgcaaatcttgcactctgggcaagaaagcagttctggtttctcagcagaatctctcagacaagtggtaaaggaaaaaaacaggcaaagaccccatttattagcttttagagactaccattttatttggcttcacagaagtagtctaagaagagcaactgatattttaacatgcaaaagtcccatgacaaattaaaggaaagatcacaataatgatagcctccttgttaaatgtctcaattatacataacaacgatataaaaatttcaaaaggcgatttcacaaatcactgaataaattacaaatagattcggccactctgattttaaaatggacaagtaagaagatgggcaaagaggaggtttctagcaagataatttaagagatattactacacataccacttcctacatccgtgatccagacggatttttcctgtggtgtactggccgcaaatataccatgaggtgtgtcaactgtataattccaggatcgtaggaaatatccatcctctgtgaacactaatacctttgggatgttatcccctctctgaaggtatacaaaaataactgcttagataggatcagttttaaggaagcaatcattattttcacaacgagaaacagaagtcaaagattaaccaagaaatgacgtaatgtttacaaaaccaaacaatattaacctctatcaagctcaaaaccaaaacactaactttaacttaaaaaaacaaactccacaattggagtaacataaacgtacatagatacttagtacagtaacataggaaagctgttttctttgcgttcataacttcaaaaacaaaaatcccagttttacttacctggcctacataaaccaatccgttgagggagtcaactgcaacacaaaatgttgctccagtgaagtattctgaatacttcggccaatccacatccagccggtaaagaatctcctcagctctccaggaaattttaaaagccaagtgcagatgtggtgggagctggggaggaaaagaaaataaggaaactgagagtgtacttacctggtggctcagacggtaaagaatctgtctgcaatgcaggagaccaaggttctctccctggatggggcctggagaatcccatggacggaggagcccagctggctacagtccacgaggtcgcaaagagtcagacacgaccgaacacacacaccacattacaaactttttaacgctaaggggcaacacgtcggcggttcggccgcagatgcagttttgagacgagccagtgagagaaccagctccatctccatcccaagaccacctcccaagaatgctgctacccgagaagccattccctaaccatccagctcacccgagaggcacagaaccgcgaatgcaaaaccagaagcgctaggaagaagccagcgccggctatgcagacccagaatctcgtcatgaccggacggga

SEQ ID NO: 59273 - DNA, 1757 bp, Bovine  19866880550554
  misc_feature (1)..(1): n is a, c, g, or t
ncatcccttgggtgggtcccacctcaaggcattctgggacttcagtatcccaggccagaagaaaagcggaggaagcgagggccggagaaaatcttgcctcctctatagcacatatgagcgcggggcttgctgtgaggtgaggagctcatgaaaacagtccagactgctgagacgagtgcttgggtgctcagagtttatggagaagttaacacggagcttggtttctattacaaagagcaatcctgcaagggtttgtcagacctgtcagtcagttccaaagactgttccagtcggataacatatgagaggctggagagttgagggcaagagaaaccggtcaaacccactgtctttccatggctgagcgctctcatttcaaggaatccattttgtgcatcttaatggattcccacatggatgccagcattcacttttctacttccaaaatatattagagctctcctataaactcagcctagaaatcaaaatagtctgcaaaattatttttactaagaaaatagactattcataattttgctagcctcaagtgagtaaaaattaattaagaaatgtgtttgagaagtagtgaatctcttctgtgtctgaatataacatactgccagggtaaaagacaaaacctacagctgcaactgtaatacatcaggttgaattgggagcctgaggagctcccatgaatgatgaagtatggaaatttttttttaatgccaggaagactgttattccccaacatcagacaaatcgtattctacctgttttcagaagatatcaagtctcagactccctggcagtcttatttgtttgtttgcttatttgtttaacttttagagctcttcttcgttttttaagcatatatggtagtcccatctcaatgcagttgtttctggttatttgtagaggccgactggacacacacagctcacaaacaaagggaagaaagaatacagccaggtaatgccttccctcagaggcattagaatgccaaggctcagacttgacttgcagttttccaaacttgtctgtttccaatggcaactgtgaaatacacccagcagagtgtttcacatttagattgcttttgtcagtgagttgcataattagattgaatgtgcttaatctctctgagagtttaaaaaaaaacatggaaagatttcatttgatgaaaaggggaaaaaaacagtggaaagtatttgaaactgaagcatttgtggatttctaacatcaatacataatgtcctttcctgctttggtttcagaacttgcagactggaactgctgcctctaaatgaggaggtttatagaaaaatttgttgtggttgcttcttacaacaagagccagaaagagcagaattgcatcatagtgtctttcattatagggttagggaaagaaaacaaagctttctcattcaacagacctttctgaggcatcatgtttggcctgttgggggagatatgcaccagacaaatcccgcctctctgagtttgcaaccaagtaaggagaatttggctcttaaaaataataaataacataacagtgactattgtgtgcatcttaagattgtcagattcctctgtgctgacaggattagagaggacttctgggaagaaaatgtcagttgaacagagcctgaaaagaaaggagcaaatacatgggagcaagaagtacaaaatgccatactgtatctgcccttgtctaaaaagttcactgaaacagtgattaaaatattccgttttgaaaa

SEQ ID NO: 59274 - DNA, 1468 bp, Bovine  19866880647026
  misc_feature (1)..(1): n is a, c, g, or t
nttttgtttaattttctaaaagcttttgtgcctttgtgcattgactatccccataatttttaatgggatatcagaagggaataaacgttagagcacatggctactcagtcatctgccttccattaacttttacagagactttagatatcctccctgcttttcttcagtcttaactaaaaggactggatctactaataaaatatttgggggctccctgccagtcaagtggttaaaactccatgcgtccactgcacgggggctcaattcctatttgaagaactaagatcttacatgccgttcaacatgcaaaaaacaattaaattttaaaaataaatatttgttgtctttatgcctctacttgaaatgatagttaaataatgactatttattacttcagacactggttattggtaaaagctgaataatggggactaaaatacccacattattgtagagttcttgaggtgaatttcaaattaatttctttgttgattcatctcagaatagagaaaaagtcatcataaaagtaacttctgaatgtcactgtctcaaatgtcagctaaagatgtttggttttagaaagaacagtttttctgttacatctgtgaaatcaggcaattgctttagttaccaaaaagctttgtaaagttggtaccaaataaagttggtaaacttatactggatattgtggaagcaaagaacatttgctaatgaaaaacaatggcaatagccattacttcagggcaaaacttaaacaggttctacaacgtaaggaattccatactctctggccaagttaaatttaatatatttttcttttaaaatttagctttatgaactagtcaggaaagacgaaatgctagtattaatactacaaaacttttgatagtttactatcgatgtcttcaagctgacaattctaattaccaaatacagaaaacactgcacaatatagatacattgtgctgttactcgagtaaaatgtcattttctgtgtaatatagtcattttataaaataatattgaaacgtgcatttaacagtatccagggttccatgatattttaattttaatataatctgattaaaattagataaaagaatcttctggagaagcaagttctgggcgagtcccattttgtctgtttactattaccgtaatttacttctccacacaaagcagaaactggagaatctggcattagctgctcattatatgttgggaacaaattcagttcctcaggacacaaaagcacattgatggatatttttattctactcagcagaaattgaagacagcatagttttagctttcaattacttcccaaagaaataccaatgttttaactttgtaatgagaacaagaaaaacagcatgtcccaaagttctttagcagcataattttataggttacaaataatagtatatactattatgaaaaatgtaaaagaaatagcatatctagacat

SEQ ID NO: 59275 - DNA, 3374 bp, Bovine  19866880690434
  misc_feature (1)..(1): n is a, c, g, or t
nagacgttttaaagtgattaaaggttagagctcttattcttaacgctttgatcctccacacattgtttggccttggcaacccctgcactcatatactctgatgtacttcagaatttatttcaacacagtctgcccacttctcttcctagatggttattcacattctttcacattatgtttattccatcagcacttattgaatacctcctggggtaatactgaatatgtagagattaataaggcacagactttattctagcatgtagtccattagaggagatggacacagtcaaatattcataaaatacttgtacttttgtctgcatggtaagtgtgcctctaagaaacaactccatcactccatgtttacttcatgaagtgaagactggttcaaggtcaagaaaacgcacatgtgtcaaacaattccagtcagggccctttcatgaacttgatgtgtgaataccaagagagacaagatgtcttctctttttggatttcaaactggggacaactagtagcctctcgtgtagaaagggcaagcttaagaatgagaacaacagaggcagagggaactgttagtaacagataaaaagagaccaagtcactgtgacatcttttgatcactgatattcagccattcctattctagtgttacttccttgaacttctgaaagttcagatgaacacaattatataagaaatactctgagagaccatatataggcattatgtaatcacaggtgtagagtccaacctagaaggataaggctaggctagatggagtcaacagtttcctgaaaggtgtaaatagcatgctttggaaagagtctcagactctcagaatgcaatatccagaaacaccaaccttctacaatatcagttcttgctgctacatactcaaaaactgcattatgttttaatcaccaaatgaaattaaaaacttgatcaccgagtactttgaaaagttttctttatcagaaatagtgcaactttaagtttgatatgtcacaactagaactgtttactaagtgtacaaaatcaggaggtttgtcctgggataatttgggcccaactgaatcctggtagtccaacacaggccagggcttcgattttgccatagctccctgtatgtcaccttcttcagtacttttaaactgacatttcctgagggaatgcactctttgagggtagggatagcgtctgtccatcttgtgtttcattgttacctctgcatttggctcagtgcctgaactgccctgggtgttccacacatttgctgtatgaaattgtctcaaaagtaggaacatcacacatgacagagctgcagtccagaatctttttgtatgttgaagtggattgtaggagaggagaaaatatggaaagtaagaagaaatgtgtctgcaggctcccagtgcagggggcctgggttcaatccctgatctgggaactagatcccacacgctacaactaagagttctcttgctgcaactaaagatcccgcatgtcacaacaaagattgaagatcctgtgtgctgcaactaagatccagcacagacaaataaacattaaaagaagaagaaacgtcccaggtggcagagaggctgggtggcgggtctactggactggtatggatacacctttctactcatcctcttacatacagcgtgtggtgtttggaaagccagcttagagaaaggcgttagctaccccagcagaagtctttcttgaggccaaagtaaatgtgttccattgaattacaaaatgctgggggagctaaggcccggaatgtcataaaggcttcttgtttaatgatttctattctctctctcctttctttaagaaaatacatacgtgtttgtgagtgtgtgtgtatttataattcacagtaagattattggcaggtatttcagcttatctatgatgtcaatttcctgagagagtggtacctataaaaatttgctaaaatcattcatataacacaaaataatacatacacatatatacttagccatttcaaatttgaggaaatgtgatccttgaatgttaattacattttttaaatgtatagacattttaaaacatctaaatgtgcagagaatgaatccctatacatcaatgattatcaactcatggtcaagcttctttcattcgtactcttcctcattcataccctcctcatatttctatggaaaacctagactgtatattgtttattataaatatttccttatagctttcctggtggctcagacagaaagaatatgcctgcaatacaggagagctgggtttgatcctttgcttgggaagatcctcaggagaaggaaatggcaacccactctagtattcttacctggagaattacatggaagaggagcttggtgggtaacaatccatgggatcatgaagaatcagacatgactgagcaactaacactttatgtataagatacagacttttaaaaaacatgaccacaataattatgtcactatatatatgtttgaaatttacttttagtacttgcagttatattcaggaactagaatttgctaacacagttaacttttcacttaggatgctagagcctgatttgaccagttatcataaaggaatgagtcatttgaaattgttaatttatcattccaaaaaatgataaatttatttctttaaatagatgataaacaagtctcctagggtctcattaacagtattaatttgttcagaatacccttaccacttattaatgggaaaaaatggcaccctatatttctgaagtctgatggggagaagatttatctatcaatatgcattcaatgcattactcttggagaattttgcactttgcaacttaaaaagcttttaaaatattttataataatcctgtaagttggttattattagtctcatccttatttcacatgaaaggaacaacagctctccaggtgaagtaccagagggtctgagtcaatctctcaaaaccttgggctcatttcacctaattacactgtttttctatgaatccttccattattgctctcctgcaaagatacccatattttacaagctcaaactttcaggtccttaggtaaagaggaaaggtaaaaatgagaatgtgtctcacatttctaatctgactaggctgctatgttcaacatttgttttttttccttcagcctcatgtgcacacatgcctgatggcacacgcttgtggtgcttgtggtgctggctagtaatattacctgcaatcaaatgaacaccttttcctctctgcagaaaaagtacatctttgagagaaggtttcttgtccaaagttctctaccttcaagctttgacgaaagtcatgttaagtacctgtgggatatatgactttataaagc

SEQ ID NO: 59276 - DNA, 1010 bp, Bovine  19866880730148
  misc_feature (1)..(1): n is a, c, g, or t
nacatgctcaaatataactattgagagtgttgcagtaagcacagaaaactattttctaaatcctttcaaaatgccaacactttctgataaatgaaaggtcatgttaattcttttggcatttaaatcagcacctttaacatgattaattgatgtggcatttaatacatgattgtacttgtattctactgttattatatggaaatactgatttgaatccagaagaatattaaacaatcattagttgattcttattgtgctaattcctgcaattaattctgtcctgttattttaatgaaatgaaaaaaaaatttgctcttataaaatgaacctggtttggattttagtttatgcttatgaaaattaaatgtatagaaagtctcataataaagacatgaccatgatactgactatttccaatgtgaaagttatatgaccatttgtgttcaaaggacaaaggctttaaaaaacagtattttattttcaaggaaaaacaactgcagaaagaactttgagtttttttgccatctagagatgattcatgctaatttagaaagtggaaattctcttataatctattttagttcctatcctttacattaggaagaataatgtagatgagtctattgaatagaatgcaagctctgttttgacccagaatctctttgcaaaacttaactcccaataagattggtacgttgtcctccccagggaaattgagttcaattcagttcagtcactcagtcgtgtccatctctttgtccgactccatgaaccacagaatgccaggcctccctgtccatcaccaactcctggagtacacccaaacccctgtccattgagtcagtgataccatccaaatatctcttcctctgtcgtccccttctcctcctgccctcagtctttcccagcatcagagtcttttcaaatgagtcagctctttgcatcaggtggtcaaagtatctggagtttcagcttcaacatcagtccttccaatgaacatccagaactga

SEQ ID NO: 59277 - DNA, 1545 bp, Bovine  19866880737062
  misc_feature (1)..(1): n is a, c, g, or t
ncctaccaggctcctccgtccatgggattttctaggcaaaagtactggagtggggtgccattgccttctccgaggctttctccagggggttctaatttctaagcgggcacagagttattaataaagtcccgatcatctggggccaactgctacagaaaatgtggtttagcttcctggactagttggggcaggttgtgggtcagagttctgtttttacatatcttctggctattgtctgtttgtatatttagcctattgaaaccaaaggctggtcagtgatttcactaactagctaaaaaaaccatagtcccaaggcagccatataaagagtagtgagctgaggataggaaaatgagtaaaaataagaagagaaaggccacagaaagaagagaaaattaaaaaaaatggaaagaagggtaaattgcagtttgggaataggtagagataggaaaaagaaaaaaataaaagcaaacaggttaagtcttttttgtgcctctcttctgaaaggaggcacttattgtgtaatgatggatttagtaggtccatgcattttaaatgaatcaagattggggatatcagatacataggataggcaatggaatgaaatatgaaaaccttttgatattttagtaaacacgttttaacagtgaaccagtgtttgtgtaccagggctatttttcaaaactagattaagttatatgtttttcaagtcagccttagagatcaaaatgtctttttatcaagggcatatgggcaagggaacaggcacatctaccatggagcattcaggagtcctttactgttttatgcctcagaccttctgcccaaacttcccacagctcgctctggtcctgccgatctacatcattctctgttcctgagcccatctgtgctatgttggcagctgaaagttcacctactctctctctgtctaatgtaggtttttttttaaaaccccccaaccaaagaatacgtttattaatttcacttttgcacatgaaaagttaccacattacaggtgattctggagtgggggaaactgaacataccctgtgaggggcctcaggtctagggccagagtctggaatgaatgccagggtggctccaacagctactagcagagagaaaggcgatagcacattacacctactcagttctattctctacacagagaagtagaaaacaattattttcattatctacatatttttcattttgaaagcattctttaatttttcaggatatttttttagggaaatctggttctgctttataaatgtcacatgagtcatatggacagtagaacaatggaggaaattagcaataagatatgctatttggttaatcattcacaattgattttttcccccttaatttaccgcatactggtaattagtaatgttgcctttacatacctcataaaatctgggccctaaatttcagggtagttcatggctcaaggggcatttcatttgtgtcctttctatttatgtgtatcagactttgaacacacaggctcagccttgtcatacattttatacaaat

SEQ ID NO: 59278 - DNA, 1560 bp, Bovine  19866880754200
  misc_feature (1)..(1): n is a, c, g, or t
natgtgcctactatttgcaactgctaggctcacgtcagtgcaaaatgatgctatattaaaaacatgttgtttaaaatgatttaacttgctaacatgtcatagaacctcatcaagctcataagaattatatagctcaaaatttaacctagtaattttctgatctgaaatcttccatcttttttaatgtttctcaaaaagatagaaaagctggaaaaaatttcatttgggtgggatgtcaggaagtaagattcaatcaaagactcgagaatgttcaagataaaactgaagattaaactgttccaaaagctattttgagtaaaagataaacctttattttaacattggtaatgggtagtttaaactgccttaaatgataacaaaacaagaggaaaacactttatacaagtctagaaggccatacttaaaactcattaaaatttgcttacagaatcttcatagatttttcaagctttaacaaaatgacaaggcacttctcgaataggccagatgactgaaaatgttattgagatagacctatctcataccttacaacataacactcatgatatatattattttattcttttagaaagtcaagacatacaaaatgattggcaggagttttttatcagaagaaaatctcttagaatgagaaatgaatgcttctttctacactcaggctctctggctacataaaagtatccatggaaacccttacctgttgaaattctaatatgcatacacaaggttattttcttttacattttactgcaacaaaaatgtgaatagaatggaaagcatcaaactattagaaaactctgaagcgttatataatagttctagacaaaaaagcccattatattttaatagtttctacttggcacaagaccaaatgacttttcagaatatgttcatcgatagataaaataaggataattagatgtcccatcatacttatggaaacaaattcacaattttatttttgtttcagaaccagaattgatgcacattcaatttaaataaaatttcaccatttgccagtcaaataaaaagtgtgtttaaaataaggagatccttcctaaagcctcataaagggtagattgcacttgggtaaagtagggaaattgaagaaaaggagctagagagaactgatgcctccagtggagcgatggctatggtatttaggcaaagaacttctgtaattggcaatttcatacaatgaagaaattgtgggaataagtgaaattcacccaaatgagaacaagcaaagactaaatattcaggacttgctctagcaaaggagttcattacagtcacttgtgtcttagtagagactcaaagacaggcacaatgggaaaggtttagagtgaagaaaatggaaggtttttttcggatgctgatggtgggggaaagctggaggtgggctaacaagaagtaggacatcctacacaatgggttaggggtacatattaggctttctcccactgctgctgctgctgctaagttgcttcagtcgtgtccgactctgtgcgaccaatagacggcagcccaccaggcttc

SEQ ID NO: 59279 - DNA, 732 bp, Bovine  19866880802599
  misc_feature (1)..(1): n is a, c, g, or t
nacttactgactacttcttgccataagagaaacaacagtttctagtattttggaaagggagacagtggaaaaagaaattacagagagagcatattcatgaattttgtctggttacttcaattttatcatttttttaaacaaaataggcgctttgacagtcacataaccagggaattttattttttcagttgtatgttccaagtatttattcaatcaccctccaaatctcaaaacatctcatccatttcattacaacctattgactgtaattttctattttatgaccacatatatttgtatcctaatggatagaaatccactccaaatcttagtaattttaaagatcacatcaaacttaaagagagaaaagacttacattaaggtagagaggacatggaagacatggacaatgaatcttaaatacatattgggctggccaaatgttcatttggatttctctgtaagatgttatggaaaaacctaaatgaaccttttgcccaacccaataaaatttaaatgttgagcctggtaaaactgatgtatacataagcatttgaaactcatataatgaagcacaatgcaaatataaatcaatattgattgttttgcatataaggcccaagaatccagactgatgttatgcccaaggctaaagacaatgatcactggattctgcaagagcaaattgcttggtagagtgtacaattctgactacagttacaagggtaatag

SEQ ID NO: 59280 - DNA, 1401 bp, Bovine  19866880847798
  misc_feature (1)..(1): n is a, c, g, or t
natggatttgtactatgaatggatataggaagatttgattcacattacaaatccagcactgattgttggaacactgagaaacaatgcaaattgagattataatggttctcaaaggcagaattgctcttaatcaaataaacacttggattgtggttgcttaatggagaagaaaaaaataatttttgaatgttggtgaaggaacaagtaaattgaccacttgagaacattttgaaattaatacactaaataattattgcaatttagtgatcattgtctttaattatttgtctcttcttttgggaatagcattactccctcccctctccctacttcctaccccatataattgtaatgagagcctcttcctaatgaaatccttggctacagggattctgggggcaggtctctgagcccaaacacagtgctaggtcgagagtaagacctgtgactcagccaggaaaaatccttctatgaagtgtcaatagctggggttgtgagagtttgtttcctctttggacacaagtgagtagtggaagcttttggaagcttcaggagcttttagaagccagatctccttctcagaaaagcctgtctgagggaacgtaacctacttgcagagagaggtgaagaagaaacctgaacagtgtgagtcctgacagtgtgagagcccctggaactgctgatcagtcctcaggattgttcagtatgaagaatatgcacttagtaattatttaagctaatatgcatactcagggtttagcatacatcctcttgtatggtagttttttccttttttacatgtgttttctatatgtctacacatcaatgctacaagagttcaacagaaaaaacaatgatcggggttgaatgtggttgagaaaactttcataaactctgaagtcataggtttcaccttgaaggaagtatgatcctgaaataagtagaaaaaataaggaacaccatttcatgtggatgtgaatttgagcagatgtacagagatgaaaacacgtgtcatgtgttctgatggctaattttgtgtatcaagttgactgggtcacagggtgtagagatatctggttagacgtttttctaggcctgtctgtgagagtgcttctggatgctattaacatatgaaatggcctactaagtaaagcaaactgccctccccattgtgggtgggcttcattcaattcactgaaaacctgaatggaacaaagaggctgatgaggggagaaattgctttctctgcccatctttgatctgagatgtctatcttctggaaattataccactgcctctcctggtcctcatcctttggtcttgcaccataactatgtcatcaactctcctgggtctccatcttgccaactgcagatgttgagactttccagcatccataat

SEQ ID NO: 59281 - DNA, 744 bp, Bovine  19866880957945
  misc_feature (1)..(1): n is a, c, g, or t
ntgataatttgtcacaactctttatgatagtaatgcagaaaaatatataaaagttggagaactgtttatatcccttgaccccagtcatcttaacatataggaactcttcttagggaaataatgctaaagaggaaaaaaaagctatctgcataaagaagactgcagttttatatataacagtgaacagtggaaacagcctaagaaataaataatacagaaatggtttaggaacctagtcaaatgagtattatgcatccactaaaatcataattgtggtgataatttaaaggatattccttataatcaagctttgttcctacaaattttaggtaaatataggcacctataattttaggtacacagaaagatacatatattactataaaaataagattctgtttaaaatgtatgtgagtgtcaggtgaaatgaaaattaaggtaggaaaaaatagatcctgggccatggttagtatccaacatacctacccattgtcttgtttgatttattgggggtgggtcattgatttggcacaagaaaagatgctcaaaagccctgatttctgacagttaatctgaaataaaatccacattgtctaaaaaactttaagagcacactagctattaaacagctattttcagcatgaaatctaagagatatttttgcttttgagtctctgcaaagaagactctgtgtgaacctagtgaacaggatcctacactttaggggaggggattctccctccc

SEQ ID NO: 59282 - DNA, 1353 bp, Bovine  19866881106438
  misc_feature (1)..(1): n is a, c, g, or t
ncatgggattttccaggctagagtactggagtgggttgctgttgccttctccataaaagatttatactaaatattaacagtgcgtatctttaaatctcatattatggttatcttttaccttctttaagttaatatttttgggtactataatttttaacaacaagcatgttgtcaaatttatcttcagaaagtaaacattcatttaaaactggaatgtttcttgggtatatgttaagctgtaattttctaattgatttgttttagtattaattatgtacttgaagattatctttagcaaacatgtgatattttaacccttaggtcattttactttgggggtacaaccatatgcttaatatcttgtaacttatgtattaaaaagcaaccaaattctcgtcctctatgtccaataaattataattcaattcagccaattccatctgtaccccacgcccagacgtatcgtgggcccagatttactccaccactggattcttcatcttttttatacttgattttacttatccttttcgatttattctaacatacttcacattatttggggaagtggaaatgtatgggaaacagcaagattttgcctcaatataccagttcttgcaagaaaaaggccactgttgttccgaatgctttatggcgaattaggagccagtagctgctgctcttcattttttccacatggtgtcctgttcatactctgcagcgctgtggaaacaactgtcaaaggcagggcaccccagctgccagggggcagttcatctgccataagaagaatgacaagattctgacttacagttcagttccagatttttcttaaaggcaggagaggggagaatggggggaaacaaagaagagtgaagctaaaaacaggctacggtgtatacttctgttttgaacaaagttatctaccaaacacagtttcacaaataaaaatcctttctttttaagctaaattactgagctgggttttgcacctgtctctcttaattgctgaaaaagacacaaatggagatgacatgactgatggcttttatccattgcatctcctgagttgggacaaaagagccacctcctgtcaaagtcctttgccaagttttagacagattatttaaaaaggtctgacttgaatactgttttgactttgactgcaatgatcacattggccactagacaggagctgtttgtcttaattttgaacactacagagtagcattttcaagagaagtagaagcaatgaaaagagaaaactataaataataattaatatgttttatgaggcaggtactcaagcacacacttagtgcccttttctctgctggtagtacataatttcca

SEQ ID NO: 59283 - DNA, 1254 bp, Bovine  19866881209740
  misc_feature (1)..(1): n is a, c, g, or t
naaaaaaattggaatctgactttagatctaaatttaagtctacagaatatgacaaagaagttaaactgcaccacaaagaagcaatagtcaaatccaggaagtgggtcatactttcttcagtatgccgatggcctgaaaaaaataagatgaatgcgagggagatggggggaaggaggcttaagataaataatagccataaacaacaaatgaactgtcttgtttagatcctaatttaaacaaactataaaaagacattttgaagaaaatcagtgaaagttgaatatggggtgggtattaaataatattagggaattacttattaattttaagcataaaattgccattgtggcaatattagaaaatatccaaaatttttgcaaattaatattaaaatattgagaaataaaatgacatcatatttcatatttattataaactactccagccaaaaagaagaaaaggcagggtaaggtggccaggatgggaaaaagagatgaaacaaataccactgactattggcaatcacaaaagctgtgtaatcaatacaagggcacacaggaccgttgactctacttatttgtacattttgaaattttcacaacaaatttttaaagacagaaaaatcattttccaagtttcatgaggttcttctttactattctgggagataatgagaatattaagagactttagtttataatatgtgtgagaacatgaatgcagaatggatttaattataaatatagcacacatctctgaatttattcataattaaacaagaagtatgtggcaactgagaactttcattatgtgaaaagaaaggaatgctcattattcctttcctgatttatatgttgactacttcagtgacattctataaacatagagcaagtgatggaagaatatatttgctttaataaaaccccattattctgttcgtaaagaagggattgtatattggacttttagccccaagataaaactatccagcatcattaaaattctagcacaatcttcgtttcactgaactcccattaaaatatgcagaggaaaattgtactttcataatccacttatttcatatcaatttccaagagttaatctatatatttgtttgatttctacaagtctgtaggctgagattaatatatgaatctttgattttgatctttgaattcaaagtatatttgaatactttgaatttttagataggatgtcatagtattgactggaaacattgctgatcaactctgg

SEQ ID NO: 59284 - DNA, 1841 bp, Bovine  19866881247806
  misc_feature (1)..(1): n is a, c, g, or t
ntagaagataaaagagagtagtaaacaggagttcaagcttttacacgcatcagcacaccaagggttttccgcaccacttttcatgtttctcttatatagacctcagctacttacagataccagccatatggtccatatctctccacatgcttaattttttgatctctttgactttattgtaatataagatgatattggcctttaaatggtttatactacatataagcccaaggttatacacatacactcactggtcatgatcttgattagaagggacaaaccaggagaactgttccatagactatgatgactaagagaccagagagtcaagatctgtgttaaagtaaataagaaaccagaaagccatttaaaaaagatagaaagagttcaggggggattcctttgtaggaaagtagatgggaggagccagaggttaagagagatgttcccccagaagatgaagagcaataagagggtgctgatgatgctgacatatgaccagggaaggattgattgtttccactataagaataactaacatagccacattaactgcattaaattagagacctcaaccaaagaaacagtgatattacaattaaaagccagttattttcctctatgttggcttcattcacattcaatattgctaattatcttgcattccaagtctaagtaaaatcaggcaataagcctaaaagaactcaatgcagtgtttctattttggtaaaattgccttaatagtaaacagaaatgaagttttaaagattagaagtatagttgaaaagaatccatgattccccttccttatgtaattttcagaattatctgtagaattttgtttctagggaattctatactttaaaactgcaggtcagtttgagataaatgatggtgttattcaacatttttcagttaatcatcaacaattcattaaaatctcacaagttcatatctagtaataagaaatcattatgtgggcttgtttctaggcagatactggaactattaggaagtgtttgggaccagtatgctgacttggggtctatagaataaggagatccatggataagcttcagcagctccacagtctccctggaataacatgaaaacttgtgtacttgtgtcccaatgagtttttcctggggattgaatccagaaacactagaggattcccaaactgattcttattttctcagaagtttttgatccactttacagaaaacaacttaccagctctttaaaataaaatgtagatctcaaaaaaatagattatacattggaatatctgaaaatctatcagcaatatattacctccatgcagacatgtttggatcatctgtagtcattttttctaaaaaattatttctctttgatagtcaataaagttttttagcttctacagtcagaaaatgagagatgctgaatttagagcgtttttttttttttttttttataaccactgtttccctttggcaaagacatccgatctgggatctgacatgcctctggatcaaaaccaacatttatgagtttcctttatcctcatcccaagagcattgacccatttagctggaggatggaacatagaggtttggggtggctgtaaataacatctgtatttgtaatgaaaccttgctttgcttgattttggtggttttagaagaattttgtggggaacaggaggagaaatggttgagggaaggggagaaagaaacaaggacaggataaaaggggaaagttaaaatgaatctttattcaatacagaaacatatttgtttctttggtatggggaaagtttgcaaatgctgccttactaatttaccatgggaggatttcca

SEQ ID NO: 59285 - DNA, 3586 bp, Bovine  19866881318475
  misc_feature (1)..(1): n is a, c, g, or t
ntctttgtgaccgatagactatagcctgccaggatcctctatccatggaattttccagaaaagaataccaaagcaggtttccattttcttctccagggaaacccagactcttgaatctcctgcattgtcagccagttcttttaccactagggccaccaaattttatgtgtgtgaaagggttggcagatatatgtatgtaaaatattagaataatctacataaaactatagaaattagccaaaatcaaaaattatatatgctagggtgtcagtattttctaagatatactaataatttacacaaatttagcagtagctggattcttttctcattgacatgtgtgtttttacttgaaaattgtgcacctgtcagagttgttaaactctgatgaatctctgtatatgctttccttctgttctattttgactgacttggtacccgtaagaacatgtaggaatgatagatgtggactttgaattgatgaactctgattgctgtgtcagtgaactactttctaattggcctcattctttcaaatcatttactatacacttgtccttggaggttatgtatcttttgggtgtttgtggaagtaatctgattatggtcttttttccatcctattcttttcaggggaaagtatgacagattaagtacactggtgagtttttaaaatatttactaagacacttttaaaattatatcagtatcaactgtcatttttaaaattagctttataaaagcatactatcctttgcttgttactgatcaagtacaacatggtagaaagaggtgaatagaacagtaataagtaaagattgcaaaacaatgaattagaaaataattattgcattctgaaggagatcagccctgggatttctttggaaggaattatgctaaagctgaagctccagtactttggccacctcacgcgaagagttgactcattggaaaagactctgatgctgggagggattgggggcaggaggagaaggggatgacagaggatgagatggctggatggcatcactgactcgatggacatgagtctgagtgaactccgggagttggtgatggacagggaggcctggtgtgctacgattcatggggttgcaaagagtgggacacgactgagcgactgaactgaacttaactgattgcattggtatgtacatttaagctgcttttttcctcctccagcttaaagttactctagtaacttgattagaaatatttctggaagaagcaattgagaaagcctgttgactagctggaactttgacctaagagcaatgattcaggagaaaaaaaaaaaaaaacatgcctgccattccttcagataaatgatagtcttggaaataggatggacataaggtatagggaattgggatagatagaacgaaaccatttcttggagacaggtttgtcagactttgcagtgctgaggctgtgaaaattatacctctgagattatctaaattcagcaaaggtctgccaaagataatttagtgttcattcctctggtgacaaaatgtcagagcttccctgcacactgtggggcttcaaatggttacagatgtgccaacacagcaatcctttcagccttcagtgcttgcataagcctgggacaatggaacttataagtcatatccttcattcttgagctggccctgccactttacttcaggttgcctgaatgatcttttaagtcttatatatgtttttgtaaaaggtggacaagatgacttcttgaggttctttctcttaaaatcaagcctgtctacttgctctcctccactgtgctaattaattcctagtcttaagggctccttggtggctcagacagtaaagaatctgccaggcattcaggagacccggcttcaatccctgggttgggaaaatcctctggagaagggaatggctatttactccagtactcttgcctggagaatttcatggacagaggagcctggtgggctacagcccttggggtcacaaagtgtcagacacaagtgggtgactaacactttcactttatggcttttatgtataggatgttctcctccttccaaactattaggtgcaaatatttcttaaaacacaagaagtatgaaccataatgaaaagactgctaaatgaatgatattaaaacttacaacttctgttcaaagagaaacactaaaaacaaagtgaaaagattcatcttaggctggggaagatccatgagaattaaagacaaactaattttaaaaaaggacaaataaacagtttctggagaaggcaatggcagcccactccagtactcttgcctggagaatcctggagatggagaggcctggtgagctgccgtctatggggtcacacagagtcggacatgactgaagcaacttagaagcagcagcagcagcaaagaaacagtttaccaaatgggaaaccaaacaggaaaccaagaaggtcaacaagcatctgtaaggtgcttaacattgctaatcaaattaaaaacaacagtgagattccaattcatgttataatattgtaaaattgatcaccctaaaagtagatgaggatgtggagaaagttctgtattgatgagaacagattagaggacaatttgatagtagctggtaagtttgaagatgtaggcacagaaatttcacttctaggtctctattttagagaacattttacacctatgcaaaaggatgtttatttagcaaagttataaagactggtataacttttctttaaacatacatgctcagttacttcagtcatgtccaactctttgcaagcctatggactgtagcctgtcaggctcctctgtccatgggattttccaggcaagaatactgtagtgggttgccattcagactaacagaataacccttaaaatgaatgaactagatccaagtgtatcaacatatataattataaaaacaatgaaaaatgaaaaaaggcaatcagaaaattatatatactacatgatcctatttattcaaaatttaaaggctcacaaaatgaattttttaaaaatgtttaacacatgctgttaaactgcatagccatgcatgggaatgatacacagaaactttttagcagtgtttacctttggggagggagaggacaggaggatgggtattagctggaattagagaatctcattaaaaaattaaatgtaaagaaaatgtcaaagttaatatcaaattaattagttgagtatcttactaatatcttgtacaactttctgtacatttaaaagtttcaaatatcttttagatgaatgagagaaatccaagctcagtcttaataaatttcattgattatatatccacagatatctatctagatatatattcatgtcagtatatatctttgtattgtatctgtgacactctatttgataatgtttccttttcccatcaaattaggggaaatttgatcttttaagggatgacattgatttctgtttcttttctgccttttgcagtgactagaactgcactaggcttcttgtatgtatgtaacaaatagctgtcaactgattgcaaaattgcattcactgaactggaaatcctcccatggtaaa

SEQ ID NO: 59286 - DNA, 1544 bp, Bovine  19866881361116
  misc_feature (1)..(1): n is a, c, g, or t
nctccatgtgctgtgtgctatgactgtgttaattatacttaataaacatggaaccagcttctcttttgaataaagaagaataaaatatccactatagaattttttaaaggaataaatgtttaaaatgcatatgaaaacacttgtaaatttgaaaacataaaaccacaaaaccagttagtcattattagatcatctatctggatacatcttacttggacatcctacatttccaggcatacagagacaacagtgaaatatgttttgctgaagaaagaaagattataactagagacaacagtgtagagaaaacagatgcttagtgggataaaaatgcaaatacaatggtgataaatttattttgttatgatcaaatgaatgtatttattcactaagtaaatctgtgtaaaagtcttcagcttcaacattgaaatgtatataccacaaccaaatgtttggctgacatcagaatatatatataaatactatgacaagtttcagtgacaatcgtactactaattttcctaacaagaatccatcactaataaaaaccaagaaacaaaaaagctaaattccttaatggcatatatagcaggtcttcttgaagttaaatccctggcttgtaaagctatcacattctgttccagtgcagatcctatatacatgtatctcacacttgaacttcacctcctcagggaggtctttcctcagcctctcttgttagagggtattttcattccaacaatttctccagcacttggtaatacacactcatgtttttttttgataggaaacagcttttttgagtgtggttaaataatgttttccccatcataagaacaactagcctcttcatcatcttcagagtttcatttctttaaattatatgcttcaaaggtagatggcattactcatagctttatgttgcccctctcaagtcatgacaaggtttttacactttatatgcctaataaacacatgttgattttatttgcaaatccagttcaaaagcacagagtattagagttaaaaaggattcaacagttatcaccaagtttcaaaattttgaaattaatgtctttaggaaggccatgtgtctccagtttaccagcgtccctaccacttttatctaacccaagccatttccacacttggtctctgaggcattcacagctgtcactgtggattgacacctgtgagggactatactccaaaggcctttgctgagttgcctgaaatgacaatggatcaccttagtgacattgccaggttgaatctgaaggtcttatttttttattttattttatctttttgttttccagagctctttcatctcaatatgttacctcctcaagtggcttttaacctaataattcttattcaacctgctttctacctccacactcagttgtaataaaggtcaaggtcaactgattcaaaattaaggatattacagggctatttatgagtgcatagtatacatgataaatcataacataattatttactatatatatatatatagtttaaggtaataacctttcaaa

SEQ ID NO: 59287 - DNA, 2640 bp, Bovine  19866881491166
  misc_feature (1)..(1): n is a, c, g, or t
ncagaaagctttgatacaactatgccatgattgccacctggctgacaacaactgcaagatgttatcaattatatgacaactcctcatttcagaaatgtaaaaatatgaattccatcttgaaattcattgggaaagacacagaaatggtcaggaaggtggacatccacagtggaagaggtcttttctgaaggaagtaaggtctagtctgagatgtgaaggatgagcgggaagttgtgaagaaagtgggaaagagggtgccaggcagaaatcactttccatgacattttcctcgtctttgaatttgggagtttagggggattaggatatatgtattattttagttctttattttgtgttggcagcaaatttttgaaaggaaattctatctgtaatcctaatacataacacatataaatgggtagttgcttttatcaagaaggtgggggtggggttgagctctattcatttccctccacttctcccccttgagggggctcccaggaatgtagtttgaaagccactggactagatgataccaagatccctcctacttgtaatactctataatgcagtgtgacaagttcatctggacactatccaaagctcaactcagcttcagaaatttatataactggtaagtgacaaaggctagcagataccctgattccaacatttgcacttttaacctgatattatactgactccaatagtattactggtatttctttgatatgtaaaatggggataacactatattctaaggccattgaacacatgagtttcatctgtgcattagtggtgtttgggtatgcccataaagacattgtgcatcactgcataacaaatagcccctgaattctgtggctttggacaatactaattttatttcttacatgagtttgggaatttaggcaagttttgactccacacgatgcagactgcacttaggctcttccttgatggtctctcctcttttgtctaacggctgagggtgccaagagtgaataattctaagagagagaaagtggaagctttcagtctcttaagggctgggcccagagactaacacagcatcactctcgccatatgctacttgtgtgcacattcacagaagcagccatattcaaggcatgggaacacagatataatcttttgatgagcagagtaccagagagttgaagccatctttaatctgccagagactcagctgaggaagaagtccatcagtgcacaggcagcaaagcacagatggaccgcagtctggatttatattttccccctttgctttcaggggtgtggaaattacagtatgctagaggatttatgaagcaattcacttagtcaaccaagtgtgaagttagttctttatcttggggaaggaaaggctcaatataggactgccacggcctgtttgaggaagtcagtggtctcaggaaaagtggggggccactgtgaataaggtaactatggcaaaggcagaagaagatattgctcagatggaaaaggtttaaggttaaatgttcttttactgcggctcaagaaatgacttcattgtcaaatatggagctcttgggatagaggaaagggatactatctttaagtgtcttctttaagagatggggctgtggtaacctatgagaaaagatgactggttatgtaaatactcatgattggcacgggaagaaaggagagggtagaaagaatgtaaagtggaagaaggtcaaatagaacaaatgagatggtaacagctattaaacgaatggagagaaactacctgaagcttgaaaggaagaggaaaaatagtggatttcatttcaggaattaatacaaacaagttgtggattttggaaagcatatggggaaacgtgaaggtagaattgagtgtaatgtagcaagaaactcagaagggagctcttgcagtcaaagggaaacagtggaacgtggctttgtgaatagaagagaacaggaagatgggaaaaaagtgtagaagagctcacagatgaaaagaccagaacaaatgacaccaagagacccaaggctgacagagcaaagccctagaagtaggaacacgaagtaggaacagttggaggaggtggaagaatctgacagctgaggtgaacgagagggttaaagagaagactgcaattattgtcaatgccactatggttgtctttatcaatgtggttactggtattgttgttatttcttcgtaatttcctagaggagttaggaaaccatttcaggaaaccatttcaaacctagaggagtttgaaaccatttcaaatggtttccgctctttaaactataatcttttttttttaactctaattttattctcagccagtaacagtaatgcctattctattgagaagggtgaggcaatgatatgaactccaccaacttctgtcaagtttacatcaaattgtcaatgtatctagtaatcatcttttctttttttaataatttttaaatgtcccttctttttcaaggtacccttggtgccactccctccaatctgttgtaggagctctttaattatccatttttttccccacgtatacaacaccttccttctttctggggagaagcattttcctgtctctcctgggcgaaaatatcttgttccttattttctataac

SEQ ID NO: 59288 - DNA, 1528 bp, Bovine  19866881564992
  misc_feature (1)..(1): n is a, c, g, or t
naaaacaacatttattctttagagtcactactggcagcacaggtcattctgaaacatgtttactaaacttacctgtgaatggcatatccttgcttattcttcatttaattcagtttacagtgccataacctgcacaggttttctatgacacaggttggaagaacccacaaaacagtgtagaaaactggaacttttagaaatcagataaacctcctaaagcaataaagctagttagtggtaaaactatgaattcaaaatgggcctgtctgaatatgagacactttctgtcaactagaatgggcttcttttatgttacagacttagatttatgcagctttgaagaggattagcacagatattttctttcccaagcaccaggtccttcccaaattaaaacaactaccagatctcagctatagcagcattctaataactgatttcttttcacaccctgaaaggagaatgccaacctatcatgattctagaaacaaataatatctcatatatgaaattgagctgtaatagtcaaaagatggtgtgaagtgttggatagtccttacaccacggtagatcaatagtagaaaataacagagactttccaatattagccaatacttattttggtatatgatgttcttgttgactcaagacctacatttgaaaattctgagtcttctcattttcaactttcttcatggagaaatatcaaggaaatattatttccctttaaatttatcctttggaatctacaggataatctagctaaaatgtgagaaataaaaattcagtgacatgttaaatatgaccattgtttgagatgtgttacattcagataaacttaaaacttttcctctaataaaagaaaatatttgtcattttaattttgacaagtttatgcctgaactattatactctacttgcttcaagtaattctttaaacattatgttgtgtttttaaatgattgttaaaagcaggctttataatagtatgtaaatcacttcaaaacactgatacaaagaattgtcaagaaatttgttttttgaaacatttttgtgtctaaattatttttccttgaaacaagttcaaaactaggaatgtttattcatctgtcttgtgtacactgggcttagaaatcatattgtttcagggtttaacatgttaatattccatatatccagagaccaattacttagtaacatcaatcatccagggtcccccaaaacagaaagatcccagaccagctaaactatataataccaaatatgttcatttattttaggaggagggtctaatctgagacatactcagagcctatttgtattttagatagaattttattgtactccatagtgtcatttactaactgagttagatggagataggaaatttttaaagagaggagagttatagaggcagggtaggttcaacatctttggtatattcttttagttgctacacatataattgtagccagagtaagagtcaaggccaaaggttgacacttgtatttggtataaaggtgcaagt

SEQ ID NO: 59289 - DNA, 3419 bp, Bovine  19866881378891
  misc_feature (1)..(1): n is a, c, g, or t
ngtaatggcaatccactccagtactcttgcctggaaaatcccatggactgaggagaatggtacacaacagtccatggggtcgcaaagagtcggatacgactgagcgacttcactctctcactctctgccataatcaaatgagatttttagggtcttgaaataaaggtgaatatattttgcttgtgcagcaggttaagtagttgtggtcaaaggacagaaggctaggttacaactgttgtcacaacattttgtaccccacctcaacaagaggtagagtcaccccttggattggagttggctatgtactatcaaaaatatgatttgacccatagtgtagtagaaatgaagttatgtgagttctgaacctggcctgaagagcccttgggacttccttttgtttcttgggaccatagaatgacatgtgaacaaacacgagagcctcctctaggattagataccatgaggaatacagatattcatttatgctgagtaatgtcaccacctcgatcatcttagctgcagactgatgaatagaattacctagtttagtctggccatgttcaaaggatgagatcaaatcactcttcagtttcaatttttgacaaagctctccatcttactcagaataggatagaagactgacatgatctggtcccctgctatactgccaacttatgtttttctactgattattcttgtccctttactgttctctttggcttcattgattactcctcaaacaggccagacaaccaagcctatactatagctatacctccacccacttctccccagtaggccattcagcaccctcatctgataaaggcttttgctttaatatcaccttcttattgtggacaacagtgataaattttacttaaaactgcaccccttttcagtgtccctttctactccacttttttttttttcctttttccctcactgcacttgtgactttctaagacaatatgaaatttatatattgttttagatttatgttttatatattgtttatgatttatgttttcaccagggcagagatttttgtttgtttcttgaaagcatttcatacagccaggacaatataaagtgctcagtatatgtttgtgatgaaaacttatataaaagtgtaccgttatctatatctatatttttatatatatttgtattattttttatttagtattctattctaggggcttccctggtggctcaggcagtaaagaatctgcctgcaatgcgggatacctggatttgagcccttggttagaaagataccctggagaagggcatggcaacctgctccagtattcttgcctggaaaatccccatggacagaggaacctggagggctacagtctctggggttgcaaagagtcagacatgactgagtgactaaacacacattatatactagaaattttgctttaaaatattctttcagtattttaatgggcataacactaagcattcagtggttattggagttaatctttgtactattagatataatgtgtaaatgataatcttttcaatgagtttgtgttttagaataaatccagtaaggaaatatgatggttcagagaatatgaacattttaaagtcacatttttttctaaatgcacatatgattaatgatcaatactaatctctttgtaaaaagtgagataggaaatatgtgaccaaatgacaagtgactctgtgcctgttttataatttctctataaaatgataaaacagtacaatcttgtatatatatttatgatgtaatatatacacatatttgacattaaagtgtaggcatacatttttccctgaacttgtatatattatagggcagaattgtgattaaattctgaaatctccactacattgtagcagttatatctatatgtaattcaatgttccataaaataaggagctaggatacagttgagattctgcatttcagtaatattttatatgaatgtatggataaggcaatggcaacccactccagtattttagcctggaaaatcccaaggatggaggagcctggtaggctgcagtccatggagtcgttgagagtcagacaagactgagcgacttcactttcacttttcaatttcatgcattggagaaggaaatggcaacccactccagtgttcttgcctgaagaatcccagggactggggggacctggtgggctgccgtctatggggtcacacagagtcagacatgactgaagcgacttagcagcagcagcatacatatgtaaggtaaaaatttgcccagagtttaaagttaatagcagtattagtaaatttttaaaatattaaatgattgtatagtgactatgtctttctctacaaattgcattgattatattttgtctagggacaaatgatgaattgaatcatgaactttttctttagtttattaatcaaaatattaaaatatttcctgggagatctgacaatatagaaaatgtagatttttcttaactgcaagactattaaaagataaagatgaaaaaaaattcatgtgtatcctacaataggctaaacatgaaaaaaattttgttgttctaattcacagtttttgatgatgtacattttctagacatcttcctttttacacaaatcaaacaattttgttcatcttgacctgtctcgtaatttttgaggcaatgctggaaggtgtttatgtgatagagctaattttccctgatgatttgatttcacattgatttcctccttcaaaagctccttttgtaacttttgcctgaaacatcaaattagcaactcattacttgttttcttgttcagtgctggctctgggcaaaattgttagttctcaaagaggtgtctgagagcctcctcacctctcttttctatacacatttcctccttgtaagaaatctcttcctcagattctctgaaaatgttttcaaaaaaattatttagcttgagtgtaaattattataattattttcctcctttaatataaactattttacattctgttctaatttgtttttggaaggttctattgcctcaaacaaacaaaagcccacatttttaagtaggaagaattcagtgatcctaatataagatagagcttacatattattccttctccataaacctagatttacagatcagtgttttttagataggagtttaaatgtagcttgcataagtcatctataaataagttcataaagggaaaaaaaaaatctttctgccttggtatgccctgtagcacctaacacaatgtaggtatatatcatgatcccaatagacacatcagttcagttcagttactcagttgtgtacaactctttgcgactccatgaatcacagcacgccaggcctccctgtccatcaccaactcttgggagttcgctcaaactaagtccattgagtcgggggatgcca

SEQ ID NO: 59290 - DNA, 1169 bp, Bovine  19866881720766
  misc_feature (1)..(1): n is a, c, g, or t
naatttttgttggaggaatataaattgtgagttctaaaaagttaaaaccatattactttgatccaggaagctaaatatatccaatggcatattgaccaggctaaagttaaagaatttgcatcaatatcaaagtctaagaacatttaaaaagagcaataatatcataatcttaataataatcataaaataaacctagtaaacacaatagctatggtatttcatctttaaaagttggtactttttccccaaatttattgttttagtgatcctgatcaaaattatgcagatttttctgtttaagcattcctttagtatgttatgttttattttatgatatctttcagtgtttttttgctattactttttatacatatatataattttggcactaaagggatccatgttgacttggaaaactatcaccaaaattttttgcaatgtagtatatattacaaactgtttgtcttattgacgttttagctttcattctattctattattactgtcatttgaattctatctttgtcaagtgacagtatcatttataaattctactcatcctttcaagaaccagtttcttcagtattgcttaatatcaccatatgcatatttttctctcagatttttaaattatttcacttggaattctttgtatatagctttgcattttgaataactctattacaactgaacaactgaatgacatttatgagcttatgacaatttttacaacctaccttattagaataatcactgggaaaccttttcattggccaataacaaatttatttcattacaattataatacagctaacctatatttaatgcacttgaaaagcccattccctgtttatttgatatgtctgctataattaattctaacaagtaattatcagggtaaacatgccgatttctatctaacagtaaacaaatttgttgttgtccctgtagctcttcttagtgcagcatcttgaaagctactccatcttctttgacatgggttgatccagactgactttctaataatgatctaataatttatgactagctgtctccaagttagaggactataattctattccacaagcatttctatatagttcaaggagatggcagtgccaagaaaaaaaagcaccttctcgatcctacaatcataaaagcaatcaatt

SEQ ID NO: 59291 - DNA, 1346 bp, Bovine  19866880628510
  misc_feature (1)..(1): n is a, c, g, or t
ntggtaggtccataccatttctgtcctttattgtgtccatctctgcataaaatgttcccttggtatctctaattttcttgaagtgatttctcgtctttcccattctattgttttcctctatttctttgcaatgatcactgaaggaggctttcttatctctccttgctattctttggaactctgcattcaaataagtatatctttccttttctcctttgcctttcacttctcttcttttctcagctatttgtaaggcctcctcagacagccattttgcctttttgcatttctttttcttgggcatggtcttgatcactgcttcctgtacaatgtcacaaatctccatccatagttctttaggcactctgtctatcagatctaatcccttgaatctatttgtcactttcactgtataatcataatggatttgatttaggtcatgcctgaatggtgtagtggttttccctgctttcttcaatttaagtctgaatttggcaataaggagttcacagtcagctcctggtcttattgtccctttattctatattttgctgattttcagccaaaaatgtctatcaaatttgaacttttctatttacatggtgtgtctttttctacccttttactttataacattttatatctttatacatgaggtggatatcttataagctaaataacaatctctgccttttaatttttatgattagaccatctacatgtgatataattacttatattgttggattatgatctactatctcttccttcagttctttgtttgccgttttctatttatctctcctttggatttatcgagtattttctataaatccttatttttttcccccaataccactgacagaggctttttcatattaccaactctagttcacagtgagcactcatggaataaaggttacaggtgtatgcaaactgtatttttgtccaggatccccggggttccatattttcaccttgtcatccatatcagtccttagaattctctttaacatattacctggttttaaaatttatatatatggggagggaggagggaggagggttcaggaaagggagcacatgtatacctgtgatggattcattttgatatttggcaaaactaatacaattatgtaaagtttaaaaataaaataaaaataaataaaataaaataaaatgtatttatatggcgcctagcctctctttaatccagtgctcttccagatgtgatccagtatttgcatcttatctccccttggaagatcctttatttccttagatttcaggctgtttggttgttcttcaacctctattctctaataaattcaagaaaatttatgatt

SEQ ID NO: 59292 - DNA, 1019 bp, Bovine  19866880932819
  misc_feature (1)..(1): n is a, c, g, or t
ntgctaattttggaagaaaattgaaactgcttgctcaaatatgtatttatgggaaaatagttcatgttaactaccaaagacactgaattgcagataacttgataagaagccattattagggagtaaataatgattctattaaaaattgatgaatatagggtaatctaaatatatttacagtgttaacaatctgaaatgcaggactttcagaaacacttacttgaataagacttcccaagtaaagagacattcaaaaaatcatagatgtttcattattaatgtggacacctccccactcgtatgggatgtgaagtgcagagaagtttaaggaaagccttcactggcaaaggaaagaagaatgaggcagcctagcagcataaagggcaccccaactttatgctgacatgctggggaaaaaattcctacccacaaagggaaaacaaagccccaaagggagatgaagttggaagaaggggccaaagtaagaggatgccagtgctcagttctgggccttttgcacctgcacgtgtgctgtgaggcccctttacttctgccatctctccctgcccacctgctcaggcccgccccctacagacaccctgctcttgagagaaaaccctagctcacgctcgctacagtggaaagactaatcccagctccctgagcctcctgggaatggctggcagtgagggggagtggtggggagacagataaaagaggaaagtggacagtgcgactgttaatagaggtgacaccagtgcattcaggtaaaggcgtctggtgcaactgggagaagttggggcaagaagttttccctctcttgctgcatcttgctggggctgtgcctggtaaccaccactctttcaagaatgtcacattgcaaacaggtgccaatgttcttgctacactaacgagctaagtgacgcagtggacaaagcaaggatgctgttcctggctcaatcgctctttcaggacgatgatttgccgcatcaacttaccttgccaggcacgaagcatca

SEQ ID NO: 59293 - DNA, 1277 bp, Bovine  19866881070663
  misc_feature (1)..(1): n is a, c, g, or t
ntgtggaggtctttggcataagacaagctggtatgaacactttaaatgtttaagtgtcatgcaagacaatgagaaattgaagaactattccagtttaaagcagaccaaagagacatgacaactaaacctaatccatgattttagtttggatacttgatttaaaaaaattgaaatgaaggaaaatattggcaacatttgagtatagggcttatattaaaatgacagtgaaattacagaaattaaaatattaagtgaaattttctaagtttgataatttttacttttttgtataaaagaatatcctttttcttgggggatatatgctgtagtggaagagtaaatacatgtgtgtgcatgtgcagaccaatgagataaaatgttaatatttggtgaatctaggaaaacattggtagaaataaatttatcattaaaatttttatatcttagaacttgttttaaatataaaaatgctaaaagcaaaccaaataaaaccaaaacatagtactcttcttgcaaaagaaaatagatctatatgtcagatttgttctagtatctgatcagtccatagaacattttttatatttttggatcctcatagtatctactatctttataacacaagcttgattagagtatgttttgtcttgttttccaatgtgtgcatcttatttttcacaatcggataggctactataggatatgttctagtctctgtctgatttatatattccctttgcagtaaggaaggttttgagcacaaagaatttagtgaataattcttgaatttggtaagtttgcatgaattttatagcttggccaaatgataactttgtctgttgcagtctgggagtatctgttatcatttgtactaaagttttacttcctaagtaattaagacagtcatttattccttctcctttttaaatgcttctaagatttggagaaactcaaagggagttttgccaggatgaagaagtattctagagcacatgaagaggtcactattttttttttttttatataaagtaggtcattctctctgtactttcatccctaggcccagttagagattcaaaagtggaaccttactgagttgttctaactgaaagagcatgaacaaagcactaaatattagtgaagctcaaaaaatttcaatagaggaacctcttttatttttaactgtcaaaggacctagtaacatttaactaatgttttatttttatggaatgtctaccaagaatattggaggggcattcagaagggtttcttgtattggg

SEQ ID NO: 59294 - DNA, 1246 bp, Bovine  19866881168243
  misc_feature (1)..(1): n is a, c, g, or t
naaaaatttatgaggagcttgttttatccttctcattattaaaataatctgagtactcacatggtcatttaaacaattctgtgcctgtataaaacctagcacaaaagtattgtctttattcttagataatttaaccaatttgagggtctcacacactgaacagagctgaaaactgtagtgttaatggttactgaagtctacaataaatcactgataaagctggaatttgagctgttggcttccagacattgggtcctctgggaatcatggtatggaataccatcgctaccttgcctcccacactttaaaggctagttactgacttggaaaaaaatgagccagaaagtaaagattacatatgagacacatctctgtaagattgtaatatgaactgtttggtaattgtgcatatatagagagatcaatcagttgcacagtggttcagaaattttaagaaatcatgtctcaaagaataggaaagtcctattttaagattttcaaattcttttaagtttaaaatgttggttttttccaaattctttgaatgtagggaaattactacacagatattggatagttgtgtgatctgtgcatgatggaaaaacaatttggttttatagccaaagaatatagtttaggttacaaattaatccaagctgtagtgaaagaaccttatacttaagaatcaggggacttgacttcaagtttgagctttgccactagttaattgccttatgtcattgaacaatatataacctctctagactacagtttttctccctgtaaaaatacattttggatcactctaaattccttttatcttgctaaattctttccttgccaaattcctgttcatcccagagactctataattcttttaattccaggatttgcttccttttttaacctctccctaggtctaccatcgtgagttcccaggtgctgctagtggtaaggaacccgtctgccagtgcaggagacgtaagagacgcgggttcaatccctgtgtcgggaagatcccctggagaaggaatggcaacccactccagtattcttgcctggaatcctatggacagacagagcctggtgggctacagtccgtggggttacaaagagtcagacagaccgaaagcgacttaacacagcacgtgtctaccatcattttgacataaatggccttaaatttcacatcttgtgtttggtggtattaacctaggacacagaaggcatacaataaatgcttgtt

SEQ ID NO: 59295 - DNA, 1027 bp, Bovine  19866881568995
  misc_feature (1)..(1): n is a, c, g, or t
nctggagagtcccaccagaatgaattccatcacatttgcattattttcttcagttgaagaaatcaccatcctttctatgaagagaaaaaggaggaaagtatgacaaatgtgacagagtcctaagaaggcactgggaaaagtgcaaggctgatggtgaggaagaacttcacttcaccagagagaggaaaaatatagtttatgccactctaactgtaatcctttgcatcttctcatagctgtggttaggtcaacgaggccttgtttttagctcttcatcctctcactcaacagtcaaacctgaagaggcagaaccacaccctccttacagactatttgttttaaaatggagtcttttgtatagaaatttgttttgagtggctacacttgattttatgtctgtaatgagtgttctcatggtgaagtgcagcctttcaaaggaaggctttgaaaggccttcctatacttactaacacatttacttggcccagaataataagagaagccatccaatacaagggcaagcatctcaaacctaaacagaatatttcccttgtctttgtctaagtaacaaaataaaaattattttgcttccagtcagacttcaagtcttgaacatctattgtgtttagagaacaatttcttaggtacaagaggctaaaagatacagttgaaattaaagatctgatcatagaattcaaggaacttgaaaagggacttgatcatcaagagaagtcaagaatgtgttgagggtagctctgtgccaattttgagctttgctttttgtgaaattgcatgcaactctcacccaggataattgtagttgagttgaattataacaaagaaccagtgaaatttataggaaagagtacctaagtaagggcattttagctttggatggactctttacttgctatgtgactcaagtgagtggcagtttcattacctatagaatgaggggaaatatatgcctttcctacgtcacagaaatagatagatagaaatagacaaaaagattcaagggattaga

SEQ ID NO: 59296 - DNA, 1828 bp, Bovine  19866880397768
  misc_feature (1)..(1): n is a, c, g, or t
ntaattaatgaagtaagggtagtgacggtttaaaatatgatttgtagatatatccagggcagtggaattctcaagaaataaccaaaaaaacttgcttaaggacaaagaatgcaaaacaacatgatatcttgttttttttgttttagaaagggtaaccatatgataggagaaaagaaacacagcagatgctgcatttttggacccaagttgcagtatttcatatagcaactcatgaaattttaattgctaacatggttcagttggcagggaaagcaagttacatggcttgaatatgaacaaaagattatgaaggaaaggtgaatttgtcagacaagtcttcagtaagaggtgctcagcagggtgtcccaaggtcagtgcttgctcactttagatttccttgtgcattttaattagcaatgtgggagagacaacaagagacccctgaaagtgatctgaagaagacttgcaaagggggatgttgccaaaccccaggaagaagtccaaattgagatagataagcccacaaggtttaacctatggacgaaataactgagggctgagattatttataaagaggcaaacaagctcattggagggacattaatcagagctccttatactacagaagcaaaaggactcatatcccaaaaaggtttcaactaatagagtaagagcagacaccaccatgaggaggtcaggctgtactggatccagtaagcctgccccacccacctcatcctactctgcctacctatcaatatcagccagaacatgggcagaggcaaagcctgtcagtatattgatgaccagcatattgatggtttctgtctagaaaaataaaatgtttaaagaaatgtctgttagccattattaggcactagcacacagaccctttcactgtggcccagccaacaagcaagactctccataacatagatatttatgatttccactaatccccatgcccctttctcactactcagccagggaaggcaaagatcgccttctcctgggagtcccgctgctccttgggaatgtttcctgcagaattctgtggttctgacttttagaagatgtagaggtttttatggctcagttttattaagaggacagagtcaatctcctcaatataaagtataggtaaattgagagctgagtatccctcaaaacatcataaaaattaaattttatgttattgctagctaaattctaattgttaagttttaggaagaacaatttgacagagaaagagaaggggctttgaaattgagggatgttccatcgaaaagccaactaattttgggagggatgtgtccttgaaggatcaaatctgagacacatacccagagttcaggcagcagcccatccctggatcaggagttcaatgtctcaatgtgcgcttgtgagagaaaccaaacaggactaaggggaaactggagagttgagctccccgcctttctccatggaagcgaaatgcaatctgcttgttggatccaggtgaagggaccagaaagacaatgcccggccctcacctggaaactgctggaatgtaacctgtcagcatgggctctcctctctgcagctacctgatgctctacctgcctccaaaccaagagtcttttccagtttgttctactggcatttgttgactgcctagtgcatactctaggaagggcaggaaatgatccatttgtctagcatgtgtacacttgtccctccagggcagtgtccagtctcatactgaagacaagaagacaccttcaaagtcacctgtagaattttaaagaacaataaaggaacagaaattcaaagtacaggaacggaagca

SEQ ID NO: 59297 - DNA, 1292 bp, Bovine  19866880402705
  misc_feature (1)..(1): n is a, c, g, or t
ntgaactttgcccccaggacccctttcttaccttccggccaaggcaaccaacgatggcaaactgcaggcaaaggtccctgtgcagcacagggtctcagccactgcctagtttatttttgttgagtttataggttccctttataagatgaggaaggacaggataagaaatgaggagctcatttgtattttaatctttccccaaatgtacttggacagacattactatctacattttatggccaagaacactgaaacttgaaagaggttaagttacttgcctgcagtcacaaaatagtaagtggtggaacgagggtggagaaaccaagtctctctggccccagacccatgcttttcccattacaccacttcagccggtcttggtcttggtcggagtcttggccaggggctgtggaggcacgcctggtgaggttaaactttatttgcatttttaatcagacaggagtctaatggcatgtctaggcttattggaggattgggggcagatttcaagcagcgtaagggcaagtagtgtctgggaggttgataatgaggcaagaagaattggggcggttgtaagaccaacttcgcctgctttgcatttttgcccagagctgcggtagcacctggggctgttgttcaagctgaaatagcagcacttccttggagttcctagcatctgctctctccaaattcatcttcctgcttggcagaggaggagagggaggcagttgcagctctggagatgtttttgagttgtcccaggtaatccttctctcgggatatttctggctagtacttccctttctcagcacttctgagaacaacaaagggatggatgagctcagagcagtgttgtgtctgacagtgttgtctggcctaccaggtgttgtgaaacagtcttctaataaatctccgagctgctggaataggatctccatgcaggtggggtggacctaacatagtgcctgacacagagagaatgcttttgaaatatttgttgaataaacacaagtgttctagttccacatgggcttttcttcaatggttctacatctgagagctatctctagttctacaggcagaatagagaggatctagatccattatgggcttccctcgtggctcagacagtagggaatccacctgcaattcaggggacctgggttcgatccctgggtcaggaagatcccctggagaagggaatggtaacccactccagtattcttgcttggagagtcccatgaacagaggagactgacgggttagacacaactgagagactaacactttca

SEQ ID NO: 59298 - DNA, 935 bp, Bovine  19866880487620
  misc_feature (1)..(1): n is a, c, g, or t
nacagcgaccccatgtaccgctgcgagtgcaagcctggctacgccggcaacggcatcatctgcggggaggacacagacctggacggctggcccaatgaggacctgctgtgcgtggccaacgcaacttaccactgcagaaaggtagcccgccctcacccgcctccagaaaccacatcaaggggatgagctgaggaattgcttaaacttggggaatggaactgaaagatcaaatcatccaaaggcagaggaacactaattcttattaagtcacttcatgccaagaacatgaatgggacaggccctttgggcaattgtgttccacagtcgattatgttgtccaaaaaaagttcatttctctaccaaatgccagcagagcatgacccatgttcccagcatatataaagtttagaacatttatacaaagtatttgtgtgtgtgtgtgtgcgtgtgtgcgtgtgtgtgtgtgtgtgtgtgtgtgtgtgtgtgtgtgtgtagctcctccaagcaaacttttttgtcttcccattgaaaatacttgctgtcacaaagtagtattcagttctgtctgcagtgtttcggtgcacgctttagtgcatgagctgagcaaaaggcttgcaaactgcagctgcaatgtgtcttctctttccaggataattgccccaaccttcccaactcagggcaggaagactatgacaaggatggaatcggcgatgcctgcgatgatgacgatgacaatgataagattccagatgacagggtaaaattgttttccattcctctttcagcttttgtgttcagcaacagcctgtaacccttaagattcaacaaaattactgatatctagtcatcagaaattattcattgtgattctgtagttttaagatataaatgttgccaagagaatttttaaatgagggttttatttttcatcatag

SEQ ID NO: 59299 - DNA, 892 bp, Bovine  19866880672268
  misc_feature (1)..(1): n is a, c, g, or t
nccaagggcatcaataaatcatttttttacccttcctcccttcttactccattcttggtacctccctcccttagggtatgcacagctatttggaaattcttggaaaatcgctgccagcaggctggctgctccaaacagttattggtttgttgtctatccagtaaatagaaaacttggaaacattttagagaatttctcaccttttctaccttccagtgtctgtagcaaggccagcctgggactctatgccagaatctgaacacaggaaataagcttaggaaccacctaactctgttggttcttgggcattcttgggaccggagaatgtttctgtctggccaaaaatactgaactggctgcaggccgtggagggcaaggcgaggacagctctcaagacagaagcaaaactgtaccctgtgttccgggtctgccgttaaaacaaaacaggaaaagacacacatctttcagccctgtgttaattctatgtgaagattaaatgctgtaaaggtcacacattaatgaaggaactttctccatgagctgccaagatgcggttgcctttctgttgagaaagttaaagttcattctctgggatatttgggtggctactcagttcaacaatgcagtatctttctttcttttcctttatatttgaccctgttgcccttaaccccagacaaggcaaatttctcctatttctgagattgtatcacacctggtttaccagaatggcagactctattctctttgggaagaggtggtatttggttccctcaaattgttgacgggacaaaaaaattaggaaatctgaaggccagctttactctacaattctttttatccgagcaacactttgaatcaatattttctgggagaagtaacatgtcctgtt

SEQ ID NO: 59300 - DNA, 1287 bp, Bovine  19866880779254
  misc_feature (1)..(1): n is a, c, g, or t
ngttattagcatcgagcctcactttcagtccctcagcatcatcagggatacacatgcaggggctcctgctaacagggggcgggtggaggccactgaccactttgcggatactgtcctgcagcgtggtcacgatggtgcgtagacccctgagctccaggaccatgctggacagctcgtcacatgagatgccacagatggcttgcaggtcctttgtcttgtggccaatgtagtcggtgcggatggcagggctggacccattcaccacgttgttgtcaagggtgacaaagacactggtagctgccaaggaacaaaggaagacagtgaggaaagtaggagagtatcttcaagtagatgctcccaccagccatcccctgggcatcctaagtgtaaaagacatttcattttgggtgagggaggcaaaaggaggggaccgttgagtgtggaaaactgtttgaggtcacctttatataaaggtaactatgttacctggggtaatttttgcacaatcaccattgcttaagtttctcagcttgttttgggtggaatgccctcagttccccatatgccctaaaaacagagggatacttacagctggagcagcctttgttcctgaggatgtcttctggtgtggttccaaagacaaaccttacattctgcagcaccccctgtgagcagaggatatacagtgtttgtagagtgttggtgggggccggggggtcggtgggaggggggactgtttacgctagaaggagcacacaacagatgttctaacatttgaaaagaactccctttcaagatcaccgtgtcaaaataacacaccaagtaactgttggtgaattgccaaattcacgggaattgcaaaataacttcaaaaatcttaattgtctcttctgccaagtctgcagtcttttacaaagaattcagttatcggcctacttggggatacaggaaatggaatctgatattgagaccagaggatacaatgacactctccagtgtcaaacagttaaatgtgggagtttcaaagccacagacggaaagatctagaggtttaagcaaggaagacactgcagcagcaaatagccactattttaatcttttctttgggattggttacatccccatgaggaagcaaatagccaagtggtatttatcctgctcataaaaagtatccacttcaagcaatattataattggtgcaatgcatttgaaattattttcttgagaagagcataaagagtatttaaggtttgaataggcagttacaggaaaaccatttcttgtttc

SEQ ID NO: 59301 - DNA, 2136 bp, Bovine  19866880792714
  misc_feature (1)..(1): n is a, c, g, or t
ncaccacatcttataagtgatagtccttcctctggagtgctctccttctcacccagtaagtgaccactcatcctcagaagctcaattcaaatgccacctccccatctctccaattgttcgtcattccctctagtgttgccaaatactttgtccagaagctcttatacttagccccatatgctgagattgtctactttaagtgcctgccttcatcaatatcctatgaaataattcagagcagtgatcatgtcctactcacctgataacctaggagcagcatccttaatgaatgaatacgatggaaccctggagcaggttttagtcataactaaacaacagaatcacccagaccccatcctcagaaactggctttaaaaatcacagatgcccagagccaacccctagaaatttatttaattctggaatggaaacaaggtattaacctgttgttaaatattacctgatgattctaatgtgcagagataagaagcactgtctaagggatagactcagtatagctttacatgccaggcagacctgaggcagatgccaaagagagaggtctgaaaatcaaaagtacacaaagtacagatgatcccataccagctaggtatgtctccaaataaaatactagccatgaaaaagtagtagagagctaaagagtaggactagcttgctctcaaggagaagacaatggcagcccactccagtcctcttgcctggaaaatcccatggatggaggagtctggaaggctgcagtccatggggtcgctaagagttggacacgactgagcatcttcactttcacttttcactttcatgcattggagaaggaaatggcaacccactccagtgttcttgcctggagaatcccagggacgggggagcttggtgggctgccgactatggggtcgcacagagtcagacacgactgaagcaacttagcagcagcagcagcagcagcaacagcttgctctcagtggtgaagaagaaggttatacacaagaaggaaaagtgggatgggtagggaggtaaaaggacagtctggagaaggcagtgtcttcattaaaatgaaattcaagaggataaagcagggctagagcaggcaggaaaagaagatactttctgatattattttcaccatcaccacataggctatttttttttataatcctaaaatagagagactagtaaaccatctaattcagatctcaaacttcagtaatggagaaggcaatggcaacccactccagtgttcttgcctagaaaatcccagggatgggggagcctggtgggctgccacccatggggttgcacagagtcagacacgactgaagtgacttagcagcagcagcagcacacttcagagtgcatacacctactgcagggcatcttgttaaaatgcagaacctgatatagtaggtctgggactctgcagctctaacaagctcctgagggatgccaatactgctggttcataaatctagtctacagtcatgatcttcagtaactcatgttttcattttattcaatttgaatgatgcagtggaatcagaagttcccaatacttgacaaagtgataagttcattacaattaaatatcaaaactctccaacataccattgttcactttatactactaaataaaacagtagagaaagtgttattttatgatagagaaaataaccagggggaaaatatttctatgaagtctaccccaagaagaactgaattagggagctacagtcaataattttttaataaactataatgaaaaataatttcaaaaataatatatgtgtatatgtataaatgaatcattttgctatttatttattaccttgctaacctgaaacactgtaaatcaactatacttcaacaaaatatatattaagaaaaaaaagaaaattagttgagagtaacttgaaaaaataaattcatcagatacgaatttactatatactaaggtcttacataaaacgggaattaacactgagaattcctaatatgccaactgtgatattttgattaaagaaactttggagggttggcttactaagagcatctgagaagcaattagtagacttggaaaagtattttacatgataactaggaggcctgaaggcacacactatt

SEQ ID NO: 59302 - DNA, 1774 bp, Bovine  19866881143341
  misc_feature (1)..(1): n is a, c, g, or t
nattatttttcctttgacttaattttctgtgtatctagctaaataaatctttggaacttctaagcatttatcctatcaatattattttgggacgtggtcaaacatatcagataatctacgaattttccaccgcccccttttttatttcctcccagagacctccttccatattccttcaccctcttgctccaggatggactgattttattctaaggtctggaaatttcatatgttaagcctttggtttgatgtttgctgaggataacaatcagtggaccatttctaaatcctagcgaattgtttatgcattgcaaggaattttatataagcagtttttgaaggtgtattttagttatctggtatcatataaggactgctttcattttctagctgtctagcttcacatagttgggtgaaggaaatgctgctagtaatggataaagtactacatctggatacctgaaatgtctagtgattaaaagtaggatttgctaatatatgatacaactcttttttttctttagaaaagctacaactcctatttttttttgtcatgcacattagccttaaggtgaaatacctgaattttgaatcccagatgattattaagaatatattcccagataatttcttgttacttttaaactcttaatggtacttgccagtatgaaacttggtttttaatatatggaagttaaatataattttaaaacatgatatattttaaaagcacgatatgaagttctttttacatgctactttttgttagctacattagaggcattacacagttatggggaattaactatactagttccatgatagctccccaccaatactttgtaaatgcagaatattcggttaattcttactgtgtactacagattagaccaataacattgttttactttattgaagtaaaagttaaagtcgttacaagtcatgattaggttttcttatggggacttcttgttgtcagataattcactcccctgtaaaggaggattaatgttatcatagataatgtactatgtaaatcaggtacagtgctaattctttaaagaaggagaatttttttcagtgtctttcaatatatttcaatcatgttcctttccaatcattgttgcaattcaggtggcatgctgttcagttgaattcttgtagaacacatagctctataattttgtttgattaattttgtttcctgagaacattactggaagagaaaaaaaatgtttttaaatctttactatcttgtttgaaacaatcaatcctgataatgtttacaaacagagattaaatgatcaaatcctcctcccagagtgcactgctgttgggatgcccctggcctctgtctagacctgtagcactgaagccactgcacatctcaggatgcatcaccccctctcccttccttctctgtcttccgtagtattgtccactgaaagctgtagacagacataggagtggtgaatccccaggggcaggttaatccaccctgtttgcctgagttaaggaattgggtggtgatagggttcatacccagaaatggaggaaacagagaaacaccaactagatattgtggcagaatttcttgctttctatcaaagaagtggttacttactaaccctgcttgatgccccaagacttaaaaaattgaagggtttttctaatatcttcatttcagcccaaggttattactatatgtgaagtgttagtggttagtttggtgcagtaatttgtttccatcagtgtcatgggacttttcctggat

SEQ ID NO: 59303 - DNA, 2621 bp, Bovine  19866881367372
  misc_feature (1)..(1): n is a, c, g, or t
ntgtgtgtgtgtacatatatgtgtgtgtgtgtgtatgtgtatatatatattaggatttattcccaattctccctctcttaagtcgtctttctgaccaaaggcatagtcactctccaaaatgtggtatctatagaatttgacccagcttttcaaggacactttgtctttcactaacatttctaaagcttcttcacagcctggtgtcctcattcatgggtcggaagatgtagctgtgagtatgtgcttcactcctgttttcctttttattttcaggaacagaactgggctttgaaaaggattcgataaatgacatttagtgacattagtaaaatataaacttatatccttttgagtctcacatcttgtgggggtggtcatttctcattgcttgtttttagtatgataggctaatttattttgttcttttattccacaaatccagcaaatacgtcatctaagcaactgcgtcttaaattgtaaaggaactgtgaacgttactgttaactgtgatttctttttgtgtatgctctattggcttaaggatacagtttacccatacctcataacataaggccagaaatcaaataaacacggatacagtaagtataaatataaatttccatatgatttattgttgttccttgtacataagaaacagtaatatacaacttacactgctttagaatgtaaaatggataaaaatgtgtacaaaaaagcacattcctagaaaagtattggcaaatagtaaaaacagggaggagggtaacaagcaaaaaacaaatcaacaaaacaaaaaacgaacaattcttcaattcagtgtgcaaacattttataaaaatagaaatactaactctacaggcagtatttcctgataaattatttaaatagcatatctacacaatctgagatatctattccaaaggcattgagaaaataatttataaaaataaagcaacggtatacaagatgatagaaaaaaaacaactttcagaaaacgtatataacatttcaatgctatttccttactgggaatacttttctgcaaagaatttttatactatgtacaacattgatttttttttttttttttttaggtactacagtagctttaagtttgttagacacttaaactctttctgtttgatcccaaaattctttactcagtcacacaacaaatgaggtaatatttgtatacaagtttcacctttgtcatttttttcttttggaaaaaggcaaaaataataaatgtagatgcttttcatctccctggaaataggcacaagggatgggataagacagtattaatggcctcttggctttctttgcaaactaaaaacacttgcaaatggacaaccaagtaattccacttggggaaaaaaaaggaaaaaagaattccaaatcatccagtctaagcacaaggtgaagagcagcttgctatgctggtttccttgtgccattcctgtgaaagatttgctgatcgatctcaactacctgctctcaaacactttccatatgaaactagattccaggtagaacagagttaataaataatctgtatttacaatcttacagtcataatgacttgtagcaaagatgatatggatagtccttacgcttcttcctgttccatgaatagtctttcagacagatcccccagaataagtaaaaaataaatagtttacattgtaaagtgtttgtttaaaacactaaaaactacagtccaaaagagacaactggaaaactccatgatgttcaggaaaaaaagagaaagaaggaatgtcttagttgataattttgtgcctttctaaccataaaaatacaagcatggcttgccgtcccttgggagacagcctggtgctcgctgagatggtggggtattcttattttgctgctacatctgcagaagctacatctggaatacaactgacaatttcaatagaaccaagctgcagcagctggccctgccttgtgtcggtttaactccgactccctgttctggtcactacaggtgatgtgttaaggggtggaaatctgggaggaagtccagaagccagtcttttccttccttccctgctcctatttaagtgcctatttatgtgggttaatcagctaacaccggtcagcatcatgaaatccagcaatagtctttcaatcccctgaaaatgatttagtaccaaaaatgtaacagttcctccatattttcttcatacaatcatctcttgggtatgcatcctcccctttgggctttggccccccccacccgcccccattccagagggagtaggtcagggctggttttgtttgtcaattctagtgagtcctcccttctctcacatgcctgaaaacattttggagtccactgctcagagctggcctcacagtcgcattctgctctgacaaaagcagagtgggacaggcaccttccaaccaaagcatgtggatgcttttgcttttgcaaaagccaaccaaagtcattgtttgtctccttggaagattcttctcagtcagaggctgaatgcagggtctgatttggaaaattgcattttcttgaggcaagtcacatgttctaggagtccacactcatgcaagcagagagcaaaggcaggcagcgaggcgcgatc

SEQ ID NO: 59304 - DNA, 1577 bp, Bovine  19866880490897
  misc_feature (1)..(1): n is a, c, g, or t
natcctccaggcaagaccactggagtgggttgccatttccttctccaatgcgtgaaagtgaagtcgctcagtcacgtctgactcctatcgaccccatggcctgcagcctaccaggttcctctgtccatgggatttgccaggcaagagtactggagtgggttgccattgccttctccgaagtcttactaaatagtatacaaaagcttgggggttccgcagtggctcagtggtaaagaatcggcctgccaatgcaggagatgcaggagacatgggttccatccctgagtctggaagatcccctggagtaggaaatggcaaaccactccagtattcttccctggaaaatcccatggacagaggagcataatgtgctacagtccctggggatcgaaaagagtcagacatgactgagcacacagcatgctagactcattacaaaggcaccagagaagccaactactggtcatcttttcctctctttaaatgcaattctttactcaaatcacaatagaaacaattttaatatatacaacataatacgtagctaacgatatatataaaaacaatattaaaaactagtagccatgagttttgtcccttactctattttcaatctctatttaaccaaatttttggctgcctttctactttcagggattgcttataattttctctcacctcctgtgctcttagattgaagagctccaggccccaagaccagagctgatagtggctgacagatgtgagcagcttgggcacaaaagtccttgtggacattcttcctgctgtcttgtcaattttcagcccggttgcttgaagctttgcctcgtgtagatgcctctggccaaaagagacgtatctaatgactggcatgctagccactcatgcccaatgaccccattgtctatgcaccttcactggtgtgtcagagaggagggaacttttctcttctgggtcagaatgcacatgactgaggcaagacaattttacaactgtcatctccctggtggctcagatggtaaagaatctgcctgaaatgcaggagacttaggtttgatccctgggtcaggaagatccccgggagaagggaatagctacccactgcagtattcttgactggagaatcccacggatagaggagcctggtgggctacagtccatggggtcgcaaagagtaggacatgacttggcaactaaataacaaacaacaaactctatccagctctactacaggctgaattcactctaaaacaggatcaagaagtgagtttgaagtgatcctttaagtgtcagcctcgcagggcacaaagaaggctagtgaaactggaaggaaccaaaggaaaaagttcagctcagggctccttacagtgacattcaaaccagcttttcctaatttccaataagtaaaggattatctttgcaacaatgttactaacccagttaattaagccctccaaatccttcattgtccaattaacatggtcacaactttgcaaagccctctaactccaagatgcattcagatcaatatgcccttaaagaattcatggatttattttctctagatttttttctca

SEQ ID NO: 59305 - DNA, 1309 bp, Bovine  19866880641925
  misc_feature (1)..(1): n is a, c, g, or t
ntgggttgccatcttctcctccaggggatcttccttgacccaggggtcaaacctgtgtttcttatgactcctgcactcgcaggcgggttcttcacccactagcaccgcctgggaagcccaagaattgtcttacacaccagtaagtactttatatgtcacccttgcagacactaagagagagacattatttctcccacgtatgagagaggaagctaaaaattaggaaggttaaatgattgacccactcttagacagttattaagggacatattttagatgtacagtaatatctttcaggaccataggaaatgaacactgagccatatgatttctaccttcttcacttgatttctaccttccactttcctaggtggtacatatagctgtcatatcaccttcagagtgctccctgaaggacaaacacacaatgtctccgtttcagacgatcaagcagagagaaagccagtgctgtagaagagcatctgtcctccacttcactggtctgtgcagtctcatcagaggaagcttgacctgcatggggagggacggctgtgttccttgaagtctccagaaaagtattcctttctgcttatgtcactgtcacattcagggtcactgactcaggcacatgatttgtgtgtttcaagtcagagaagccaatagaaacacaagtaggaaaaatcacagatcatttgtacacatgtatatttttaaagtcctaagagttgttcactgattatgtgcaaactaccattcttcagaccttcagagttcatctgctcgatacatcggcgatctcagccaaagtctatttttagaaatgcattgtcattctcctcccgttgtgactttgtgtttgccacgggcaattagacacaacctaaacttattgcaagcataaattaaaagcaggattacataagtttgttgttttctcatactgtgcagttgcttctatacccaataattaggaggggaaatgggccactggagattggttttgcaaaggcccgcctgttctggccaatcttacctggggcaagacgctcttctggggacaaaggaagcaaattcaagaataacagttggtatttaaattcatggggcttccctggtggctcagctggtaaagaatctgcctgcaatgtgggagacctgggtttgatacctggattggaaagatcccttggagaagggaacagctacccattgcagtattctgacatggagaagcgaagaagaactaaagagccttttgaggaaaatgaaaaagagtgaaaaatctggcttaaaactcaacattcagaaa

SEQ ID NO: 59306 - DNA, 1617 bp, Bovine  19866880808651
  misc_feature (1)..(1): n is a, c, g, or t
nttgctatgccaacctggccggtgcagggcagaggtcaacagacactggtaggtcggtcctgacatttgcatgcaacttgctttgttaccagagaaatgagtgctgggctgagaagcagtatgttacggttcgacacgtggcacaaaccatgaactacgttgccctggatgctctctcaacactcttcaacccaatattatctttaattaacaagatcaacctcttagaatgttcaaatttctttcccaagtctccactgtctctgtcttggccagacctgccctcctggattgctgcaaaagtccgttaatttctttctcctattaagcctcctccaacagtcttaaagttttcagagagatagtctctaaaaactttgaccttattcctctgtaaccctgcaaaaatgccttcagcagcttaccactgcccacggaatgaaaactaagcctcttactttggcataaaagatcctttatgaccctttatggtcaggattctcccacttgtgccatgcacttctccccactgagtagtaaattgctcgcggttctgtgagcacattgtagtttgcccttgagatttttctactcactgtttcttctgtgagatacgcacttccctccgccttgtaaatttccagcactcatctggcttggtacagtcatcacttcctcttgggtgtcttattgaagatcttccctcacctcccagtttatcggttcctgcctggtctttccagagccatctatgcatttctccattctcagccctcctcactttctggcattaatgttcttttccatgttagtggacctcatcagcttgtttgtagtccacagctgccaagaagcagaggctcaaaagggtgtggttgaataaatgggtacttattccagttgagagagtggggaagacacggaagttatgaggaagatctcaactggaggctccccgagttccaggttctccacagggactcaaactgttagcaggagaaagggcacttggaaatcccacatgagggaatctcattagtttcattaattcagtgtcatcagtttcattagtcaatagccatactgtttaaaaggctgctggttccaggaccatgatgggagcctgagtctatgccaacatccatgccatgcacagcctccttgatcgaccaagccttgccatgaaaaaatatgccaccccaatgtgacgaatgcattcaagcacaaacccctttcctcactgcagaatgaaaacacactttttgtggctggcagaggtccttgggccatgcttctggagtctcttctgactgagtttaggagaacaggcaggatcttagaaggagtcaattttcacctggtatgactgcttggcataaaactatcatttgtttactttatttctccccatggcccaaattaatatctacctccaggctttaaaaaaggaaaaggagagaccatgcctagaaataaaactaaatagcacagagtttcagccagctctgtccctccttgtcttcgtgaccttggccaaatcacatcctttccttttgcattagaaggactgattaatccctgtcccgtgttctttcgtggcatttgtgaagattaaat

SEQ ID NO: 59307 - DNA, 1840 bp, Bovine  19866881041017
  misc_feature (1)..(1): n is a, c, g, or t
nggtgcagtagtaaatctgttcaaaaagtctgtcagaagctaccagtccctggctttttttttttttttttttgctttatctggatttcaagcagttacattttgctttgtggctatccttgcctgctacataagtttccctatttcttgctcaatgtcttgaaagcattttccaactataaaatgtgatttttctcatggggacagcttgtatattctgagaccatgtttatatgcataaattgaagtagaaaatagagaattttaagtcaaatacttttgacctttgcttgcagcaaatcagtctttggatttgaatgatcatggttccaattatgggtcttccttgtagctcagctggtaaagaatttgcctgcaaagcaggagacgctggttcgattcccgcattgggaagatccgctggagaagggataggctacccactccagtattctcgggcttccctggtggctcagatggtaaataatctgcctgcaatgtgggaaacctgggttcagtccatgggttgagaagatcccctggaggagggcacggcaacccactccagtattcttgcctggagaatccccatggagagaggagcctgggaaatagtttcccttggaataagctttaaaaatactcctcagtaacaatgagctttgaaggacatgtaacattttttaaaccagtcttttcactttttttttttttttggttgttaatatctgtgttaacatctactcatctgatagatggagcacagctgtaggtattagctcaggaaagaagttgtggatctagactagaatatatgtttccttgtacaaagaaagtgaaatgctaagtgagcatgagtccattactcatgtctaattcaagccaccaagagatctcagatgcagggcttaagacaaaagcaggaacaaaaaataaatgcaggaatgtgtgtgtgtgtgtgtgtgtgtgtacgtgtgtgtgtgtgtgtaaattgttaggttttacattgataaaagtcaggtgtaattcttaacataaaaactactttgatgttactttgaaaaacatattaattctctttcatttagcaagcaaatatttttttctgggtaatctctccttttctttttttcactatacatttttctaagccagtaccactccaaactcgtattgtccatttatttaacagttcaatcaatgaaggtatttatactgatttatattgatgggcttcagtggttaaaaatctgcctgcaatgcaggagaagtggattcgatccctgagtcaggaaaatcccctggagaaggagctggcaacccactcgagtattcttgcctgggaaatcccatggacagaggagcctggcgggctacggtctatggggtcacagatgagtcggacagggcttagcgactaaaacaacaacgacacatttcttgtagggaaaagagaaagcaagcaaccacaaaatttatattgatactgatttataatgcagatcactgtttccctggtgatctcctgagctgtgttcaatgttttatatagcctttctaaggatcacaaaattatttgagaaatttggtaatggtaagagatgtgcattatcaaagtgaagaactgagcaaatggtaaaaataactgacaattacagatagaaaaagaaagggaggagtatatttccacgtaattcagattccaggcaagaagaatggtcatttatagaactctctggaaaattactgttgtactttaattcattcatatagtataagctttgacctcattgatagttcatactacatacctatcaattatgatcaaattcagtaagta

SEQ ID NO: 59308 - DNA, 682 bp, Bovine  19866881507384
  misc_feature (1)..(1): n is a, c, g, or t
ncctgtctctttcctgcaacaatctgttgcactatcttggataattttagcaacagaattaactttcaatttgttgacactttacccaggagaaaaagtagagaaaaatgagacatcaaaattaaattagttccaacactgatattctaaccttaatatcaggtacacagtgtcctcacacccacggagccaagagttaatcaaattcctaataataaaatctttttcttcaggtcacatggattactcatcagcagatgaaaccgggtgggagaaaaacccacccagtgtcttctgatgcagacatgaaaatagacatatgccagctgttactctccatcggctttaggagaggctccattgagggggagcatgttctctgcaggcaaagtccttggacctctgaagatgtaacctggtgcctgccctcagggtctacacagtatgttccagaaacggataaaagaaaaattccatcactgaataggcaagctgggactggaggtcaagggaatggggacacgtgtatgtcctgggcaggcaggaagtcttcttagtggaggggacgatgctgtgagcaagagaccagttcaggcagtgagcagtgttagctagctcactttcctaaaatctaagagggtggaacgcaaagggtttcccctgagcatgacaagtctccaag

SEQ ID NO: 59309 - DNA, 718 bp, Bovine  19866881861621
  misc_feature (1)..(1): n is a, c, g, or t
ntttagatacacttagaagtgacagcacctgtgtgtccagctgtctctgaaaaggaggcttcatttatcagaatggcttccaaattgctctgttttgtgcaaccgtgacccacaggttcccatcagtgtggaagctgagtggtgtggggaatgcttcctggagtggcttggtttccactggaaactccagaataattttctggtggtgagcggaggcccttatatgctatgatcctttgaggggggcagtggttgctgatgttttttaatctcagcctcaagcatgttttggaaaccagcatacgattaatttcccgattgctgcagggttgttttaggacttttttttttttttttctattttaattttattttaaagctgggacactgcaaagctctgtaaacaaagtaatcgatcagttgctatcagcagttcttgtgagagggcagaataatttgatggattccggacaataggaaaagaatagtgcaagcagcttgaataaattaatggacatgattataagtggagactggggtccccacaggtgttcttaaaggagaacattcattctggctccgaggtgcctgcatccctcaggccacatggagtcaattgtgggtggatgcttctcatttatagcctccagtccatttttgaatcttcttgcttttgcaatctgatgctttacctggactgcaggtagcagagatttaa

SEQ ID NO: 59310 - DNA, 3050 bp, Bovine  19866880647669
  misc_feature (1)..(1): n is a, c, g, or t
ntttagggtttctgtgaaaaacttttaacattttaatatattaataatttactaaaaacatctttgaaaacaaccaaaatagaaataagtacatttttctattggtttatagaaattaagaatctcttaaatttgcacaaatcttcttagcaaacataacaatttcatatatatctcatttgagattaagactataatcacagttaactgttcttaacaactaagtaaatgtgcccctattaataatcctattttaataaatttgtgtattaagaaaaatatttctatttaaatattatttctaatgaacataaattgggaagtagaatattaatgaaataagtcctcttcacatatattatgattatacactaagttatcacatcctaattcaactcctagatcataattaataatatttaatagttggctatctgatgacattaaaagaaaagcaatttctcacaagactggagtctgaaatttcagacttaataatgagattggtcatgatatagtgtctctaagataaacagatgttaaggtacctggtatttatgtctcaaatattcaataatgactgtgattatctacaaaaattccatttaattacacagaactctgtttgtttgtttgtttgttgaggtaggagaatttcaagtaatcacaggtcaataaataagtgatgaacaagaaggtaagtaaaactgaatactgatttaaagaacaaggacccgtgaagcatttcactgaagccacaaatgacacagcagacagatttaaaatggaaaaacatagataaaagacacagaaattaacaagattctctaattagtcctatcaataaaaatactcaccacataatacaaagttcagtgaataagatcatgagaaatgcttattgctttcttaaagtcactctcatttatcttagaaagaagtggctactagaagggcaaatcatccgtagggtttttcaaatcctcccagtaccaacaataaagaaggcctcttatatttcttggataatttccctctgcagatcacctccccattcccactcatcctgggttctccaagcctaaccctgatacactgcttgacgtctcacttctccagcattactatcagggcatggaggggctggctacaagaacgaacagacatagatagaaaggagagggctttgctaagtgtctttagaaggcaataggggacacagaggtgtgggatgggtgggagatgggaagttcaagggggagaggacatctctggctgattcatgttgacgtacgacagaaacctgcacagtgttgtaaagcaaatatcttgcaattaaaaaagaaaagatacggcaagaaaacgagatctgttttcaaatttctgtacctaaatgtaataaaatagtactcttgcaaggaaaaaaaaaaggcaatggggggaatacataaatctatatgactcacttgagtacactataaaaagtgcctttgtctgatggtgatgagtattgtgctcacaatgctattttaatgaatatattacacttttaagagagaaggttccaatttcttggatagcatcctcccttatcatcatgagtggtgcctcagtgcagtctctgaggaaacatgagttttcccccagacagaaatgactcattttactggtgcctacaagtttatggacctatttctccctagacaagaggtcagtgaagtttctctgtaaggggccacacagtaaatactttaggctctgtgggccaaatggtcactggtgccacagttccagtctgccaccatagtgtgagagcagccacagaaaacatgtcacatgttcatttacttcatttacagaaacaagcatcaagctggattttagcctctgggccatagtttgctaatctctgtcctggaccaaaagccttagtcttataaaacctctttaactcttgttctaaatggaaatcaagtcactatgctactcataatttaaagtttcaatactgagaaccagtccttcttcgtagaatgtacaacaccgtgctaagtttttaaagcaggagaataagaaaaagggaaggaaaaagaagttattttagaggaaaatgaagtttagaagactgcttttgagtgactgaacacacatgcgtgcgcgcgcgcacacacacacacacacacacacacacaaagggaaaacagataactgttgcttggtaacagtgaaagagatttatataccgttgtattttactgccatggtcactgttctctagctctgatttaacaaaacactgtgttaagtagtgttgtgattcattaagtggaatccccagatcaggtgaactgtccagaagtgaaatatacaagttcatattctgatataatttcatcatctcacatttctttcgaaaggacaagtcctccttagtttgaaaaaatactctataacaatgacactgatgacattacaagtgattcagataaacaaaaaaaagtcacagactggggagaagatatttgtaacttgcatctgatgacttagtggtatctaaaatatcacaagaactgttacatgtcaataataagacaaacagctcaattttgaaagtgaggaaaagatttggacacacttcacagaagaagatatatgcataactaataaacccatcaaaggatcctcatcacccttagtcataagagacatgtagatttaaaccacagtaagataccgttacacacccattaggtctaacacttaaaaagccaacagtaacaaatgtcagcaagaatgggaacaactggaactctcatacatgccggtgggaaatatacaactacttttgaaaacattttagacattttagccacaacagccaatacctggatacaacataaacttgtccattgacagatgaatgaatacacaatacagaggaagctcacagcaggaatattcatcagcaagcaacaaactgctaacacatgcaacaacacgatgaatactctaagcatcacgctaagtgcaaaactaaacacaaaaggcca

SEQ ID NO: 59311 - DNA, 1840 bp, Bovine  19866880670173
  misc_feature (1)..(1): n is a, c, g, or t
nattaaaatactattatgaaatttggatgataaaaaaagtgaaagtcactcagtcatgttgaaaagggaccacaatttaaaactagcaatctttaatacaagatacataattttatccacagaataatttcaagaatgatttttcattacatgtaaatacacgatacaattaattatctttactacgaccgaaaaagaatgggaagtcagaagtaacattcaggggagaccacacccacctttaatagtcgctgctgttccaagacgagaggagccagatccaatctgaaaacatgacatgaagtaaacacaatgctagccacgccatcagcacagactagcaagaccatcagatgaaattatactgtcagaacaagtcatcagtcaccttcaccagaaggccatgacacatcagcgccacactcggctgcagcgtgtgcggcgcacccagtgcacacaagccggacacaagcccgcgcctgctcagggctgctgagcccccagggggagagcctccaatcgcagacaatctgggtcaacaattgttatcagtttcctattgcatcatacacgttccagtgataaacaaagcaaaactaggtgtcaagtttacctgaaataaatgtagacttatcagggattataaagggaaagtttggaggataaaacatagtaacaaagagcaacctaaatcttcctgtcaaattcttagtgcatcaatatgtactttcctgagtttcaggcagaaagttctttgtaggctgtgataatgcattttttaaaaatagtaataattttacaaaaaactaaggcatttaagaaaaaggaatttttagcacaaactctataaacagaacactattataaatctgtggggtttttagggcttatactcaagatggtatacaatttccctaaaattttataaccatcatatattatactattataacaatcatataaacaaatactacaaattccatgaacacattaaggaatccaaatataacaacatgacagttactaaatcaacaagtctgagtagttcttgttataacctgttttcaagggattcaagaagagaacagtcaagtaaatttaatatctttatactaaaaccaagaacattcacagaatacttgcattttgccaaatctttcccttcaactgattcaactgaacagaagtatacaatgagaaatttggtaaaagtatagctaataatgactttaaaggggcatgagggactttcttggtctggatggcaattaaatgggtgtacattttatgtaaaaacatactgagcctatacacttaatatgcatacactatacatatgaaagctatatgtcagtgaaaaacagcaaaaataagcatatgcatataggttaaaaccactaataagcagtatagacaaaaaaatgagctttgcaatatttttgaacaattaagtttgattctcctgctttttcctgatatgttttcaagtagccacaaaaagcactgcaatagacagggagaagaagggcccaaaggcattttactgcaaaaagagtttcattctaaacacacctgctaaataaataagttaaaaaaccaacaagttatttttctactagaataataaacacataactttctacacagaagcttacaaacaagcaagcacaccagaaagcaccatttcgtggcatccttctaggaatttaaactttaaaaaaagttttttgaatatgcatacagtagtcatttgctcacaacctccaagtgtttcctttttctctccttaacaagcctctcattttgttcaaatgttggacatatatcttctgatttatga

SEQ ID NO: 59312 - DNA, 1436 bp, Bovine  19866880698381
  misc_feature (1)..(1): n is a, c, g, or t
naaaaagcttaataataatattaagagttgttgaggatttggaaaatcaggcatattgctgacatctgtgtgccctgatgaaggcatttttcaaggtaaattggcagtatctttcagaaattgtaaagtacacgtgctccgctttaacagttaatttctagaaacctattattcagaaatatacatgtgcgcaaagacatgtgcataaggataaatattacaacattaactgtaatagaaaaacatgttgaagacattcaaaaatacaccaagaatttaattatggcatgaaatgccatatagttgttagaaggagtgggataggcttatatatactgcatgtgaaggtttctgaggcagattaagagagcagagcaagttgcagaacaacatgtgaacattctacacttatgtgcaaatatattttcatacacacacacacgcaggcaaatatataagaaagggaactgaagtgttgagagcagttacctctgggtgggaagtcatcctaggaggaggtaggagatgtcatctcatttaccagactttccactttctttcccaactgtgctcctctctgcaggaggatatattcccacactgtcgacctcaggaatgccatgtgacttgctttggccaaagaagtgatgttggtcacttttgtgcaaagttttagaagtcagggcctcatttgtcttgtcatcttctgccaccagattgacagtgttccagatagaggctaggcttttccatcagctttggttctggagtgaaaaaagcaagaagcagagcttgtagccaacttgtcaaaaacatgtgctgtgaataagaaataaacatttgttgcaataagccactgagagtatgggtggcggtgtgtgtgtgtgtgtgtgttactgcagtgtaacatgtcctactttgactgatacaagtaaagactacctctacaggtttccattgtgtatttctctactgtataagcagtttgcaatatatatactcatatattacttgtgtaatagctaatttttgaaagctgacttcttagtaaaattacaaatgactacatgtcaaggaccttcaggattgttgattattgatgaatagagactgcaaagctaaatcttggaattccaagggcaatgttccatgcttgcctgagatctgcagaccaacacaccacggctacagcctgtgtaagcacactcagtcacccaatcgtgtccgactcttcgtgaccccacggactatagcccgccaggctcctgtgtccttactaaaggtgggttgccatttcctactccaggggatcttcccaatccagggatcaaactggcatcccctgcattgcgggtggattctttaccgctgagccactgggggaagccctggcaatagcctgtagtgctgggaaaaggtacaaagtatgttatcag

SEQ ID NO: 59313 - DNA, 1905 bp, Bovine  19866880729098
  misc_feature (1)..(1): n is a, c, g, or t
nttctaggtgttaagttcttccttcatttctaagtcttcctctgcctgtcagatcttgcctttggatacctgtcttgttgccccaagtccttgtcttctaaacttgccctgtacctcctctcaagaatctcaattctgtttcatcagttccccaaaggcagaggaatccagacctgggagacagcactgagcttgaggtcttactataaataatacattttcttttaaaaattttatttatttatggctgtgctgggtcttcattgctgtgcaggcttttctctagttccagggagaggagctactctctagttgcggtgtccaggcttctcattacaggggcttctctggttgaggaacacgggctttaaggcgagtgggcttcagtagttgtggcttctgggctctagagcatgggctcaataattgtggcacgatgagcttagttgctccgcagtcacgtgggatcttcccggatcagggatcaaacccatgtgtcctgcatcggcaggaggagtctgtaccactgagccatcagggaagcccaacacattttcttaatgcttgctaatttcccaatttttgtctgttcctgggtttccaaggctgcacagcagctgcccattggcttacattttctgtgttgaaccatcctgatcctggctgccttcctggctgctgctggtaatgtagcctccaaatattgtcttctggatgcacattcatcacaacaactgagtctgccttcagttccatggttgtatctcgttctggtctccattcttccagtccacctcaccccattacagctaattcttttacattaaactacagcagatatttgttgatgtggaaactgatttggtattggaattttatccttgtttacatttttctttgtgttggaaaagcttgggatcacttccaaaacctgctcagagagctttcctcttttaggagaaacaaatgaacacttgacaaagccgtgtgtctgtgacaaaaactctaggccactcttttaattgtaagattgcatattttaccttaattttgttttattatattaatatattttaattaaaaattaaaaaaaatttgggccacaccacacagcatgtgggatcttagttccctgaacagggattgaactcatgccccctgcattggaagcaaagagtcctaaccactggaccaccagggaagtcccattaatacatttaaaagtatattttggccagtgttcattcaggtctcttaatttcaagatatgttattggactttcaattctttttgcttataaggaaatgaaatcaaggctggggatggtgttctacaatgtagtctcaacttttaaggtatgttagaatcttctggaaaagtgttagttgctcagttgtctccaactctttgcaacctcatcgactacagcccaccaggctcctttgtccaagggattttccaggcaagaatactggagtgggttgccatttccttctccaggggatctgcccaaccgagggatccctacctaagtctcctgaattgcaggcagattctttcccatctgagccaccagggaagcattttctggagggtttgttagaacagaaatctaggtctcacacccagactttctctggagtgatgcctgagaatctgcatttccaacacgttctcaggcaatgttgacacacctggtcctgggatgacactttgaaaacaactggttatatgtttaaatgggccccaggtgacctgaagcggagcagttattgatcagttcaaattcttatctgaatgtgtaaggtggagagtactgaaaaataaacttccaaagttcagtccatgcagttaggatgactgctggtgccagaggtcttttcaactccatactagaactcaga

SEQ ID NO: 59314 - DNA, 1446 bp, Bovine  19866880753305
  misc_feature (1)..(1): n is a, c, g, or t
natggttggtgtcatctgcatatctgaggttattatctgcatatctgaggttattgatatttctcccagcaattcttgatttcagcttgtgcttcatccagcccggcattttgaatgatgtactctgcatataagttaaataagcagggtgaccaatatacagccttgatgtactcctttgccaacttggaaccagtccgttgttccatgtccggttcttcctcagtattacaatgggggaaataatagtaccacccctcatagagcagttgtgagtattaaaaatgtgatgcatgagaagtgctttaattcagtggcagacatgcagaaactgctcaacaaatggtgtgtattgaagagtggcatatataagcagactgtccgagaaagagagacagtatgcaataaacacattcctctagagagggatgagtgtactaagctataggagttcgaagaaaacaaaggcttctttctgcccttagaaaacaccccagtctcctggaagagacaaagcagtaaacaaacaactctaatgtgatgtgacagagcttgagcagatgtctgcttatacttgtcaaaggatttttactcagcactgcccctgacactgttgctgttggatgaatattagtttctatcccactagagaatcacaatgcctagtacattctccttgcagtgagtggaagattagtagagtgtccctgagtatctggatttggttggtcccgttgccaaaaactaccacttaaggatccaagatgtgtcttccctctctatgcgtagactcagaggggcttcagatcctcagatgcttcaccttggaagacccggggctcagcagcatcttagaaagcacacaggagccagctacctgccccaagcctataggagattaatgacgccatgtctaaaaagagtgtaaattattaagtagaacattaaatatgccagttttaagtgactgaattcactgaagtcagactttaccattttaaattgttattattgggaatacatatctttagtaagcacatttccaaatagcagtgatgatagaaatgcaacaagcattattcttcgtatgatttcaagacatttccatcccatcatctccctaacctccaaaatatactacggtctacgatgagttacagaagctctctgagctattgttttgctaactaaagtcaagaaaacttagatttttagaaaacatttatagagtaatggcagtaccttgagtgtcacaaaacaagagagggtatcattattaaatagcataaaattaaagttaatcaaatagggaaaaaatcaaagttggactgattcctcacagctaaccaggataaattctaagtagatataatatctaaatgtttaaaatgaaaccatcttgtccttttagaagaagctaaaagcgagttattcatcatcaagtag

SEQ ID NO: 59315 - DNA, 2086 bp, Bovine  19866880761178
  misc_feature (1)..(1): n is a, c, g, or t
ntggaagatgtgctctgttctgagtcctcggatccaggacctcactcaggagggagacatctgagtcacggatgtgcgagttgcagaatccagcctctgtctgtgaggacgaagatgtgctaggtgctcactgttcctccagcgttctctttctcttttccttctctcctcctttttccccatccttcctcgggtgcgaccatgattctgtgccctggcggaggaggctgacgggaaggaagctattgcacagtggcttccagcacaaaggcctttctgttcttcccactctccccctcaggctgcttggtggcgtctatgaccctgctcacctgtgaccgtgctgctcacgaggcagtttctcatgcctccccccaggtttctgagcttgggacctgggtgagacccaggtcatctcttcctccccctgggagtaccatgcccctgcaaggaggccacgtgccccagatctcaccgtgggagccaggctgacccactgatcgagtttagaaccatcccagaggctcgccacctaaacagagggagtttcactctctccagtgttctttctgttgcactaattttctttcctcactcctcatggtaaaatatacattggactgacgttgaagctaaaactccaatactttggccaccagatgcgaagaactgactcatttgaaaagaccctgatgttgggaaagattgaaggcaggagaagggacgacagaagatgagatggttggatggcatcactgactcaatgaacatgagtttgagtaaactccaggagttggtgatggacaggaggccttggcgtgctgcagtccatagggctgcaaagagtcggacacgactgagcgactgaactgaacagtagaaaagaatctgcctgtcaatgcaggagatacaggttcaattcttgagttgggacgatcccctggagaaggaaatggtaaccctactccactattcttgcctgggaaatcccatggacaggggagcctggcaggctaccgtccatagggtcacaaaagaatcgaacacgacttagtgactaaacaataacaactatccaatataatattgaattgatcaaaaatttcattccataacatcttacggaaaatcccgaatgaaaacttaagccaatctagtactttctagggcggcaactaactacagagtagtcaacagctgaaactctagagtcagacagactcagttcaaatcctagctatgccacttaaggccatgcaaccttggacaagttttctgtttttcagtttccttatccatcaaatgggaatagtaggtaattacatgaaagaaatgagattatacatgtaaagatctgaggagaatgcatttaataaatgctcactattaacattattgcatctgtatatattttaatttgtacaatattgtctcactgatcacacaaaaaatacatgaaagtgctttgaaaatcttaaagcatcatataaattaaaggtgtcattggtaataatctcctatgactatttctcaactcttccatctccttgaagaccgggactacatccttcgtccaagggcatattgcacaatgacaggcaaatgacaagccctcagtaaatgtttcttatttgactgaagctacatggcatcgcaaaaagagcataggtatctggagactaggctgggataaaatgagtttaaggcaggagaaccagtctgcagtcatcattcactcagtcaacaaatacttgttgaacacattctacgtgctagatattgagtccagataatttcatcaaaaagggttttacaggttcccaccagccaagtccctgggcggtctccacagtcccagcctactctaaaagcacaaaggcgcagccagctttgtacaccactggacaagtggcccattgctctgggggaagccccatcctgcctggctgtaagcaactcggactgagggttgggggagggagtaaaagtgagggattgggctgcttccaacagaagtgacagggactgctgcctgttcatttatttttattcacacttaacttcgtccacagttcagtctcccagt

SEQ ID NO: 59316 - DNA, 1770 bp, Bovine  19866880766137
  misc_feature (1)..(1): n is a, c, g, or t
naaatagcgttggttttgttggcatgggaccaaggcctgaacagcttagattagtataaagaagattcaaatatatgtctttcacatatgcttaagaaactgagctgaaggaagagaaaaaagcagcacatgccatctgtttaggaggtatgaaagctccagagagagtttgaaaagaaagggaagcttcagtcttctaagaccaagaggcagtgagaaaggcagaaacacaaagaaagagaaacaaggtcaggtccaagggcagatacagagcctgaggcccataacgtcagcaggagcactgtgccttctgctgtgcatcacaccaaattcttcccagcaaaataatccatgaacatctctaagaaatcttgcaatgcatctcatctcagtaacagctcagtaatgagctattacattagtgataagatcacccataggattcactgtcctatgtccagtgctggccaaaggaccagtgaagccaactgtgtagcagaaacaccgtggctcagtcttcattctcccctgtgaaatccatgagcaagcaatacattcaaggaccacctacaggtgagcagtccaaatactatttttacctgaataggtgctcaatttcttagtgcagagttctcttgcaaaaacaagtggagcaaagtaaaagccaatagtaaaggctagatgagccttaccctctccaacacatacccaaatctcgctctctgtcctgccatcagttcagttcagtcactcagtcgtgtccgactctgtgtgactccatggactgcagcacgccaggccttcttgtccatcaccaactcccagagtttactcagacttacatccattgtgtcggtgatgccatccaaccatctcatcctctgtcgtccccttctcctcccaccttcaatctttcccagcatcagggtctttttcaatgagtcagttctacacatcaggtagccaaagtattggagtttcagcttcagcatcagtccttccaatgcatattcaggactgatttcctttaggatagactggttagatctcctttcagtccaagggactctcaagagtcttctccaagaccacaattcaaaagcatcaattcttcggcacttagctttctttatagtccagctctcacatacatacatacatcacagctggaaataccatagctttgactagatgaacctttgttggcaaagtaatgtctctgccttttaatatggtatctaggttgttcatagctttgcttccaaggagcaaacatcctttaatttcatggctgcacctatcatctgcagtgatttgggagcccagaaaaatagtctgtcactgtttccattgtttctccatgtatttgccatgaagtgatgagactggataccatgatcttaaaagttttctgaatgctgagttgtaagccaactttttcactctccactttcactttcatcaagagactctttagttctttgctttctgccataaaggtgatgtcatctgcatatctgaggttattgacacttctcccagcaatcttgattccagcatgttcttcatccactccagcatttctcattatgtactcagcatataagttaaataagcagggtgacaatatacagccgtgacatactcctttcccaatttggaaccagtctgttgttccatatccagttctaattttgcttcttgacctgcatacagatttctcaggagtcaggtcaagtggtgtggtattcccccctctttaagattttt

SEQ ID NO: 59317 - DNA, 1446 bp, Bovine  19866881021867
  misc_feature (1)..(1): n is a, c, g, or t
ntgatacaaatgtaaatgaattagtaattgagcaaatatgatactgcaatattttagaagctatttagcatgatctatagtacagtatctagaaactgactactactgaaaccttgctcaattaatggttttcatttgcactgtccccatgctaggccagatctctatcaaatctaaattactgtcacaatctcttaagctgttctccatacctttaggttctctcttccccaattcatcccaaatgtggctgaccaggctaacttttctaaaactgggctttcattgtgttttgtagctgctcatacgcttcagctctctgttacctatcaaatgggataatatatgtcaaagtcctttgtatgtggtcagtgttaaaacaaaatctaaactctatttaatttcaaataatctgcacaactgaagtcattcagaaaggcagtacggtttagcaaaaagattcttggaggcagaagatgcaggttttaccatctcatctgtaggactaaaagcacctatctgatgggtggaaaacaaatcttagaagcattctgtaaacttcagagtattctgcaaataaactagtgtctgatcgttcccacatgggttcgttgctctcagtctctaccattttcactcagcatcaggttatttcctctgcccacagctcagttcaattgttaccacgtctatttctaaactccaaaatcacacccccttttggaagatcccatgtattcaaaaatatatacttattagagttcctttaattttcccatatatttaatttcaccttcctacctatagcaagaaatgtatcttctatgggtcacagttgactggtattgtttagggattctaattctaaataactggttgaccaaagaaagatattacttaaaagataatgaaacaaatgaaatgcaagcataatcctcactaaatggcataccacttagggagacactttttacagacaagaatgttttcttcagatattaccttgttgaagagtatagacatgaagaagagatccaagagcatggtctctgaaaaagcttcatagtcgattttgaaaaagagcacagtaaagatgactgtgacatactgataggtaggactgctaaaagaggaccgcagcaacttcagaccagcaatggtgatcattaaagcacctaatctacagtacagagaaagaacgttaatcaactaataactgaaaactctagataattatgaacttcagaaaaattaccatttcatttactaagctcagaatattatatcaaatttaaacttcaaacattcctttttaataatgtgtcatgattctgatcctttatataaataagcatgcttaaaaaataagtaacaaaaaacccccacacacacacaaataagtgacaatattgcaattttgacattggttctccaggttctcagtat

SEQ ID NO: 59318 - DNA, 1004 bp, Bovine  19866881117115
  misc_feature (1)..(1): n is a, c, g, or t
ncagaaccccaagtaatctgcctggggcaatataagtatacacaaactgcaacttataaaggagttcccaaagctgtaggaggaaaaaaaaacagcaaaaagctttttatcagacttttaaaatagaaaatgaaaaacttctaaaatgattttgaaatgaaatgaccctgccaaaacaccacacatgtttttaagtaaagatggttaactgacttatggattattattattttttattctatgctctctactggttatattacaactacaaacaaaaaaaaaaaggtaggaaatatagatgtctgtaaaacttacgcaataaatacgtatttttattctaatacatttccctcaaattttggtgctttgggaactgagcatgttttaaaggcaatgtcaaaaggaatttgaaagcagccaggaaggggataagatgtaatacagttgtcactgcctatttgcctaagaattttattagtgtgtatcaggcatctgttcataatcagaactattactgccaatggaaacataatgtacatttccatcttatttaaattaggatctgttttgctgttgaatatgtcttcaacactgaaacataattattgcctttgcctaaggttgcctctgcatgctaggcaacacaagagcccattcttagaacagattacagaatctcaaaagcaagaggttctgacttactcaatgccatgattcaggcaccaaacacctcaaatttaaattatttagctgatttacaaatgaacttgtttaatttctaagttaaaaaagaaatcacaacctcaaccaatcagaaaatgcagatgaacccctgcattctctgccatgactcaaaattgtgctgacaatcctctgcactaatgcgatcaggatgacgggaagacttatcagaaaccattacaactgcttaaaaacagtgactcagaacactcctccatctctaaatacagactgtactcaaatctgactgtaatattaaagaa

SEQ ID NO: 59319 - DNA, 1363 bp, Bovine  19866881166038
  misc_feature (1)..(1): n is a, c, g, or t
naagacttgtatgcacacactgtgataataaagctgaacctgaagatcaggcatttgagatataaacatttatgggaatatttttaagtccctgcttttaaaaaaaactgtaaaactcattttgaccttgggggcctagagtgttggacctgggatgatccctaagagatcatgatcatcggttcatcttcctttttttttttagatgcctggagtggggaagagatacactcaagggcattcaaagtacaaagcctatgtttttggttcaacacacctgtaggaagctgctatctggtgtctatggctgctctaggctttgggatgtagaggttaaaaaaaaaaaaaaaaaaggaaccactgctcttaacatagtcgcacatgttcagatgtccagatcagtccttgttccattttttccctcattctgaatagactccttgagaaataggaaactatatgtagcagcacatacctaagagattaggaaaaaataaaggaatatttccctatgtccctagtcatgagccctactcccaagcagagtcctatactgagtctcgcagagtcctacactgagtctcacagagtcaattagttctgcctctttcagcttcatcttcttgcctctcattccatcacagaagctcatctcttactattcatgtataacatctgtgtggacagccccagctgggtgacatttcaatttatcacagtcttcccgtttggtggcagattagggaatatcttttggagaatgtgttctccaaaatacctactttctttctttcctttttttttttttaaataagagaattgtcagcccactaaggaggaaaatcgtgctgtgtgatgttgctccgccaatgtggaaatgctaactctggtcctgggatctctcctggtgctgttgccaggcagacttgttactgacacacatttcctccccgataagttgagttcttccccctccccaccaacttcattatgcctgcagccggagctcggctgcagagggaaccctgccagacactctgattcacactcctaaaatatcagcctgcctgggtatgcgagtgatgtgataaatctggaaaacataaatcagattgttggatgctatatctgttcgtgcacacaggctgctgcagcaggcacgatgacatgcccgcaaactctctgggggacagaggggacagagcctccagacctgggaaaggtgagcaaggagggcaggatctgacaagcagaagaggccttaaaactgttgacttatatcccagacaccagacgtggagttcaggctcaaagattgctgggagtggctggaaaatgacgcctaaggaatggccctgatgtt

SEQ ID NO: 59320 - DNA, 853 bp, Bovine  19866881170657
  misc_feature (1)..(1): n is a, c, g, or t
ntcgggaagagcagtactctatccagctgaggtaaatcacccacctttgctcttcgggaagagcagtactctatccaggtgaggtaaatcacacagaaactctccctggatatgcctgccagtcgatggtcatagtcttcatcaatgtttggattaaatgttggatccacatcaacataatttcgatctgcacacagacgcagtccttcctgcatcgtctcattagctagccattcctctagtttagaagaggttgtaacataataaatgataccctaatgagaaaaaagatttaaaaaaaaacacctcaggctaaatcacaatctgaattaacaccaatatctcattaaattgtttatactgataatatgaatcaaagtaacattagtttactaactttaaaatagtctaaaaacaattccaatctactgaatttatgatctcttaagaggtgaaaaacctttactgtggtgcatttattttgagaaatttctcacagaactattaagctatcttgtgatcctacgtcaacttataaaaatataactaataaagcaatagaaacacatatttagagataggaaaggccacacacacatacgttattaataaaaatgttgtaaattcaatctcttttagcttcctgaggttgggtttaaccaaatattaattaaacagaagattcagacttcaatccaaccaatcaatgcaaataagttggtacacataagtagtaacacatgaatcatgaagatttagcatatgttttcctcttgaaaatgctggctttgcctataaacctctagcgataaccatgttgtatattctggaaatttttagcaaaaaacaggat

SEQ ID NO: 59321 - DNA, 2099 bp, Bovine  19866881236725
  misc_feature (1)..(1): n is a, c, g, or t
ncccactcctccctccacgacgtcacagggggtgggtgggtttccatgtgtgcccttcacctgcagagccatttttagaccttgttttctatcgaccagaaaactgctgaaattagaagacatttgaagtggctcttcatcaagcccgaggagatttctgcggttgctatatttgaaagcccggcagcaggttgtttgggcttacgtcctgctgttatgtaataaacataatgttaagctttggaagcctggaacacgggttgggagggaggagaccagtagcctcacaatgctgtgtgccctgcagatgctttgtagaggttggggagaagataatacagtttctgcgttaaatggtgttaaaataacaatgtgtgcacagcagacttgaattactatgtaaattcccagaggaaacagtagggggggaaagacagaagcaagaaaagaggttgtgtattaatatatgggaaaatgtaatcaacagccaaatagaagctgtttttagtaagataaagagactcagagatgtgggctgatccgcagagaggagattgtattggttttccaggacttgtcactgattaccatatatgtagtggctgaaaacactatgaatttataatcacagcattctaaatcagaaatctgatcatggtatggctgggttctctgattaggacctcatgaggtgaaatcaaagtgtcctccaggctgggacctcacttgaagtgtgaggtcctcttccaagctcacatagctttaggcagaacttagttacttttcggtgtagggttaagggtccccttttcttttcagctgttgctgggagctgttcttagctcttagaagcctcctacatttcctcaccatgtgatcccttccatgaaagttgctcagtcatgtctgactctttgcgaccccatggactgtacaatccatggaattctccaggccagaataatggattgggttgccatgccctcctgcaggggatcttcccaacccaggaatcgaacccaggtctcctgcaatgcaggcagattttttaccagctgagccaccagggaagccctacaggaagctggtcctgctgaaaagtgatgttcttcctgaccaaaaaccgggacagacatatagatagatccaaggttgcatcaacctaggaggtttgcctccctgtaaatcctccaccttcctcagctgaactgtctgctctgactggttcatattttggggggctcacttcacttttcaagtccttgaaaactcacaggaatgagctacactgggtaagagagccccaaaatctgagtggcaagaggtttccagactcttgaggtgaacactcttgcgcacatcctcaggtcacagagctgggccctctacctcctcctaccagcaaggtgaggagcagaggacacaatcattccctcctttcatttcatactaatgagacaggagggaagggggtggggcataaccattaaaaaacatgatatacccattgaggacatgacaaaaactggtgggaacctcctaggtccaagatggcggaagattcaacttcctgtagaccttgagcctcactgtacactcattataatatattcagatcagatcagatcagatcagtagctcagtcgtgtctgactctttgccaccccatgaatcacagcacaccaggcctccctgtccatcatcagctcccggagttcactgagactcacgtccatagagtcagtgatgccatccagccatctcatcctctgtcatctccttctcctcctgcccccaatccctcccagcatcagagtcttctccagtgagtcaactctttgcacgaagtggccaaagtactggagtttcagctttagcatcattccttccaaagaaatcccagggctgatctccttcacaatggactggttggatctccttgcagtccaacggactctcaagagtcttctccaacaccacagttcaaaaccatcaattcttcggcactcagccttcttcatagtccaactctcacatccatacatgaccacaggaaaaaccatagcctgactagacggacctttgtggcaaagtaatgt

SEQ ID NO: 59322 - DNA, 1504 bp, Bovine  19866881245501
  misc_feature (1)..(1): n is a, c, g, or t
ntagcaatacgtaaagttgaatattttaccatcttatttggaagcatggaatttaagagctggaatgaatctttgaggtaggcaggcatcacctactaaaataagggaagagaactttgggttcatttttgcatacctctcacctcctaatgtagctttcatattgttggcctgaaaaacaacagaaaaagccctggttgctaaacctgggaatgaggcgagggtcaggagcatcagcgagaattccatccagtctgagcgtgtttccctttcatagcaagattgcaattcctgtctgtcagagaaggggcagaggtaaccgtgcagatctgcacagagggagaattcttcccagggagcagctgcagccgcctggttccacaaagcacacgctgaagagaagcaaccttccaaggaaatagagttgaagtcaatccagacttaatggcgggggaacattgagtcagttcagacagactgaggagttatagcagtcagctaaaacatctggtctgagtaagcagatgtggtagcagtagaacccagaagggaaactcaaaccaaaaaggatgagaaaccaaagtcctgagatcacccaagtgaggtatgagatgagaggagaaatcacaaggacattttcctaagtcctgccaaggttgtgtagttgcagggagacccctagtcttaaccactcagaagtgtgagctgtaatggagaaggcaggactcaccatcaaacctgaggacaaggggaagttgaattctggagactgagaagagaagctagaggcaacctgggagaatggaggaaagggaagggtcaaggcagcagattcagaacaaagacagcgacccttaaatttctggagttcttttatgtgatgcttgatccatggctagggtgaccatttaaaggaactacatcaaagtttggacaaataaaaggactcacacaggattatgacagaattatttcctttagacaatgtccttaaatattagaagttaataccagaaccacaactgtatgtatctatcttcattttattttggctacagcaatgttaccccaaaactgggtccatctcttggtgggtgtcatgccaagagacaaaacagagccaagatttggagaaggaagaaatttattattcacagcaagtaagaagaacaccagggaagttttaagctaagggtacatgcatgtttggggcttcctgggcactcagtggtaaagaatctgcctgcaatgcaggaaccgcaggacatgtgggttcaattcctggatcagggagatcccctggaagagggcatggaaacccactcttgtattcttgcctggagagtcccatggacagaggagcctgataggctatagtccatagggtcacaaagagtcagacacaactgaagcaactgagcatacacgctcacacccttgcatattgatcaaggggcttgagcagagaattcaacattaactcggacaaaggtgacagagtcca

SEQ ID NO: 59323 - DNA, 748 bp, Bovine  19866881584569
  misc_feature (1)..(1): n is a, c, g, or t
nataacagcctttagtttctaagttaagctctacggtcactagatggacagaagggacgggggtgactccagtgcagcagggtgctgatatcatcttgagctaactcttgtaaccatctttaggattcctcctggagtgactcctacttcacctcctcttccagttactggtcatgcagaactggccacagtctacccagtgctgacagaaaggtcaaacagtctccagttttgttccagccaggggtcactcaccttccatgagtttggcaaaaggttccgggcatgtagaaggaatgggaagggcaagcttgttcatggccactccataagcaactgctaagccatcgattccccggaagggcacctcaccagtcaggagctcccaaagcagcaccccatagctagggagaggaagaagacagaagtcacacaatgaaccacagctgtaacttcactgaaatagctaatgaggctttgacgagcatcccacatcttctctaacatgtagggagactaacagaacagacatactgccgtaatataaaagggaggccaagccctactggctataagcaaaaagccctactggctataagcaaaaactctggagtcaatcatactcggtttcaaagtcttattcttcaaattcctcatctgtgaagtgcgaaggacatgagcagttggacaaggctatcatgaaatgaatgctctattgtttaaatcatgctcaagggccacagctatt

SEQ ID NO: 59324 - DNA, 1247 bp, Bovine  19866880508944
  misc_feature (1)..(1): n is a, c, g, or t
nactttttgaaactatgaaatgacatgaaaacattcttacaaacatttaagaatttgaatttgaacaatattttcctcagcaaataccctttttataactacatcatttttgcttttataaatgagtagtttacagtgatactgctctatattttatgcacactaaaattttatggattaaaatgtgaaattgcttttaatatttgtgtttacaagtcgttttgtgtcttttgtcaacaagggttgcctgtttagttggaaagtgccattgccctagagtgctgtattttgaagtcatctgtcacaaatacaatgtagagagagaagactatttatgtttatggcattttaagtaactgagttaaaccctttggaatatagagaaatggcttatttactgtcatcactgttcacttaatcttgtgaccctgacatgatagcattcccataaatctcccatgtggtagttcaataaaacagatgaacatcaaaatgtaatgattgtttcagctttaggaattaactctgtgatggaataaatgtggcccagatagtgatactacagatgcattttaccattccctttttctaataagtaatgctagaaaataattatttattgtaatttgtactctattttcagatagtattttcagtatctaatactcattaagaaaaaaagaaaataaatgcaaataatatacatattgtgactattttttaaagtttcattttttggcattttaagattattaatgttaatataataaggttggtttttacaaggatgttttaatatagctttgtcctatactgtgttttcattgtatcacatccttgtgttagtttttttctgtatgcactttttttaatatttgagattatatggtttctcaaacataaagtcttaatgtctgtttatctgtttgttttatcccacttttttgtaaacaactagtgaggcattctgaaaaacaacaaaaacaaaaattgagggtattgagtcattcaagaaggaaaaaaaaagtgtggccctaggataattagtggaagaaactaaaagtctatacctgagaccatctccacaaccagaagaaaacccagcgtttgttcaacattttgtgaaagtaaatgttattaatactcttattgcaatgatcttagtttacatttgtctcctaccaacttcatatgtaaaaaactttttgtcagttttgtttggcatggtaaaacctttaatcctctgt

SEQ ID NO: 59325 - DNA, 2531 bp, Bovine  19866880520141
  misc_feature (1)..(1): n is a, c, g, or t
ntatgagtcatataattataaaaaagttttatacatctaaaatacacatataatgagttcacattcattattacaaagtaaaaatccttcatggaaggtatatgagcataatcctttcaactatctctcgatttagactaccaaagtcatgtcttccagagaaataatccttcagtaacctaagaaggattaattcattttccaatttatctttttgtacagggactcaccaattagtacaatgatctgtctccataatgaggttaatatttcattagctcattggagagtaaaattaaattttcatttttcttccttaacaattacaatggttagccaaaaaacttaactgttaagtacccatctcaaattaaatatactttttttcctaattacaggcttatatgggagatatagaatttcctcaagaagtcctagtataacatgttatggctttacaaaatctattacaatttaaaagtggaatatgtttggtaaactacacatgcacacagatacacacacatcaatgcactttattaatatagctttaacctaaaaggaacaaatagaaaatttgggttaaaaaaaacaatgcacgttcattaagtaacaatgataatactctcaaaatttggtttacatcagtattttatgtgtacacaatctaaaaacactgagttgttcacattccattcacagcatctatacctcctttagctgtgtgtccttaatcagagagatctcattttcaccaagatggtgaaaatggtattaagggtgtgtgaaaacaatcttactctttaaatgtataaagcacgcatacacagtacacaaacaaataaacagcatattggctataattataataaatcatggtaggggctgattagggtgacaactatttaaaaattttccttagggggacaataatgtacaaaggttgtaaaacatcactcttagcttagtatcatcttggttaaatatatgttagagcttgtaattaaaatctgatggcttgaaaatgtatcttaaatgctttcacatgtcaaatattgatctgcttatatccccacaaaataacttgcttttcttagtagaaatatgatcaactcaaaactgattctgcagggaattcagttaatattctaaaccttattactaaaagaggtcaaaagtcaactgaacattgctattttgtctagagttctgacatatcttatacctaaacatgttattcaaagcagataacttaatcttttctcatcatccagattagagtatgatacctgatttgtaaagattcgatgttatttatggttggaaagatacaaaacttcattctgacaaacacttaactgttgatgtatttttattagaatttatatttttttcagataagactgctacaatcccatatgacaggtgtgtggtgtgtcatttgacaaatgaagtggatattatggttattataacaaaacagttatttctgccttattttcagcgaggtagatcagagatctctagacctatatcaacctgcatgactaagagagctgctttattgagataaaaacctcaaaactggaaatatgggttctagcttccagttgcacgacacttgttcatatgctgtatcaggagcataaattggtggacttaggtattattttcaaggccaacctaagtctaacaccaggtcacctaaatatttctgaaaataagtttattgaatcagggtaatatgtcaaataattattgacatgctagaaatataagaataatatttatttaaaaaactattagtatgtactatgtactacttggaataccttaaatttttgaatataaaatagaaatgatagtttgttctttatgcaaattataatttgtgcttatgaagattttaaactattatgtttccatatatacatacagatctacatatacatcatatataataggattgcttcatttgttaataaagtataaattataaaaataaaatatgaactaaaatgatctttggccactctaaatagagatgaatacattattaaataataaattagagaagagtaaaactgtttcttcacataaccactattacacccatatctaatggtgtgtaaactatgcttaaaaattactaaaggaattgcactgtaaaactgtatgtgcctttaagaataagttagaacaacctcagtctatcaagtggttaagcataatgctagagtagtcttttcatattgcaaatgaggtaataagaaataagtgtcctgtctgacatttactaaagcttttaaaaacaactgaaatgccttcagtgaaactttcgtctcgaaaaaaaaaaacttatgtaaggttaccattggtgacaactgacttgtaagagaaaagcagaatttaattcactcccaaaaccttacctcaaactctgcatgtttatgtacatcctcagctctctgtctgttcaaaataaactcagcttcatttgcaacacgaactatatggtccttcatagcagg

SEQ ID NO: 59326 - DNA, 1260 bp, Bovine  19866880721103
  misc_feature (1)..(1): n is a, c, g, or t
nttttaaatggttgaaacacagaaactggagtgtaggataacatttaacttgtcaagtaagaagttaaaagtaagattatactacaaagaaataccacgtttatatactcaaaataaatacagcatgcaacaataaggaattaaacacaatctgtatttccacacagaaacaaaaagtaaatgagatatgatatgagtatggaaaacaaaatgcagagatttgaccactaatttctactcgttttttaaaatattcaataaatgtatatatcatatgcatttatttaggaaggataatttccattacaaactaatctagtggtacatgaaataatcactgggctgctaaggcaacactgcaaacaatagagaaacaaccttgaggtaaacactggcaggaaatgcaatagacaaaaggcgtcctgtgatattaaaatattagttgccaaaaatgtatctatcatttccaagcagcgtaaacaaagctaataatacatgaactcctacaacataagcatcttctatagatgagaaagataacatgacccaaaacggttcactgctgtctagaaatttctgactttagtcgatgcaactttggtataaaattcagaatgtatgtttgtttatgatacatctcctggctgaatatttagctactgaattaactacacatattgaaagaaagaaaggcagatggaaagaaagaaagatgctactgagcttggctacaaagatttctagtttggcttactgttggttttgaactactctataaggacctcctactttcatatgtttataaaggttaaaaataatacatttaaaatatatgagttatttgtatattaagtagtagcataaatgttttatgctaataaacagaaaaactaaacccaaaaccttgataaaatgagaatatagccaatatcattctacatttttgtgtaattaaacaagattaaattggcatttatatactgcctacttataaatacttgagatgattatgaatagaaccagtttaaatctagatgtaaaaattaaataaaaaggagataaatgatgatgaaaattcaaataattagacaaatattaagtacctgtacttgttggtgaatttatttcttgtctgatgtttctacctggttggcttccagttcttgcagtctctcgctggggttctaaaatgtcacgatacttggaaaccatcagaaccgaaagaagtaaacaacagctagagctaagaactgtgcctgc

SEQ ID NO: 59327 - DNA, 726 bp, Bovine  19866880877938
  misc_feature (1)..(1): n is a, c, g, or t
naatttgaactgggagttccaaatcaaaaaaatatcatatttaaatggttgggatgtagttatagtaaagacatattgctttgtttatctggcctatatttgttgatgcccactatatccaggcacatgttagattctttgcatacacttttagcacatttgcatggaaatgcaacatttttcttaacatttgctaatactgtaaaatgaaacatgcataaaatgttttctcttggttgttaaatatcagttttaatttgtccttgtgggaatgaagataaaaatctttacgtggaaattgttataaatgtttatgctacttaacatctacactcgtgaataaaattcatcaatcataggtggagaaagcaattgtgcagttgtctacaattaacaggacaaaaacagttgatgaatgtgcagctgaattaaaatactccctaggacaggctgaaattataaactggatcatttaaaggaatctaacaaaggatctttataattaaaacaaagcaaggttaatgggatgtaaaattgcctataatatcttggcaataataattggattttaaattattaaaatatgaattgaactataaagcaaataagaaagacttttaaattatagaacttgagtaatcttttgaaataaattaatcatttgcctaaaataaacctttatcactcttttgggaaatgtataggatacaattaatgaatattcat

SEQ ID NO: 59328 - DNA, 1087 bp, Bovine  19866880915023
  misc_feature (1)..(1): n is a, c, g, or t
nactttcatccctgctgagaatcactacactaaactaagtgctgtgaggaggtagaaactgtgtctcagcctctgaaccttgtacgtcgtgcatgcatggcacgtggaagatacctgataaatgctttcaaatgaatgaagctaccatcttgagtcagtttaaagccttccatctaaagcttcaacataaaaacaggggagttgttaaaaccttggttgtcatgaaaatgttcttatatgaaaactttaaaacgcattttataaacatattttataagacagcatttaaataatccattttagttcttttaagagactataaaaccatgaggtaaagatgagattatattaaaatgtgcactgacatcaaaaagagctgaaagatgattccatgtatgtctttctttcactcatacaaaagttacatcattaatttttcaataaattattttaataataatcagatcatctatttcattcaggtatgaagatttaattaataatataccaactaaaatgaacttatcaatgaacaattataagatgtctgctagagacaatatggtacaaacaatcgagaccactaggttaaaaactcaaataatcttttccgactaagtgtaaagtcttcaaaaaattgaagtaaaaaaaaatgaagtcagataatttgaagttcctgtctcaacaaccgtatatagctgcattagtattctttaaattctcagtgcttttcttgtttcttgaatattgcaagtagcactttacagtagtcatgcatataccatcaaaactaatttaattccagatttattacagagctgctttttcttcatcaaggtcatatcatgatggcttcacaagcttggataaaccaggtgctaagtggacacatctctgaggaacctaaggatgttctcatttgcagttctcagcatatcttattatttattgccaaagaaatgactgattaactttgtcatctttgctccaagtttttttttttcctctggctaaagcagcctgccgtcctctgcgatgacagataagacctatttaggatgatgtctttgatcacagacttggggga

SEQ ID NO: 59329 - DNA, 1444 bp, Bovine  19866881071161
  misc_feature (1)..(1): n is a, c, g, or t
ntgcctaggaaatccagtacgtgttgaatgaattgaagtgtgatagtggacatacttgtctttgttcttaatggcaagggaaaggctttaaatattttgccataatcataatatttgccatagggtgcattgtttgctttttgtagatattctttatcaagtaaaaggaacttcttttcccttcccttccctttccatactggtttgttaaaaactttttatcctaataggtaaataattttgtcagtgttttttcctgatttattatagtgcccatatgatttttcttctttttcttctattaatgcagtgattcagttgattggtgttataatgttaagcttatataccaaaggttgattgttaagctggttaatggctttttcagactagcaacttctcaagagtttaagtgcctggcagtgtgctaggacatggattggtgttttgttagctaactggtagttaaattaatatgtcatttgggagaatatatacattcttccatccaaattaataaatgttaaacaactatgcagtgatatgacacacagcaggccactgtgctatgtactgtgtggaatacaaagatatgtaagtctcagtctcagctccaaggagctgtaatctagtttgtgagatcataccgattcttaggtaattgtaatgttaacataaagcaatatttaataacagttaagtgaagcatcgattagattgtatattttataaagaaatggatgaatgttcatctttgcagtcccaagaaatagcacagaattgaaaaagccaggcttgtttcattacagtaaatgatccagaataaagtacaaaactgttagtagttaaagataagactccaagagagttcagattcaatcaaggaagatctttaatgcccagtgaaagattagacctggatgtgaaggcaactcaattttaccagataagaaaataagtcttgagaggtcatgacctgcctgtggtgatacaacatcagaactcgagttcatgagaagaaaaaatgtaatcgtcttgatccttaatgaaattttccaccccttccaaactagtttatttgactaattattacagtggtgtgactttatattcataagaatagtttgtttcttgtcttttttaattgtattcttctatgtctaattatatataatgccatatataatgctcagttgtaaaatcaaattgatgagaagtgggagggggaaagcaattattctttagccatgacagatataataggcattcatgtcatatgatactgaatgttaaaacgaggtcacagggcactagagaaaaggaaacaggcaatatagtacctctgggtgatgaatgtgacgggaaacatcttatgggtgtactggccaggatatttatcatttagtactaaaactcctggtgacatgataacagggtttttcta

SEQ ID NO: 59330 - DNA, 913 bp, Bovine  19866881261170
  misc_feature (1)..(1): n is a, c, g, or t
ncccctctcccaaatgaaaattgctaaacattttaaactttgttcctttaaggtataagtacctgtgtgataaatcatttaactaaaatatattttgttacatatttttggaacagatggcaggaaagagcagtcacccagtggaataaaatgtacactgactagttgtctaaatactgtacaattaattaccttccttcattgatgagctcaataaatgcaagtcctgcattcttctgaatagaattttgccattcctaaaaggagagagcagaccacgtgtaagaaaaatgagcacgtaaatgaaagttaacatctggtttaaggatcatgttgatgctaataacttccatgtgatatttctaaatctttctaaaagattgttaacaaatgctattttctgagaaatgagaattttaaaagcaatcctttactgtttagttaaaaggcgcttttgaattcccagtgatgcagactgagatagaaagtgaggtcacaagaacagatcctcactgtgacagtaaaatgttgcttattttacactctttttatggcatatttagaatatgttttaaagagctttttgcttattaatttattccaaggactttaattttcttggtctttctaatatagctggcaaatttagttttttagattaaagattatacccctttcaatgatactacaaataaatatttgcctaataaagttttattaaaaatccttattgatcagtcatgccacccatctataggagttttcctccatgattttctactaattaagtgttggccatgactatggctttcggaaacacagtctccatgtcactccttcactctgtttctgatcttgtttccttttaaagctttgaacacatgctgggaataagtgtggtcccccaaagtag

SEQ ID NO: 59331 - DNA, 721 bp, Bovine  19866881409082
  misc_feature (1)..(1): n is a, c, g, or t
ngcaatggaaactgtgcactgaattgatacagaggagaaaacactggtgggggaaaaattatgtgcagggtccagtatttctactgtgttatctaactgccataaagtgattgtgaagagaacatggggatttcattgtcatccttctggaacctatttgtcttcaaagtgtttagtttcaaaggatccttaacttgatatccaaatctctgaaaaagtccttcatcttgaggaaatgttatgcatccatgtagaagagttaaaaaattgtgacaaacctgtctatacttgacagctctcaacacgcgttcaaacccagtttagtatgtttccccacgaggataaaaatttgatgcctacgtttaatttacaccttttcttatggctgctcattttcttcagtagtggagcaagtgagtgagtgtatgttttctcaaatggcagaaaactttggaatgattttgtagctaagatttttgagtatacttttttcctgtcattgccaagaaattgactttgttgagatgacaatgaattattattattatccttttgtatacattttcatgtattcatttactttgttttgggacagtgattaaagtgtcctttccttgcccagctacctcctattttcttaactctcagtgtactttatagtgttgtgtacttttcttgtcacaaagcttttaatatctccccttcagtattttacttaatt

SEQ ID NO: 59332 - DNA, 826 bp, Bovine  19866881547858
  misc_feature (1)..(1): n is a, c, g, or t
nattctgtttgacatcaccataggggctttaggcaaagcacctagtaaggtgccagatgtactcccggagcctaaatctccaggagccatggctgcatgagaagatgaggaggaataagaggccctggaagccattcagtattgtagggcccccaggctctcctcacagccccattattgggcatacactccttgaagccatttctgtgtctcttgcactacccatctgggtgtggcactgtgttgtggagaaggttctctactaatctctctttaccctctgaagaggctttgggattcagtgggattgttcttgaaaggcggtgtagtaaattcatcatttttaggagtataaacagaagtgtcattttaggagatgagggcaaagaagtctgtcttcttacaatgcacttctgagaatagtgttgattgcctgaatgttgaggattgtgtgtgtgtgtgtgtgtgtgtatacttggtctgtaaaacactatataaatggatcttaataaatttctgctttaaaaaaaacacacatacaaacatatcatgcattagttgatgtataactcctcagtgaaaaactgggaggacagactttcagacaaccaatacagttttctctggtgtatctgaggcatgaatctctcctaccccatcccctgctctgccgccatgcctcttggctttggtcatccactgttttgttgctaagaatggtataatacctattaaccagccagaccctgagtctctcccttcctgctgtcttctgttaatctatttaaatataatctgcactaattcgcacatattagatttcttc

SEQ ID NO: 59333 - DNA, 1366 bp, Bovine  19866880567063
  misc_feature (1)..(1): n is a, c, g, or t
nactaacttaaataaattacagtattaactaaagcttaacacagaacatcaatgtatagtaacaacagagatattttacaccccaagtctatacatattttcatagtaaatggtgacagtcttaaaaatatatttaaaacaaaatacatattttaaactaggaaattaggaaaatcttaaaagtgtattttgatcattggaggtattcatataataaagattttaattatgcccaagctattaaacctaagaaaaaatttactacaattaaaaaattatacaaggctttcatggaaagagtaatttttcattgaaaataggtgatacactttcctgttgcctcattttcttttattagtccagagctttttcatggcatttttcatctcagcatttctcagagtatagattagagggttcagcataggagtgataattgtgtaaaacacagtcaaggatttatcagttggtaaggtggaaggaggtctcacatacataaaaatacagggcacaaaaaagaggatcaccacggtaatgtgggaaccacaggtggacaagcctttgcgcctcccttcctgactaagattcttcagggagtgcaggatgatcccataggagatgagtaagagcatgaagatgatcacacagatcgccccatcattggcaaccactgtgaggccaataatgtaggtgtcagtgcaagcaagtttcaacaagggatacatatcacagatgaagtggtcaatgacattagggccacagaaaggaaggttgtaaacaaagagaagttgaactacagcatgtaaaaacccaccaacccaggccaggagaagaagcataacacatactcgctgattcatgatggtcaaataatgcaagggtttgcagatggccacatagcggtcataggccatgaccaccaggagcaaaatctcagcaccaccaaataagtgtcctataaaaagctgggtcatgcaagcttggaaggaaatggttttctttacataaagtaaatctatgatcatatttggcgtgactgtagtagaatacacagcatccataaatgataagtagccaagaaagaagtacatagggacatccaggcttggactgaacaccacagtcaggacaatgagtaggttgcccaccatcgtcacaatgtagatgagcaagaacaccacaaacaatattttctgaccctggacactctgagtgagtcccaagaggacaaactcagttacatttctcctttgttccatagatttttctatatgtcatatttcagaaatatttcaggacgaattagctgtaaatataattcttacacatggctgcctggaaaattaagataatgcatttacttatt

SEQ ID NO: 59334 - DNA, 1067 bp, Bovine  19866881585262
  misc_feature (1)..(1): n is a, c, g, or t
nggctgactttcttctctagagtaaatctataatgagtttaggggtattgacacaggaatagcaggcatcaataaaagagagattagccaggaaaaagtacatgggggaccccaataatgagctggtggcgatggtgaccaaggtgagcacattccctaccatagagacaatgtagacaatgagaaacaaagcaaatatgattttctgcaccttcagattctgtgtgagtcccagtagaataaattatgtcacattattccttttctccatatatctcatattatggttaattacattacatgaaaaaatgtcattttttcataatgtaaccttgaatcattgtctctgataataaatacctaagttctattgagttctgtatccttgtgagtttatttgagattaaaaaaaaaaaaaagcttctgatatcctgaaaaattactcaaattctttcctggcagaagaaaatgcttagaatcaggaggaatttagagaacacagaggcaagagggtatctctgtacactgaatcatgtgagatgacttagggccttagtagaagcagtaggtctcatgtgtagtggcgactaagcctgaaaaaagaaatagaaaatggatgcaaagactataaattcaaagttaaagagttttccttttaatcttagaaaatgagaaaccagggaaagtaattggaatactagtggaaagatgaagaagcatttgagaaagaaggaatgctggatataactcaaatagaggtctttgtgtgacttttatgaagtaggtggaggttcaggaaagtgaaggaggatagataagggaacctcacctatcagactaattgtaatagttggcataaattttaacagagcattgctgatgagaaggaaatgaaatgacacagttactataattgaatgatcaatgtgttgcctaattccagtaaatttataatgctaacaaacatacttccaatgactgacatcatcatggcagtgagtggcaacctaggtggagtagtagttatttcattattttgcacaggagttaaaaagttgtaaagacta

SEQ ID NO: 59335 - DNA, 2082 bp, Bovine  19866880236989
  misc_feature (1)..(1): n is a, c, g, or t
ntgtcagactttttgggggggctcccaaatcactgcagatggtgactgcagccatgaaattaaaagacgcttactcctgggaaagaaagttatgaccaacctagatagcgtattcaaaagcaaaagtaatattactttgccaaaaaggtctgtctagtcaaggctatggttttcctgtggtcaggtatggatgtgagagttggactgtgaagaaggctgagtgccaaagaattgatgcttttgaactgtggtgttggagaagactcttgggagtcccttggactgcaaagagatccaaccagtccattctgaaggagatcagccctgggatttctttggaaggaatgatgctaaagctgaaactccagtactttggccacctcatgtgaagagttgactcattggaaaagaccctgatgatgggagagattgggggcaggaggagaaagggatgacagaggatgagatggctggatggcatcactgactcgatggacgtgagtctgagtgaactccgggagttggtgatggacagggaggcctggcgtgctgcgattcatgggattgcaaagatttggacatgactgagcgactgaactactcaactgatgtattatttttcttttgaatggtagaaagtagtttgttggataaaagttaatatggaaaacaattttaattctgataagagatatcagccaaatttaggaatatgctctgagaaaagcatgtgaagatttttcttctcatctagaagatgcttctggcctctatttcattagacagttctgaagatcccgttcccattgtcttctttgtcccatagcttctctgtcacttttcttctggtaatggagaaaaagaaatcctttattttggttgttttgctgaagagggccaggtgtctccctgtaacttcagaaaataatatttccaaagggaaaagtccttaagtactgtttatttgagacaaaatcattctctcaccttataatccatatacctaagtacttacttaagagcatgctccagtgttctaaacccatgcagatacatgatttcgtaattctataagtatatagtgtttaccagggttatggaagcaagttgcatgctatgaccattatacactaaagcttttttcttaccagtttttttcttttgagatgactagtttgtaaaatgatctcaatctgtgtttctatatattgatatatggcaatcaaataggtaaaatctaataggcttttatattgttgaggacatgaaaaatcaactacaatctatgtagtaaaatctagactgtaaaccttaggctattaatattttagcatatcaacacactaaaattatctttgatatgtatatttcttatgtatcagcataggtataccccacaaataacttagattactatttttatgttagtcattatattttttctctttttcaggtaatgcttcaaggactctacagcaatttctggtattggacatattcaaaatctcttcaactttttctatcctggtgcactgttctgctgctttaacttgcttgagatcccatcacgcattttacatggtttgcaatggttacatgaacgtttgggaagtggcatttgtaccatctcatactttattcatgatggcactttaggaaagtaatttggaaaaagcttccaaagcctcatttttaaaaaaaaatgaatcttattgtgaagcttcggagaagttttcgaacattgattgttctcttagccaccttttgcttggtgagcattgtcatctctgcctatttcctctactctggctataaacaggaaatgacacttattgagactactgcagaagcaggatgtactgatgttaaaatcctaccttaccggtcaatggagctgaagacagttaaacctattgatacatccaaaactgaccctattgtcctcctgtttgtggagagccaatactctcaacttgggcaagatattattgctatcttggagtccagccgatttcagcaccacatggtcattgccccggcaagggagatatacctcctctaacagacaaggcaaagggaaat

SEQ ID NO: 59336 - DNA, 796 bp, Bovine  19866880842512
  misc_feature (1)..(1): n is a, c, g, or t
natgttgacccagactgagaataaaaagatatccattatattttaacttttaccacaagtgttttagtatcttaaattgtcctacggtttttcgaacaaggcccactttactcctcctattcttttctcccaagatgttttgaagatcagcaaaatatttgacattttataatctaccagtatttttttttaaccaaggaggtttcctaagtgaattattttggaacagtgtctatcatccttttaaagcattcgtaagtatcatttgttataattctagattctactcatcaagtattaaaataggagcatctcaaaaaaaactgcctctcacaagtagcaaaatgcttgacgtcattgcaaagctgttctcatgagtttttctcatgcttttttctaaactttgagaattgtgtatcctggatcagtttagggtgggagtatgaaattttatatggggtatatgtatatgcgaccagtcacgttgtttctactgatggccacgctggtgttttattctgcagtatctaaaagttaaaattgcataagctataaagcaactaaataaaaaataggcacaaatcactagtgaaactgaatgaagcaaggagtattcagttgtttcattttgtgtaagattaagaatgctctgaagtaagagatctaagtaaaaggtagatatagtaaccataaaatacatgaaatctacatttaggaaataatttatcaaaaaaaaaaaactcattttcatttccataaagtgctttgtaagtcctgttcgtggcacggaattctg

SEQ ID NO: 59337 - DNA, 839 bp, Bovine  19866881319677
  misc_feature (1)..(1): n is a, c, g, or t
ntcgctatgaacatcactgaataaaaaatgatatgctacttttttctgtttaaagtgaaaaatatgtctagatggagaaacagaataatctaagtactaaattgagttcaacttggtttgactgatttgaagatcttttttgtgtttattcaaaaagtgccttattccaaggaaagtggcttcacaaacagatatcaggagccatcatacttgaaatggattaataagtgtaatttttaaatgatttcctgtgtttgattttacatattacagtatgtgaaatctcaagtgcattgacataactattagtgaaagattggttgtgaaacagatgaaatttaattctggttctaattatccatttgcactttagagtaatgaatagaattgggacttttatatgcattcacaggagcatatgcatctctgcatctgtttcctttcttgtattaatctttagtgttgctatatttatatctgaggtttaaattatttttgtgtaggcgtgaaagactattcagtacatcaagaagaactcttttgagatgtctgatgaaatatgacaaattctgtggaacagcagtctacaattgaatttttgcttcaggaatggagtcaagccaaagcatcttaatgtgcaaaatagctttcccttctctctttttcttccattagtatggcagtgggcctttaggctgaatatgaatgttactatgcttaaactattaaatataaaaatgatttatgggagtttaaaataccagtataaggattatttacatttattattattttatttttgccactaagctgcatttgctgcataaaaaaaaattcca

SEQ ID NO: 59338 - DNA, 1090 bp, Bovine  19866881331640
  misc_feature (1)..(1): n is a, c, g, or t
natgggataggatagtgaaaagcattatattggcaggctacattttacccttggctgttagtaaccatgttctaatacagctggcacctcatttaatgtcttcatgcctctgtttcctcccctgaaatggtaatgattccctttttcactctctaaactatagagcttttagataattaatttatatcaactcatctgccaacctaaagcacaggaccagataatccactgatcaatttcagttctaaaattctgtgatcgttgatattggtccacaaatttgaaatgaacatcttgaaatactcatctagctacaatcgaagcaattatggaaagggattttcaaactaaaaggccaatttatattgaaaaacatccaaagtgtttaaatctcttttttattccatcctgacattactccctattccttggtttgaccttggctggcagaggtgtgctgtgcttttatcagtgaaaagcacaactgttctcacaacatttacaaaaatgattcacctaacatattaatagcttcatattgatattttaaaaattgttaaacaatcaaacaaaatggttcatttgtagattttctctgaattgtttctggatagagtttattttgtgttgcaatatgtctaaaaatcatgagaaaaacatattgcaagactgtttctttactatttcattgtgtaagaagaattattattactgtaaagcaccatcattccttaattcacacacacttaagtctgcagtgtgaatgtttgtgtgtgggggcaatgacgtatgtctatgttgaatccatgaccacatgtgtacatagtgtgtgtttgtgtgtgcatttatatatatatgcatgtttaatccatgaacatatatgccatgaggatgtgttatagaagatgttagtctattgattagcacaggcaacccaaatatggtcattgtaacgagtaaggcagtagggtgggagaaataattttgactcttcttttttttttctttttactaaatcatacattttgctgtcaacagacagaaatgcagatagaaataacacttcgaagatgacagcaaaaaattaagg

SEQ ID NO: 59339 - DNA, 1909 bp, Bovine  19866880404878
  misc_feature (1)..(1): n is a, c, g, or t
naaataaaataaagcacagcggaagattcactttttcagtcacacaagccatccttcccagtctcagtaggcgcacgtgggggtggctgctcctgcggtcggcactcctaggttaaggctgcgcgtgccctgaacacccagtgctttcagatggtctgtgctccctcctttccttcagcagccagtcaggtcactgtgtcttggctaaagtgcttgtttggattataagaaaagtgttctggggcagttctcagtggttaggacctcacgctttcactcccgagggcataattccattcctggttggggaactaagatcctgcaagccagtagtgtggccaaataaataaataaatatatagatatattctgattaaatttatataaaaatttttgaatggacctagatattattatactaagtagtaataagtcagacaaagaaaaataccatatgatatcacttatatgtggaatctaaaatatgatacaaatgaacttatttacaaaacagaaatagactcccagacttagaaaacaaacttatggttaccagtggggagaaggagttggggagagataaattaggagtgtgggattaacagatacaaactactgtatataaaatagatgaacaacaaagtcctactgtgtagcacagggaacttttattcagtatcccctagtaaaccataaaggagaaggatatgagaaaaatgcgcatatgtataactgaatcattttactgcccaccagaaacttaacacaacattgtaaatcaactgtatttcaatttaaaaaataaaaaatgttaacttccacttcactactctgaggcacatgcattttggaagagggtacctgaaaaaatcacgcatctccagttggcagaattccacacaataaatggtggtggttaatctgaaaggctgtgcagaagggcttatccttaaattatggagtgcacacacacacacacacacacacacacacacacacacacacacacacgctggtgggcgtctgaacgaacaaactgacgtgtgaggcctttgtgttctcctgctccttccctcctctaagagaggattaactactcttctttttctcttctcactaattgatagataatcaataaatacattcataaatttcttgcaaccactgtggtggcagaaacgtatttctgtatgaagcttaggaagcgtggaaatgggtgagctggcctctctgcagaagactgtagcccagttggtgatgggtgaacccgctcagctttggccctgaggtctgggcagcctgcacgcggccactgcccctcactgaaggacggctctatgccttcgttccatgatcgtggactctcagagacgatcccaaaatagttagggcttgagtcatggatgagagtctccacagagacctcagaacagcctctcttgtgccttcagatggtcttcagaaattctatctatctctaccttcagctccctctgagagctgacggtatctgctgaccctctcccacctcattctcccttctcctgaagtcatggcagcagcttgcaaggtgaacttgccctgagcctctgcctccgttaggtcctgggcaggagtaggctgtggtgtgccgaagagtgtggcttgggtgtccaagctctggctccactgctcttttgatctgtgatccgtggctttccctcagcctctctaagcttttttttttttttttttttgtatgtaaagtataatcataattatccataaggtaatctgagatcgtgggaggcatggaagcatggactgagggatttgggagctggactgagttaagggaactagggtgtaaagataactgattccttcccaagccgctaactaaattctgtttatgtatgctcgttcgtca

SEQ ID NO: 59340 - DNA, 1724 bp, Bovine  19866880571524
  misc_feature (1)..(1): n is a, c, g, or t
naacaaaacacataaaagtataaccagaatcaagtgggaagtgattactctcaaaaaggagaagaggatatagaaaccagaacgtgctgggaaatcccagtgaacgccccacgaagacctgctgcccggtcacccccacccccgcacccggcccctggaccgcagaggcctgcggcagcctgggcatcccaatctgcccctgctggaatccaccagccctttgaaggcgtctgcctcttcagccctggctgcctccttcccctcagggacaaacacagcagacctgttttgtgaagaactttttagtagctaaatatggcaccatgtgtcccgagggcaatataaattacagtatgcaaaagataccaccggctgaggtaaaacacactgtttctgcctcacgtcaccatgaggggaaacacacagatacttttaaaaacttcttgcttataaaaaaaaaaaacgtcccctagaaaggcctcctaacaggggctaagaggctcaccctccgccgcggggcgtgtcggtcgggggggcagggggacccctggctgcccgctcgcctccggcccggccagctcggcagctggcagcaaccctggcccactactgctggcccagagctctgtccaggttgctcttgatggtgtccaggaagtccgaggtgttcaggaagtgttcgttcagcttcacactgtcgagagagcacgtgcatgtgagagtggttctggcagacgccgccccgccgctgccgccgcatccagggcagcgtccagacagtaggcttctcgtgccgttgtgcggagggctacaggccagaggctacctggagcgcactgtcaagaggccacagcgggacttccctggtggtgcagtggttaagaatctgcacttccactgcagggggtgcaggttcaatccctggtcggggagctaagatcctacatacagcatggagtgggcaaaaaaaagcgggggagggggccacagcaaactcaacaggaacccagcgaggcttggctttgcttttccagattacaacaggcagctcagtaaagctcttctgagagaagccaggaggtggttgtggcaggggatggaaggctctgagcagccggcctagggacagggacccattcactgagcctggtgtggggaggctagccccagccaccatcactcagggccatggacctgtcctgtcccctggcagccaagctgacttaggaagaagcctctacaagggaccctgggctacgatccacctgaccctgagcccccggaagcccagccctgccttgaccccagaccactcacttgctgaggccgtggatgcagcccgccaggtccttggtcatggctccgctctccaccgtctcgacgcacaccttctccagggtctgggcgaacctgcagggcacggggcagagtgagaccccagctgtatggagctggagcccagaacctgcccagaaccaactcacctgatgaggtcctggttcccatccaacttgcccccggtgttctaggccacgcgtccaggcaaagatgctggcgatggggttggtgctggtcggccggccctggaggaagaggtcgcagggggatgaagagccaagcagccaatgaaaaggccccttggacacagatgccccctctagactgacaggaccaggcccatgcacccagccctcagggccagtgggcttgggctccagggatag

SEQ ID NO: 59341 - DNA, 1204 bp, Bovine  19866880592931
  misc_feature (1)..(1): n is a, c, g, or t
ncagtgccccagaactaccgagccctggctccagagcctgtgctctgcagtgaggagcccctgtaatgaggaaactgtgcactgaactagaggagcctgtgtgcagcaacagagacccagtgcagccaaaaataaataaataaaaatgaaaagggcagccatgatgtcgtgataaaacagggtgatctccctaagaggctgagaaaaagctctttgcttcccattaaaaaaaaatcagacttgggtgatagaaactctagaataagcacaataactcatccctcaaggcacaaggctaaactcatgtggagagataactttatcaaaacaaagctgccatgacctcacccttagaaagaatcaaggaagttaactataatgtttggtttttaaattttcccagaagagcagcagtcaatataaccatgagaaaaagacaaacacttgtagagaaaaaaaaaaaagggacaaaggacatgaatgggcaattcacaaaagaaaataaagcagcctataaatatgtgaaaaacttttaactcatcattagccaaagaaattcaaattaaaacaatgacacacagggaatacagtataaaggtaaagaggtgtaaactcaagagtcttattgtctgaatttgaatcctaactatgtctctgactagatgtgtgacctcaggaaagttacttaagctccttgtgtctctgtgtcttcatctataaattagggaaaatgacaaaacccaccttagggcttccctggtgcctcagtagtaaaggatccgatgccaatgcaggaggcatgggtttgaacccctggtctgggaggatcccacatgccatggaactactatgtcccaaaagtcactaatacagggaacacaggttcaattcctggtttgggtgttaggtctcacatgctgaggggcaactaagcccacaactactgagcctgtactctagggcccgggagtactctagggtccacgtgccatgattactgaagcccgagcgcccaagagctcaagctctgtaacaagagaagccactgcaatgagaagcccttgcactgcaactagaaaatagtctgtgcagcaacaaagacccagcacagccaaaaataaataaatttaattaaaaagacctaccttacagagttgtcatgaggattaaagattaagtcctcaataaatgttagctatcacta

SEQ ID NO: 59342 - DNA, 5169 bp, Bovine  19866880624052
  misc_feature (1)..(1): n is a, c, g, or t
ngtggcagggtatgagagagggtgagagagaagaggtgtgagtgacagcgagcgttagggaagtggagtggtggttccaggcgcttcctgggagccccatggtttcagaagcatttcacaggcatgaaatgtgccaacagcgaagccctggcactcctaacaaggagccatgggacttgcctggtggcccagtggtcaagaatccacactttcactgtgggtggcacaggttcaatccctagctcaggaactaagatcccacacgctactcaatgcggccaaaatatgcccccctcaaaaaaaccccaataaaacccaaaacgaagagtcattttacaccagggtcttttctgctgtttctctgtcctccatccttgctcagccctgtcctctgctagaagacaagatgtctcagctggcttccactgagcacccccacggagtctggggacactcctagaaagtcagggaagagaatcctgacccacagagaacgtagtaagacagctaagcaaagagggcaagggccagaggaagtgcagcaacacacaaggagatgctgcgtgtgccgagcaccccagaggagtggcttgtctcctgggaatgtctcttgtctctttctccataaaccttcgcccccaccccacagtggcttcctatatccaggcaggtctgcccaccaccctgaccgttctgggcagagtgaccttcaagtatgtctctgtttcaaactgatgtcacttacgggtaacagctgcgtgccctctgctctgtgcagtatctccacagtggactgagtcacccaaaccagaatgcagccactaccctttggaagaatggtcctcagggaagtgtttcagctctaacttttatctagaaatcaagaggctctccatcggctcatctgacccatctctgcatctcctgtttttcttttcctttggctgcactgggtcctcactgcggcacatcggtgttctcctgttgcagagaacgggctctagagcacgcaggcttagtagtcccacagcatgtgggatctcagcgccctgaccagggactgaacccctgtcctttgcattgcaaggcagattctcaaccactggaccaccagggaagtcccccactttacttttctactgtcttggaaattaggtggcagagtggttcaacgaatgggagtgtgaattcgggattcactcatacctggttcaaatcccactactatcccttacaggtgcaaggcctgggaaagtggctgcctttatgaacctcagtttttctgcctctaaaatgggtcaagaatgctgtttcttacagagtcactgaattagaagtgcctggcccagagcaggtactcaacaaacattggtcctccttatccttcccttgctggaattggggaaaagtgttagtcacttagtcaactgtgtccaactctgtgcgaccccatggaccccagaggcccactaggcttctctgtccatggtattatccaggtaatactggagtgggttgccgtgccctactccaggggttctttctgacccagggatcaaacctgctcctgtaatgcaggcggattctttaccactgagccacagggtatctcattcagtaactatgaaagtcgctcagtcgtgtctgactctttgcgacctcgtggactatacagtccattggaagtctccaggccagaatactggagcgggtagcctgtcccttctccaggagtccttcccaacccagggcttgaatccaggtctcccatgttgcgggcggattctttaccagctgagccacaaggtaagtccaaaaatacagatcttcccaacccaggaatcgaactggggtctcctgcattgcaggcagattctttaccaactgagctatcagggaagcccctcagtaactataaacatgaattaataatacatctcagtggggacttccctggtggtccagtggttaagattctgtgcttccaatgcaaggagtgcaggttctatccctggtcggggaactaagattccacatgctgtgcagcatggccaagaaaaaaaaaagcaactatactccagtaaaaaatgttaaaaatatatatatatatataactcaagggaaaaattttacttgggattatttcctggtcagttttaagaaacacagtcaagcacagaaaacataattttataaatgatctgtaaacggctcatacagagcagatatttcaggtgaaatgaaaaggaattcaagcaaaaatactgtatttattcctcttaagggtttttcaaccctcaaatcaacctttccaaaggggatttccccacatggaataacaatgtaaaccccaagtcccctggcttataccagagtgatctgtcaatggcttctctgctcagaacccactggtggctctcccaggtctctgaatgaagttcaagtctttggacacattcccaatcggcctctccagctccatcttctgccatcccacctcgacaccctatctcccatccgcaacaaaccaccactgactctttgaatgcccctgttctttctgacttggtatattctagtcccccagtggaatgcctcggcttcccttgcctgctaagactcagctaaacaccacctccaccagtaagtcttccctgaactgctccccagcttcactatgtctgcagagcaaacttctcatgcttttgtctgcatatcccatatcccttcagtttgagggcctgctggggacaaagaccacgttgtttcccctttatatcagagtttactaggtgtttggtatttactgactgaacaaaggaataaagaaaatgatggaggtttttaagagaaaagaggactcacggtggagcagggctctccctgacttcacatgcctgcagtccacaggtaacaatgatcaccacgtatcacacagcacagacaaggtctgtatagtcaaagctatggtttttccagtagtcatgtacagatgtgagaccataaagaaggctgagcaccgaaaagaatcgatgctttcaaactgtggtgctggagaatactcttgagaatcccttggactacaagatcaaaccagtcaatcctaaaggaaaccaaccctgaatattcattggaaggactgatgttcaagtgccaatactttggccacatgatgcaaagatctgactcattggaaaagacattgatgccaggaaatattgaagttaggaggaggaggcagcagcagaggatgagatggttggatagcatcaccgactctacagacatgagtgagcaaactctgggagacagtgcaggacaggggagcctggcatgcagtagtccatggggtcgaatgggacacaacttagtgactgaacaacaacaatacagcataaagcacacctattaaaaagtaggtacatgaacccacttcacaggccatgaaatcaaggcttgctgggggaggctgtggctcgtcagggctgggagatggcaagccaggacaaaggccgtggctccttggatcctgagtcccatggcttgaagtaggtcctccacttgcctgtgattctacttctgtggcagacaaccctttagattcatccctgcttgtggggagaagaacaattctgtgtttcagtgattaagcccctccagggcttcccaaggccaagaaggtgccaggttagaagttataactcagggacttccctggtggcccagtggttaagaatctgccttccagtgcaagggacacgggttcaattcctggttggggactggtcaggaaactaagatctcacatgcccggggtgaccaagctcatgtgccacaactactgagcccaaaccctgtggagcccatgaggtgcaatgaaagatcccacatgctgcaactaagacctgatccagccaaataaatatttttaaattaaattaataattttttataaaaaagaagtagcagcacacatgggagcaaaccatcaactgtgtcttgggcgacccagagccaagaccctcacccttggacccaactcttccatcctgctaagggtgggtgccacacaccatctctcactggacaccaaagctgcccacttctcatgcctttggtgggtccatcatcaccaaaagtggaccctggttttctccaaatcaatgagctaagaagcaaggtgaggagtttcactggaatctaaggttgcagaatgaggcctgcaacactgtgtctcaaatgggggaggcgggtagagactgtgggaaggaggggccattgagggatgagaggcagggctgggcagataagagatcgcatccaccagacagataacgggaccacaaatgacaaaggagctggaggccgtgctggagtgtggagagaaagaaagagcatattaaattttaaacaaagcccaccccgggggaacctccagccttgtctcccaacctgtgcctcccatctccagctcacaagtcgccaagttcacagaaatcgaaacatccctcatctctagggggttgggttttgttttgtcgctgtgtctctggggggtgggggaacttgggcctcccagaggcccaggggtcttcccaccaggcctgagaaaggagggcaggctagaagcagcttcagctgggacagccctgcttggaagggggagcaatggcagggctgggaaccagagcagagcgggtacaagaaaagagctggcagtgccaggtccagatggtgggcagcagcagagatgtcaccaggagccaagaggagggaagaaactaagaagtagggaaggtcctgagaggccttgccaactgccataaagactgtgctggcgtggaggaggaagagaacagaaaaggaggaagagcgagcccagagctggagcaggaaggcccaatttagcccaagcacgtgttacttcctctgtaattccatcaaacctcccccaccccaccccaaggtgatgactggggaatggggctgcaagggctgaaggtctggagagaggcactcccctggggcaggacccatggggcagggcctgaagcttgcacacagcatcctccatgccagccccacaaacaccaacccagccaggcaggaccggcttcgggtctccggagtcaggacaggatgtttgtttcacaagcaccttctccgaag

SEQ ID NO: 59343 - DNA, 1458 bp, Bovine  19866880825862
  misc_feature (1)..(1): n is a, c, g, or t
nctgtgctccctggcattttccacgtgccccttctctcagcttccttcctcaggttcggaggcccttctgggcctgttcagactgagcaacagtctttcccaggtgaagctagcaaaggcagggttttcattcctgggtctgtgctgcatcccagcccctcccccgcccctccccccgagatgggcctcaagcatctcggggccttgtattggtcctcgtcactttgtgatcccagcccctgccacccagctctgcacagactgatggctccatagatgagtgaggttgaggctcgctcaatcaatcaataaaccaatcagtcttcctccactcagcctctctgctcccaggcatttctcattatccagcgtctggatgatcagaaggaaaaagaagcctctgcataaaggtgaccccatttcaggtttcaccgtgactcactgagtattgagaaacaggaagagccagagaagggaagacgaagaggggggccagggatactcacctgccccaccctctcagggggaccttcagggagatgtttggtcactagactgagggccgagtgcgggcagggactgtcccgtgcaccgcattctccccagagctcagcatgagtcccacacacagtagacaccccgtcatagctgctgtctgtctgcagaaaggaagcaaggacagagcccacctccaggcctgtttcgaaagggggacttgggattgtccggggcgcctacttggctcttagtcctgggtctcggccagcccaaggaagttgctgatctgtgatgtccacagggccccacccttggaaggacactgatccaacagctggcagccagtgaaaagggagaagccgccaccctttcaccctcctgagcaggcagccacttccttgaggcagccccaggagaggataccccatcccagggccctttcaaagtgtcccccctcactggtacccagcccctcctgagcagactcgggccccaggctggcctccagccagaacagccgccttgctcagaccctcctccttggtcctcctacctgggctctcaactctcagacccaaacaggagaacccagagggccaagaaccgcagaggccaggccttactcacagcgtcctggcccagggctctcccggcctgggctcacccggggctggggcagaggaagctgaccctgaaataaagctgatggctgttggcctgtgcctcctgcttccctgagaagaagcacttctcttgtgggtgtagtgagttttggggggaagcatttaaagcaaccctttgatgcttctccaggaaaactgcatttatttttttgttacttttaggaattaacttgcggttcccagcccctccctctctcccggaaaggagagaaagagaaagaagaaagggtctgcattgtcccggtgattggcaccttctgtgaatgaggggtcaccg

SEQ ID NO: 59344 - DNA, 782 bp, Bovine  19866880836425
  misc_feature (1)..(1): n is a, c, g, or t
ntacctatatagtatttttaaaaatttatttatttttagttggatgatgattgatttacaatattgtgttggtttctgccatatatcaacacacacatagttttattgggatgtctttcctaatctctttatgtggtacatacaaactaattacagagacttaatatgataatttttcagtttttatccacttgactctttattataattggtgctgtttgccagctcctccatgaaacatgttattgtttttgctttttaaaattgtttttaatctgcctgatagtcctctgttttctgcagcgtttctaccttctgtgtcctagtgggcattccttaagatgcagttctgtttttagctacattctcttattctcatggtttcagttgttttgaagactctttgctttacgataaacacagcgtcttcaattggctactcgacatttctctgtggatagctttctgtctcttggactttctcgtatctaaaactaaacctaccttttctcccaagtgaacttctcctctgtgtaagtggtaccatgccatcattttcccagccatccgggctcaaagccttggttcccttggactcctaagcggtctttccccaagccttcctcggttgcttgcagtgtctgttttatctgttgaaacagcctcccagcctggtttctccagcttcagtctcttcactattcactgtattctgtgtcttgtcgacagtcagatcttcctgaggctccatttttagctttggcttcaaagctaggacttct

SEQ ID NO: 59345 - DNA, 652 bp, Bovine  19866880886410
  misc_feature (1)..(1): n is a, c, g, or t
natagggtctgtctcccaagtggatccgctggtgggtgatgaagtgggagctctggttgaagctcttgccgcactcaccacatttatagggtctttctccggtgtggatccgctggtgcttgaccaaggcagagctgtcggcaaagcccttcccacagccgttgcacttaaaaggcctctcgcccgtgtgtgtcctctggtgcgtgaccaggtgcgagctctgactgaaactcttgtggcagtaaggacagctgaagggcctttctcccgagtgagtgctcatgtgggccacaaaatgagagctatctcggaagcccttcccacactcggggcacttgaagggccgctctcccgtgtgggttcgctggtgcttaatcagatctgagctctggctgaaactctccccgcaatcgagacacccatagggcttcactcccgtgtgggtcctctggtgggtgatgaaattggagctgcgactgaagctcttgtgacactggaggcacatgtagggcttctcccccgtgtgggttctttggtgcactgtgaggtgcggtttccgtgcaaaagtcttcccacactcggggcactggtggggtctctcacccgtgtgggttctctggtgtttgatgagggtcgagctgtcgctgaattt

SEQ ID NO: 59346 - DNA, 1007 bp, Bovine  19866880887112
  misc_feature (1)..(1): n is a, c, g, or t
ntgtttgaagcctttcccgcactcccatgcacttatagggcctctcaccagtatgggttcttcggtgccttatgagataggagctctggttaaagcttttcccacattccacacacaccagcttcttttctatatatccttccaggagcttgtttaattccttctcctgtgaaaagggcccctgctgaccctctcccaggagggttccatgctgcccttctaattcaagacccctctcccagtttcctccccaactaggaggaggagaaatatctttattggccccttctaaggatgttccacatggttctgccgtttcagaaatgtcctgatcgagttgtaccacctgattcttaaattctgaaaagttaacagagtaacacaggatgaagttattacttatcaggaaaggtcatcagaaagcagcaagaaagagtaaaattagtatttttgctacagaccacatttaatctgactactctcattctgattcctgaagagtatatccctggcggcttagtggtaaagaatccacctgtcaattcaggagattcgggatcaatccctgggtcgggaagatcccctagaggaggatatggcaacccactccagttttcttgcctagagaatcccatgtacagaggagcctggcaggctacagactatggggtcgcaaaagagtcagacatgacttagcaactaaacatcaatcaggaaagatcagcagaaagcagcaaaaagattaaaattagtgtttttgcaacagacgacatttagtctgactactctcattttgattcctgaagagttcactgaagatcactgagcttcccattcatgacataagcaattcccaagccctttttattttaagatggtccaatgaaccttgaggtgaccttgatatcaagagtaaaacacgtattgtcagaactgggcaacttttttcaatgatgttagaatctagacaaaagtgaaatgtttaatttaaatgaagaccttatttg

SEQ ID NO: 59347 - DNA, 823 bp, Bovine  19866881068442
  misc_feature (1)..(1): n is a, c, g, or t
natgatgggctcccggaagaccgttcccccgaggatgttccggatggttccattggggctcttccacatcttcttcagcttgaactctatgaggacaaagaggaagtggccccactgcagcccaaaccttccgaccaggatttgaaccctaagcgggaatgtagctagaagggggctcctaaaaaccaccctggggaagcagcagagtcgagagtggccatgggcgctcctgaatcagatttcttagcttcaagatccagctgtgtcacctcaggcaagagcccataaaacgaaaccgttgataaaacccctggccttttggcttgttgtgagacttaaatgcatgttgtgtgtaaagtgcccagaacagtagctggcacacggtgagcgctctgtcagccgtatcattgccgcttcacgctgggcggagcccagcctgacgaacctggcaacacacagcctcagtccagacgctgtgcttccagccccacccgccaggctcagcctaagacagcgaccctccaactccttgtccccacccccaccgtcccagctgccccacccccaccccctcgcaccttccacacgggcctcgtcgggggtgatggtggcacacttcacagccacactgtacttctgggtggccaacgcggagtcgatggtgacctgatcattggtctggtcacggttcgggagccccaggtcgaaatacttgagctggacgtccacgtggggcaggatgagctagaaacagacagccagggccaggcatcagcccagattgactggattcaggggcacctggttcaccccgtgggaaggg

SEQ ID NO: 59348 - DNA, 763 bp, Bovine  19866881116090
  misc_feature (1)..(1): n is a, c, g, or t
ntaaatgacccctttacaaggttctttaatttctagggctgagaaaatactttggagcacaggatgtttagaaagaagcatccttgaaaccctccacacattatttatttacaccataccataacaaatggagggcttcctgggtggctcagtggtaaagaacctgcctgccaatgcaggagatgtaagagacttgggttcgatccttgggtcgggaaaatcccctggtgaaggaaatggcaacccattacggtatctttgcctgggaaatcccatggaaagaggaacctggcaggctacagtccatggggtcacaaaaattggacacgactgaagtgacttagcacgcacgcacacataataaatggaactaggaaattacaaacggttagaagccaaacaaaggactaatgcaataaacagatccagtgtgttgtcagtaaaaagcgccaatgtcactcactttagttgcctctgcatcttcccctgacattgattcattataaaaatactcacttgcccttgctggctaagttatccaggcaggtcttgatatagcttttatagtagtccacctgctctccataaaaggtggccttagagttcagggcagcgtatgtctgctgcagtttcaccagctcagccttcctcctctgtcggtatctccgctgattccgaatatcctgagacataattattaaaatcacaaaaataatgatgtcatgtgcttctcgaaccattaacactagaatctggcagtgtt

SEQ ID NO: 59349 - DNA, 1176 bp, Bovine  19866881117837
  misc_feature (1)..(1): n is a, c, g, or t
nctttgtacctgtgtgtgatttatttaggcatgatccgggagaagaatggggatggaaaggaaaggccagagacccaaaacttggtatctcttcctgggctacatctcttactaccttcagctcatgaggtctttcgttgttcattgctaatgatcacctgtgcctagaacagggcccggcacatagtgggccctccataaattcttgttgagtaaatgtactgggtgttaggaaagagttccctcccagaagggaccgacaaatgacagacgggaggcagaggcagggaggtaattgatgggagctgcagagttttgctgtgagtcagggctttgaacaagctccagacaggtaaaggcaggaggggctgggaagagcaaatctcatggggtggagccactgggtggagacttgtgaaacaatagatcttgaattggacaggttgtggggaggataataataaccataggtcttgggccaggcttgtgtaagtgctctatgtgtattgtctccctaagagtcctcacaggtgctagttgttgcttgcaggctgagttgctcagtcgtgtctgactcttggccaccccatggaccgtagcccaccaggcccctctgtccatgggattctccaggcaagaatactggagtggattaccatttcctcctccaggggatcttcctgacccgggaattgaactgctgaattggcaggcaggttctttcccatttagcagattggagaactgaagcacagaggagtcagtaactcattcaagagcacaaagctggtggtgtctgaactcaagcagactgacttcagacttggctgccctagaatgatgatgagttcaggtatttctgcccatgtcaaggagctgggcattcagagctttggggttgctagaaaggatagcaacggaaaaattgaaaaagaaattgttggtctgcagtgcagtgaagctggtcagggaaatggccctctgcttcctttgccaaggccctcaaggtgtctgaagactgtaaaagtttttttttttttttttgaaagtatttatttatttggctgctttgggtcttagtttggcatgtgaacgctttcttgctgcttgtgggatctagttcccgaccagggatcgaaccctggccctctgcattcggggtgcagagtctagcca

SEQ ID NO: 59350 - DNA, 1021 bp, Bovine  19866881145501
  misc_feature (1)..(1): n is a, c, g, or t
ntagtgtccgacactttgcgaccccacactttgcgaccccgtgcactgcaggacccgctaggctcctcagtccaaggaattctccaggccagaatactgaagtgtgttgccatttccttctccaggggaacttcccaacccagggatcgaatctgcgtgtcccgggttctttaccggcagggttctttaccactgagcctccagggaagccattaaacccgtacaacctctctgattcggaccccgttttacagagtaagaagctcagagaggttgaggcacttgcccaagctcacacagcgcggattccagccttggtaggtcagttgatccgacacccaagcccaggctccttcgtgacagatcccaagaacccctccctcggccactgtgaggcctcacccgggcaaaatgggcagctcggcacttacaccacccagccgcctctggggccgtttcctttttcctattcttgctctctggaaacgcatcctatcggagctgatcctatgggttctctgagcctcgatttcccctttgtgggtgtagggagtaggggtctcccactagtaacaaggacgagggagagaaaagagaagagagtggctctctccctcatcccacccccacctccgggctaagaccccagcccggtcctcccggaagcgcacttcccaccaagcaaggtcctgcggcaggaatggggctcggcccctttaaatcccgcgcgggaacgcccggggccgggccgcgcagcccgtgatcggccgtcgggaattgccggcctccgcgcgtcctccggaagcttcccctcgcgctgtccccagccccgcgtgcccactcggttcgccatccctcgagggcgccgcggccgtggggaggatgagccgcatctatcaggacagcgccctccgcaacaaggcggtgcggagcgcgcggctgccgggggcctgggaccctgccgctcaccagcggtaggctccgcccgcgtctctccaccgcctcccggcccggcctctgt

SEQ ID NO: 59351 - DNA, 961 bp, Bovine  19866881159378
  misc_feature (1)..(1): n is a, c, g, or t
ncctacctgtgcctgtgcaaggcatttaaaattttccaagcttgtcatcttgttctggtctcagaggactgcggtgtagattaaatgatatgagatatacaaggcctctggcacatggctccccatccagacaggttttgctccccacctcctagagctctgtgatcatgttaccatcactgggcctcagtttcctcatcaaaaaaaataggtacaataacattacccaatagggctattgaaagcctcatgctcttctgataggagtgcctcatgttttgaaaggatgcaacagaggatgagatggctggatggcatcaccaactcaaaggacatgagtttgggagatggtgaagggcaggaaagcctggcatgctgcagttcgtgggggtggcaaagagtcgcgcactaagcaactgaacaatatgttttcaaaaggccccattcctgggaccatcctagcaagactccattttacaaaattgccatctctgctttctaccaaaacaaagaaacacaaatagaaaaaccaatcttagagccattatcctttttgagacaaaaagccaatattattcacactgctcggcttggaagattttctcagaaggaaaaccagaagtgacagctcaaggcataacacgggttccaggattctctccagcttcacactccgagaccgacgacccacccacagcagccgtgacaggacagacagctagtgcaaagcgcaggggggatccaccggggatttcagcccaaagcaaaacaagacactaaactcctttacctgtaaatgagccaatactgatcaagcttttgttatcagcaaaggcactatgtggacatatgtttccccagtatcaaggaatatactgatacatgagaacacagtaccaccgctgttgtggatactcatcagggcggtggcctcagctcttcccaaaggccacgtctgttt

SEQ ID NO: 59352 - DNA, 882 bp, Bovine  19866881170612
  misc_feature (1)..(1): n is a, c, g, or t
ntttgtgaggatgctgtttctatatgctggctctccacttgactgactggagccccaggatacctgcaatgacagtttttaaaatcttgaatctggctttacagtgagtaagcccggcttcctatgtctctccccagatccagtccctgtctgggcgccctcggtcctgtgatgtgggaggtggcaggtaagagaggttctttcagttcttgtttcagggccgtcctgagggttttaccaaaaggaatgtctcgctgcttcatcagagaacactgagaaatttcactcattacatgagttgaaagtcaactgaattttcacaaaaacaacagctcttttttggtatgctcatatttcatttgttcaaagtaattatatgacataactgcaaaagtaaaactgccataaatatgtttgagaatgacatcaccgactctgggtaaacaaacagccccactggaggaagccagggcctgcaggcgttgagggagcccgccagcctcacgcctttggaatccgcgggccgctggcagcttggtgagccagaagttgcctaagagagtttgcacaaatatactgaatgccacaaaaccatgaacctcaaagggatagattttgtgttatgtacattttatttttaccacatttttttaaactaatggaagatgattaaataggaaaacttgtgatattaaaaggagtttctatggaacagctaattaatgtattcagaagtatacaacttcactccctgaaaaatgtgagagacagctttcaaaaaaaaaatatgtgtagtactaaaagattaaaacgttcctgaggagatgggaccaaggaagaacgggagacaacagaggtgatgaggcccacacacgacagacc

SEQ ID NO: 59353 - DNA, 794 bp, Bovine  19866881256066
  misc_feature (1)..(1): n is a, c, g, or t
nggttcgatccctggtctgggacgatcccacgtgccagggaggaactcagctcggctgtcacaactactggttctgtactctagagcccaggaaccacggacaagagaagtcaccacaaggagaagcccgtgtactgcaactagagagcagcccccatgcatcataaccagagaaaaacccacacagcaatgaagagccagcactgccaaaaaaaaattttttttaataaaaaataccaatttgctcatatttacaagattcattgttcactcaacgaatattcattgagcaaatatcacgtgctagaaactgtgcaaaggtgctgaacaattcattacctggtgttgctaaaagatgctctattattattttgcaagtgggaaaaccactgaccctctcattttctcatctctacaatgaaagagttgtaagagatgtttcttttcacttgagtgctggtgcctgtatgaaagcaaactaaagtacttacgaagatttcggttttgaaagactcaatttattgttaagctttcttgccgaatgacgttccagttgttcctgtagattattttgaggaacagcagccatgatcctgaaaaatgagggagaaaaatatcagtggaattacacgctttgcattaatcacaatatttactgttccaactgtgcccagagtaatgagacttttttttggacaaaaaactgttttgacatttaaaacaggtgacatttgaaatacataatctttaactaactgaaagctcacttatagcaaaatgacctggttttcccc

SEQ ID NO: 59354 - DNA, 873 bp, Bovine  19866881259360
  misc_feature (1)..(1): n is a, c, g, or t
ncccggggggcgcaccactgggatgtgaagaccccgtagaagagggtgtcgggccagtcctcggggcggggcgtcagcgtgaacatgtcctgtagcacgttgaacgggaagccgtcgtcgggccgcaggcacagcagctgtgccttcaggaaggacgtccagcgctgctgcaggacgcgcccgcccccttcgtcgccctgcaccagggagaggggctgggctcaggggacagcgcctcgcttcccctccccagacaccaggaagggcccgacggacacaacaccaggcctgagctcatctcaaatcaagaagacagggcttcgtcgccctgcaccagggggagaggggctgggctcagggacggctcctcgcttcccctcccgggacaccaggaagggcccgacggacacaacaccaggcctgagctcatctcaaatcaagaagacaggggacttccctggtggtccagtggttaagaccctatgcttccagtgcaggggacgctggttcaatccctgatgagggaactaagatcccacatgttgcatcccatggccaatatatgtgtgtgtttatgtgtatatatacatagagagagagagagagagagcacgcctccggctagatctaaatttcacataaacaataaattaaaaaaaaaagacttgaagtggcagccttcagtcccccccttgccagaaggctggctaggtaaatgacagtgcttccctaactgcaaggagccagaaaaaggacgaagggaatctgtctacaaacatgaaaagacgtcacgatttactgctgagcagaaagggaggctaaagagttgcattacagtgtctctttgtttgcacaggttttacacaagacaaa

SEQ ID NO: 59355 - DNA, 1656 bp, Bovine  19866881283582
  misc_feature (1)..(1): n is a, c, g, or t
ncttagcactctgcaggtgaggttttctaaagcaggggtcttcaccctgcaggatctaatgcctgatggtctgaggttttctaaagcaggggtcctcaccctgcaggatctaatgcctgatggtctgaggtggagctgatgtgatgataataaagtacacagtaaatgtgatgcacttgaattgtccagaaacctaaccacggccccctccctaccccaccctgctcctgtccgtggaaaaactgtcttccacgaaaccagttcctggtgccaaagagcctgggaactgttgctctgaagggcctcagtgtcatcctttatgatccagatcagaggaaactggtttgcactctgggctgagccggccaccctggccaccttctcctctgatgtctgtggacccgcctgccctcaaggccctcccgccccactgccctccgtccaggccaccccagaggtttctggcctctgccctctggtcctcctcctacctctcctctagcctgcaggtgagaggttccccagcccccatgagtcctgggagagtacagacccctcaggggccggctgcgtcacccccgtcctggggctccagcctctttccctgctttctgtgtgcagtctgccctgaacctctcatctcacgtctgcatgtctcaggggctgcccccggccccaccttcatcctcctggctggactgcaggtgtccacccctcacgtgggttctgacccacgactcaccatgtgacagtgcgggtggttaggtgactaaggagcgagctggcacagtactgctgctgacgatggcttgcgtggatggccatgtgcgtctcatgtatgcatgtgtacactctcgggctgaatgtttccccagctgtccctcccctccggagatacatgaaggcattacgtgaatgagagaggcattctttactcctctcctggcataaatccggactcgacttgggtgtgtgggtgactgcaaaataaatgttgattacagcatcggcagacgctgccagggacgctgctgggctggaggctcaggatgagtcacgccggctgccgtgagtgaggagagggctccgcggccaggccaccctcctcggccgtcctcagccctcggcacgttctctgcctgctgctcttctgccattttcccttcccttcatctctcgctgcagcagatggggaggtgggtgggggcttctgagcaaggttctcttcttcctagactgtctcagcccctctcttgtgtactgcatcccatagatcatgctcactggactgaagggctcagctctgggaagtggaaactgggatcctgtgtcacagatgaggggcctgaggctcccccaaaccaatatataacggggtgaagccggaccccacagccagtggagtctccgttgactcccaaagtgcccgttgacttgcaagaatctttctgacaccctttaaaaaaaaaaaagcaaagttactctgtctttttgtggcaccccatgctttttgtgcttttttcctctcctgttccatgattctttgtcttgtctctgaaaccaaaatgtgaggtccccgagagtggggtctgtgtttcccaccagccaccatcaccagccggcccagggcgggatagaaggaagataacagcagca

SEQ ID NO: 59356 - DNA, 698 bp, Bovine  19866881614088
  misc_feature (1)..(1): n is a, c, g, or t
nctatgaaaagatgacctagtccttgggaggttgagctggctccagttttatagaccgctgccctggggctgaccacctaggtcactccccaaccctaccctctaatgaaaccctgctcctagctggtggcaatccctgaaaactcaaggaacctaggcatggaattagggtcagggtcaatgttagggagcctcctggtggtggcctgcccccttcccatcttcctctgaatgctggacctcacaggaggctgtccacactcaacgcctggctgggagagcacagctaaaattgcagtgagcggtagggaggcactgaggacgtagtcacccaaaccatcattttggcacattctgttctttgccacaactaccgaacctgtttcccccagtatctgagtggagctacatgtgtgcctgtttttgaccaggaccaaacttggttttgacatcttgctggatgacaagctaatggttgagggtggtcgaggacggtctcttgagttttgcaaaaccaaggtctgccctgaacaggatcccgggatagaggtggtagaacatacagtggcggacgcagaggcattcgttcggggggtggtggtggtggtttccccgcttggtggtgtccaactcttttgcgattccatggactgtattctgtcaggttcctctgtccatggatttctcaggcaagaata

SEQ ID NO: 59357 - DNA, 1752 bp, Bovine  19866880777104
  misc_feature (1)..(1): n is a, c, g, or t
ntctcccagaagtcactttctcccctgcctgaggataagaatccttggcacaaacatcaggaagcagccttcaaggttcccgagaagggaaagctcgtcttgtgtagacagctattcctgcctttgaaccacaaaaatcccccactgaaaactactaaatggctttcagtacattgggagatcaatgtgacagattcctcagactctgagcaaccctggggaaatgacaagtacagcagtctgtttagcagaaggggagacagagctgccccccgccagcctgccacaaagctaaacctgccgcccacccaactcttaagggtgctgtgaggaatattgggagaatggatctgaaggatgtggtagtggtgttgagttctggcaaagagccatgcatttgtaagcaaaacattaatgactatttattgcaaacattgtaggaaaattgtttatattgcaaaattattaaattctgactgattagagactgagcagaatatgtggctgagttatactgcaccaagagttctcaaatctgagcatgatcaaacctgtaggatgcaggttctaccctcagattttgattcagtagatctgtgagagcgttttgtttgtctgtctttgttgttgtttttggctgcgctgggtcttcattgaggtgagggggctctttgttacaattcgtgggcttagttgctctgcagcatgtgggcttttagttccctgaccagggactgaacccgtgtaccctggcattagaagatgaagtcttattcagtggaccaccaagtaagtctctgtgagggtttttttttttttttaaacaagcattatagttggttctgatttgggttatctgtggctcacattttggaaacctttttctagaaagataagaggcttcttgtacacttcaaattaggagattgtaaaacaagagcacaaatgtagtcagtttttcaaagcataccaggaatatggactacgcagatgaggcttctcaggtgcaagggagttttcaaatgtctgttttgcagttgagctgcccccatactggagtgatatgaagcagcagaaagtctgtgtggttgagctacagcctgatcatccagaatacagaactgtggcgagcaagtttcaagagacctgtgcacacttcaaaatagagagggtaagccttctgcggacatggggattctccatggtagaaaaagggctgtcatggtcctggataaatacattttcattctcatttgttttatcccaaattagaatattttatggtaattaggttttaaattctagatcctactcctgtcactatgattactgagtcattgagcttcttgtgttattacagtatcatattagattataatacaatattataacactatatatttactttgtgaagcaaggtaacaaaaatgcctaaatatggctcctgaattggagtggataactagcaagcacgacagagagacacagggaggctcctcagatcagggttgtatgcttctgcaccaccactcacaggtcagcagtgccctcttccttgataatccagtggtgccttccttgttcatttcctttattttggatcttctgcttttaatagtttaaaaagtttgctttttgaaattattttctccttggatttgtacgacaatatttagatgctttcctctccttcttttaactaattttccttttattatctctggtatgtatttctcctctaaacccctaatc

SEQ ID NO: 59358 - DNA, 1783 bp, Bovine  19866881066085
  misc_feature (1)..(1): n is a, c, g, or t
ncccaagttcatttgaattaagattctgttttgctagctgcctcctggattgtaattctgatccccatgtaaggccaggatcaccatacacatggaaaataatcaggttcacctagagagcaaagaaagaggacttttctcaggaaaaaaaaggaaatccagacaaccaacactgcagagatcagagcctgagcccctaagcaacctgtcaagagaaccacagggaccaaatgaagagccttactgcagtttatcatttgaaaagctttataggaagagggaggtagggaaaattaccattttgtttatgtgaaaatatgtttctttcctgtccctgacagcaagagtaattttgagatcctaaatttactcttggacttggtttttagtagatggttgaagaggtccagttccttaatggattcattaaaggaaggtggtacatctagtcctaagatgaaaaatgtcagagaattggatctttccccattcctaccctctccagtcctctctaaagagcgcagtatattctctcagacaattccatctcctagctaacacttgtaaattctacatcattttgattttgtaatcctggagtttgtatcttaacatatctgaagataaaagccttcagaaatctttaatttgcttgtatcaaaattctcagattcctcccttgtacagactatttattaagctgaaagatgaagaaatgattcctctggaagtgaccacctcatgattttcaccttagcagtccaaagactgagagagaaaacaaacctgtcatcatcctcagattttcttctgtgtacatttaacatagtattctttctccagtgtgactaatgggtaatcttgactaccccaaaagcaggaggaataaatatattccaagaggcttcatggtcaaataattaggcatactctgggaaacttggagagtactccttcctctgtctccttggagagcactaggatgtgagttgtcactgatactcctactgcatattggaaatttgaatagtgtgtcttttggaatgagatgtttgccatttctcttccagaaagagagtaataatacatagtcatgatagcttaactcactaataaatccttggacaaatgtaatcccttcattccatatacaaagaattgtgaatcttagtgaagggtctctttactgtctttctggctttcctcatccccaaaccaatggggtgttgcaaaccaaggtgataaaaatgcctgcttttggcagtgctacctaaatactcacttgccctcaaatgagatgatcatggatggaatctaggactttggaagcagactatgccatttaactaacagcgttctcaagcttggtaacatgtgggtctcagaatacttgagcccttgacatgagattggtctgcctcatggtgtattccctggacccactttgtttgcatttttgagtccaggtccaacatttttgtactatcctttgcagtgctgagatgtattcccaaaccttcttatagaaacttacaaaaatagctagaatataagtaaattgcctcttagttccagtcattaaacagatattcctcttaaagttgtaaatttgagttaaattagttttcccatttctacctttcttgttaacactacaagcttaatgtgataaactgcagtaagccttcatcctcctatgtttttcccatcttcattgagccctctacctatcttgaaaggttgctcagatgactcaggcactgttctctccagagtttgatat

SEQ ID NO: 59359 - DNA, 1666 bp, Bovine  19866881402729
  misc_feature (1)..(1): n is a, c, g, or t
ntgaaaagtgaaagtgaagttgctcagtcgtgtccgaccctcagcgaccccatggactacagccttccaggctcctccgtccatgggattttccaggcaagagtactggagtggggtgccattgccttctcccgaaaactctacataattgaccttaaaatattttcggaataataatattgaggatacattttcttcctttcatgttgccctttttttctcataaggcaagttcagttcagttcattcgctctgtcgtgtctgactctttgcgaccccatgaatcatagcacaccaggcctccctgttcatcaccaacttccggagtttacccagactcatgtccatcgagtcagtgatgccatccagccatctcatcctctgttgtccccttctcctcctgcccccaatccctcccagcatcagggtcttttccaatgagtcagctctttgcatgaggtggccaaaatattggagtttcagctttagcatcagtctttcaaatgaacaccctgggactgatctcctttaggatggactggttggatctttttgcagtccaaggggctctcaagagtcttctccaacaccacagttcaaaagcatcaattcttcggcgctcagctttcttcacagtccaactctcagatccatacatgagcacaggttcttagacattgaaattatgcagtgacaaagtgttaagattaatttgagagctgtgtgaaggatgaattaaaaagcaaacagtctaaggttaaggaagggtggttgagagctgttgcagttatgcagctgtacaaaattggacatgacttagcaactgaacaactacaagttatctatctgtatgataggcacctaaatcagactggtggcagtgagaatagataggaatagataaacactttggatggaataataggcaaattttgattattttaactaaatagacatgaaggggaaattggtagatttcattttgaaagagtacatttctgttttaccaccagttttgcatcttgcttttaactttattgcttttggggctttattttcctagaaaacaaggaaaattgggcataatgtctttaaaggcttctggttcctgagagagtgcaaagttactgacaataacttaagtttttaaattagtcacttaggtgataatatcctaaagatgtttgcttagtataaagataattttctcattctattacatgttcatttgattataaatctctatagaaatgatttcacttctttgttacctgagctttcttcaatccaactgcagcttacatttcagttgtgttttgcattgaaacgaaaagagtgttagtcgctaagttgtgtctgactctttgagaccctatggactgtagcccaccaggttcctctgtccatgggattttccaggcaggaatactggagtgggttgcccttcccttctccaggggatcttcctgacccagggattgaaccctgatctcctacattgcaggcaaattctttatcccctgagccataagggagacaaaattattttgcatctgtttccagtaaaacttttgctcccactatggagattttcagttgcatgcagatgccgtatcagaatacacttggtaatttttgaaagaaagaacagcaatagagacctggt

SEQ ID NO: 59360 - DNA, 837 bp, Bovine  19866881703805
  misc_feature (1)..(1): n is a, c, g, or t
ntgggtaacacatgtttcttgcaatttccttctgctactggttccagagtggttctggttctggatgtggggcctccaggaacaattttcgtgcccactttcttgtccataatttccatttcttattttcaaagtttcacttttattccttctattgacaaaatcaagaaatgaaaatctctgacctgctgagaccaaaaaatcccccattccaccaggttactttcttcaattagacagcagtaactttccactgattcataggatgacatcagattttttcccatcagctttctaactggaaactcatttaaactattttacatatgatgatacttatcttgccacattctaaccacaaatctgaattgctacaattaatttttgaaagaaagttctatgcatagagagcattttcagctaaaatgtaaagtttctgtgcaatagcttaacaaacatttataaagtttaaaaaaataaattattgggctttcctggtggtccagtgataaagaatccacctgccaatgcaggggacatgggtttgacccctggtctaggaagaggccacatactgaggtgcaactaagcctgtggattgcaattactaagctcacatgcccagagcctctgctctgcaacaagagaagccaccacaatgagaaacccgtgcactgaaacaaagagagtgtagccccctctccctgcagctagagaaagcctgcgtgcagcaatgaaaacccagtccagccaaaaataaataagttcatcaaaaaaatttcttacatttatggaaaatttctacacactcagaaaaataggcaataacaccccaca

SEQ ID NO: 59361 - DNA, 1474 bp, Bovine  19866880567407
  misc_feature (1)..(1): n is a, c, g, or t
nactgccaagcaacgaaatgggcaggacacagctaagaagctatcagcaggcagagacctgtctactgtagctcagtgacacacaggtgtgtgtttgtgtgtgtgtgtgtgtgtgtgtgtgtgtgtgtgtgtacctcgagcgggagctgggtgggccaccaacagcctctaccccagctcactggcatcagttcacataagcgccttggttagagtgtttatacagaacttgtaggtcaatcatattcagagtgatagagaaaatatctcttgggtgggtcaggaaaataggattttctaatttaaaaacgaaggaaaacagggctgcttttatgtaccacctctcttctaacttgaacttaatgactagctgcctttcaggatgctgtgggtgtggactttcaccccttctctggtcccctggcccagcaaaccagggatcagaaagatgagcgtgccctggaatgttctgaaagcatctttttcttttgtcttttttctgagcacgatatccttctgtctggctcccagagagaggggcacaagtagggttggaattaacatgaaaacagcagaaatccaaagagaaaaaggtaatttcatcttatgaaattcaaaataggctttcatgggactagagcactccacagccctgagtgattgcgagaaaagatcagcctccctttctgcagcctggctgggcgctctgggcacgggctggcttgggaggggagcccgccccttgctgcctatgatgcggcctgggagggccaatttccccttcccagacctgcctgctaggggagggcttgtctactgaagttagacagtcttaagagaagcttcccgggcagaggcatcctggctctaatcgcttctggggactcggggccccagacgtggctcaacacacgtcagaagcctgggaccgtggtcagagggagtatgctaggtttggactgtgctgggtttgaacgtttgagcctctctgttaccgaggccagcaggtctgctgcaggccccaccaacgtggcctgaacaagactcctccacatcacggaggacaaggcagagactcagggaggaaaacagctctttaagagccaaggggattccatgtgggaaaatacagagccctgaccagccggcagaaggcctttagctccagacatcagcagagcatgcagggaggggacaaagatatccttatcctaggggacaagacctcaggtgggagcggagaacctgccctccaccaccagggggcgccggcggccttagagaggagccagtgggggcagggctacagaaaaaggactttcggtttagttttcagttcactcagtcgtgtccgactctgcgaccccatcgactgcagcacgccaggccttcctgtccaccaccaactcccggagtttattcaaactcatgcccactgaagtcggtgatgccatccagccatctcatcctctgt

SEQ ID NO: 59362 - DNA, 3343 bp, Bovine  19866880635842
  misc_feature (1)..(1): n is a, c, g, or t
nccctgtgctctctctttctctgtaaatgaccctcttaccaacctggcatttttatactatcgacaacagttatgattcagaataggtaaaaatgtattaagttgatttcttatcttgggagaatttacaacaatgttcaacagcacactttcttggattatctaagaccttatgcagcagtcaggggacagagcttcagggagaacagaagtctactggaatacttagacaaatgagaaaagctctctattaactagatactgcaaatctgaattgcaacaatgaaaatgtcatccagactggctgatgcaccacttgtttttgtcaatgtctctgaaattggtttgtatttttgagaggaaagtgggcaggactctcaggtctaggctcacctgtaggagacaggtaacctcatgggcattgcttttcccatcgagaggcagccacgatagaagaaagaggaaaagacatccctcctcccttcatggaagaaggcttgtgagtcaccagcagtggcctcctgggtaaatatttatacagagatggtattaacgatgagagaggtaaagagccccaagtgtttaagacaaggcagacaggttttcctcgttttgcctcaccttgcttgtgtgttcctatcctaaggggtaaaatgtttttttgtcgttcagtttttgtttaaactggaattggatgtgtttgtctgtgaaaggagctcggggtgtaggattcaatttctaacacttctccatctacctggaagcccatctcaggagcggccttagccgactggatatcaaagtccatcctgttagggaccaggtcagtacctgaatcagtggctcaattcaggcttctttgcttggactggagtggaatccagtctgggactctaggcataagcggagttttccacactgctgagagtctaaatttgggacaagaatgctgtgcctagtaaagacagaatgaaataaatgcagagtttagctttacaaggaaacttctaattcagttaccctaaaaggaatgaactttacctgaagtaagcaagcaggatgaagggacacatattatcccaactcacaagagactgatgcacaaaacctgagtgtgtctatgtgaatttatgttaaggaactttgatggaacacgactgagtcttcacaacctccccatcctttctcaccctcgctgattcctgtctctgtcccattagactcggcaccagcagcagtggcagtggccgggagcccgggggttgggggtaagccgctttttggtaggaaaaggtgtgaaacccctatgaatggtgacttgttgataaagaggcttcatgagagtttcaaggagcagcagtgtatgaactgtgtattgagaaacacatgcagacttgacgcaagaaggctaaggaggttctaagaaaagaaacgtatctgcaaatttggcaagcacggtcaattctagatgctaccacgtgctttagaactgagggggaaagacacaagacttgaattatgtacatgtgggtaatatgagggcttctctggtagctcagctggtaaagagtgcgcctgtaacacaggaaaccctggtaagatgaagacagcatagactgtggctcttactccttagagggtcagaattagagactctaacagcattgaaaggaagcaatgaaggccacaaattaaccaagtgtgtgacttttatgatggctgttgagagtaaggacatgggcagtgttgggaagtattcagcacatgtatgtggttctttctcctctgggcactggtctgtgggtaacctcacttcgttcacagacaccacctccctggctcatctgacagtcctggatcttttctgaggctcatctctgatcttactcatctccctgagatggtcagctaagctggggtttttcttacaaggcactgcgtgcacatttgaacaagacatttccgagacttctagccatccccacgctctcctggcttcctacacacgttcacccacttgccctggaggatgctacgcctggggccagagtggacctcagtaagcatcttccccgctgccagtgcgggaaccagacttctcacttgggcctagaagtcattaagcaaaagccttctttccatctgaaacagatcctcttggtagaggatcttgggttatcaggtgaaaccagccgcctctgtaaacgacttctggggaaagcaaagtgcctttgtgggtggaaacaaggctgctctgtgctgttcaacatcagcaatcaactgttctcagctttcattctttctggccaaggtttcgaagctgtgtaccccaatgatgaggagcccccctttcggcccctctgggagctagaaggaaaatgcaaagccagtgagcttggccccctcccactttgtcactgggtggctttacttgcatctgtttcaagtattgtatggctgcaaaaacctttgttgaaagaaagtttcaaaaactaacgaaaatcggccaacttgggcttcgagtatggtgtaaaaacagactgctccatctctcaggcattgatttcctgctgatttagctcctggccattctgctttcttctgaccatcagtctggggcattcagtcatgatgaggtggggctcaaagctctcagcttgcacactcatccatcaactgctaggaacaaagagccctgcactggacctattgtgccagtaggaagttctacctgagaatctggtctcagaacatgtacttcttcctaaaattatcactctatgctctggttggagatcagtggtgtgctagtaaatgtctaacaactggatctctagtgagggaaaagtgccctgatttgtagcatttactgattgtgtgtgtgcccagttgttcagttgctgagttatgtctgactctttttggctgcatagactgtagcctgccaggttcctctgtccatgggatgtcccaggcaagtatactggagtgggttgccatttccttctccaagggatcttccttaccagggactgaacccatgtttcttgagtttcctgagttgacaggtggattctttactactgagccacatgggaagcccgtttgctgattactctggtgtaaatactcccaataatatcaatttcaatcaatcaacttgatatcactggatgcagagctgagaagagaggcacagtagtatactgttgtatagtatatttccatcttaaagatacaaaagacataaataacatcaaagtagagataatcaacctatagtaaaatatttagggagggatacattttgaaactttcctaccctttctcttaaaataattta

SEQ ID NO: 59363 - DNA, 1216 bp, Bovine  19866880659334
  misc_feature (1)..(1): n is a, c, g, or t
ncaccaatggaggacacggctggagcctttcttgttcagccctgctttcaaaattccctttactcatagcattctttttatttacacatggcttcttctcaactgccatcctgtgctgacatttttctaatttgaaatgtttaacttcaaaggttattgtgccaatagaaaaagcaattcagcatttgaaacattgaataattaagcaatggcccattgacttacccattgccatacattaggcatcctcttctcatttaccatcttagttcctaatgagtttattctcacactggtatttattgacagctagagaacaacaattcaaaagcatccagaggcccatcccaatatgagccaatccgagctgagttattcataatttagataccgcttgggtgttgtgtttcctgccatctttactaaatgaatacgaaaagaattggaattggagaaaagaaccaggttctggcttctgataactgggagtggaacagtacttctaacaaaatcagttctattctgacagttaacattcaattcctgcacaccatgtgccatttaataagtaaaccgctgctctttttaatgaagccaaaaagatgatgtatgccatctgaagcacaattatacccccagaaacaaggaaagaaatgctaattacaaaactgttcacatggcaactgcttgataaattaaactgaggaaaacagccctatgtctcttacccattcttctttgtgtctggcaaaggcaagggatatgaaaagacaaatcgacatctcattttgggtgcaaggtggccctttttataagatgggtctcttgaaagccctaactatgctgatggctgagaccaacacagtggacacgggcaatgagaggggacccctcatggaaaatatcctgaatctctcctggttagcttcttccctagctgccaactaccaccgcctccagtttgtccctagggattgcaaagtcgggagctccccatttctgggggaaatttgacagggagccacaggaatgaacccgtcagtcaactctgggatcgggatgtgggtgttggagtgcagcaaggttgtcacttctggtcctgacactgctctgacagatatggaagagccagtcttccctggaaccaagagccctcccaagaacgctccactctccttaccgtaaactactgagagggtactctgcccaccatctg

SEQ ID NO: 59364 - DNA, 1227 bp, Bovine  19866880686026
  misc_feature (1)..(1): n is a, c, g, or t
nctgaacccccgaagtaagtcgttaaagtctgtggtgggctctagaaaactgctcatgctcctctacacttgccaggaacactgcttattctgtgatcactcagtgagtgtttatcacattctcgtcaaacccaactgtattttcacaaaatatttttaaattagtcataattcactgggtagtctttgtaattgacccctggtcacgggatcagtgtctccagctaggaaaataaacattccagctgccatcagcagggggcagaaaaccattagcctgtcacagtgtcctatttcattggcattagcttgaaattaatggtaaattacaatgaaataccaacaggactacttatgtcacgttcaatagctacccggctaccccagagcctgtacagctgtgtcctgctgacatgactttgaatttgactccctggcatgatgcattttgaaaggcaagttccggcaccctcaattaacagcatcagaggaaagtccagtggcactgtgctgtgacctcttgaacacttgaccagttcagttcggtgtccgcctctttgccaccccatggaccacagcacaccaggcctccctgtccatcaccagctcccggagtttgctcagactcatgtccattgagtcggtgatgccatccaaccacctcatcctctgtcctccccttctcctgccttcaatctttccaggcatcagggtcttttccagtgagtcaattcttcacatcagatggccaaagtattggagtttcagcttcaacatcagtcctaccaatgaatattcaggactgatctcctttaggatggactggttggattttcttgctgtccaagggactttcaagagtcttttccaacaccacagttcaaaagcatcaattctttggcactcagctttctttatagtccaactctcacatccatacatgactactagaaaaaccatagctttgactagacggacctttgttggctaagtagtgtctctgacttttaatatgctgtctaggttggtcatagcttttcttttaaggagcaagcatctttaaacttcatggatgcagtcaccatctgcagtgattttggagccccaaaagataaagtctgtcactatttccactgtttccccatctatttgccatgaagtgatggaaccggatgccatgatcttcgttttctgaatgttgagctttaagccaactttttcactctc

SEQ ID NO: 59365 - DNA, 780 bp, Bovine  19866881587112
  misc_feature (1)..(1): n is a, c, g, or t
nctttcgcttgtcctcttagctagccaacactaggaaccttaaatttcaggtgaaagtggtacagggtattcagctaaaatccccactgtcaaggaatggatagtctatataaattttcctaaacaagtttttgttggcttttttttttcttctagatttgctaatgcaggatttccagatccttgttaaatggtctaatattcaaattttgtaaaagttcccaggagtattttttatatgctcatgaataaaccttgtcaacaattaatagcatttttcatgttctctctgttcagccttctctacctcccagtgatatacactaatgcttttccacgtgtccagagaagagtcacctctactcaacactaccatctccctgtgggtactgctctctttcaggattctttgtcacatcttttcagtaccactatttcataccataatgctgcatgttcttcggatttctcagtattcttcaatcaccctatgttcattagaactagaatcaatgcttccctcccatgtaaacattacacttttttctgcatatgaatcctccaccatttttcaaatcgttgaattcttttatgctttttttcttacttacaatgaatcaccaccatcaccaccaccccacccccaacatgacagataagactcagtttgtgacttgaagcatctacagaaaaattcaagtgataaacataacattttacaggacttcacatgctcccaaatctttattcttataaaacacgtttattagtaagatttat

SEQ ID NO: 59366 - DNA, 2418 bp, Bovine  19866880436402
  misc_feature (1)..(1): n is a, c, g, or t
nagttggactgtgaagaaggctgagcgccgaaaattgatgcttttgaactgtggtgttggaaaagactcttgagagtcccttggactgcaaggagattcaaccagtccattctgaaggagatcagccttgggatttctttggaaggaatgatgctaaagctgaaactccagtactttggccacctcacgtgaagagttgactcattggaaaagtctctgatgcctgggagggattgggggcaggaggagaaggggatgacagacgatgagatggctggatggcatcactgactcgatggacgtgagtctgagtgaactccgggagttggtgatggacagtgaggcctggcatgctgcgattcatggggtttcaaagagtcggacacgagtgagcgactgatctgatctgatctgattaatatgcacctttacatatttaagaaagtaaataaaatgtaagttaaaggaaaatatgagaataagagtgaaaataaatttaatttactttctttttatcttctgttttccttcttcatttattttctacaacaaattcattcctcaaaaattgataatgacacttgaaataacagtctataaacaggctgagaaaataaagaatgttcagttttctttttttttttttttaatttcctattcctagacacatcagcagtctcttcctgaataaagcaagcaagtgattaattagtataaacagtggttaccctgaaaatcaacaagcttccaacacacaatcaaagccagccgtctacttagaaggcaccctataatcagatcagaatcattgtgcatagaaagtaagagataagtacagcagacatttagctacaataatccaagagtttaggccataaactatttttttaaaatcaaaccaatcccgttagagcaacaaaattaaagctaccctattatttaagtaataaaccatctgtagagtagtgtaggtaaagcacactcagccattccccatgatatccatatgtcctgtggatccacccccgggtgtttctaaacagcaggaagcatatttgagaaatggttcatcccttttcattgcagcactaaccaatataaagcagtacttaaaaactatgtgtttcagtcctgaagcttattgtctcctatattttccttcttcaacctgattttacctgcatggtagatttgttttatattgaaacagatctgaaagattatagagggctaaaagcatccagtttatgaactgtcttaggtgaattcacccttgcttcttttgaataataataagagaaccgaagattcagctcaatacaataaaacctgctaagttatattaactctctcatcatttatatctctcatctattttataaacacagtataacatctgatttccttaaataacaatcttttaaaataatttaaaagattaaattgtgtagttatctatgataagtgacataatggtccattctaattaggttgggaaaaagctatatgacctttatatagttaaaactataatactaagacttgtatggaatatgggaaaaaatgatttaaaaaaaaaaaaggggctgtttatctataggccgaagaatgcagttaaaatacaaacttggcactaaatattttagtgtttcttgaacaaattacaagcagagaaaaggcaaaatgtttttttcttctacctcatgctaagtgtccattacattatcctattttaatttcattgtcatgaccattggtacccgatgttacagctggtgctcaccattatgttccttattcttgagaaacccaattgcttccaactgttatattttcagggggatgttcccaggaatgtggaataaaagttacaatgactgattcctccagcattttactccataatcagtcttcagcaaaatgttgtatatcttcaaacttttctaacttttaatttttttcatctgattgaaatttgacttttgcctgaagatgttaacttcgctgcatctctaaacagatggctactttatgccaccatggttcaattcccctaggacttgagctagaagcatcattgttccttactacccgattctaataactccttcctggctccgtacaatctcagctttaaatcacactttatcagaccatgccaccaagaatacttcattattgctgtcattggctgacattcaattcaggtcatttcagttgctcagttgtgtccaaatatttgagaccccatggaatgaagcatgccaggcttccttgttcatcaccagctcctggagcttactcaaactcatgtgcatcaagtcagttatgccatccagccatctcatcctctattgtccccttttcttcccgcccccaatccctcccaacattataagcagggagaaaatacacagc

SEQ ID NO: 59367 - DNA, 4618 bp, Bovine  19866880495986
  misc_feature (1)..(1): n is a, c, g, or t
nttgtacttttataataacaatttaattaaaacaaaaactcagaatgacaatatttgggggagtttctgggttggtgaatgtagtgtgggacagcctgacgtctctgggacagaggctcctgtgctcaagacacttgcagagctttctctgtgtacctcttcactagattgttcatttgtatcctttatcataaaacaacagtcataaatatagtgcttttctaagttctgtgattcagtctagcaaataattgaacatgggttctgtgtgtgtcacctgtcatctgcagatgaaaccacccttatggcagaaagcgaagaactaaagagcctcttgatgaaagagaaagaggagaatgaaaaagttggcttaaagctcaacattcagaaaatgaagatcatggcatcaggcatcaacacttcatggaaaataaatggggaaacagtggaaacagtgactgatttattttgggtggctccaaaatcactgtagatggtgactgcagccatgaaattaaaagacgcttattccttggaagaaaaggtatgaccaaactagacagaatatcaaaaagcagagacattactttgccaacagtggtccatctagtcaaagctatggttgttccaatagtcatatatggttgtgagagttggactataatgaaagctgagcactgaagaatcgatgcttttgaactgtggtattggagaagactcttgagagtcccttggactgcaaggagatccaaccagtccatcctaaaggaaatcagtcctgaatattcattggaaggactggtgctgaagctaaaactccaatgctttggccacctgatgaaaagaactgactcattggaagagaccctgatgctgggaaaaattgaaaggcaggaggagaaggggacaacataggatgagatggttggatggcatctctgcccccatggacatgagtttgagtaaactctgggagttggtgatggacagggaggtctggcgtgctgcaatccatggggttgtgaagaatcagacacaataaagactgaactgactgactaactgggcagaagtgtgggaaccccacttggagttggcatctgagatggggcagccttgtggaactgacctcttaacttgtggggtcagcactcgattgcaagtagttactctcagaattgaattgaatttttatacttccagttgatgtcagagaattggaacatcggttgttgtaaggaaaaaataagtaccacttcatcacctttgccatataatatagcctaattaagggagcaaatagtctttcagagtgacctgtcccacttgtgactcaaggaaagtcagggtcagaggacctatacagcagggttagggatcagagacagtcttagaattctttcaaccacagctgagattctgtatgcctagggccaacaatcacccaagtaaataatccagtataaagttgctttctgaaaatgaactttctacatttggcctattgcttatataaagaaaacaatttcatttaaaaatagttaaaatgatgaagtcatttcattgatacataacatagggtagccattatccacattcaggtcagtgttacccttgctttatgttaagttttagatgctgatactccaaaagtgaccaaagaatcacatggttatttttataaccattatgaaattgtatggttggtgacttgaaacatactttgtttctatgagctgtcaccttgtaaccatggggaactggagacaccatgtacagattctatactgtaacacattctccttttctagtggttgttgcacttcaaagacctcagataatctgtggttgaggtgagtcatttttttttttcctttttaaggaaaataactcttgagacaccaatttatctcaaagtggaacaactttttcatacagtagagtcttaatcatgtttgagattaacatataagtatacaaaaaaggaaacaccctcagagatagatattgtttaaccattcactaaaaatatttaatagctatcacagggaaaaaatgatatatatatattatatataaatatacacagatatatattcaattcatctggtcaaagtaatctcttatattcctttacaaaggcactacaagttcagatgatagtttggggttgatgatgctgatgactgtttctgagaacatgaatcacctttaaacctaaggtagtgctctgaatatgttgacactgaccctggggctgaaccattactcaaattttccatgcctcagccactacttccagtgacaaatgaaacagattctgccaactgcctcacacaaataatgcttttggattgcttgttgtgcttccttgcaagagctgagagaaccatttttcttctaatccttaaggacaaaaatgcattagtctttccacttctaatccaatcagtgctatttttcctcttgtgagtaaaaggttttgtgaagtctgttggtcattataaacactggcttatgaaagcttcaaagtgattcagaacttctgtattctgctgtaaccttcaacatcatgctttggccatccatacataagaagttagatatttcagaataaacgccgtcttaatcttgttattacttaactttattattgctaattaaaaaaatgtgcaatatatgaatagctctatagagaaaaacaaaaatgtcaaagacatatatacacatatttacatatgtctttgacatttatatcagcttccctgatatctcagttggggaagaatctgcctgcaatgcaggagaccccgatgattcaattcctgggttgggaatatcccctggagaaaggataggctacccactccggtagccttgggcttcccttgtaactcagctggtaaagaatccgcttgcaatgcgggagacctgagttcgatccctgggatgggaagatcccctggagaagggaaaggctacccactccagtatcctggcctggaaaattccatgcactgtacagtccatgggtttgccaagagtaggacatgactgagtgactttcacttttgcaagatattgaatatagttccctgtgttatccaagtaggacttttttgtttatctattatatatagtggtttgtatcttctgggcttcccaagtggtgctagtggtaaagaaccctcctgccagcaggagatataagagacatgggtttaatccctgggtcagaaagcttccctggaggaagttatggcaacctactccagtattcttgcctggagaatcccatggacagatgaacctggcaggctatggtccataatgtcggaaagagtcagacactgataaagcaacttaacacacacacacacatacacatctattcaaccctagtgtattttttccatgtataaactattgatacccaaatatgtaaatatacatgtttgattaattttaatgtgatttcatgattgattttaatttgcagaggcacttaaaagtattagatcatttaaccatttagcaagagtagtttatacatatgtatttagcaacatcaacctatctcttacaaacaaccttaattttaaaatagtcaaaaataacactgtgtgtatgtgtgtgtgtaacagttgatttaggcacatgtacaactaagtaaggtatgctgctgctgctaagtcattgcagtcgtgtccggctctgtgccaccaaatagatggcagcccacatgctcctctgtccctgggattctccaggcaagaatactggagtgggttgccatttccttctccaatgcacacgtgcacactaagttgcttacatagtgtctgactctatgtgaccctatggacagcagcccaccaggctcctctgcctatggaattctccaggcaagaatacttggagtgggttgccatttccttctcccaagtaaggtataggattgttaattctcaatctctcagtattaatatgcaactcaacccttgttaatcctgttggttatgtacttggttacatgttcctttgttttggcttattgttccttccttatcttgcagtggctcttttgaggaccttaactgattccatccctgatggcagaacatgagctttcaaactaactctgaattttcctagtgtcccataatttagtatacatttctttactcattcccaaaagtagttttgtttcatatctattgctccatactctggcttctggattcgaggagttaaattacctgcatttgtgctctgtgtgtgttctcaatggagagttttccttttgatcaggttcctgttagataaatttcatatttccagatcctattttgaagcctgtctttggatcagtgattgtgctgaaagatcagattttgctgctgaattagttagaccaactaaagttcttaatggtaaaaagttggttactctagccttatacttaataatatggtaattctgattatgatgactatatctttctagttgggtctcaagttctatttgatctgacagtttattccaaaacattgtggaaggattataatttacctttcttgtatttatcatgcagctgtgtgtgtatgcttgtatcaca

SEQ ID NO: 59368 - DNA, 1371 bp, Bovine  19866880754187
  misc_feature (1)..(1): n is a, c, g, or t
nttattgtgatccacacagtcaaaagctttggcatagtcaataaagcagaaatagatgttcttctggaactctcttgctttttccatgatccagcagatgttgtcaatttgatctctcgttcctctgcctttcctaaaaccagcttgaatatcaggaagttcatggttcacatattgctgaagccttatgtatatatataaagatatttggaagtctatatcaatttctggagggcagagtgagactattacttaaatgatatttttgtccacttatattttattctctttatttttgttaaaatacaaaataacatatgtaactatgtgaaataatacttgacctagtctattcaccattgttgtataatcatattatggaagctaattatgcataaagtatataatctgaaaaactaattaatatcagacattctttgtttgttcaccctggatatctacatatgatttgaaatacatacattttacttggttctctgtcttgaaccaatccaaaaaggcagaaataacatgtaaaaccatggatttttaaatgggtaagtgattaattacattaaaagatatgttaataacaaacaaatgaggtcaatttagttgaaggacattgtagtggaaaaataggaacaagaagtaaacacatttttatctatgcaatcaggaattctagatgaccataagctgttaactggacacaggtggctgttttctcaggagatcccttcctaataggttttaaatgagaaaatgggaatcatcatttttatatacttttgaaatatcacacgtgtgaaagccttcatacatcataactgaaataatgggaagtgattaataaatgtcattgacataaatgagttgccagatgcatctaatcctcaagtgagcaggaaaaacaaatgcacaaaaacctcttaaaatatatcatacctgattgtgacaatttatgcttaaccacagaaatgatttcaatttccaaaataaagtaattttataaagctaaattatttattttgagaatataaccaatttctttattttagcatttgaaaaattatattttgtcttctgtctcataccataattataaatgaatcaaagcaaaaaatggatacaatgtaataaatatctaaggaaatgaagactgtaatgaaatatataaatatttccagttaaaatgtgagaattaaaagtatctcttaataggtatttgtttactgaaacattttaaaaataatttgattttaatttgaaagctaactactagtttagttaacttatgccatgatgtttgtcattgggtgataatcattacatttaaattttagaaaatattataataccaagtatttt

SEQ ID NO: 59369 - DNA, 1359 bp, Bovine  19866880772425
  misc_feature (1)..(1): n is a, c, g, or t
ngctcctcctcttataaggacaccagacatatagtattagggcccactctaattacttcatcttcaactgatagcattttcaaaggttctgtttccagatgaggatacattcacaggtactcaaagttataacatcaacaggtctttatggagggcataatataacactttatgatgtagatattggttttactttaaatctacctaccaacagataaaaaaatgtgagtatactcagtatactagagtatactagacttcaatgtgctctgtgactcttcccaacttcgattggtagagaaactcttgaacttgccattagtgtcaaaactcttgggaacaccttagcagtctggaggatgatgccaattgccctgtagtttggtgaattccagataacagctcacataacaaactcaatttgctgaactaaattatttatagaaactgtacactaaagtagcaattcctaaggtgtcaatggaagtcaatgtcagtatgcaaatttcctttttagctgcttcatgagtaccaaataaaatgttttttataaggttgtagggtcctcttaaataaatagatctgttaagctaataaaacattggcataataagcctatttaaaatagatttctgctgtattttgccaaatttacagtcacagtgttagaagaattctaaaatgcaatgatttgaatagtcatcaaggataattaaattttactttttattaaatacaacactccaaaagtgactctgtgagaattttttttttttctgagataaaatttggagcacagatcttaattattcagatctcaacacttaagtcctgataattggtcatttctataccatgcttctaaacttgctggtttggatatttaagtaagaaatttattttttactaaacagaagattttgttctcacagacttcaatcagtttcatttgttacaatctagctataaaattacagttaatttcctacagtgatattaattcttttcaaatttgtaattggcaattaatggcttttgtgcagcttctgtcaagagtttcaaatggaagaaagagcaattttttttacattctgtttcagttttctttttccagaataactgtttgctgaaagacagtactttcagtaaagggtaactttagggtttctttaaaaatgcaacgtgcaaattagcatccacatgctattataggaaatatttaaggacagacttagttggtaacaatgtcctgaattaatttataatcaattacttttaatgtgattactattaatccatgaaaatgaactttaaaggaaaacatttcatcttccaaatatatgcagaaaaatattcata

SEQ ID NO: 59370 - DNA, 1523 bp, Bovine  19866880817575
  misc_feature (1)..(1): n is a, c, g, or t
nttgctgaactgcacaaaaaatattgattatttcattttaaaaagttattctgtgaattttttagcacaactttaaagcaatagacagaagttatattcagcagtgacttgaaaggctgaataatccagttgatttttagttttcctgtaaagcttgaattgttattaaggttatataataataaactaatttttctcttatgcatcatgccagtatttgattttatttttagttaattggattgctattgtacattataatagcatttgccaatttgatatcccctttactcaaaggaagatcaaaggactttttgctctctgatctccagttcttcaaacatccttgaatgacatttcttattactttctgaaaatacccaaggtaaggcagaatgtctgcaatataatacaaaatctcttcatgccaaaaagacagagtagctaaaattattaattttatgttagccagaactgttgtcagtacttctgttactactgtaacagtttgccctggcaaactaatacaaaagccacacaagaaaattatcaactggtctcagaaattcatgaggcagttatgcaatgtgttgactctaaaaacttaaatggatgcttttattttctatagaggttgttctccatcattttgtaaaataaaacaagagtaatgaattactctcatagagaaagtctttcatacagtcagaatgtggtaatgttagcagaaactctactgatctactgaaacatgtgtttaaatatagcataggcataaggtcttataccggagaaggcaatgggcaccccactccagtcctcttgcctggaaaaccgtatggatggaggagcctggtgggcagcagtccatggggtcgcgaagagttggacacgaccaagcgacttccctttcacttttcactttcatgaattggagaagaaaatggcaatccactccagtgttcttgcctggagaatcccagggatgggggagcctggtgcgctgccctcttatggggtcgcacagagttggacacgactgaagcgacttagctgcagcagcagcagcagcagcaaagtcttatacaaagtggtatcgtgtgccatctatgtctcattattcagagagaagacagagaaacttacatgttctactggtaataaatgaattaaaaaacatttgctgtgagtcaagctaacagtatgtatcaaagaattaaaatgatcatatatcttgacccaatataccatttgaattatttatttttttgaaaaataagaaatatatacaaacatatttctaaaaaaattcttaactataaaattgctggttatagaatattatgaattatattatatattaatattatagagtatattagatataatataattacttagaacttgaaaattttgcaatttttaagttaatttatattatttaacaaaatctttaaatatgagttaaaaatcaaatgcaatgttagaaaaaggttgttttcaatgaaatacttcaaaaaacg

SEQ ID NO: 59371 - DNA, 1664 bp, Bovine  19866880954175
  misc_feature (1)..(1): n is a, c, g, or t
nttgttctagatatatttatttttatgacttttaatttaattttatatgattttcatttaactacagatatatgcctttattatgtttttattataaattccatctaaaatttattttacaggataacagattgattatccaaatactatttattaaatgttttaaatatcatcaccaattttaataccttccttttaaaaataggaaaatactgccagtatgttattaaaaaatttcttctacataatcctctttgaactatatataaataatgcatttccattcaatttggggagaagtacaggatttgtattggtgggatttcatgaataatagatatcctaagtataacataatgaattagaaatgaatatctattctagattttttgtttgtattttcatttttctctcatggcactagtacatgtattttaaaattattttagtgttataaagattttcagtgtctgggaatgtaaaactctaccctctccctgtccccctaaaaaaaaaccaacctggccaatttcttattactgtgtgccatccactaacttttaaaataatattcataatagcattttcaattaaaaaaaatgttgtggtttttgattatgctatattacatattaatttgcagagaaccaacatattgtatacatttactgcttccttcaaggggcattctatatcttccatttacttagaatttatctgttacatataattaaatttattatttttttaaagctcttaagtttatggaatatttatatatagctattttaactttagtaaagttgacccactatattttctaccatttatttatttgaaatgatatttattagcacctgtaaagctttatttattcctataatctacataaagtaatatataacaaaagccacatttgaatgaagtgattttttaaaatatatttttattttactcctttcacaccaatactgaaaaacacacactgtattctattatatgcaacttgcatatgtattaaaagcaaagtggttcacttggaaatcatatttacctgttgacaacaagtaacaatgaaaacaatacagattcaaaactcttttcctctattaaaataggaccaactcactatgttataaatattttcaatagtgttatttttttacataaacataaatatttaattcaacatggaaaaaaggatggaagtgattattcataagaattcataagtaaaataattttcaactataagagcttatcaaaaattaaaatcaatctgtcttcattaagataatatacttattttcctcgcacaatattatgagatcaaaagagtactggcttcattcaaggatataggctacacttttgaattttctctcagcaactatatgaatagattaaggaaaaatatcacactccacctagctttatattcacaaagtaaagcaatactagcttctcaataatggttaagacaaatctgctcaataatagctgacagaattgataatgtgtttctcgtgtttttcttctcctctattataaagtatttgaataaggtaattcatctttaagatccctttgggttataggactatatttctattttgcaaaattaatgcacattatggtgatattaattttgggatttgtgagat

SEQ ID NO: 59372 - DNA, 2815 bp, Bovine  19866880968492
  misc_feature (1)..(1): n is a, c, g, or t
ntttttcttggaaatgaacagagatcttctgtcgtttttaagattgcttaaagtccaagtactgcattttggactcttttgttgactatgatggctactccatttcttctaagggattcctgcccacagtaacagatataatggtaatctgagttaaattcacccattccagtccatttttgttcactgattcctcgaatgtccacgttcactcttgccatctcttgtttgaccactttcaatttgctatgattcatggaactaacattcccggttcctatgcaatattgctctttatagcatcagaacttgcttctatcaccagtcagatccacaactgggtgttgttttttctttggctccttcccttcattcttcctggagttatttctccactgatctccagtagcatattgggcacctaccagcctggggagttcccctttcagtatcctttcattttgccttttcatactgttcatggggttctcaaggcaagaatactgaagtggtttgccattccctactccagtggaccacattctgtcagacctctccaccatgacccatccatcttgggtggccccacatggcatggcttagtttcattgagttagacaaggctgtgttccatgtgaccagattggctagttttctgtgattatggtttcagtgtgtctgccctctgatgccgtctcggagcacctaccatcttacttgggtttctcttaacttggacgtggagtatctcttcactgctgctccagcaaagtgcagccgctgctccttaccttggacgagggttgtctcctcacagccacccctcctgaccttggacatggggtaactcctctcagccctcttgcacccgcatagccgctgctccttggacctggggtagctcctcttggctgtcaccccaacacaggcctaagaaggccaggcaacatcaaaaaatggtatcttttgagattttatgtgctttattgggaagaacttttgctcctagtatttctattgctagtttattggatcatttaccttttcctaatagactgacacaatgacagtggtatatgaacttagtgtttttgtttccgatgtcaaaggaaaatttaattggcttgttgtttaattgtgaagttatgtccaactcttttgtgaccccatggagtataatccatcaggcttccctgtccatgggatttcccagtcaaggatacaggaatgggttgtcatttccttttccagggactattccacacccaagtatcaaacccatgtctcccgccttggcaggttgattctttaccactgagtaactagggaagccccaattggcttataaagaaagaaaaaaaaaagtttcctcccctcacttaacaataatagagataggaagaaagaattatgtcttgtttatgacatttgaaagaaagaatcattgagcagtaagagctaccaggtagaaataaacctccattccaggagaccagagcagacagattgtaatttgcagaatgattctgtattctcaaaaatcataagcagagatggcaaagatgcttatcattacaaaatctcagttgtcagatctcctcacagattaaagataaactactgcattaacatttattataaatctagaagtattgacaggacagaaagatctagcaaatcaaagacagaaataataagtattatccctctcagggctttatgtaattcaatgatagagaaattgattttcagttaaagcaataacaatgcagtctgtgctctaattagacagcaataatcttagagaagataacagaggtgttttgagattaactctcattatacaactgtaaattgtacactatatgtactactaaaaagattattgtgttagaagaataggtctctaaattttgagttaatctgaccaatacatatcattataggtattaaaacctttgcaaaaggagttagtgatatacatcggcttttttactaataaaaatatgccaaggataattggaaagttttatgatagatagatagatattcatttttgccaattttattttgtctctatttgccagatttaaaagaataaaaaccaatgctatgcttgaaaacatgaggctcaaaaccatctatatcttgctctagagagaatattcttaggaggcatagagacatttaatcttgatctaacctgggactgaggtaataaatggcttgaatttaaaaccttttgtcagattatttatttccattgcaccttctcttctaaggagtaaccagccctgcatatttcccaacagaaaagcacatgctcaccaaggctcatcttcctcagtggactctgaactccaactgtggtctctcaacttagtgaaactgcttaaagctccctcatcttttcaacatctagtctgccacttaataaatggaaaatgtctcagggggagaatagagttaattttaagagtttctttcttagcatttttctccagtctaaaatcttatgttctccagttttcattgttttatcagtactcaagtgctttcaaactggtgtacactatatttcctgttgtttttcatgggagatttgccctcaaataatcctttctgtcatagctagaaacagaagtcaagtgttcagtatttaatttgcaaattactgtctgtaattgataaaacactttccaggttttgttagctgtgagttatatgagaggccagattccagaaacaacaggtcagcagtttttccatctttaattctaactaatgatggcttatagataaaggttagaggttt

SEQ ID NO: 59373 - DNA, 2868 bp, Bovine  19866881266083
  misc_feature (1)..(1): n is a, c, g, or t
ngatgtgcagagtcgcacagtgttttggatggatgaccagttaagtgagtctgatatcaccaaccagccagcatgacagaaacagatcgttaagcctttaattttcacaggtgataaagatctgaagataatcactgaatgctttggcccatactatgattatatatttaagtcccaaagaggcaaactaaagctataaagctatcaaatattttcagagatgagtatatagtatgcttcaaatatgcaatcaacttccatttgtcaagtgattacattaatgaaatagccagttttaatttaatagttataatgctggccttttttggtgtgatttcatcatgaacaccatatgtgtggttaaatgataaggcaaatttggcaatatatgttaaaatggagccagtctgctaatattaaataccactagctaatgcataattgataatggtacagaaagcaggttaagaaagtcaagtggaaagcttgatgatagatatctgatgtacagacatgttttaatcatgtccttaaaatacaaggtaaaaaaaaaaaacaaacacaatcaacaaaggaacaggtacaggcctgcttggaaatagaggtagatagaatgcctctgtttggttttcagacttatcaaactgactctttgaataaaggcagtaatacttggccttgtgaataccagccacagacttaactaagaaaccgagaacattagagaagtatcagctcttgtggctacatacacagcacaagatcactggcaatagaaggtggctacatcattctcaccagaggcattggagaaaagaaagaatcaacaggggaaatttagaagtatgaaatatttaaggaaaaaaatgtgaagagcattgatctgagtacttgatgggttctgtatattcatcataatcacctgatggatctttgatatattttaattcatgccactctgtgtccctaattctgatttgataagtctagattgaggcccagggatgttgagctttttaaatcctctaaggtgatcagtcttttcttctttcagcttgcccccttgttgttcagtccctcagtccgactctttgcgatcccttggactgcaggcacaccaagcttcgctgtccttcaccatctcctggatcctgctcaaactcatgtccattaagtcagtgatgccatccaacctctcatcctctgtcacacccttctcctcctgccttcaatctttcccagcatcagggtcttttccaatgagtcagttctttgcatcaggtggtcaaagtattagagcttcagcttcagcatcagtcttttcaatgaatattcaggattgatttcctttaggattgactagtttgatctcctccaacaccgcagttcaaaagcatcaatcctttggtgttcaaccttctttatgttccagtctgacatccatacatgactactcaaaaaaccatagctttgactatatggtcctttgttggcaaaataatgtctctgctttttaatatgccatggtttatcatagcttttgttctagggagcaagtatcttttaatttcatggctgcagtcaccatctgcagtgattttggagcccaagaaaataaagtctgtcactgtttccaacttgcccccttacctatgtagtatttgcatatcccggatgactgatggccagtttctgctctcagatgtctttgaatagggaaaattagttgggagtatcattatatatactctaacaaagctctgataatccccatcacatatttttttaattcacatataaaaaagtcactgataatttgaggtaattcttcaccatcatttcatataaagtgcttatattaagatcaatactctttatggtaaattgtatatggttaaccagttatcatagaatatttgatttttgctatagctgacctatgcttgcaattctgctatgaattaacaaatgcatcctaatctagctttatccctataaataaatcaccattgaatcttacctatgatgtattggttaactattctaacactcatgcaagtggtattcactaggctaaaacttctttaagcatcagcattaaataaatatcttatttgtaatactgctggattccctgttgtcaatattcccaccatggccaatttcaggctacaaatgggatcctggtgaatgaggaattggaaagtgtattaatttcctaggcctgctataacaaagtatcccaggacaaatgacatttattcactcatggttctagaagatagaaatttaaaatcgaggtgttggcagggccatgctctctctgatatctataggggaggaccctttctttctctatctagcttctggtacttgatagtaatccttagccgtctctggcttgtagatgtaccactccaatctctaccacctttttcacacggcatttctcccttctgtgttgctgtgtccatatttttttctacaaataagaacaccaggcattaggttagagcttattgtaaccaactatgacctcatcttcagcatcagtccttccaatgaatagtcagggttgattttcttgaggattgactggcttgatctccttgaaaatctccttggccacttgattggaagagtctgctcactggaaaagaccctgatgttaggaaagattgagggcaggaggagaaggggaccacagaggatgagactcaatggacatgagtttgagcaaactcagggagatgttgaactccatggggtcgcaaacagtcagacatgagttagcaattgagcaacaacaaataacaacaatgacttcatcttaactttattatactcaaaaaacatttatttcaaaat

SEQ ID NO: 59374 - DNA, 1237 bp, Bovine  19866881591292
  misc_feature (1)..(1): n is a, c, g, or t
nttctctttgatgaaagtgtgtatttattaagtagttctgtaattaaaattttgaaagagtgacttatacagtgctctggaataatactatatggagagttatagatttttaaatatatcattgtgtcaaagtattcctgtgcaggttagcttgctgttaaaactattgcaatcttatatgattaacatagcaaattaaaggaaaaatagtgtgggataaggataattgaccaacaattaaggagaaaagtagcacagcattacagggtatacaaatataatactgtttttaaaatttctaatttatttgttttaaatagggcatgtggtaaaattatactagaccaatgaaattcttctaggaaactaggaaaaataactctctgaatatctcctagaagggataaaatatttgttacgaaatattttagctttgtatactaatatttatctttttagaaataagaacagagttataacaatggcataaactaaaataaaacaatgaaaatacatattacttttataaaataattagcaatgattaaataaatcaaaattgagattattacttagtcttctgaggaaactactggaataaacaaatctgtgtttagagagaaatctatgatttcattaaaaaaacaaaagggaatagactttggtatctggcctgttagttaccccaaccagcagtaaaatgaaaacacacttggaattccaaataaaacaacacacatataatttagaatgtatagctgactttgtaacacagtaagggtaatcctagatatgtaccttgaaaagcatttgcatgtatatccaaagtaatgccactaataataatttaagagttttgcatactattgaaagtacaaaacaatataaatacatgttaacttagaagaacagattaggactggagtactataaaacaagataaatgagaaagtcagttgcagaatgatattatcatatgaatttatagtttaaaatgtataaaataaaattatatagtatttgacaataatatatatgtaggaaacaacaaagatatgcattggaatgatataaactctctttcagagtaatgagagaaagagaatataattgaataagggtggacataaccctcaatgtcacacaaaattcttttttctccttcattttgatcttaaatatgtatagataataaaaataataaagggaataaatatactcaccttccaaatcaaat

SEQ ID NO: 59375 - DNA, 2469 bp, Bovine  19866881564294
  misc_feature (1)..(1): n is a, c, g, or t
ncagagttggagacgactgaagcgacttggcagcagcagcatctttttatgctcaagcctgtgttaatttgaacacttttttctttatggtctgttgaaaggagggggtatagaacttcatccagatagaagattcattttcattatgttgaagggttttctatgttgcttaaccttagaaaagttatgtttgtctgctgtggaatacctcagcacatctgtaaggaactttggcaagcacacttgtcttcatcaacagagacagcaacagtctagtgctttgtctccaagttctatcatctctctttctgctttttctgcaccatattacacagagctgttgttcaagaactttcagatatgcccagtgatttgggctgactcaagccaatttaattttgacgacccttacttaataatggtggtagccaaagtgaaagctgagtaagagtcaattgctttcctaaaatctcacaaaataaattctgctttgtataaaacattaattaaacaaatatttactatgaaaaatatcattatagcttgttcaataaagatgatgaaattctatctttttgtttttcaagttctcccactacacttttaatgaaaaagtttgtgtcagatactataatattttggaagcaggatttagttaacagaatgaggaaactagaatcctatgaatcaatagctagatcgagactcatgtttggataaaccctttgcattatctctaggcattgcacctttaggcttgctgtaaatgcaagactaaagggtgtctctaaaataaataaatgtgtctctataaatataaataaataaataaatggctaatccacatggtactgtgctgtgctgttctcagtcccatctgtctctttgcaaccccatgtagtctagcccaccaggctcctctgtccatggaattatccagacaggaatactggagtgggttgccttttcccatgcgggaggatcttcctaacccagaaatcgaacctgtgtctctcatgcctcctgcactgtaagcagattctttaccacggcatcaccagggaagccctaattcacatgtcttgaacaccatgaacacctgttcctaaaatctgttacaataatttataagcttcaggtaacacaaataaaaaccaatttctaaactgtactataaaaattaacaaagctttggtgctaaaaatagttgaaacatgtataatactacctttggaagtgtgacctgtcttactgaggactagctgacttcccagaaagtgtataaatttctgattagagcaaatgatagttgtggcagtatatatacacacataaccacagatacacacacacacccacaaatatactgatgtattttaaaataaattacaagcagcttagcatcccttagcattcaatatctagtcataaaagaatcatggtgtataacaatcttcactgcagatggaagtctaataaacattatgagatcacaaattcattttaaattttgatttagttcagatgaattagaagcattcaaagagagatactttcttttcctgcacaactcccccttctcttatttccttccttccttaagatttatgcaatgcttactctatacctgattccatgtttggggaatctgagggtaaaataggattattatttccctggaggactttgagtcaaggaaattgatacaaacaaaatattttataagcattcaaaacttatcattagcaatataaagtattttgagagaatctaactttgcttataaattccaagtaactcttcattatgtagttgacattggaaaaaatcttgaaaaatgggtaggcagtgaaataattctatataacagggattatatatgcaaaagcacaaaaattcgagtctggtacatttaggaaagcacaaaatagttcaagatgtttgttgtaaaatgtaagaaaatgtcaaggagcaaactagaaaggtaaaccacaggcactatttctgtgtttaaggttcatatcctactgtctcattgatatttcatttggatatatagtcatgtcctcaaacttagcatgtgtagaattgagtgcttcctgtgatactttccctctcataaaatacctttagtcttgttggtggctcagactcacagttagagtcctcctcttgacttctctgtctcttaaaagcatatatgttacatctgtcaggcatcaaatttgccaacttttctttgactaatttcccgctttcatatttgtcccaacttctttcagttgttgacacaggggtcaaaaacaattcagttcatattacttctatgtttgaaatttgataatgctttcttttattactcaggaaaaaggtcaagctcttgcactaacttgtgaggtactcctcagtgtattaagctttatctttgatcagtgatatgaaaattcttcctattcagacatcccctca

SEQ ID NO: 59376 - DNA, 1872 bp, Bovine  19866880552062
  misc_feature (1)..(1): n is a, c, g, or t
ngtggtgattacgggaaatttatgagtaggtttttgttatgcataacttatggaaaacaatagaatatgccttttttttttcagggtgtgtgtctgactgccaccaaacatagctgatctaatgagactccctgaggttaacacccttgttttcctcaagtgtacacatctcttgggtttccaagtgaagaattttcacaaggacacccatagaaacacagagccctttgtcccaagctccttcctcttgaatatttgacttttagcactttattgtcaactaccacacatgtcacatggctaagtcatgaaatgacacaaagctaacagtccaccttgggaattaaattgcttacctttgagcaattccaacaatccacatcctaatttacatgtagaatcatttactcaattctttccaggaattaaaatataagaaacatggtattagagactctcccttcctcacacccatattccttctgtgggctactgtgtacagatctctctcatcattctatacaaagagagagactactgttcagaattaacaattaagatataaaacagttgttttatttatttatttattttaaattttattttatttttaaactttacaaattgtattagttttgccaaatatcaaaatgaatccaccacaggtatacatgtgttccaataatatatttggctgacaaaactcaggcttttcttgcttctaattcagtttgactaagcttagaacaattactgatctccattttttttaatatacaagtacagggaggaagaggaagatgggtagaggatttaaaacaagccttagattatctgtattctgataatcaatggtgcactattcctagtatctatgaaaactggaggaaaaactccaacaacttagttttcagttgaacttctgagaagcatacctgaaggctaacttcccctgtatgtcctgaaagaaagtagatgtattttgacatttcagttccaaataccctaaatagtctacctatgaaatacttaactgctttttcttcaaattgagcttctttctgatttttcattgcagtctgactagcatcttccgaaggtggcattttaaatagtagctttggctgtttaagagagaatgtaagtaaagaaaaagtgttggcaagctctattatcttaaaataacttaaagcactataaatagtaatagctatagaaataacactaagaggatcataataatttctaatgatttttaaaatttctgcatttagagaaaatgacatcacataggattttaaaatgttctctgaaataactaactacccaaatgaaagtcacaaattttagggagaacattatttgaattttaaaatattttactctccaggattataaataaaagagtagtgattcatttcaaaatatccccagttgttttgctttcaaaatcatccctggaagtaactgatcccagatcccaaagtctacggaatgaaagagcaaataagatgtgagttgttagcagatgtacgtgggcagttttagctggtaatgaaagctattcaacgctaataaccttacctgtggataatgggccactaatgcagtgtgactctgcagttcaggaaggtctgactacaccccaaattatcctttccttcaatttgcaaaattatttaaaattctaccaacagaaatttattctttgaggaagaattcaaacattaattccccctcgccagttcatctttcaaaagacaggcaattttgagactgaaaactattaaagtttagtttactccaaggcagaggtcagcaaggtaggaagtaggtcactccaacccgctgcctgtctttataggtcctcca

SEQ ID NO: 59377 - DNA, 1773 bp, Bovine  19866880749917
  misc_feature (1)..(1): n is a, c, g, or t
ntattctgccctagagaattcccatggacttatagtccatggggtcacaaagagtaggacacgactgagggactttcactttctttcactttcattgttgtttaatatcttgtttgtctatgggaattgatgctgcttaagaaatcctggtgggcttcccagatggctcagtggaagagaatctacctgctaatgcaggaaatgtgggttcaatccctgggttgggaagatccccctggagaaggaaatgacagcctactccaatattcttgcctgggaaatcccacgggtagaggagcctggttggctacaatccatggtgtcgcaaagagttggacatggtttagtgactaaacaacagtaagaaatcctgagccaggaaacccttggcctcttgattggtcagtggcttagtgtggatggccaccctcctcattgtgtaagtctgactattcctctctctgcactaaaatcctcagtacgtgaaatagcctatagtatttcctaggatcagcatttatagtcgttcatttcatgaggataagagctccatattactacttctgtctgtgattcactagtgggggaccatataagagactgggaagatttgacctaaattacaaaccattccctaggagctgtccaagacccatgtgggttatgggtgacttgacactcatttgacctttaacagttgtcggcctcgagctgaacttctcaacccagcattagtgacatgtgtgccaggtaattctttgttgcagaggctgtcctaggcattgtaggatgttaagcagcgtccctaagaatgtactcactggataccagtcacattccccgtcccaagttgtggcatccgaaagtgtctctggatgttgctaggcatcccctggagggcaaagctgctctctccctctcactgagaacaccgagctagagaggatccatctataggacactccaagtcaatttagaaaataaagctaaagtttcagctcttttatattcttacaaagttcaatatgtatgcatattcattacactgtatatattcacttatttcagccaagtgtaattatttttaaggtgcatcttccctcctctgaatgtaattggacagaatgctcagtggatgtaaagacagtattcatttacataagccctccctggcatgcttaaagtgagctctttacttcccccatcccaaacagaaacttcacacaatatgccgtgttattgatgcccttactgcaaagagggcggcctgtgactttgtgcttttttatacctttgctctttatattggtattattgactatagcagcgatcatgttatcatatatggcaaattttaagttcactaaattgtcttccaacattctcatcaggtctcatatactcaagcatttctcctccacttagagtgccactgacttaagcagaagaacaaggcttagacaacaatagctaataataataactactcgttactgagcacatattagagcaaactacatgaaattgctctttttgtatgtgtcttatgctttatgtgcctgatttcatttaatcctcacaggaaccctcttttttttttttaaccactgaagaaaaccaggttatagagcgattatgtgattgaatcatggttaaaacctacatctgcctggttacaagaatctatatccttgaccaccaggctattatagtgtaaatttggatcctgctgtcccttaattttttttagaagtcaccaaatgtaggacaata

SEQ ID NO: 59378 - DNA, 1527 bp, Bovine  19866880752522
  misc_feature (1)..(1): n is a, c, g, or t
nataattctttgatagagactgagatttagactgcaaatataaaatcaaatcatgagaaagaattgaaactttaataaagtatactagaaatgcttggttttattctacatgtgatattccaaatttccacatgtgtcagctccttagatcccactgaaaaatgttcagttactgaactagcaaaatacacagtgaaattttaaaatagtgtagaccttgaaagctgaatctcattaatacctccaagaaatcaatatggcatgatctgccttatattttttacttactatattctcaaatatgttagagttaagcagaacctaaatataagttacattttaaaggcaatgtgaaatgaatggttaatgtttttcaaaaagagactctcacctctgtttgtacatacagagccaaaaaattacagatcatgaaaactgtccactccatatgcatccccaaggggccatgtgaagatgctatctgggctggaccttgtttggcatgactgggcagcagggttatttgctttgcctctctcctctacgagcaacttaaaaaaaaattatagtaggtaaacccacatatgtaattaactgacttcataaggaaatcctttgtggttagagttctatcaataaatagcattagatgcaaaatctaaaactctatgtggatttgaatcattatattgtcatatagggataacctgtgtactactgtatctctacgacaaacagtactctggaaatttaatgatttaataaaagaagataattcacaaatgaaaactgctcatcaaaaagttatatattaccaatgtaatgtattttaattcttcgatttttctaaattgtaattaaagctttagggagccaaatgagctcctggtaatagggtaaaagtctctcttttcctttattgtgctaacatataaattccattattttcaatcctggcttcacaaatgtcaataaactcagataagattgagagctaagagtctccaagctctttggttttccctccctccctacaattttctttgcacatcaggaagatgtcacttgttctcactcagataaaaatactgaaagagacaagccaactctttctcactcggaagcctttgaaatcttctagtaggctcagtttctcaggcacagactccagatggtccaaagccactcgggtactctagaaaagaaaacaaggcaagcaaacattataaaaaattgatcaatactctcagaatccaactactaaaaattggctgtaccactggtataagcagttcaagctgtagattgagagtcaactaagaagaaatagtatttctaatataaatgtatgttttcaaatcagaaaataaaagttttaaagaagtatatgagatgcatttgcaaactgcctccaatacaaagctcttcctagataactgctttcaactgatacgctatgaaactttctatagagaatttcatattaatttacaaaccgcttcagtgcacatcagaaataatcacaag

SEQ ID NO: 59379 - DNA, 3334 bp, Bovine  19866880780482
  misc_feature (1)..(1): n is a, c, g, or t
nattcctggggatagtccgttgataccagtactcccccacatgtgcctgagaaaggtgtattacctctgagattgtctcccacacacacaataccaatcataagagaaataccagacaaacctaacctgaagaacattttataaaatacctggaccattctctctaaaactgccaaggtcttggaaaacaagaatgagacagttacagagcagagaagactaaaaagatgtgacagctaaatgcagagtggtgtcctggattggacactggcacagagaaaggacctcagtagacaaaatctgaataaagtctgaagtttatttaagagtaaaattagtgttagtttcttagttttggttctcggtccaatggctgtgtgaaatgctgattttaggggaaactgagtaaaagacatttccctgtataatctctgcaacttttctataaatctaaaatcactttaaactaaaaaaaaacatctttataagttaaaacacaaaaataatttctgtgtttcaacattttgctcatctgtgactttagtttatcactacagaaacttcctttaggaaaatgtagttaaagggagacaaatgaaaaaaataactaaaatgaagatagcaataatttttggagatagaagcatgctcatctctgtataaatgttgcatgcacacgtgcgaagtagcttcagttgtgttcgacttcaccaccctatggaatctagaccaccagattcctctgcccgtggggttctccaggtccgaatactgaagcgggttgccatgccctcctccagggaatcttcccaatgcaggtattgaacccacatctcttacatctcctacattggcaggagggtgctttaacactagcgctacccaggaaggcctcacctctatatattgagacatagttcacaagctataaaacaatagttttaaagttggtttttagcatacttacaaagttgtgcaactaccatccaattccagaaaatccctttaaggtcacaaaaatttacacctgcttttttttcccatgacttttataatttaggctcttatatttaggtctttgatccatttctagtgcatttttgtatacggcatgaggcaagcgtcctctaaaatatggttttttacttgtttatgttgactaaaaataaatttttaaaaataaataaataaaatagaaaaacatatatacttacaacctgaaagtagggagtaattttatttggtgggaatgtttaggactccaagctcaggagacagcatctcaggagctctgagaaaactgctccaagaaggcaggaaggggagtcaggctgtgtgtaagctggcaacaaagagagccagcagtctgaacatcgcagatcagataccaagtttaggaagtcagcattctctgtatgggaagatgcaagcctccgggctcactgacttcattcttttcacactcaccaagctatctggagccaaatcctgtttccttctttgctttaaggagtggcaaatggctgcttcttgcattgccccagctccctggcaatcactgtccaggagtgacagcctctgttggcccatagttttgggagctctcattctcatttggaggccagaaattgatggtggttgtgacatttctcacttattgatatggtaggagatatttcacatttcacacttacgtagcatcaaaaacattcttcttagaaactgaaatgccaaggttgaaatgtcaggccccagcagtcacctagtgttaaggtatttttcctttcctaggtgtccatcttctcaccagcattgtgagggaactgatcatcctctggggaacttatttcaattttaattgggattttataaccaccaaaattgttgttacttacagagtacatgtgggttcactatgctactctctgaatttaatatattgaaaaaaatttaaggaagaaaactgatactcagaattgccaatattttaggctgtcaagtaaaaacatattttaaaaagactaccatctcttatggacttccctggtggctaagagctaaggaatccacctgcaatgtgggagacacaggagatgtgagttcgatccttggttcaggaagatcccagggaggagggcatggcaacccactcccatattcttgcctggagaatcccatggacaaaagagcctggcagacagcagtccagggggtcgcaaaaagtcagacacaactgaagcaactgagcacgcgtgcatgcaacatctaattacaacttcataaaacaatgattaataccatatagtaaagaaaataccatctttacatagagtaagttctttttaattgaggaaaaaataccttcataaaaactcactgccctgtccttatatttttgacttggccatggaccagtactgattcctaccctagtgtttgggaagcactgaatcagattataattctgtggaattagaaccacgtaggctcaggcgtatgattcactgttgataaacacagagaacaataataagtgggaggaaccagatgttctcaggtagaatcctattgatatcaaactctcaataaacctgaagagcactaagcttcagctttattcacaatacagtaaaattttcatgaagcactcatgactacagattaaatgaaaataactgtgaggtaggagagagtgaaaaggtaactgtcatatcctttgagtttttattagttttattgtggaaattatggatagactcagatgcactactagtaagttttaattccatattgttaattgaacatcagtaagaattctagcaatatacaaaagtaaaatccagaagtagagatcattcatttgtaagagtcaatatgccagaactcctcatgttatagaaactgccgtaatgtaataatactgatttatgactgttttgaggaaacagaattataatttccaaaacaaaaaatttaaaaagaacctggatttttctcttcttgtctgtggcctcctaatgatctcaggatcaataataagttagagttaccactggctcaataaagtgtagactttttccaaacaagatgatggtaagtttcacaaattctgcaaaagtaaagttgaacatcatagacagatcacttgaactcaagaatgaaatggaccttaaatcagtacaactttgaacttgttgtacctttctttatatcaatagcatttagcatcagttatatatttctttccctatataatatatatatggggtatgtatacacacacacacacatatataggcctatatttatatttatatatatatatagacctccc

SEQ ID NO: 59380 - DNA, 672 bp, Bovine  19866881356781
  misc_feature (1)..(1): n is a, c, g, or t
naaataaaagtggatgagaataaatccatttctagggacagctgaaggaataagccacagagaaggcccgagggaatggtaggtcaagagttgcagcctggtacacaaagaacttgaagtactttgagacgcagaggcgcaggaatgaggatgagacaatgtggtttgtttgggagcctggcaacatggcaggtactcgaatggctctgaacgcggagagctggctttgccaagtgctgtgtgcctttcataagcatgaaatacacttaggtaacccttggtacatacccttctgaagccacagcttgttctttacaagtttttggcaaaacacggttttcactggtcacgcccaacctattctgtatttactctgagtgcataggactaatgagataatcataccctgcagcttaactggttgaaatctgtaaatctcctaaaagtgtaattacctagtcataatttttttttccaatattgcatccatctcattagtacatatgtttttactattcatgtatggaagaaattgtctttttgccattgaaggaagagttggcagggggagacaagggtgttgtgtttgagctacttgcttttatctccttgatgaaattttaaaaaaaatgcattcccaagtgtaagaattctcttagcagttagttcgtt

SEQ ID NO: 59381 - DNA, 2010 bp, Bovine  19866881374552
  misc_feature (1)..(1): n is a, c, g, or t
naggcattttattgtggactgtcgttaactgtaggtattctcataggtgcctgatgttactcaaggtgctttagcaaagtttccttttagtttgggaagacattggaaaatgtataggcatttatggcagagcttgaaatactatgtcatgtcagtagaagtctcgaaaggcaaaggaagatagtcactgttttgagaaatgaagtattgtaccctggtccagttcagaaaccccgggctcaagttcacacacttctcttcactagttatgtgatgttgacagggacttttaatctctcggaactcagtcctcatctctaagatgtggaaagtgggttagagcagtgagcagtggtcctcagcacagtgtggagctttagagccatatcacagccccacagaggttgatgccaggatgagaaggaagtccagtggccgggcctccaggcccttcacttctgcttccaccaaagctgctttcttttagctttttaaattgtttgtttatgctatgtttatatgttttaatatgtttgtttatgcacacacacttgaaagtgtgtgtgacttcattcataagaattctacttcttttttaaaaaaatcaaaaaccttggcattaggttagttcagtggtccctaaagtgtcagcaatcctgaataacttgggagccaggaaaagaaaagagaaactgaccgtgttttcagcatgtagatagtacctggagcacctagtatataacagcggaaggctaagcccaccgtttgcgatgtcttaagggttgtggtgtgttctttaatttgattagttccattgtaccacacctaccacccacaaagaaaaatggcacaggtttacttgttacaaattattcttttgagaatttacattatctattgtttcccatgggttttccacagaaatttcatgggaattacattatctattattttacattatctgttgttttccacaggcttccctgtagctcagatagtaaagactctgcctgcaatgcaggagaccccggttcaattcctgggttgggaagattcgctggagaagggataggctacccactccagtattcttgggcttccctggtggctcagctggtaaagaatccgcctgcaatgcgagagacgtgggttcgatccctgggttgggaagatccctttgataaggggacagctacccactccagtattgtggcctggagaattccgtggactgtacagtcccctgggtctcaagagctggacacgtccgagctactttcacatcacgttgtttttcacagatgttagggtacgtagagcagcattgaaaaggagcactaaattactaaatggggtgcaggagccagaaactaaatgcttttccctaaactgcagtcactgtttcaccatattcttctgccactgctaccgtgtccagtgctgttgttataaatgctgctgagtctgaaacccttgtttccagaactttctctccattaacaactaggctgagttataatatggatgagatattttatagtaaaatttaggggaaaaaaaacaaaaacctacttctgtctaagcttgatctccaacctttctgtgaagggtcaagctgctaaatgacttatgcacacctaaacaggattctccttttaaaagcaattaaacaaacaacctatctgtttccttggctactaggaaccagaatcaacatttaaaaagtgtcaaacctccttaaatagccagaccactagttgcaaaggaagtggtggaagacagtcttagccagaaacatgatcatgatatattaccctgtgtgtgccagagaaatgcaacatggaggaaaacaaaacagaacaacaggactctccgctactcatccataatgtcctgcttttgtaagtgggactttttccctcctctaataaccatatgtcataatgagttagtatcagctcatttaaactggctcaagccagtccaaaaaaaatacacaggatggctgcc

SEQ ID NO: 59382 - DNA, 3773 bp, Bovine  19866880186938
  misc_feature (1)..(1): n is a, c, g, or t
ncatgactctggaaaaaccatagccttgactagacagacctttgttggcaaagtaatgtctctgcttttcaatatgctgtctaggttggtcataattttccttccaaggagtaagcgtcttttaatttcatggctgcagtcaccttctgcagtgattttggagccccaaaaaataaagtctgacactgtttccactgtttccccatctatttcccatgaagtgatgggaccagatgccatgatcttagttttctgaatgttgagctttaggaacagataatagaagatactgaattcaagaccttggagtttatgtttaagcatccattgatgattctaaatagcagagtgccagaatcagagtttttgggttttttatggccgtgcttttcaacaagacagaggtgaaagatatcatttggacctagtggtaactaggatttccaggactttcctgtaactccccttccactcttctactcaagaaaatattgaaatacaatgaagacaagtaatactattatacaaacatataactcaactttcatttattaaaaatacatttacttgatagtagttataaattacttgcaatacactttataattgatcatgacaggaagctgtgtattatgacagcacttaagagccaaggttgagggacttctctggtggtccagtggttgagaatctgcctttcaaatgcaggggaagcgagtttgatccctggttggggaaccaagagcccatgtgatttggggcaactaagccagtgtgccacaattgctaagctcgtgcgccacaactggagaagctcacacgccacaactgaggaccccatgcagccaaataaataaattaaatatttttaagaaaaaaaaaaatgaaaagaaccaaggctgaaaataatatggcaacactgtgtagaatggattgaagtgaggaggtgctggctgtcgtgagagagaacaataaactattgcatttgtcttagaaaatttatacagatcagaacaaaggtttaccatgtaagtgaaagaggaaataaagtctatagcacagggcaatttacttgatactggtgatgaggaaatgaaagaaacctaggatgaatctgaaatttcaaactggattatctcctttgcaatagaaataagagttgcttcaaattgggaaaggaagaaaattgaattcagttttggccactaattggggttcggagcttatcttacagaatgcttctgcatagctggaagtttaaggttccttctcaggagcgtgatgtcgatttttaagtcatctgtaaatggaatgttctttccaagatacttcaaatgggaggaggcactcctcattctgtttgtgaacctcatttaattcttaactgttcaagtacattatttaatccttatattattaatgatggaatttttatttgcatggcacctgaaatttctctgcccccttaatggtggtaaagtgattgtaaggagctgatgcacattccaggagtaagtactcattgagaggaagtgaaggcccagagcttctctagctcagtgtagaggagattgtttccagtgctttgcatatctcctgtttattgattacatgtttagttaaatggcagagtgtattttcttacacatggcctgtgggtggctttcattcttttatataattttaaaacattttttaaaagccttaattaaaagacttgcaaagtttctacaccatatgatgttttccatgtcttcaaaactctggtaccctgtactgtcttgtgaagcttgctagtctaaattcaattcaggtgcaattccaggagtagtccttttagcttattttggacccttagcttttgtgtataaaaatcatatctatgggtaggcatgttcttatatctacttatagacttgctttttacaactggtagaatgagaaaatgacttattttcattagtttgaaaaagaaatatagaagcacattcattgcatgataaatattaatgataatgactatactgaaagcttttgtcattcaagaagctcagaattggaaattagatttcagctatgctttatatacagtatagtcagcagcatttaatgaactctcttcattaaatccatgatcgtgggtataagcagtggatggttacttgaaattaagaaacgatctaccttagctattaatgttgataccttactgaacttcttataaatcgttctggctatagaaaactttgagtggtgtccctgctcttttatttttctcagcagcttgtgagaagagttttaagatggaaaaagcaaactgatcaatgaacaggttgttggggatggagggttacttttgtgagtgggtcgcagggaaagggccagcaataggattgcaagattgagtcacagcctaagagataagagtaatcaaggattgatgacaagttgttgcttgactttcatagaaataatccccacccacccccactggaacttttgtctcaaaaaaaaaactggtttatgtatgtatggatacttctatatactatattttctgctatagtcctgatttcctgtattttttgtttaaggaaaatcattttaaaattttacaataaagcagagttgtcttagaatttgaaaaaaacttttatttgcatagattaatatgtaagataactctttgttcatcaatatttcttattttttagcttgatatgagatattgattattgacatttttggtcattctagaatatttattgcagagctatgttgatttatttttctcctttagaaacacagcaatttactagaaacactttttgtttatcttaagagcagtggttaatttggaagtgaaagtatactgtacagttttccttttttaataaagagctatttcttcatttatatttctttcagctaggtaaattgactcgggggaagcatgggggagaacaacagaatttttgcctgagcctgtcaagacaccatgccattttctgatagttttgtaattatgaagtggaatgtgaaaattatggagtggagaatcgtgatttttttccattccctcccaaatgatgaaatacattatattgagagatatcatggcttaaatttttgggagggttaacagctcaattgagctgccacgaagccaagcctctttgcagttgctcccttctgccgtctactggtcattatctgaccttatccctgctaacacttgctcttgagccccacataggtacacatctgtggaagactgcaagtttatcaagatggtgttcttagttattctgcttttttgtgtagatttgtgttgatttctgtgttgttttctcatttaggtttaagccttggataccaatttttgcctcaatatttagaattcctttgagcctaattcactctttctacaaagaactcctttttttaaactttttattttgtattggggcatagctcattaacaatgttgtgatagctccaggtgaacaacaaagagactcagccatacctgtacatgtatccatgatggctcagtgggtaaagaatccaccagcaatgcaggagacaaaggaaacacaggttttatccctgggtcgagtatatcccctggaggaggaaatggcaacccactccagtattcttgcctgaaaaaccctatggacagaggagcctggcaggctatagtccaaagggtcacaaacagtcagacagactaacaactaaacacatatacattctctcccaaactcccc

SEQ ID NO: 59383 - DNA, 876 bp, Bovine  19866880380558
  misc_feature (1)..(1): n is a, c, g, or t
nactgagacccttaagacaaaaaattacagtatatttttgcagaggaactacgtgcttgcattttactcttcgtttgaaacttctgggaaaatagtaaagatgtcagaggctgtttcttgctataagattgttttcaggccattctgtttaggctgcagcttaaaaatagaggagcacattgaaagctgaaggtctttgattatccaacttgtgggttgccatgctgaatgacattagttacagtgtcatgagtccaggacaaggttccacgtttatttatggcggtggctgctgagcgactcttccagcagggctccaaagggcgaggggtggggcacagcggggaaggcaacacgatagattcacattcctaaatcggccattttgatgtaaggacattagtagcaaactaaggtgtatcgatctggccggtggtgtcaggattagctgggagtaccaacgaggctgccgtggcagtggttattcttgcctcgcagctatggccatttcaaaggtcaggcccctgcactggctgggctcagaggaattagaccgaacatgccgtctctgggctgattacttaaccaaagacaaaataatgagtcctaagcaaatactgactaattgaaagggctgtaaatccattacatattggtcagggataatcaggagtatttaatcacttttatctattcaagagcactgaagctgcaacagcaaagccctgaaccttgccatgtggttattattctcatcattatcaaaattacttcacagctgttctttgctacatcacctcagctggagatttactaacctgtaaaatgtttttaatttggaagtcgaatgagtgcgagaggaggggtttctcattt

SEQ ID NO: 59384 - DNA, 2778 bp, Bovine  19866880468317
  misc_feature (1)..(1): n is a, c, g, or t
ntgattttggagcccaaaaaaataaagtctgacactgtttccccatctatttcccatgaagtgatgggaccagatgccatgatcttcgttttctgaatgttaagctttaagccaactttttcactctgcacttgcactttcatcagtgtccattatttgctttcataccttattcaagactccacattgtatttaattgcactgaggcacttcggttgcatgcaacaaattctgttaaattctctttacacttttattctattgcaaatatgttctaatttccttgttatgtcttcttatatacacccatcacttaaaagtggatgtttaatttccaaatacatgggattttaaaaaatatctttgatattaatttcccatttaaatgctttcttctctgtaatcaccctctgtgttttttcagtattctaactttactgaagctttcaacggctaaatcaaagatctctcttggtaaatgtcacgttacacttgaaaatatgtaggttattttcaaatatcttttgatattgatttctaacataatttccacagtgataagagaatagactctgtacaatttcaagacctttagaccatgaactttttgcaccttgttttatgttcttggatatattttagtgtctcttggtttatagcctatggaaacttgaatagaatttgtatcctgctattgtgtgacaattgtataaatcttaattatcttgaattggttcatagtgcttttcaggcctactatattcttctacttttctgtctattcattctattaattttttagagtttgatattgaaactctaactaaaaagtttgtctacttaaaaaataattgtaatatatagtggaactatatgtaactttgttctatattttccatgtgtcctgaaaatgtgctatcatactttataattttaaaaaataaaaaagaaagattccacctaaaaacaatcagagttatattccatgagattggcatcctgttctgtctactctcctgaagtctcctctagcccaattcagattcggcccttacatggtacaaatgtgtctaacactacattcttctgacctttaattatttccatggtgattggcccccaaagaaatatcctcaaataagatcttatatcattgtcatcagagtaacctggcaatggctgatggagtaacatcagaactccatatacaaatcttttctttgtgggcagtttttctcctaatgagtacctactcagtacaattagtcatttcataccctatattttagaactattcatatgtggcttataaatagctggcacagaaaagtggtttaggtttaatcatgccctctattttagatgacactaagtactctgctattgctaggaaaataaataataatatacttcttataaaatgctaatcccagtccattattattagttcatcctatgggataggatagagacaatgtgacatgtaagtaaaagcatgagtggtaattatacttgaagatgtcccataattaaagtaaaacctttataaaagagaacattttctatagttaatttatcacatctcttgcacgtttttgctatgtccatttttacatttcaagtagtaaaagttacagggaaataccgcgagccatgaatgtctaagcacgaatgcaactgctgtggtgctttcagttttcttcttttctaaacaaagtcggtgcacaggagaacagcactttgagctacttacttgttctgaccggcaggctgcggaacatagatatagcaatctgcctggctgactcctgccacacatcgggagtcacggaataggtctcagcaggttaacagccgtgtacctacgcacagcagaatgctgtgattacagcaggtaggtggctcgcgtagcagagaacttcagaaagtggggagtccgacataatgtgatgtgtgatttattggagttggtggagacacacactgtaattgtatgcttggtctaatgtctgattgttgtgtctttcaaaccctctggaggccagccccccatgtaagtgataacccactggcgcttttgttgggagtgcaattgaaatatacgaaatgaatagcaactgattaattgaagccggctacatttttggaaaacaaatcaaagtgatttgcatgaatcacaatttgttatataatacgtttggagggcacaaattacctttttaagcctaagacacatatatacacagtggaacaaacgaaactacaataaactgggctataactacataattcatattgaatactggataccaaaactgatatgaaacaaatgattttccaataaactactcaggcagagccatatctgttctaaactttcaatagaatattatttataataccaataattcttcccaattgttagccatggaatgaaggaacaatctattttacatattagtttgcgggggggcgtgtatttacaagttggaaactgatttatagttatgtcccagaagatgtgataaataatagtaaacttgagagaagtacttggaggaaaactttcatggcaaaatcattattaccttgttctagttttgaataaaaaccaaagtagtaagaacagtgtcagcattaaaagtaaatataatcgtcatcattacatatttctctgagtttaatatctataatggatttttttaactttcacttattgtttttctcaaatttattgtctgtatcatttttattgttaaaaactacagtatacacata

SEQ ID NO: 59385 - DNA, 771 bp, Bovine  19866880468780
  misc_feature (1)..(1): n is a, c, g, or t
ntaaatagaagggaatgtagtcacccgtagttccacagcttagttaacatcttgctctgtatttttccaatctctttcctatgcatgttttatttgctatttgacatagttgttaatgtccatattaatttgaatcctgcttttgaaagctaacgttatatcaattcttaatataacagatgaagccttctgggggcattttttaaaaatgttgaagttatcaagtctttcacccttgaaaggttaagaggattaaaataaatagatacttctattaagtagaatgctcatcccaggaaacagcttttgcttttagtggtaagtcttggtaaaagcagtttagaacctttatagcatgcatctctatttctatcagaccttgaaaaggagactgcactgtgaggacgtaagatttctttttttcttgctgaatatttgaatttgtgtaagaatccatttccaaaattttagttaatggggtaaattcagtttgtgtgtttgtgtatgtagaaaatagacactgagatgatttttttccccttactgacctcctctatggccttaaattttctttttaatttgaaatacaaactatcaaggtatatttacataaaataaaatgcacctactatacaggttggtgaattttggcttatttctacactcatgtcatcacaaccaccatcaagacacagaacaactccatcattccaaaaaaagactcttgtgcagcgtcccaggtactctcttaccggatcagacaaccatcag

SEQ ID NO: 59386 - DNA, 2190 bp, Bovine  19866880480480
  misc_feature (1)..(1): n is a, c, g, or t
ncagcctggcgggctataatctgtggggttgcaaagagtcagattcaactgagtgactaagcacatacatacagtaaaacagacaagtgattgattctgtatcttaaatacaaagcgtagtatttttaaataaccataaagctgagatatgatgtactcagcgtttcatggagataaattaggcagcaaaaatctaccccacaaattaaaatgagtagtatattcattgatacatcttttaagggccattttagacaaaagacatagcggtatatggtgaaactgaagctggcctgagagttaaagaatttgcttccagcactgtgaccctcagcacgtctctggcatggtctgtggctagccctttagatcatatctaaagatgtctccaaatcagtggttctatataatctagggcaatagagaattacctggtttctcatctcactgcctattcaaaggggtactggaagtataatcctgagagatcctgataagattaaatcattgatagcttaggggcagatggggtgggaaggaacatagagaaaaactgaattgatttgataccataaaagtttattgtttattttttaacttgggaatcacccattttgatcatataactcactatcttggccccttggagcaagcaaactaaatttatcctgatattagatgtcaaataagggttaaaggtatcttgtttttaggttgtatataccaggttaaattggtcagctagaattaggaatataaaaccatgtaacaaatcataaaatagttttcacttaggtttcatgccactttgatgcatgtggtgccattctaccttgggttgtggtttcctagaaggcgaagaatgtaagattgagtatatttttaagtgctaaaattctgcaagctgtggctctgagatgaggttacagcagcaagccagcggtggcattcttgctttgaattctattcctacaaaagcaaaaagaacgctttgtgggttctgctggttattaaggagactggagaaatcttggaggattcactcaatcttttttctgttttcagaaaacaaaaaaactgaacaaacacagaggtgtggctggtacattgacttagaaaagccaggcgggatgtaaacttgggcgggcactggacagctctgctctgtgaatgagtgttgtgctatgagctaatgtgtaaaatacattgtttttggctgcctctctgaatcagttagaacgttttggctgcaagtaacagaaaatccaattcagtctggcttgaacaataaaaaaataaagctatgccattggcaagaggtgaggtaggctccatctctcttttccttcaattctcttggctttgccctcttatgggcatcaaatttattcgcaggctggtggccagatgacctgagcagttctgagcctctgatcttcccaaaacaacccagaggaaggacacctgtttctctttctttggatactctcaagggaatacaggtgcaaacaatttgagaagtcactaacaaacttaccctcacatctcatctgtacatatttgcagaatgcttgaataggcttaaccaggtatcttgaaacaactactggttagaggaggacccagtcctaaaggtaggagcagacactttcctgtgttatggtgcaaaatgggctgagagaagggttagattccgagaagacaattttttctcagtttaaaacacagtggactagggacttccctgatggtccagtggttgagacccatgcttccactgcaggtggcatgggttcacttcctgtttggggaactaagctccccacatgctgcctggtatggccaaaaaaatagaaaaaaaatacaatggactaaaaactagtacaacttctggcaaatactggacttttggaatagttgttccatatttagcactgaccagctgctagccagtgtatctaacataatcttagaacccttgctcctaatagttttctatcttccagagcagagttcactgatcatgggcagagatcaggatgtaatagatcttttacttatatgaacaataatagcatactgttgagaagtcccttgggtagcatattgggggttccaatgaatctgtgatgtttggttttcaaaaagaaggaaacaatgacatcactatcataaagaaaatgataaagt

SEQ ID NO: 59387 - DNA, 1014 bp, Bovine  19866880530083
  misc_feature (1)..(1): n is a, c, g, or t
ncattcaaatctctgtctcaggtctacttctggggtatgtgacctccaaaaatatgggattcctagagtgaaaaattttgatagaatgaactcaattgtttgctaaaacgaattgcccaaccattggcctctgtttatggatttgactggctactgatctggcaggacacactgggcctaatttcctttatgggaatattatcataagttactgaagatattttaagaaccattttaaaactcagaatgttattaaatgtttttctttcattttgagtgagacaacatatgttaatgctaagaaatgttgcattctctctgcatactaagtgtaagtaaaggaagctggtttgatcaatatgttttctacaaacatgcatattatgtatatgctgtaaattaaatttaccaccttcataaaaggcaattgcaccacatcttgtatatatctagctgttctcaaagataaaaatatattgaactgcaagcggttaaacgcaaggcaagagtgccatcctgtgtaacactcaactaggcaaaggcagagagaactaatctgacttgacatcactggccctgcttcaccatcttgctcttggcagaattcccactgaagttcatatatgctttgctataggaccataggacggagttcatggattttctccagtgcaaatatgtcagactttattctttgggcttcacatttgggtatattttcacatgaaaatctagatgtaggcagagcctgaaagaaaccaagtggatgaaaagcatcataaggacatcactttctgccaggaaccaactgggttgtatctgcatgttttttacataggtcttaaatgtcctacagaggatatcaaattctttatgtatacagaaaattatcactcagattcagttaacctagaaatgacttaagtcagagaattggctctgtaacattctaatttctttagtgaagaacaacatgaagtgatttactcctaacattttctaaaaatattttaa

SEQ ID NO: 59388 - DNA, 1637 bp, Bovine  19866880603302
  misc_feature (1)..(1): n is a, c, g, or t
ngacagaattgtctagtgagcccatgacttccatttgtgttcttgtctcattggtcctctgttgcttgatgaaaaatgacaaaaagtaaaaaataatcacagctgtctggaatttcatattgagtgtcaacatctggtcaaagttcagaaagtcttaaaatagtttttgcgtgtgtttccttttcccttgagttcccttatactactgggcatgaatgtccataacctgtccaccaacattaggatctacagaatttaacattgtgggactctgtgctgacatagtcattccaggggtgggtagggggtcctccgtgcatcatcatggctgggtggtggggatggcttggcaaatatgaatgcattgggggtccatgtcttaattgagtagggtgtggggtcatctggggaggagtgtaacttggctgtgccatactcattcccataggaccaccctgagaaatgtactcccctggcatgctctgcaaacctgaaaagagagaggcaaaaagaaagcaggtcaaattcctaaacatttttatactttactcatcaaagatgaaaaaaaaaaaaaaaaaacaacagacactgcaaatcttatatctaaatttagctgcagattcttgccaatgttttgcagacattcaaattgtagtttgcatttaatttcatcgcacagcagtataatgcaacacaacagaactaaatatttaatgcaactaaatgtcataaagtggaactgtttttcaaaatggtattcagtacatttctttgataattgcaataagaatataaattctaagtcgagttttatcagttaactgttgatatatcatttcttttcctttgttgcatttctaaaatggaaaaaaatgataaatattaaaataaagttgacatcttatcatatctatatttcttcatgaaaaatttatcatacaaaacattatggcatattcatttcaaagggatgggcttttatgtatatttaaaatgaagcccccttttgaattagaggcattcttagagcagtacacccaagagattgtaaaggtcagaggtaagaagtcaatgtaaggtcatatgacatgcccagtagtttatgtctgaaaattaaaaaaaaaaaaaaaaaaaaagaatgccttgagattaggcataaaatataacacatctagaaattcttaatcaagatacacaagatttgaagttgtgaattaaaatgttgggaagtcagcagttgaagattctgacttgtcttgcaagttacctgttcattgaattaaggttatattatatttattgttgcccatccccagagctaaaaggacagctttattcacctctatttaacctccagtacatacagttgaaaagctgaacagatgtttttgacactgtaagctggtaatctaaaggcttatacgctgcagtcattttgttaagtagatccgcagtccattattaacagaagtggcaaaaccatctaaagacaataacacagcctgcatagtcccagctctctgtttattctaccacagcagcctgctcaatggatgatgataatttaagtaccaaatataccatattgtgtggctgcataatcaaatcaagagaggataatattcttctgtattaag

SEQ ID NO: 59389 - DNA, 1706 bp, Bovine  19866880616010
  misc_feature (1)..(1): n is a, c, g, or t
naatttacttgtttgtgtgtgtccatgtacacaccatgtctgtgcacctatatgctgtctgttccacatgtatttgtatgtcaatatgctgcacaagttattatcatgtggctatttctatcagtacgctaactaaaaattgcccttatgtacacaaattcaattacacttaactctttgttaagttacattcaactttgttaaattgcattaaactacctgttaaggctattttaaagtaatttatttacaaaccttatttggacttgcagactagtgatgacatttttcagacagacatatgaaagtttagaatgatctttcttcagcttaactttctgaacatttctgtggtacattacagtgtataaatctttttcttctgtaaatgggtatttcaatctcaatgaccctaaaaacctggcagtattcacattttaaaaggcatgaaatcacataaacagaaaaaagaaggcagattctttctggaggaggaggaggacagacaagacataggccaaaatgttcatgatgcttcactagggcactagagctgtggatgggagaatgaaaactgggctggaagattttatggagtccagaagaattcttccactcccaaaaccagatggcatcttacagcaaacctcagccagaatgtgaggataaggcttgaagaaatgagggtgaaagaatctagcttctgaggaagaaagattagcaggagagaggagagtaataaagataactttaggaggaactcaaatagcttgatgagttcagaactttggccaccaaacagaaataacaagaacgaccattccttaccacaatttatgtgttaggagagaaacaagtatctccttttcatagatgagttcagagaagtgaactcattagcctatttaacctggctaatacaggggtggtttaactagattcttaatttacccttcttccccagtataaacacattgccttacagtatatccattaacttcacttagtgaagatttttagggaggagaatatagaaatgaacccagggaaaacaaattttccagaggttggggtgtaaggtgaaactccttatgtctttgtgtggtagaggtggagaggcccctccagcagggcaccaagaagcccgtttgaggatgatgtggatccattttgtcacatcgcttcaaaaaccactgtgatctgcttcaaagaactttttaaaccatactgctttgatataagtgtagtgtagacccaactacaagagacaaaaccacaagaccattatctgcacttcaaagccagcagaaaaatacaagtgcaggtaatctctaaaattgccagcctaattctcaaatcccaaacacttcaaatcctaagtgtggatgcagctcaatatctgagaaaagaggaagagataatgtgtgtatgtgtatgtgtgtgacataataccacgatgattcagccacaagtggaaagataagttctctccaaaacagggaaaacaagtgacaactgagtatgagactttgcccaaagaacaagagagaacatccaagtaagcggaaacagaaagctacaaatatcattgtgtcgtctttcatcattatcctgaaactaatgcattttcacttgaactcaattctggaatttttagatttagacccaagagatttcaaaggctgagacagctctcaagcaggttt

SEQ ID NO: 59390 - DNA, 1208 bp, Bovine  19866880621287
  misc_feature (1)..(1): n is a, c, g, or t
ncttaggtttgtggccttgactaacaagggttaacgtagctaaatcaagaatcagatggacagtagggccctgaaaaactatgtcctctggttaaatctctaagccatgccccgttgagaacagaaccagtcttttccctgtctctggcttttctgttgtttggtttttattttttttctggtgagaaagtgagcgagtgtaagaccgacacacccatcagaactgttcttggcacttttgtgtgccaatcagggcaaaatacttaaaaaaaatagtcttggtaacacacgctcgtaagtgcagatcagtctcctattttcccaacgatcaaaatatcaagagatgggagatctctcccagaacagccttattatcgagactcaggcaagcacctggggaattaatagctgacatacctcattttaaacatctaccatatgttcatggagaatacagccacgttacttatcactttctgtttttctttcattggtttatgttttgccttgaataaaaaccgcatgaaaacacagtcttacggtaccaggtatgcagctcctccatggaatagctcaataacatttttagtgttttatttatgcaaacaaaagtgctcctcaaatcagtgcaggctgaactgcttgaagagtgctgttagaatttcagtaaactgaagctttttcctaacatcgctcaggtacagatactctccaaaaggcctgtgattgctttttttttcctttcttgttttttaaaatcatatatctgtgtttcagtgttcctcaaatttatccaaagcagaatcatgaaatttcttaaggcaaggcagtgggttcacaaaaaatgaggtgttttttttttcttcccagtggtctgtgaatctactgaacacctactacgtgctataggctttggacactcacatgttcattctcctcttccggacaatgctgtgagatgaaaattaccagctccatctaagagaaactgagcttctgagagagtaagttctgtgtttaaggttgcatagctagtgagtggcggagctgggaatccaactgtttcttcatttctttcttacacttccaactgcttgtttattgttttgactggcacacaattgagacgatattcacatgcacagcctctccagtgtgagaccaagcacattataacacattaggaaagaacgtgaatgaaggtagat

SEQ ID NO: 59391 - DNA, 2828 bp, Bovine  19866880650684
  misc_feature (1)..(1): n is a, c, g, or t
ntgataagaggacatctacagaaaaggtacagctcacatcatacataaaggtgaatgactgaaagcttctcgaacctgtagaccgctttgggaagcatatggtcattttcacaatattggttcttccagtccaggaacgtgctgtatctctctgcctctttacgtcgttttttctttctttcatcagtgccgtatagttttctgctacaggtcttttgtctctttaggtaggtttattcctaggtattttgttgttgttgttgctgtggtgaatgggattggtcccttaatttctctttcagattttttgttgtgtatagtgtataggaatgtatccttatcaaattgctgatggcattttccacagaactagaacaaaaattttacaatttgtttagtaacacaaaagaccccaaacagccaaagcaatcttgagaaacaaaacagaactagaggaatcaggcttcctccaggtgattccttcctgtaggaattccttcctggaggaatctgacttcagactatactgcaaagttactgtaatcaagacagtatggtaccagcacaaaaacagaagcatagaccaatgaagcagggtagaaagctcagagataaacccacacaccagtgggcaccttatccttgacaaaggggcaaaaatatacaatggagaaaagacagcctcttcgataaatggtgctgagaaacctggacagctacatgtgaaaaatgagatgagaacgcctcctggcctccctactggccccagagggaagtctctgcgtgcgtggggctgcagtgacctgtcgctgattggtggcccctccccaggcccagcatgtgcctgtcatggcagagggcactcctggcagctggctcgaggtggtcctggtggtggcagtccagctggggcagcaggtgctggagtgccggtggtgctggggtccgtggggcctctggcgggccgtgcagttggagcaggaggacttggggatggtgggcatgaactgcatggaattctgctggggcaaggccatggccctcatctttgtgggcggcgtgccccagggtggcaccatgctggacgcccgtgccaatgcactggggagaggagaccacattcatccccccacgtgctggctgtgcaccaggcctggtccaagtgaggctgagagaagctacagccgggatgaggcaggcatgacaggcaaggtgctggacaccgcccatgcaggccttcatcctggaggtgatcacctagcaccaggagccagcctgcatcctctgcgacaaagactcctttcccctcaagtcctacatcagcctgttggcctcttccccaactccaagttcctgctggtggtgcaggacagcctctgtgttctccctggtcacccacaaggtcaccatcgctggcttcaagcctagcagctaccacgactgcctcaccaagtggagcaggccatcgaggcgatgtatgccccaagcatggaggaggcaaggacaagtgcctgccatgtcctatgagcaactggttctgtacccttcgcgctccctcaagctcatcctctgcagcaacagcatcctatatcaggaccacctcatctgcaagccctgcagcccaagtccaagattgagctccatataccaggtcctcaagcctgtgaacctggaagctctctccaagtggactggccacattcctggggatgtgttgagggacatgggctagatggcccccatgctggcccagctcatctatgacccctatgcaaacccacccaattactacgaccccagccccaccccacagtcatcaaccacacacaccaggtcctgaaacagggactacaaaacaccggtcagtctgaaaggctactttcaggtagacaagaacagcacctcttcccacctaagaagctcgtgatttccagatctctgcaaatggctttgttgccaggagaaactgcattagagtggaaactggacctttaatccaagcatattatttgctgttatattaatcaccaaaacaggactcctcatgaggaaggtatatgcatatgtttgcaaaagctgaattattgaaaacttacctcttcacactctatcttaggaccgtctggggtacagaaccaagagtgtggaagtagtctggtttttgaaactttggtattttgcatttttccccttgaaaacttgttttaagaagtggatttgcaggactgccttggtggctttgcctgcagggacaaggcccaccacctgtgcctctcctgtagactcttattttttaattcaaagaatccaattaagaatttaacatatgaggtcttctttgattctccttttctctttggttgactcagtttcacagaagaactatatatatataatttgaataaactgaatggggggaaaaaaacagttcccagcaccatacacaaaaataaactcaaaatggattaaagacctaaatgtaaggccagaaactataaaaactcttagaagaaaacatagacagaacactctgatataaatcgcagcaagattttccttgagccacctcctagagtaatggaagtaaaagcaaaaccaacaaacaaatgggaccaacagttagaactggacatgaaacaacagactggctcaaaattgggaaaggagtacaacaaggctgcatattgtcaccctgcttattaaatcatatccagagtacatcatgcaaaatgccagactgcattaatcacaagctggaatcaagattgccaggagaaatatcaacagcctcagatatgcaggtgatacaactctaaaggcagaaagtg

SEQ ID NO: 59392 - DNA, 589 bp, Bovine  19866880716843
  misc_feature (1)..(1): n is a, c, g, or t
ntgcatgtgtaagtcccattaaggctaataggaatttggtgcctgaacccaaagaaaaatctgcctctgagatggcaatatgcatatgtaacacacaaagaaaaataaccccccaaatccatttctttttatccaaagcacataaaacaattatattaattataagtacaagatagagtagtctctgtggaattttaaatcaatttaataaattcgcgattttaggcattccccttgctcaaaattgctttcctcagatatgctttaggttgtctcaggctttgaagaacctagtgacggatggaaactaagagaaataggagtggtgggagtacatttctcaacatggtcttcatttatttatattctgcagcacacgcagtcatgatgtttcaaacttatttccatgagattcaaaataaaacctggaacacaaaacagcttgcccatattttcttgtttaaggctctatctcctgagctttcctttgtatctcagtttttctaaccacataagaaattttcaggcaagagtcggtattcaaatgagatgttaattttaaaaaattgctccatccttctgtttattt

SEQ ID NO: 59393 - DNA, 2481 bp, Bovine  19866880752949
  misc_feature (1)..(1): n is a, c, g, or t
ntcccccatggactgtagccccgcctgtccattggtcgcaaagagtcggacacgactgagtgaaaagcccagcccagcacacatttccacaaagtacatagttggttagttcttgtaccctactcttcaatttgcctttggaaaatccgatgcccatatttccaagcaagtattatttactttttgatagaaaacataaaggcatttcattttatgaacactttattgtaataaaacctggcatttctcatcactaccatttgcagtctactcttgtaaaatgtaatgcatgttaacacgtgcatgatccggaaaataaggagacaaagaagaaaccttctgtttatccgtaaatgtcctgaagtgagcttatcaaggcaagaattctcatgatctagaccagctctgtagaatttcgtaaccgttagccatatgtgaccaccaaattcttgaaatgtccaaattccaatgtgctgttagtataaaatacacattgaattttgatattgtgcacagaactgtaaaataacacgcaatgttatactggttacatatttaaatgataatatcttagatattgtgggttaaataaagtatattaaagttgatttcacttcagtgtttttttttttttacttttttatgatgtggctattagaaaaattttaattatatatgtgactcacaatacatttctactggaaagcagtgatctagattaagaaatgcacagctattattccatatggcaattagatctggcaatataagcataatttcataatgttacaagtagtaggagggttttgatagaaacttctatccatttgttttgggtggattaactggcctaatcagatgtaagctgttaaaagggcccccagaggaggcaggggaaagaaatgtggactcggacaagctttccaagtcctcaagtcacacactcctggttgactggtttgcttagccaagctgaaaccggtcttattgtcatgttgggcacattaattggagagtagactaatttgcaagaatgcgttagtgccctttaaaaggtgatttaaaattcaaaatgatggaaatggcataaaagcatgcttgtctgatcactcctcggaatccatcttgaaatcccattcttctgtctccattgttagaattcaagcacacagtaaaacacttaacgattcgcaaacatcacactctacatcttagcacaaataattatcctgttaaagacaaacagggatttcctatcatcagacacatggggattataagtgaaaatacaatctgtggatttagttagggttccacatacaggaatgaaacataaaaatcacagtagtatcaccaaacatttttgtaactgaatggaagaagttctgcctctaatccattagaagtttccaaagaatttgaggaagcaccttcacctctaatttagctgcaataagactgataacttatatttataaccactttatagctacatataattttacatccattagcacatttaatcctcatgaacaagaatgacactatcatatccattttgaagacaaggaaacaatccagactcctgaaatcaaacctttggactgtgctttttcactacattgcaggtaggaactaaactctgtattgccaggtcaaagaccaaacctgggcttttaggcaagcaaagtagagaagaataatatgaaggaaaaaagtaagcataacagcgcttttagagacagtgaattcaaagaacatgaatttacttttggaatttacagaatgtaaaactaaaaagtcttccattttgttacacatgcatgtatttctgattatacagtgtaacaaaaaaccttttactatcatttgatcaagggatctgtgttcattttaattcgataaccttagatctttggcccaaaccagtaataatgaaagcaagagctttacgtgtcactttctaaaatagtgattgatccagggttctcacacaaaatatattcaacaacacactcttagaaagggctcagaaatactgaataaagaggaattgttagagctaaagcaaagcattatttatggagtttgttttgtgaagagatttaggtttctcacagtgatattgagttccatgaagatgcagaaatgaaaacttgcctttagcaataactaggaattttttaaaaagtggaagtcacccataagaattaatgaatgctaactgatacttctctggaaatctattcttaccatagctctaagaaataaaattataatctagatccaatctacacactcaaaatatatatcagccttaacatattggattcaaatccaacacaaatggctgtgtctttgtcactcgtgtgttaatgtattttgtaaaatgtgaattttcaataagttaaaccttattgaatgaatggctgaaaggaagaatgaatggctgaactgtccactggcaaacacaggtacttg

SEQ ID NO: 59394 - DNA, 1088 bp, Bovine  19866880802106
  misc_feature (1)..(1): n is a, c, g, or t
ntgcatgctttttattcactataaaagcaagctattaaaaagtgaaatgctcttctcacaaatattgcattgccttttatggtgcaccctgacctcagtgatagtttatgatgacagtaattaaatgaggtttaaaatcctttactctgctaggcagataacagcattgccactgaaaatagacagctgtgattaatacctgatagacctgatttgctagaactccatctggaatctgagaagggtcccgcagcatactatttataacagacttggaggctgcagaagaaaagagatgaactgttagcagacagtcaacatacttttaatacaacatgaaaagtgacatatacctataaatacaccaaccatgaaaatgaaaacactactgatactaatcattttttcccttttttttttcaaatctcagagaagcttttaattaaaacattttgccaagtttataagccacattgacagatttgaagatgacctaatgtttccaaggtaaattcacaagtacagacctaaagcatatgtctcttcgcagataaattagctttggaaaagcccacttgggggggaaaaaaacaatcagaaaagaaaatattttccttctgcaggtaagtatgttataaccaagcatatgtagctggagagtttagtgaaggcaggtcagatgcaaagacttcagtgacgtcaataaaaactaccttcagccaagaaagcatctctgaatctaaatctttctaaaataattctcaactgccatgaaatgttatgtccatttcacaggtaaggaaagtaggtaaaactgacacaattgaacaaatcttaaataagagaaaaaatacatatatacacacacaattgtacaattatatacaaattttgtcccaaagtatgtctcatcatacccaattgcaaattaagctgaccttatcccgggggaatgcagtggaaggggctataggaggcatcttacgaagtgtggtatatcagatcacaccttttgaaaagcgaggcagaagattctgacttcactgcttagtggaggcatgcagaacccagtggccagaactcctctt

SEQ ID NO: 59395 - DNA, 1750 bp, Bovine  19866880869882
  misc_feature (1)..(1): n is a, c, g, or t
nctgaaaactaggtgtatttattggaatcgagaaacacatcatatattttgacgttaattaattactttggtgagaattaattacttcagaaaccctcaaaatctgaaatatggcagtttcatccaccagagtatttgaggatgcatacttagttgtaaaggcttccctggtggcgcagagggtaaagaatcctctgccaatgcaggagacgcagtttgatccctgagttgggaagatcccctcgagaaggaatggctacccactccagtatccttgcctggagaatccatggacagaggagcctggtgggctaccatccatagggtcgcaaagaactggacatgactaaagcaacttagcagccacgtatacacttagttgtaagaggaattcctgtgctttcattgtgtttgccttaaaattagcctttgtacattattgtttatccaatatattgataaattaactcaaacatttaaattttttgttgttttttttttaagggcttattaaggcttagctttatctttacatttctatttaaggaagtttcccctaaaatcaagtcaaggcaactatgttttgtacacagatttggggatatttggtgaaattattagattaactgcaaaaaatggtgctttccattgcttgcttttatactgctgagccggtgacaaagtgcttcctggccatagaagtgtctgctggcttaggagagacgggttctctggtcattggccaacaggatctgacttgggagagacactgtccatgaactgctcagtgggtgtttccctgttagtcattaattcagagtatgttatcatctgaaagccagagacatttggcatatgtcctcatattttgaagacttatgacacaaaaggagctggaactctcacattacttctgtgctctgctggtttcccaggacttaattcactggggccattttgggacgtgattccttccatgagtgtctccggagagaactgacactcaggacagatatcactgagactgaatcctctttggctctgtgggatgtttccatcttatatttttagcatttagggtcttgaagacatgaatatttatcgagtctctgatgtatgtttggcaggcaatagtccatggggtctcaagagtcagacccgacttagtgactaaacagcaacagcgacgtgtgtgtttgaaactatctcaggtgttgtggggaattcagaaacgtgcagtaaatgctcatctgggggaaataaatcattacttgggcttcccgggtggctcagccacggtgcacaaatcattacttggcaaaatgaaagcaaaagatttgaaaatttcagaaaagacaattacagtataaaaaggaaagaggcaaacctgtggggcttttagtaagatattttacttctagaccttgggcagcaaataattttctatatgctgtggtagctgcattcactactgttgagaagggttccgaggctgagtccagctcaatgggaaataaggctgtgatcaattctgggcacaagtctttggagtgggtagtaatcacatagatgccacatattttctattcctgccctaggccattcatgtttagtgcaaatataaataaattctaagcatttggaacagaactcataatcttgttcatgggcctgaataataaacagtaacattttcattggttctgtaacatcaagtgaagtattagtaacatctgtccatggctgagat

SEQ ID NO: 59396 - DNA, 875 bp, Bovine  19866880921611
  misc_feature (1)..(1): n is a, c, g, or t
naaatggggccccattttttttcccactgaccttttttacattcttgaaatgattttcccttgttttactctaatgtcttccacaaagaaagcttaggattatccacaaatacataatttattattatattatggaaaataatgaattaaccttcttcaaatgcctcagaagttcttgcatgaatacaaaattgtcattttgggaacctgccaaatcttgaacatctcattgaagagatagaaaagagttgtcttcattagggtaaatggttggtggttgcttattgtttaagatatttccataatgaatggttatttattgtaaatttctactttaataaatcttttctgtctctctgcaaatctattatgtaatgacttatgcggcatgccttggggtgctcggtcctgggccaagaccagctattttattccaactgttatctattataacaagtaaagttatagcagttatctagaaaagacacttgttaaaaatggcaatgtttttttgctgtttctgagaggtttcccaaaccaaatgacagaaatatcagctaacaattgttgtcactgaactcatatttgcaatacaattggggaattgataaacaaaaaaacttacattgctttgaggttccccaaaagatagttctctagaccctccaaaaaaagaatctaatgtgactcatttggatgatcatcagtatttgacatctttaagaatctaaaatggtgttccagtgagagaaatgcccattcctaaagcacagaatcaatcaaaaaatgattaaatagctgagccaaatttttgcatagatcctggtggtcagcacaaaaagtattctcaatggaaaaactgagtgttatatctt

SEQ ID NO: 59397 - DNA, 2598 bp, Bovine  19866880924115
  misc_feature (1)..(1): n is a, c, g, or t
ngtttcctgcagaggtcactgggattatataaattttgatttttccctataaaagaaatttcagttaaaattaaaaaagtccactttacatacactcaattgtaatttctgactgtatctgtgttgaatataaaaaggacacttttttttttttaaagaaaaaagtgctagcttttcgagaaatacctttaactgaggctgttttcaggggaattcatgactgctttaggttaatggtcggtggcttcatgttcaggcctcaattaaactctgaacttccattgttattacttaattgacttggttatatttcatgtcagcatttcaaaatgaccttccttttaaaaaataaaaattacctgacagggaagcattgtggcagccatcccacactgtctttatgtatggttgggcctagaatttactcaatttatctaccactagggtacttctcatcatccttgcttatgacatgagacagctccaagtaaatgcaagtggtgagggaaaagagatgaaacacgaaatctatctgctaccatgactattattaagatgccaactaaatccactgatatccactttaattctaatcaggggagttagtcttaaacaccttgcatatcatgattaagtgctgtcaagttatgcttctttgaaagcaggattatgtgcaccttttccttccattacaagtgcctccaaaggtttagttgtgccagttaactagatggaaacgtaaatcccctttacttgtacacgagacaacaataagaacaagttggattgctctaactaatgagtgggattttatataaagtaggtatgacgccaagatggaacgctgctagactgactgaagcaaattaaagcatcaaatgagtctgtcccctccccctgcatcgtggaaaagttttaaaagtctttttgaagtactttgatcaagctttgaaatcattttagtgggtgactattgtatgaaaaccgtaatttatagttcttgacctaagcagctctttgtctcacagccatgttcaaaacaatggcaggaaagtgaaaaacacaaggggaacgcaagctgttctggttattatttaattcataattccatcttccttaatctttgcaatccaggcatgttcttaataaaacatcttcagaccatttttactatatataggaaggttagtttggcataatacaattagagggtctgaactgtgtcactgggacctttccttaacctgagggtgacctaccaggcaggtccagagaggatctcgctataaatggtgacagtgcaggcaaactcctattgtttgccttttaatttcctctctagttaagccggctttgttccttgaccttaactgagaaggtgccaactgggagattttcacctcccatcctattcacaaaatagttatagttaggaggcaatttgctcccagcagatcacacagaaaatggcaagcttcctctaagatgaactagctaggccgtgattctctaattgaatcacagagacattttactattttaattagtaattttaatcagctaaaacatcaccattcagcctggaaatatcagtaaacctcacatgttctttggactctttttgccaaaatagttacggatagcctaaacctcaggctctctttgaccctgtaaatatcttagttacaggttttacgatcttcaagtgccacagatgcctgtgaacactggatacacggaggagccttacgtgtgcttttccccagagggtttaggccaattgttcttccccaacctggactctgaaaatacatggatcaggattcagacgggctgcatttcagtcctgggatcatttcccagagagaaaaagaaccaagggatagtgctgttgtttgatgttcagtcactcagtcatgtctgacttttgtgaccccatgaatcgcagcacgccaggcttccctgtccttcattatctccctgagtttgctcaaactaatgcccattgagtcagtgatgccatccaacctctcatcctgtcgtccccttctctcctgccctcaatctttacagcatcagagtctttttcaatgagttgtagtaagtgccgaatgtgtgtccacgtgggaagaaactgcaaaggctggagaaggggagatgacagggaagaggaagggcatggaggccagcacggatttaattcaactgaaactgcaggtctgtaaagggtgtgtgtgtgtgggggggggggggtccgctggtgagaaagagcagacatctcaggtatcttggttccagagaggaaaggaaacactgggtgtagctcctcagggaggggcgagtgacttaactgttcacttgggcgctgtgcgttaattagtgaggcccaccggggcccatttagtggatgacctcatccagggcgctaagcaatcccctggtggctttaatgagtgagtgcacccctcaaagacttgacaacttatctttttccagagtggaattaagccttgccaataatgagcacctacacacctatgcttaaaggaaaatgatgtcccctggagagccagttttctactctgcacccgagcctcc

SEQ ID NO: 59398 - DNA, 996 bp, Bovine  19866880945074
  misc_feature (1)..(1): n is a, c, g, or t
nttattaactcttaaatatgttatcaagatgcctcctgaaaggtagggatggagaaaaagagaaaagtagaggcaagaataagttccccagagtggccagaaaagggctggattcatgaccatccatgtgccatattaatccgtcatgcacaggtagctccatgctggttccaaacccatggaccaaaccatcctggatgcagctgtctgtctgctcccctaagacaccgagacttgtcattcagtgagaaactgtggccaaccccctttcctgtgttcatcacagtataccagctctccaaagcagcaatttgaaaccagaatgtccaaaacaatcactcgaagacatttcccttcaagaaaaagacaaccaaaaataaaagaaaggaaaatttattctttacctgtctcccacatgattttcataccagtacctgactttaatatgttaaggtcacttttcatgcttactctgaagaaggggttttatatcggttgtttgcttttttaaggaaaactcaaccaatatggcaaaattgcacaaaatgtgtaataaaaacataatgggaaattcagtcaacatttgttgaaagtcaaataataaaacattattaccctatacatctattgaacatttttctcctagggaaatatataattcctttttattgtaccagcaaacattccaggatcagttattacttagtagactgaagtcggatgcctgaatatagacttaaaaatgaagtcaataatctaataacataaaagtctccccctcaaactaataagaaatattgtcagcatgtaggttcttctctggataacactatatgaggttttcttcaaatactcctttgcaggaattcaagttcatatcacttttataactatgcacatgtaaagtggcacaaatacctgataaaagttaagcacttcttcagaaactgatgatgccatatacttaacaaaataggcttccagaagagtcttttt

SEQ ID NO: 59399 - DNA, 1037 bp, Bovine  19866880951939
  misc_feature (1)..(1): n is a, c, g, or t
natctatactctggaataagaactacatacttatttctagacaattaacttaggcacagttatgtataacaaattacaaatggcataaaatagagttctcttaggaatttctacttcttctttatcaaggacctagaaaaccattttgccaaaggaattgtctctgtactggctcagtgcgggattcttttccaaaattcagctgacattcttttggtcaactacagtgagctagggtattagtgtattttgtctgtgtgatacaatgaatgaaatctaaattcttaaaataggaaggagataaactggaaaaaaaaaaggagaaggtattctgagcaacatgagtaacttaaattcacacagttgaaaatgaaagtggcgttattattacacagagtaataatgggctggactggccagtccagaatacatgctaatattttgtgattgtgacagccaagtttggacagatagggcaagaatcttgggaaatagatgttgtaggtaagttggttattctgagtaccagaagcctttgtgggtgttacagaaaaggtctcatgacaaaaaatagtatttttcaaatgctgtcttacttgtgcagcagttgaagtaaaatgcaagaagacaattttaaggcaagtttcagccaagaggatttagttataattcaagtgtaattaagaactcaaactatgtaagaaaatgcaaaagcacaaatgtacaaaggaaggatcaattccacttattacattagatgagaaaagggtataaagtgacagactcatagaaactaaaagtggccatttaatgaggttatttgatttgcttattatttttaatttagggataataaaactaatttaaaaggggggataaattatagtgtaccttagaattttcatgtatttcaaactcatagcatatataaatcctataggtttggtttgtcgtaaaagctagaattaaaaacatctattcaaatagactcaaatttttctaagtgttggtttatatatatattgggggacaataag

SEQ ID NO: 59400 - DNA, 1732 bp, Bovine  19866880953240
  misc_feature (1)..(1): n is a, c, g, or t
natgaaggaaactggcatgagcctgcaggagtctccccagtcacaaaagagaaagactatgaggaagtgtaaccagaaatctgcggctatttagtaatctgctgtctggtattatttctctgcttatttataagtgttatattaaagtttctcattcttcagttgttttaaattggacatcatggttaaaatattagtaagagattacattctcttgcttttgtctatgggttggaagtaacatgaaatttatttggatttatatagtttacattgaaatgggtgctttagtcaatgaaccacagaaattctaagattgtaccattatgtaaacttactgaattcatagagaagataacataacatgaaggactggatatccaaacctcaaatttggtgttaattatagtttttgttttaatatttgtcatttatctgcttttaattcagtagtgaattttacaattgatggcatctttgattcaaaaaattattatagagtcagaagtcttctgagagcaggttctttttgcccaaaatgaatcctcaacaacagtagtggttttacatgtagcatataccatcctgggctaggctattcatgtcatgtgtgctgaagccatggccttcttttctagatttacatctctgagaaggacattgtctcttcatctccacctgaaggaacaataaataaggccccttccccaggcaatcagaatttgctgttcatattatggagtttatggtatagacattcacattgtgatggatggaaagaaataaagattcctagggggtgtctatgactgatttgtttttgtattgacttctgaagttaaaactataatagcagagtttgtctttctttctaagatatgtgttaatgtgcccaaaggctagtaagcaaattgagtgcacttaatatgcctgataaatacaggcatgaaaccaccaattttgtttaaaaaagatgagtttacttatttttctaaaaatgaaaacttttccataaatgaagactgaagaaacacagtgttagtctgacatacaccaaagtaggaaataataggagaacaattctgattatgcagaaaagaatcaaatacatttcaaatttcaaaagaaaaaaatcaaagtaaatgcaagtcatttactgggtggttttgttaaggggcaaaggattgggaagagacatacttctgggcaacaagtgcagtacagagccccctgaagctactgagcctaaaatccatgtgttcaatggaacaagtaaggaaagatgatggcatcctgagtgccctgctgattactctgtgaaattagagcccacttgctgtatcaactcattctttttcagttttgagtggaactgagtcaggaattgacccagaattccccaagcatgttggtcaactagggcttcaacagatgtatcttttcattctggttcaatccctataccttatagatcggaagagggagaatatttttactttgtcttcatcagcaagcatgtccaagtatgaaattttagaaataattttataaattattttagtatgtattccatatttaatactaatatcaaacatatatataaacaaagcaggtgtatcactcagccttctgagttatattaccatgtattcacaagtccaaggtcatagcattatggtattatgtcccactggtggcaagaaagcatgctagtgaaacatagaactggggg

SEQ ID NO: 59401 - DNA, 1286 bp, Bovine  19866880970540
  misc_feature (1)..(1): n is a, c, g, or t
ntctactgaaactgataatgatttcctcaaatatttacaccctgagtcttacttcatgttaacattcaaagatttaaagcaaattagaaattctcaatggccttaaacatgacaggaattatgtaacttagaggattattccattttgaaattacattttttgaatctatagaattctcactaaaatccctaattttctacagttgatgtatcatactggtggaaaacagagttgacattctctgctttcaactgcaaaatattaggaaaaccattacctgactaattgttgtgagatttgtgtcccagttttagaaatgtgtgttcttgggaaaaaataccttagatttacatagtgatttttcagctttcatatgatttttccaactcttgatcactacaaccatgtgtaaatggcatatcctatttattcccatttaacaggtaaaccaagcatggttaacatttttggtaactccatgcctttgctcggagcactttccattatgaacagtttgtaactattgttaggttgaaccatttgaaattgctagtatttgaccagtattctaacctaccaaaatggcaatttcataaaagcaatattttcagttttactatcaaccatactcttggttgttcttttgcttattctacttttcgatatgcttgtttttaccaagatgtcgtgcctcactcttaccaatcccttcattttctcttttcatagtgagtagataaaaaggcaaaatgaaaataaacactaataaaggaaaccctagcctatgagaagccaatgaagttacacacaaaaaacttaccaatgaacaattaggtgatgggagacattgatgtgtttttaactagggttgaagagagaagctgcttcatagtattcagtaaaaggaactatttttgtcaattctaatttcaaacttcaacaacagtaattagcattgagaaatgaggaattttcactctaaatatttcctataagaacaacagcaacattaattaaaaaaaaatacttattgagtatttactctctttcagacacgctgttaaacacttgacacgaattacttcatgtaattctcaccatcctatcaagactgattttccttttgcacatgaagaagctgaggcttggagaggttaagcaattagctcatatgaataataagggacagagactgggttcacacctgtgcccttaagagactgttgcctatgatgactgatccctgtgactcctgagcccatcgagccagaattttccagcctcg

SEQ ID NO: 59402 - DNA, 1794 bp, Bovine  19866881002619
  misc_feature (1)..(1): n is a, c, g, or t
nggcacagtcttggtcatgtgtaatatgaactttgttctgaaatcctcaggtatagtgttataaatcacagattcaaagggcaaggggggacaggaaagaaaacaaaccttaaggtcctaatttcccaaataaaatacacaaaaggttattttcatgcatggttttgtgatttccaacatcttccttttgtgataagtgctatttctagaacttgggcctaaatttagaaaaagaaaaaaaacccattaatcagatgctaattagcatgtatcattaaatgttatagactgagacaggaagcccacctccttataagtggctgattccatttctcctgtactgtcagatatttggccacttctctctctctgattcagttctttgctgtgcagactgcaaaatataataacttctaagcagtgtgtaaaacaaagtgctcaattcactttattaaaatatccaataataattgatttaaaggcaataaaatgtgttcattagagggtttatattcaagaaatattgaaagtatacctaaaactgtcacttttattgtgaatgaacaggataatataatttgaaaagagtgtgatcatactaaagatttgtcctgcagcattatctgatagctcgtaaagtgctgaaatttaatatgatgctttcagtcagtttaattgaaatttaattgccactttgggcagaaggtttagatctgatcaataaaatattaaagattttgtgctttcgcttggaacagctcctttagcgatgcatcaagaggactctatattttcggaaatatttgtttgttatagttcacacactgctcaatatcactttctaatctgaaagttttaatgtgctgtgcagacaaatagtggaaataataaagcaatagttgatccatttaattacaacacgatgaaagaaataacggtcaccttcagattcatgagaaaggcattaacgtaaaagagcaataaatattttgaaatgtcaaacctcagaaagacagagtccaacttgagctgggttgtaaatcagactgagggaaggaccttgaaaaaaagatggttctttggtattttagaaataattactaatacaaaaagggtaatgatgaaactataaattacattaaaaagggccattagaggaggattagtttataaagctgagagatggttcttaaaattgtcctgctggttatttctacttttcattttattcaggaaccccctgctcaattatctgattattaataagctaattgatcatgctttgcagttcaaatattaaagtcaactttttccttttcagggactcccataggacttccacattgcttatattttaggaagggagagagttggagacttaagacatatgaacagtaaactggagaatgacttccagctaagtaacatttctattaatgtctcaaaattataatttctttcatatgactgtattcaaaaaatgactgatacttgtgtgttataattttttctaattatcactggaataagttctttactaatgatcttttttaacctatagaatttctcaaatgctccatgttccagcctccatgtttctttagtcaccagttttctgtaagatgttaagttcaatagcaaggcatgttgttttatttggtttgttgtatctctaatgtatatttcctctttacaaccacattcaaacaagactaattatctacaatgatcataatcagtcatcttttttctttaaccacctctgtttcagatttcttttggttaaccatccgc

SEQ ID NO: 59403 - DNA, 1902 bp, Bovine  19866881022584
  misc_feature (1)..(1): n is a, c, g, or t
nagaatgatttaatcaaggtacgtgttgttatattcagcctcattaaacaaggaagtttcgatgttatatgaatttttttatgctctggtgtcttcagcaaaggatatatcttgttggcagactctgaatttttttcagatgtcaaaaacacttgaagctttaaagtctaatgggtttcttaatccaactgcagccattcagcctcagtgaaaaatccattccttcatattcagttgctcctaaatgtctttccctttaaatttattgactgactttcctgtctttctgtctcatgtcgaaagtcagtaggcacatgtaaaaaataatcaaaacacaccgactccctagtgaagaatcaatggtgtcactgctgtcatatatctagactaggcataatgaactgcagcatttcatctttgcatataagataatttgggcatcaatcgtattctgacagatttatgtcactcaaaggacagttctacttttcctttttttttatcgcttcattgaagcctgcttaatttctctcagtcaactggtgcccccaagacgttatttttattcttaaatgtccaatatccacctgatgtctgtgtttgtgctcattggggcctcagtaaatagactaagagcaagtcccccctgcttaagacacacacaggcttgtcagttggccttttcaaaagtgtgtatttgtgtcatcttcgcctttagagatggtgatatatatttaaaaacaggtccttagtttggaaaggcatgcagttatgggcaaggaaaaataaaacgggggccaaattataaaaaataaaataaagtctctgcagtgacagtgaagacaggtcgcacccaactgtacttacttcccccggctttgcgattgctttacatggtgaaggttacatgtagtgccattgcccatccatgcccatattcatgcccattccactcataggtcctagaaaggagataaaatccaagaagaggccggaaaatcagcaataattgatggtgaaaaaataggaggaaactcaagattccttctcacttactgccttggttcaaaaagaaaaaaaaaagaaaaaggatgtgtatggggcagagtaaaatggtattgttgtcaactctttactttttaaaagaagattttttttcccccacccaagggaaagaaagcaggcagagcaggcagcaggcaatattaaacccaccatgagagtgggagagtagagtggatgaagaaggctggtggagaaggtgacacttgccagggaagcccagaggagagatgagcaaacctacctgcaggccggattcccatgtgttgctgaccatccaacacaaagctccccatgggctgaccctctggactatacgctgctccttggctcactgaaggatcaagaagaaaacctgattgtagtcattcgaggacacagaggagaaagaagaaaagatataccaaacaatcagcaattgttcctgctgcagcactgaaacgttacagcaacaacgtggttggcacttgcaaagggggggtgtggtctgtatgtgcggttctagggttgaggtgagatgtgtgagtagctttaccaaacattctagaggaaagacttccccagcctgtctaacaggtgggtcatcctcagcagcctttacttctggacttttctctctcaattagggggaagagggacaaggaagagcggctacctgatgtataaagatcgccacatgctattaagattttgtgatcctgccatctctggtggcttaataaaatttcacatcagacataaacacttgaaaatttgagcacagttttacaagattaaacagactcaatggaacatttgctttttcactcataccaaagaaaatgtaaacacgataaattt

SEQ ID NO: 59404 - DNA, 1019 bp, Bovine  19866881061310
  misc_feature (1)..(1): n is a, c, g, or t
naactcggcctgaaaagacttttagggggagcctggtgaattttttgtccttaaaataaagctgtttttgaggtaggagagaagcttagtttttgaaatggcacaatgaataacaaaggccccttttcaccccccaaaaaaggactaaaaaggacatttgttcaactcttgaggaagaattgcgccgttaacataaaagtctagatacaagaggagggaaaattggaggaagaggaggagcaggtagaattaggaaatgcaggacccgggaagcaacttgttttacaaagatgattatgctcaagctcagactgagaactcgagaaagagcacttttagtgaatgaaacagctggaagattaaaagtagaacatcccttctccgagcacgtggatatgcgtgtgtttctctccccactcccctctcctgtcccccagtggccttataagtatagtctggcagacaagtggccagtaaccagtcttcataatggaggtcaggtgatttgtatttctggatttttagaagagacagggtttaccattgatttaaagatgcaaagtacactatttcacctccccctgtcatttagtggatgtggttcttgagtgtgttaatgcgtctcgagccctgacctaaactgtagatgaaaagactctttaaatattaaaatgcagaacaaacagaattgcttatgcagtaagaaagtgcacagtattctaaaatgaggcctaatcttttttattggggcagcaaataactacgtttctggccaaatataactgttttgaaaactccctctttaacaaaattagtaagttgctggcctttcttttaaaaaaaagaattcaagttacagagtatgtaactctggacttatcaaatctttttatgcctcttacatgtcaaagtttaagtgccgtgttttgtgtatacagtcatcatgatatttgaaaaggccataaagaaaagcaattatataatgttttcaagaaccaagaagcaaggataaaggtttt

SEQ ID NO: 59405 - DNA, 949 bp, Bovine  19866881075461
  misc_feature (1)..(1): n is a, c, g, or t
nttggagagagaacaaaatctcataggtctttcttagctctttaatcccaatatgtaaaaacaaaattacaggaagtagtttataatataaagatttcccagcaggtaagagtgtataggaaataagctggattgtagttgccgtaggggctttatgtgatattagagtaaagcattttcttgaattttctaagatgcttttactttctaaagtcttcctgctgtaattgctgaaaattgaatggctttaataaagaacaagattcttatttcacaattaacatgaaatcaaagagatacaataatgtttttaggtcgtatcaataaataaatgactaataataaagtctatttccaaagatgaccattataggaatgagaaccttaacagagaagtacattatcttttaactaaagtattcattatttttctctgaaactttgtctgtttaggtgagagaaaaactatgaaaaactaacaatactgagtcagtctctacagagttttcgctcaataataggcattattctaacccctattagtcatttgtacatttaatctccaaataactcaaaacatagaatgtttaattatccccaatttgtagatgaataagttgaggaaagaagagttaaccagtctagagcattaaggtacttgctgccttgaagaaagtaaaaataatgcctttgcttctgagagtaacactgttgtgtgcagagtagatgtagcttttagtattttgaaataatgtatttccaagtgcacatgttgttgtagaactaggttaaattctccaggattcacaggtaaatcaatgattattgaggaactcatgtcactggtactaatcccaatgtaatcctttcaatcatgggccttactttcaaaatagcataacaaataaggtatgggaggaaagattacggagaaaatacaaaaagggca

SEQ ID NO: 59406 - DNA, 2705 bp, Bovine  19866881102382
  misc_feature (1)..(1): n is a, c, g, or t
nttctttcctgagttaatttaatattccaatagtacctaaactggcattgttgatcgccaattctataaacagcctagtctatcctatctcttctatataaacatcagcatgctctagttccatatatccacttgaaaaaacaattccaagaaactattctagaaaaccaaatagtcaagacccctagaaatgacacgagaaaagcttttgctgcagaaaactgtgaacttttcatcctacaaaccatgtaactagacgccttcccagttcccccagtagtgcaaaatgtacatgaatttagaaacaggaagcaatgaaaataaacaagtaaatgacaacaacaaatactttgaaggcagtgtcatgccctgccgaccacaaccacacagcatatagctacctatcagcaaatgaacttgccatagctgcttgttgcacccacctgacttcagtgaatacacttaatatacaaaagagctccccaacatttccctcccagtgatggagaaagccaagagtaaagacaggcatgggagccttcaacaccacagtatttattctgtctcagaactggacatcggtactgatgttttcttttttttttaattgaaactttcgtccttaggctatatggctttccatagagcacaaaagctactcattaaaatctgtgactgtatattttcaaaacttttggagaaggagggggagaaacttattctccaggtatctcaactcattcctcttaccacctaggagtggggggtgatggtggtgatacaaactaccttcaagcctcgacgcccatttaactccacagagtgctaaattaatatttcagccatcaagttagtagactatagcctatatcattcaggttgtgagttcaattgactgtaatctatgggcaccctgtcccccacccccaggcttgagttcctataaataaactgctgttcacacccactctttaacctctccactcttgcctttcctaccagctgcaatctttcttctctttgcttctttttcaaattttcagtctcactacatatgcttttttttttaagcatcagactcactagatcagttccaaaataggattaaaaacagagagaatagaaagaaatctccgttcctggcctgacacacatgggtccctcctgactatactctccgttctcatccaccaactcttttaagtgttaaaattcaaccactaacctatgtttactcaatcacaattcccttcagctttctgtaatacattgttaatatttgtttcatcaaggttactgtcttttattaccaagatgcttcaggcacttggcattaagttcatacactgacaataagtttctatacagcataagctcagaaaactagaatgggttcactccttttatttcaaatgcgatgcaagattggcaataattctcagaattgccatctctgcgagaaactgagaaatcagtccttgctccccaattttctcccatcctgtccagttaactttcctgcctccttctctccctgctgcactgattacagagttgagaaagcagaaaaggcagcggtcaccgtatcaagcagacaatttgctaacactcaagttaccaaatccaggaaactttacacattagaagcacaaatcactctatcaatttgctgtttttttttttttttttaattctcaacataaataaggaaggggtccaagaaaagggaaatacagatgaaaggtgtggaagaagtagtgagaaagggagggaaagactcccagagagaccagattttttattttaaaaaataaaactcaagtcagtggagctagaggttacaacaaaattttcaaaactgctgtgcccagtagtcttaaaagaatgccaaaagctcacagacttacatggtcagcgagatttgtggaggagcccgaaagttcttcgtgatccgacttggagctgccgtctctttcatcaatgacgaggtctataggcattttccccttcaaacagctaatgtaccggtggcagaagttatcacacagttcatggacctagaaggagggtcatggtggagggttcagcttgtattgttgttgttgttgtcatggttttgtttcatttttttaaggggaaaaaataccaggttgcaaggtttcatttggaaagagtaacagtgccatgtcttccaaactaactctaattaatgggtgtaatagttgaaggcaaggaaacaatagagcaattgttgtagcagatattattctccagagacttccctgagcaacaagttacaataaagggaacagaaacaggactggaaataactgggttcaggctgggactccttggggggaaaatccgatttgatgataacatcaaaatgtaaggacgaaggaactgggaacagcattagcatttgcgattcaataagctaggaattttgtatgtttccaggagaaaatgattgagctgcagagcaatgtaaagacaccctagccagaatgattccctctgctagcacctaatgcatgccctgggcctaatagagacgcaagcaagctgaatgtccagtaacacaaatggtttgctgcatttcaaaataatcctgaatgcctggggaaaaaagggggggtggggggaggcggctactttaaaaggcggggctgccttaattcacccatcctccgagcccctgggtt

SEQ ID NO: 59407 - DNA, 2306 bp, Bovine  19866881115602
  misc_feature (1)..(1): n is a, c, g, or t
nggatcccaggctagtgctgtcttgatgctttgatatagctaatcacttatgaagtgaattattgagaatacctgatatattaatgcttgaaaatgatacagctgctggagcgagagttgttactttaaaaatataactttcatgcagatacactttcttgaaaatgagaaaagaaggattgggtttcagctaacctttagggaatttgcttattgggagtgcatcactgatattaatgtcatcttatgtgtatttttctgtaacagggagaatgtttacagctgctcaaggaagatggaaccagaataagaaattttccacttagactcaggaaccagcaacctcattcagaacaaaccaatcaaaataagggaggaaggtaggacatattatatctatacctacgcattatattatattgtctagagatgtcatgatttagatttcaaattactctttcattgacttcaacctgcaaagactaagaaaagttttgttttttggcatagttagaaaattttccatctgaacttacatgcttataagtaatataatttataaatacatagtaattgatatgaatacatttatattgatgggaataaatctagataacctcaaagagaatcatatatataatataggattaaattaatctttttctctgattttgctaggaggtagatgattgcactttcactaacaaaattctacagagatgcacttaaatatagaagtacttaataactattttctagatgtatcacacttcattcatctgtcaataggtcatatgaatgaaaacctatttttaaaagaagctaagaggacacaaaactacccatgtaaacatttgagtccatactcatttttccacttagaatctggcaaaacaagccaatcccagtactctaagacaggaaactagacatatgaatactggggcaggggtcagaatccaagcaagcctagtttggacaggtgttagctgaatgacctctattaagtcttttgacttctctggttctatgcaaagaaagtgttgatgaaaatacttacacttctaaaataattgataagaactttgaattagataatacaaaattattcaagaaacttgaatggttatttataaaactttacttaataggtttcttactctttcatttttcacccaagactaaattttttcctcttaataaagacaacagaaaatgagctttttattgaataagttgaaagtatttatacaacacaataattctgcaaaggaagtcatcatcaccatgcccattttacagagaaaagaactgaggcctaacattactgaccctcctagagtttgggagctttatagagatagtatgagaattaatttttagtaccttcccacttttccattggttatttatgtctgtctgactcatcaaattatgctgattgtttttaacaacatcactcagaatttatctcaatgcctgaagcatcataattgctgtgactaaagtttgttgacctcggatttcgtttgtgatacaaggaagggtcagaagtgacctgcggtgtgcagaactctctagttttaagtgtgatgctttggctaagcaagaggatgactggtgaagacaatggtgggtgaggaagctcaagactggaaagtgttgtccgtttattatccctctcagtgcttagtctctttccctgattcaggcagttagcaaaagtcttagatgcccttaaaccagtcttctaccaacaaaggaatcccatctatggttttcataacagctgatcactcagctgctttttctgcagggagattgtaatatctcaagtagctaaacactgttgaagatttggggcctttttttttttttttttttttagaaattccctttatactgagcttattcactgtccttgttctgcagtttatgcttcaatttgtccgcatgaaatggataatgagcatagatttagatcctgtcccaggctttgagaaccctggagtaataggcaaatttggccttggagtacagaatgaagcagggcaaaggctaatagagttttgccaagagaactcactggtcatagcaaacaccctcttccgacaacataagagaagactctacacatggatatcaccagatggtcaacaccgaaatcagattgattatagtctttacagccaaagatgggagaagctctatacagtcagcaaaaacaagactgggaactgactttggctcagatcatgaattccttattgccaaattcagacttaaattgaagaaagtagggaaaa

SEQ ID NO: 59408 - DNA, 1089 bp, Bovine  19866881131864
  misc_feature (1)..(1): n is a, c, g, or t
ntaaaaggtgacttcagagatggagtggaattgccatgagtgtttcaattcacatgttgataaaacatgtaaataacatttctcccaaatccttactttcattgaacagtaagacagcagtattcaagtagggttgtttgttttaaaaacaataatctggagtaatttctgtttatcaccaatatgaaaagaagtggaaaaacataagcaatggtctaaacactggccttacaaggccatatggcacttcctactctccacatagcctccccacccactgaataaaataaccatcatggaatggcacttttttcctgcttaaatttggctataaagtgaagcgtaactttctgaataattattttgagcctgtaaatggtgtctctctataaccaaccaagcatataacaagaagatgaagattagacttattttcacttcatttcacttctttgtaattgacaagctctcactgggtgtcaactttaaaagatgacaaatcctaaatcttagaggacccaattcaatagtccaactttctaaattgtttgcaaattaatctacattttcaaatgagtcaggcatgaaatataagatgacatctatattacaaaaatattaatttccttgtctttctctttttccctgtcaaagacaaaaggtacatttaaaatgttcattttgttaagagatagtaaaaatgaatatatagtgtgcattttagcaacttggctttttctctttttttaacactaatttatttctctctatttaaacatgcaggttattcagttcacaaatgttctatgtattgatgagagaaaaattaaatttgtgaagcattttcagtgcattacattttttaataaagattcaacaaatgaaatagtaatctgagccccattgatttaaattctagccttagcccccttctcaattagcccttgactcagtttatccacatgtgagtaaacaggtgctgtttttttcatgcaaacaacttgatggtcataaaagctctgcacatttttaattcctaactaaaatagttataacatcaatgtcagtgatctgatttactgaagggta

SEQ ID NO: 59409 - DNA, 1177 bp, Bovine  19866881178895
  misc_feature (1)..(1): n is a, c, g, or t
nattttaaatatgttatcttaaatgatccagaaaaaaattaaatcaagaaaaatgagagagtaaattataaatcaaatagagtaaaatgtcaacagtaggtgaatatagaaaaaagatatgtggtcagtttttgtcctctttttattttgtattatttttattttgtaatgttttggtaaatttgagattattttcaaataaaaaaatttattttttctcctatttcacagtgtaaaatgaatgaaaacacagtgtccttcaatcatgtagcaagctcctgtcaatcatatatgatttgtagacatttgattgacatgctgattttcttgggacttcaaagatgggattgtattccccaatcagacccacaggataacctgaggtataactttcaaaatgtctccatatgccagctcacaacatgaaccatagatgctttctatctcattcaagaacctaatgatttacttttatatccataagaaatatatcattaatatataattaccccactcactgtgtacttgtaatccacactctctgggttcataaacactctaaagaacacaactatataatagaaacaggaaattccaccagacaatccctgaaaacatacaccaatctttccttcttccttccctttctccttctcaggggtcagatagctctcccagcctcctctctctctctttctactatttccttcacagatgattaccccagtaaatctcttcatgtaaaatcctatcttggcatctgcttctcagagaacatagcctaacatggccctctatcttcagaagcatccacacagaactagaggttatacctagtcaccctattgcattggagtgcttcccaagcctccatcagcaatacgttaaaaatgatctcccaagaagtcagtctaatctagtattatagactagaccttgaagtcaaaaggactcaggtggaagaattagctggatgatcttaatatttaatgggatcagatatctatttcagtgacatccataataataatagacaggattctactttttatggactccccttttacagggaccatgcagattttcttcttttctaaagacagaaggcaaagtacccagatgtgaactttctcaggagcaatcaaaattcatatttgtttcccccaaagaaagttaa

SEQ ID NO: 59410 - DNA, 767 bp, Bovine  19866881215827
  misc_feature (1)..(1): n is a, c, g, or t
ncttttctcttccctaacaaaaacaaaagcaaaaacaacaagccagcaaaattaaccaaaatgataaaactcaatgccttggccgtggccgcaactgttcagcgttccaaaccccaagggtcatccttccctgcctccccttctccctggccctctcctgccatctcgctggccataactcaaccaacccaactgaaccagtcagttttaaatttcagttgggaccttggtgacctgttaatgaatctacagagaggagaaaaactcacagtgttgagttatgcctggtgttgctagctgacttggagtcagaaatgcttgaagcgttaacgtaattgcaagaatgtgaaaaatgaagcgctgggctcctgagcaaagtgaaaggtcaaagcgagcctcacacacaacaagtctttggaagatagcctcattagaccattaagtctgcttctcctttccccttctcttgtaccatgtttaaggtgttttgtttttattaatagatacatttccccctttgtggcaccatgatttggggtggtgggaggagaggagtcttagaaagcttttcagatttaaacacactgagaagtatttctccaagacatagaaacacaatgaaagccactgcattacagattcactgaatttatatacatttcatcttcaaaattctttatagtttcgttttcttacatataaccaaaggatctaataaaaaacagtacagaaagcctaaatagatacagttcaccggttcttccaca

SEQ ID NO: 59411 - DNA, 875 bp, Bovine  19866881221808
  misc_feature (1)..(1): n is a, c, g, or t
ncctggtaaattcctggcatggaaaggaccccagggaggtgtcacagttgccctgccctgcccacctccacactgtcatctcaagggcaaccctccagaagtgagaagaaccatcagctgttccctgcccatcccactcctcctccctcggataattacaccagcaggggttggcctgttcccatttatgaacggtggtatttgtaggttgatcagtaagtgtgaatcaccgattcgtttatgtgaagcaaacagtccatgaatctctggactggatctaatctcttgattaaatggagctcactgaattaagtggtagactgtgctgtacttcttatgaagaccatgactgaagccaaagtcaggataaattttaaatatgagaatatatatttattaactatgaaaacatatttgaagttagtgctatagaaaatctggcagggagagtcatcatgatcctactgggttgttgctctcctaaactacacagttcactgaattttgacttaagagaaaaagtcaaacatttagtgaaaactctggaaaactcatagcaaatttatattttgggtgaaaaatgtcaagtatcagttaatgcccataatttgagcataatcaaagtctcctttcctaagagggcttcataattcaccttcactcctatgattataattaatatttattgagctaggcactatactgagcgcatacaggtatcctcttatttaattctcacaaaaacctattgaagcaggtacccttatcagcattcccattttatggtcaggaaattgagatttggcaaaatctaatgatatgcctaaatgtcctccagatggcttgatgataaagaatctgcctaccaagcagga

SEQ ID NO: 59412 - DNA, 905 bp, Bovine  19866881230580
  misc_feature (1)..(1): n is a, c, g, or t
ngatttatctgttgatatttaccaaaaaagtaaattaaacctgagaaattttaaaaattgcttatttatgttaaagattaatacccataatttaaaaaagctagtgagaaaaaatggcctcattttacacttttggcaaatctctttaatacctgtcttaatagaaacaagatctgtctgcttcggcattcaacttgtgatatgctatcttgattaaagaatatgaagacattctggccttagacaaaaatgtaattggaaaactatttttgttactacataatacccaacaagtggtgtttttcttagaagttaattgcaatgtggaaagtgaaaccatattatagaactttttggccagtcttgaacttagagtggatctttcacccatgcatagttcttatcatcatgcactgttcatttgcaaaatattggttgtgagttatgcaaatcttctaaatgttgtcatcattacacagcatctaaaacaatcacatttgttaatatccctactgatttcatcagaaaagtctgtaggatttgaagctgtaacacttatggtgatggatgcacagttttccaatatttgagtttccccttgaaagctcagttttttcattggcaacaaacactattggttgtttctcttgaagtgacaggctcatgtttatttttgagaaaatgcctgccagatacccaaatgtgaataatggtagtttgttcatcattcatccaagaataaatggtgttccatggaaagggcacctagttcagctctgaaacagtcatacagatgcttccccttcagatagtcatcatgcttcgatatgcagtagacgtgcttcggtttacctcttattttgttatacagaatgttaagaggatgtgtatctagagtgagatct

SEQ ID NO: 59413 - DNA, 1065 bp, Bovine  19866881258867
  misc_feature (1)..(1): n is a, c, g, or t
ncctggattggcacacagatacttttagcaccacctgggaataaaggtgggaaaatggggttgtagatgtttgcaaaatagctgacctgaatatttgtaggtgaaaatccattttgggggccacttgtctagggtctctgtcttccaaagttcttctgctcagcagggatgactaaaaaggacaggatgctgcaccaagggtgagtgagcatgagtttggatgagtgttctctgtcttctctgagcttacgtcctccaacactggaacagttaatcgagagttgattccctaaaattcctttgtctactttaccttatgttgatgtatatagtggatacggtggtgcacaaccaagattcccattggtgtgaatgtactccttccccaggggccatggtgttccttgccatcatcttactgttgagtgctcctctaagaactgccctggccaaagggaactattttccccaaagttgcatctcttcccaaggtctagcctgaatcccatgactaaaccatggttccgttggagatatttctgatggatcatcccaagctcagaactcctcacgggattggctgaggtctcagttgtgactgcactgtaattcaacattgctctctgacaaatccttcctcacacatatcatatccaagagcagtctccaatgaaccatttgtatccaaatctcaagctcagagtctgttttataggaaactcaacctatgacagttatagtggggatggttctagggggtaggctccaaaatgaaactgtggagttgaattatttccttgctggctggctggtgactaaagacactattgccccttctctcagaatctacccccaacacccctcctggttaccaaaacagtatcaaggattaaaataaagcagggatgcaattgttaacattttctctgatctttaactgtgatgggatatcagcagaagagaatgtactgcaaagtataatactgcagacgtttcagagtttaggggtaaatagtaattaaaagactatagaattacagagctgttgctgcagctatccatgca

SEQ ID NO: 59414 - DNA, 1420 bp, Bovine  19866881286952
  misc_feature (1)..(1): n is a, c, g, or t
ntgcctgaaaagacttggagatttatagttagaacacaggtctgctttgtggttcaggagctgactgcctctctatgtagctccatgcgtagttcctctgatgtccctccagccccagtgcagctggcttagaaaaaattctaggaatttggtaataaagcaataagaagttggagaatttattatgatttatttcattgggaggatgttaattaattttaaattattaagtgactgaaataacacacagtgatactcataggttattaaagaggcatgaattacttagctgaaaaataataatacaaccttgattttacatagttcctattttaagtctgactgcccatgctttttactctcaagggtattactccatgaattctcagcaaaattgggctggtggttccctttacccatttcctcaagttggggctatcctgagctcaggaggctggcaggatctgacgctgtagactgcactaaacatttaattaccagatcagcctggtttgtagacatcactttatttatcctccaattcatcctaactcttctgctacatttgatctatctggttacaaaatatggctatctgtttgctagtgataagaagtatactttcaatgttgatgcctgagtgggatcacagtttggaactcatcatatataactgactaaagaagtctcagtattttgttttgaggattttctttaaacttggtattatgctgtttgctattccacttactacatctgtaagtttagaaatgggtttaaggatcaaaataagaatggaaaataagagacagtgtttttcatcctatctgaatgcatatttaggttggcttgtgttaacaatagatcatttatctgttggaaattctaaaaagaatgacaaaaatgttgttaggaaacattttgcaaattgacagaacatattctatcttttctaaattaaaaaatatcttttggtacccgggaaggcaatacttttgacccaactacggtaacttattgggaaaagccttttcttataaaattcaaactgccatttatgacagaatcaatacttatgatctggttacctttctggaactctgtgctgtacttcatgaagtggagaaatatttattatcctagataaaaatctcaacagataaataatataaatgtgtgcctctactaaacagttttaattcaatcaatgaatactatgaacttgccaagtaattagaaaaccccttgattttctttatatgcttcggaaagtatttcaatagatgataaatttactcttctaacttcaacttctcttaggtatttctaattataagtattttattcaattgatatcccagatttcatatgggtcattctgagatagagattgtttagttgaaaaaggatacaggagtat

SEQ ID NO: 59415 - DNA, 1643 bp, Bovine  19866881294906
  misc_feature (1)..(1): n is a, c, g, or t
ntgtaaaagtttttttttttctttctggtatgctttttttagggcttcccaggtggcgctagtggtaaagaacccacctgccaaagcaggagacataagagatgcatgttcaattcctgggtcgggaagatcctctggaggagggcatggtaacccaccccagtattcttgcctagagaatccccatggacagaggagtctgtgggctatggaaaggtaagattcaaccaataattcataggaatttccaggtgggttcaggtaaaatatctggtgccttgcaaagtcataggctaccagttctctcctttgggaatgtaatcagaaataatcactttactgaaaaatagacgaatgcttacttttctggtgtattttttttacttctaagacattcaactattctccttaaagtacgtggaaagcctgaataagtggtgatagaaaattttgaggagcatcctgggagaatgagaggagttggtcttgggattcaatctaacagtgtgatttgggcaaatcacttgcctctgggagcctcaggattttttgagctataacatgcaggtaataatatctgttctacctgctgcacaaggtattgtaaagactaaattaaactatacaggtgaaaaaacttttaaaaagtgatgtacatgtataaatatttttaaatatttgtcaataagaagaaaacagttcacaaccaaaggatatacttaaaccttgtactgtaattattacaactgcatattccaaaccatttgaatactgagatatattaactttttataaaagtgaattaaaaaccaaagggatattaggtattttttaaagaggaattttccctgataaaccgcgaggcctttgtgtttgttattattcatttctgtttcatcagtgcctagcgtatcatggctggcagatagtatctgacatattacgactactcagtaaatctttaatgaaggaatgccaggagtttgagcatcactgagaaacagtttatagagttaaaactaaagccccaatagaattttaacctgaaattatctctacatattgaaatattgataccagtaagtagagtgaccttcttaaagaacaaggcagttttttgttgttgttgtttttttagacagaagttcccctataagaagttttatttatcatagatgttcaaggaaactttattcatccatctggaaacttacatttgtcagcaaaaaggcattgttctgtggatatctactagagtgcattcaacacagtaagagttttttgcctattttgtcagaggcagttggacttggagaaaaatacattatcctatatctaaaaagtaaatgcacattccgagtgtgttggggcaagccactaactacccatttaaaacaaatcttcccatttgattttcagagcaaaaatggaaactgtctgttttgatttaaatctgtcccagagcagtttccatgagttaacccagctgaattgtaaacctaggaccaaataaacaaacgaatacccaagtggctttgaacaacagaaccgttgcatggtttccagtgggtgcatctttctccccaagcctgcattataattaagaggttaccatggaaagaaacctgggacaatggcatggg

SEQ ID NO: 59416 - DNA, 861 bp, Bovine  19866881324350
  misc_feature (1)..(1): n is a, c, g, or t
nacagaaatggaatcctgaggcattttgttaatttgggccacccatgtgaataaggcagactccagaccctagcatgcagttgaaatggtcaatactgattgtcaagagggccaaaatgactgttttgactgtgctgtccagatcagttatcacatacttgagatatcacgccgtattcacttcataccaagttcaatgtattgatcccatttatgcacatatgtacatcattaacacgctaaccagacacatagcatggaattacatttggaaagacaataggcaagaaaattccatctactttgaaaaaaacagccacatataaggattttgttctgctttgtgaatagggagatgcctttgttgctgaagttgaaaggatgctataaaaacctcagtataattcattggagtagactaaattaaaaattagatgaaaatcctgattttttattgaaatgattcaattagattatggcccctgaatttgagtctcaaggcaacaggggaattttaacaagtcattaaaactatccttctgtacagagctggataaaggaccaacagtaagcctgttcatggacctgagatcaaatctataagggatgcaagaacatcatttcaatcaatggggcaggaaattcagacttccatatgcagcccatataggatgtaaactacaaattggccaactcccgctgaagtagagaacctccaggttacagttgtgagactgttccttaccagcactgttctttctgcagagcatgggtcccatcagcagcagtgaggcagacatagtcaactgtttgctgtttactcggaatcagtgaaataggatctgcttcccaacaacaaca

SEQ ID NO: 59417 - DNA, 762 bp, Bovine  19866881390031
  misc_feature (1)..(1): n is a, c, g, or t
nagttttgaaactggggcattgttttcgttagtgggttatggccccatttccagaaaaatctatctgagtctaatgtaacctagcaaatctttcaaatgaaagagtcttgtgggaggcaagttgtcattttctgacatattatttagggctcagctcaggtttccttctttcttctttccccacttaaacccctgctcactctccacgagtgccattttctaattaaggcaaatgaaatttgtaatttgtagaagcgagacgtgaccttccttgtgagccagcctcgctcctccccacacaccattagaaaataggatccaggggtggttgtttttttaattggtatcgctttgtctttagtgcaaaacacacggcaataatttagtgaacttcagtgtttctcttgtggcaaattgatagcataattttattatgagtggaacaatgacttctgggagcaggagagattctcccagaactacacataactcggctgactaaatgtaatacttgaagaaggtaatgaaaacagagctgaggttcagagagaactaggagatttcagtctcttgctcccatcaaaaggctactcaataaatcatacctgaagcttatttaatgtcagaagccagtaaactgacaaagtacactggggtgcttaccttagaaaaggcacactgagtcatgtgatctctggtccctggacctgatggggtcatataatccatctatggattttaatatgtaacctattatgttcc

SEQ ID NO: 59418 - DNA, 1157 bp, Bovine  19866881398745
  misc_feature (1)..(1): n is a, c, g, or t
nagaaggggaaatagaaaaaaaggattttccactgtttgccttaagtttctagtacatattgtccctttctgatatttggaattgagttatttaagcttttcagagtcccaggaagatgctggagctttctttcttatcaaatctgtataaaagaagagctgctttttgggctccagaaagagtgctggtcggtggcactctgagaaatagaacatgggtagagatgggtaagaaatggactaattcagtcattaaagggacaaacaaaaaatagtatgttattaagtctcacgaggcaaggtgaagttgaaaagatttaaagatactttaaagattctttgccagcagttatcaaaagtaaatatttgaactgagatcttgctgacactaaaaccaatccattcttagagtttatccatctctcctgttgttcacattaggagtgattcccaccccacaccacacaccccttttctggtcagactgaggtcatgtggcctcataaagtaggacaccactcactgtcaatttgaagaagtagctggcatcctcagaactgtgtcagtaacaagctcttggacttttaccattctgtcaaggtctcccagctgctctcctgcttcaggaaaacaccattggcaacaataaacaacaataaacgggcaagcttcgtaacatacatatctcattaattaccatgaaaaatccgacaaagattttgtaggatttctcctacaaaagcaggcattctatcactacaatgtacatgaataagacacaagaattaaataatgtgcccaaatccacacagtgaggaaatgatggaatctggttttaaacctggtctgtaaaaattccaaaacacatcttcttctccatgggatggggcctcttaattttgctacactgtgtggattcttctagcgaaaagttgaactaatgccccaggacttaaagtccatttcactatactcttcagaaaagtaggaatacatagtttagcaatttcatggactattgtttcccagtcataggccagaatcctccaaaactaaataaatctatatattcattatggtatttccaaatactgacttaggctcacagcacaggcagcaaactgatatttgcgaagacaatattagaaaatacatta

SEQ ID NO: 59419 - DNA, 1209 bp, Bovine  19866881401247
  misc_feature (1)..(1): n is a, c, g, or t
naaaagagaaaagaaatttagtgactcttggaaggagattctgttgcctgagggaatatgtacaattgagggacaatgaataatttgtataaagaaaaattgttttatccccagaaaagctagaccaagacctgtagccatactttatacagcatcatttagggaatgtgggggcatcattattatgtgatggatgacaacaggtgatcaatgatttctttatagctttataggtagtttagacattgaacatgatgcaaattaaggaaacaccagctactgcactgtcaatgttattaactatctttccattttagctactgatgtgaaaacatatttaaaaatatttttctttttttggcaaagtagagcaattagttgtttggatattcttagaaatcacaattgagaaatccattacaaagaaatgttctttactccactttttttggatatgacactttctatttgtccctgaacaggtttttcaagaagaaactctgcccattctgtaggcagctggctccctgctctgctgtttcagaccttcaatcactagtgacatgcctgcaatccacaaagtcctgggtgtctcttttagctatcatcatctaaaagacatctaaaagggttttttagtgcttgaaagcattaggtttcattttttgcattccacaaggtaagtggaaaagttgatccacaatgacatgaagggctcaattctgcatgaactttttgtttttctaccagaaataatcctttctttctttctttgtaaggctcaagttcatctaaaaactgttgactctttcctagagacacacagcccagcaaaactaagcccaactcactgaaattgacatctaccagcaaaagtatggctattttaatactagagacacattcacagaatgactcaacttgctaagtagcaaaatatagagatagtatactgagattaagaagagtcaatcatcaaccactccgactatttttaaatagacttactatacttttaaaggagtattattttaataaaacaatccacaaataaatacaaaacaaaagggcaaatgtagagacatattgcaagtaagcatgcataccaaaaaggtaagtgcaaattagatttgaatattcatgagtcacaaatcattgacagtttgaaataatgcaaaacagctttataaatgaggttaaggcaaggga

SEQ ID NO: 59420 - DNA, 735 bp, Bovine  19866881414192
  misc_feature (1)..(1): n is a, c, g, or t
ncagcagagtgattttaggtaactggtaactgtaaaatactaaagggtctagcatactgcacccttagaaaggaaagataaaggctatgaagtcaaatagagttcaatataaaaacagtcaagttccaatctccccaaagaaaagaactaaaaataggaaaataatcttgcttggtttaatgcatgatgataatggcacctgaaaaatccttgtaaggaatttaacccttgcagctttatgtcagaacaaaatcactttatctatattgaggagatcatacgaagatgagcaccaggactaataggcagcattaaactctggggttggtggggggctatgcctcaaaaaattcaacaagagttaattgagagcactgaagaatgagtttgagtgttgcaaattcttgctgggaccctatcatcaccataagtctggcattttacttctaaacaagaaatacattttacctttctgagattattttctggttacaagccaaccattatgaacctttcagtgaatcactgaatagggcacttaaagggataaacaattataaaaataactctgtcacaagtgcatacattttattttatttagtgatgtaataagcttaggggcatatatcaggtccaaaatggtcttggtcattaatttaagcaataaatcataggtcttgccaacaatgacggcaaacagatgctaacaaggaaatgtattatttaatattgcca

SEQ ID NO: 59421 - DNA, 867 bp, Bovine  19866881414909
  misc_feature (1)..(1): n is a, c, g, or t
nttaaagctgtttcaacagaatattactacaagtttctgtagcagacaagttattaaaatcttgagaatactgtggattcaaacaactggttaggatgcaatctgaaacttgggcagtaggcagctttccttgtacatcagtgattggttccaccctgaagagggtagttacacaccgctctgcacttgacacatgcaaatgctaaatacagtagcagcgtgaggtctctgtcattaagagtaatttatgtaatgaaagccacctggctgttttttataattaattgcttgtaaataataaatttaaatataatttatagttttctaaatttgattactatatagacccaacagcaaacctaaaagaattggcaatttcatcatttagttcaatgacttttaaaagatatattaaaagtgatacacaccacacacacacacatatgtctcctttcaggaaatatttttactcggaaatgtatgtatttgttgtaaagtaaatatcaggtgaaaatatttttggaggtgaatagtaaaaatgtaatctagccctgctagctttatttgagttggaatgctaatttggaaatagcctgatttaacttttacattatttcagtcagcattttaaaattatttgtgcacagaatttaatacacatagaagaaagtgtaccttcttaacaagaatgaagtacaatgaaattctttggagaaatgcttaccccttattttgtaaaattccaattatgttttgaaaagcatttctatatgagggaaaagacaagtatatgtatatatgttatatacccatggtgataataagagactgcctaaatgatttactaagcacactatcattcattta

SEQ ID NO: 59422 - DNA, 1795 bp, Bovine  19866881595840
  misc_feature (1)..(1): n is a, c, g, or t
ncccggtctcctgcctgcggtgattctagtaacaaaaacttctacaagaaacacagctcaactggttaactcttctgtttacggacacaggagcacttcttcccctagcaggggtgttgtgaagcacagttaattatttgcaaaatgatcccaagctcccagataaaagaaaacacacttcccatgcccagtgttactgttagtgtcctctgccgccaaggagaatctgatgcagaacttgcctcaagcatctaagaagactggcatgtgaccacagagggaagcctccgtgcttgttcatttgttggaaaactgttcagcttgcctgtgacataatgaagtcaaagtttaggggtgggtgcactggccaaagtcaggtcttttacaaaactgcgcccaatagtgtcaggagcatcaatcagagaaagaacccaggaacaaactagtattcatttccccaaattccttttgctttgctgttttcagtttttcaaagatcacattcaaaaagcattttatgctttcactgaattaacaatagcccggagaaggtatttcaatcccaaaagaaaccttttctattatgacaaaccttcgggggctcatctggagcactgctgataggggccttcaatcagacctggaagcctgagctagttcctgtgctgtgttgtctccaaagttgtatttatggccaaggctatggtcactatcaaaagaaacatgggctcagagttcctctagagaagaggaatgttaagtgagacatgtgtctgcgaaaacaatcaactaaacatatccccactgcctctcctttaactttaggaaaaatggcttttttaaaatgagttttagaaaagcaataataaaccaagctatttaccttatactgatgttgatgttaacagaaaatgcacagttttttaatggtgcatttcgtttattagatggatccttctatggtagtgatattattaataactatataatgtacaataaaactatgagatatgatactagttttgttagagcactgatgtatgatgtattacataataatcttatttaatccttacaatagtcttatgtgataggtattatgtcaattttacaacagaagaaattgaagcctttaggctcattatttaagtgggggagcagggattccagcctgtcaccaaattgagtgtgagccaccaggttctactgggtacagttatagaatatgatatactaatcattactggtgaggatcagaaaaattcatgaattactattggtttaaacattatccttacagaaacagaagataataaacataacatctgtggatttttttaatggaaggagaaatcaaatgaatatgtaaatcagccaggggggaaaataacctacaactgtttccaaaatcatttttagtagcaaatccttaagctacatggcaatgtatagaaactgaatgctgcgctttcactgccgggaccagcatctcaccactggttggggaactaagatcccccaggctacacagccaaaaaaaaaaccaagaaactgccaccgaatgataaggattttaggttacttaagtgcaaataaaatgagaggtatttctgtcaaagcaacagctgattcctactatagagatcaaacaatcagtaacagagcaaaaacagtaaggttcagaatgttcattcaaaaatatacaatgatcttgtactttgtaaacagtaaatgtaacttaggtattggaagctctttctggaataaatgattaacatcatggggacaatgatgg

SEQ ID NO: 59423 - DNA, 883 bp, Bovine  19866881599084
  misc_feature (1)..(1): n is a, c, g, or t
nggtgacggtgcaaggggggagcacacagagagtaagtgcattgctctaaaagcattcccagtagccatgatctttgtaggaacaaaaatccattgtgcaggactgtaatctgagaaactttctgttaccgtgcttgttcgactcaccagcattgatccctggtacatgtgaccctttgaaaaggagcaccacgttggtgattcctcttattactaaataccattgtgttcataatggccatttatatatggttacactccacgcccgtttggttaatcagcgttcccaaactctctgatgccacctgaccagcataggatgcagacctcggcctcctgatcactctctttaccctgtcctctgttgttcctagatgtcctctatgagaatgaaatagggagcttagcatggctggaaatagggtagcacaaattctggggggagagggtggcgggtgtggtggagggtgtcaggacgaaaaagcctggcaaagtcttgaggaaaataggttatttaatttaatttaatttttttcagttccacaaaatgtctgcatgctttagcactgaattctcagctagttgggtcccaggaggccccgcagagccctgtactactcagggagttgcagctgtataacatggggggaaaaatgtagtttgcacgaattgttctttaccttggtctgggttcagaatggcagctgcactccgactttgtgtgtgacagcacaaaggccagcaaaactgaaaagcaagtcagcaagtagagagacaaaagcaacgatcagctaatacagctccacatggcctggactaatttatgagaaaaaaactgttctggttcattggatcagcactctgaggaggcaggtggaattgt

SEQ ID NO: 59424 - DNA, 749 bp, Bovine  19866881769378
  misc_feature (1)..(1): n is a, c, g, or t
natctgctttagtccttaaatattttagctttagagggttagttggtggatttctttccctcgaattgcagagaaataaagacatcaacctttgattcccgtattccacacacagctacagtcaccaatagacaaagaagcaaatactgtgtactgcaatttgaaaggaattttttgcatattcacatctcacattttcagaattccctaacgtggcttaactattagaaatagaaatgatagcatttgaattttctccattttcacagtaaagataaagtaacaaaaataatttaatttagaaattggtttaactgctatacagttatgtacatataaacaaaaagacaattaataagtataaagttaatatgccaactgcctaggaacacactatttcttctgcccttggggcctttctctcatggctgtctggtaaacacacccttcaaaattcttatcagagaatatctttttgaggtaacttcccagattccatggtttgagtaagaagcacttcttcagtcagtagtacctagttcacagatccatcacaacatctatccaatactataatcataatgtatatatctagcttctcaccaggtagtcccagaggccagggccacatcttaattgtacattattgaaagcatgtcaagcatacagtacatcttcagtaaaatgtatggggggaagtgctaaccaaatgacaaagaaaagttcctctgtcttggaaataatgtcaa

SEQ ID NO: 59425 - DNA, 737 bp, Bovine  19866881770520
  misc_feature (1)..(1): n is a, c, g, or t
naacttttcccttctctctctctctctttttgtctcaacatggaatgatattataggtaacattcaagctgttaaaggaataattgaattgctctaaagttacttaatttaaagggcattggctttatggagagtaatttgaaatgagcatctatgaacctagagtctgttttgggtgaatttgctcaccttcctgtaggaacttatgtgtcttttcctccttttttcacctaaaaagttatagatcctcagcacagaaaactccaaattcctcagaactgtaaagtctgaagtgttaatctgtgtattaaaatcactaggcttaaaacctttttgtcttcttacaacagttagaacaattggcaccttgctagagaaacaaatagatccacccttaatcttatttgtaactttaatgttttgaattggagtattttggattaagcagagtttgggtttgttttttttttttttttcttctttctttcttttttcctctttaaggttaatttttatttgtggaggctctcttgactggtttggaagaaagatactaattattactttaattcaaaaaattccttcaggtaaaaggaaagtgccgttttaaaatgagaaggtagatgtgagatgcttgggcttttagaataaaactaaatcaatattttagagtaaattatggttttaaagaagttttcttgcattactgacctgagcaagtaaataggatccaaata

SEQ ID NO: 59426 - DNA, 1234 bp, Bovine  19866881916382
  misc_feature (1)..(1): n is a, c, g, or t
nctttttatttttagtgggaagataaatttaagaggagtaaattggaaaatcaaatgagggctttagcagccggggagatttgcagagctgtctccgggtgtttgaaaggcccattcatcatgtcctacaagtagtcaattcctctagtatctgtaaatgttttcagatattagccaatttatatgctctgagattcatcatggaaaatcagctttaccatcgtgcattatctccatctgagatgaagtttgatatatgagcatctttgcagttcaatgagttgtgtgcaaaaaagtacgtttttaattaataaacaaatttgctcaggagctcatcagtgtcaagagtaataacgattgtcattcattattgtttattacattcctcccgcaacaaatgttgccttctaatgagatttctttcctattttttaatttagttaatggcattttcatcccagagaaaaatgcaaattccttgtacaaaatgtacgaaacccagtcagtgtgcttctctggagctgaattgtataaattctcaaaactacctttctttgaatggcccctctttgtgttgtcagtacatcccttttcagggagataaagatgagggaaaaaagcttggcagggtaggtgatgatgataactgtgctataccaaataaaaggcatccacatttaaacaaaattctggtgtgcactgagctggcaaggacgtttctcagtgtgatgctcttgccttttgtatatagcaaggaattcaaaaacatacatacccacgtcctgtaaaaagggaacagggggttaagaaattaaaagaagggagaatgagatttttttccctgaataaaatggaattttttctagtaaacacacacacacacacgatatggaggattggggtagggaggttaagaaattagaccatgagaatgagattttttttccttgaatataatggaatttttatttagtacacacacatgccccacataaaagaatacttaattataaaaatgctgccttcccctcaccaaaaaaagccatatatatttctcttaaccttaccatgatctggcctgttgggcgagaaggcaccatctaataaaggctccttaataaacgtatgcttgtggtgttggaacctgcaacgatgcagagatgttcaagtgttattatttactgcagtgtttgcgcaggacggcgaatcctctgctgcaaaggcattacagctg

SEQ ID NO: 59427 - DNA, 786 bp, Bovine  19866882021273
  misc_feature (1)..(1): n is a, c, g, or t
natgaaataaagacttgactttttagactgtagataaaaatgttaaaaattaaaatacttgttgtttttccaagttatatgataaaatttagtgtataaatcatacagacttttaagtaaaattttactttggcaagtaaagatcctaggcaaaatttactatatggtttaaccactatgttaaatatctcttgacttgtgttgtggaatagtatttttatctacatacaatatattttaagttgtcctagtactaaggcataaagatgtctcttcctaaaccaggagagacattcctaagtttccagatatttccctcccatcaaagaagttgcaccgaaaatgtaaaccatttcttttcaaattttgatgtagaaaaacgcaaaaacagtcctcatctgagacttgtctaaattcccataatgtactggggttcagattcttgctgctgaggtcgttgttgggcagtatgcccagtgaatctcagcctaggatttaagattcttgagctacgttaacatatttgaaaatattattccaatcagtagtctctaagtgccttcatttttttcaagtacagaatggacataattgaatatttactacatcttagagaaatgtgcagctttcagaacactgaaacatttaagaggctcagatgaaagattaaagaattaagtgtacaaaccatctttcttagttttaatccaaatgggtaatattcattatgatgtaaaacagcaggatacatagcataattggcatattaacaaagatctcaaaaag

SEQ ID NO: 59428 - DNA, 864 bp, Bovine  19866880458815
  misc_feature (1)..(1): n is a, c, g, or t
nacgactgagggacttcacttaacaagtatggggcttctcgggtagcatagtgataaagaatctacctgccaatgcaggagacacaagtttgattcctgggtcaggaagatcccctggaggagggcatggcaacccactccagtattcttgcctggaaaattccatggacagaggatcctggcgggctatagtccatgggtttgcaaacagtcagacacgactgagcacacacacaacacacacacacaccaaatacattttcccttaaagtcattccacatctaccttttggcatgaagcatctaaaaccatccaaaaactgtaagtgcctgctttgccaataagctgttagcaagtcttaactcaggagatctgtctctcctggcattctgagaagcagaagtctcagattacttccagctgaagtggaaaataaaccaaacaaaatagaaactcataggccaaatgatgaccctaccacccccaaagttgtacacgtcttaatctccaggacctgggaatgtgttaccttatatggcagaagagactcttcagatgtgattaagggtactgattttgagatgaagggattaccctggattatctagatggatccattctaatcacatgaagaaaaggaaggcagaagagtgggtcagagagatgtgacatgaggatttggcccactttgaagatgaggggaaggggccatgagccaaagatttcaggatgtctttagaagctggagaaggcaaggaagcagaatccttcatagtgcttccaaaaaggaacacagccttgctgatgccttgattttagctgggtgagatccacatcagacttctgccctacatagctgtaag

SEQ ID NO: 59429 - DNA, 778 bp, Bovine  19866880533851
  misc_feature (1)..(1): n is a, c, g, or t
nctggaagattttgagtagatgcattaaagcatcaggtgatcacagaggtctttaacattgaaaaaaaaatatttgggactcttgagaacattgtgattgaattcctgtatactatggattctctgtatatacccatgtgttaaaaaccgatctttttctgaagcagaaccatgttaaatgggaaagataagtcttttgtcccctgctaacaggttcctgtttgcctgaacatgtcagacatactgccttaatcctttgaagtagtaaaattgaaatacattgacttcccccatcaactgagttttttgcgttagagaagaccattgagcaggttttcatacagaaggtgcaagaaacttagtatcatgtggtttgacatttaggcaaacttgctttcattatttagtttaggttgaacacatcccttttcttttgaatttaacatgtaagtaatgactccccacagagaaggcaacggcaccccactccagtactcttgcctgggaaatcccatggacagaggagcctggtaggcctgcagttcatgaggtcgctaggagttggacacgactgagcgacttcactttcacttttcactttcctgcattggagaaggaaatgggcaacccactccagtgttcttgcctggagaatcccagggacgggggagcctggtgggcttctgtttgtgaggttgcacagagtcaactgaagcgacttagcagcagcagcaacgactctccacactgggagacatgggagccactactgttctga

SEQ ID NO: 59430 - DNA, 1369 bp, Bovine  19866880543272
  misc_feature (1)..(1): n is a, c, g, or t
ngaggcagagctttgcttttctgccatctttggagctttgtttcttcccaacattaaaggaaatactacccgatagcaatgaacacctaaaacgaagatccagctcagcagaaagtaaaagcccagtaagttgaaaataaatttgaaaaggttaatgacttgaaacccttttttaagctcaagaaaggactcattgtctttaaagtgatagtctacttcttctgggtttcatcatatgttctgaataaagaacatgtgatagagagtagcaatagctactcatgagttatgtcaggcagtggtgttaattgccaccattcctgggatgaggctgagagcagtaaggaatcacgaggcttgttccttccctttaaggatttgcagtgtattggagaaatacgcctggctttcttgaaccagctcataaatgcaaaggaagtgattgggagctaaattatggagaggacagcagtggacattcagagcaaggggaggtcagtcaggaagagccatgaggtcagtgaagtcctatgggccataggacttggctcttaagtgtttggttgagtcaaggtgaaagttgagctgaaccctaaatgatatacctttatttataatataaatgatatacctaaataatagacctttatttaatgctctgtcttaagatcaaacattttacttactttgaactgctgacttgcacaagttccaaatggtgaagatctcctttctactcctatccccagtccctcagtctccctaacccagagtgcctgccatgactcatttcttacagtcccttccggatggaatgtaatatttttgcacatatgtagcgtttcttatttgaattggtgaaatgttttcatttttaaaatgtatccctttgtaagtgctaaaatgtagaaaagaacatgaaaggtaaaacacacccaaaccaaacaaacagaaacccaacaaactgctctgctgttgggagaccacagctgtgctggtctcctttaatggtggtgggcaacacctgagtgagaagtgcttccctgggatgtttgcatccacgtcaatgggaatagccctggcgggaaggtagagcaaccacgagccctccatggcttggagaacaataatactgttgtcctgaatgtgatgctctgcgagaacctcacaactttttcgcttgatctccataacaactccacaaggtaggccttttccttccgttcagatgagaaagttcagactcgggccacagggcaaataggaggtgctgtcaagctgtggtgctgacttctaaacctggcctttctctgcatttatcaggctgcccttctagatgggagggtctgtatttcggaatcactgctgc

SEQ ID NO: 59431 - DNA, 774 bp, Bovine  19866880570130
  misc_feature (1)..(1): n is a, c, g, or t
ntatgttttgagataaaatttcccatacaataaatgccaagttttacttaacaagccagccagtcagcatctggaagcaagtctgcaggcagatttttaacttccaggaattctgttgaggatttaatgtttctatagcaacattttgttgtggcataaaccaagtttgaagaatgctgcagggtttgcttgtaatgtgtttcttttatctctgtaccatctattagagtctcaagattttatatatgatatatatgcctgctttaatagtattttctaacattattcccacgtgaaaactcacataatagaaactcaaatctgtcaaaaggttttgcgagaaagaactgtgtgaagaaatgactattcctcattcaaagctttaaatttctctgcaaggtattttatttctccaatagtaatatgctttcattataggaaagtcgactgtctaaatgtgaaagaaaaaatgaagacattattaaaaccattaggctggcaacaatgcagtagtttttaacccagtggtgctcagagagtggcatgaaggttcttgattatccaggatttgatgatggatgcaggactctttagttcaatttaatggctgagattggtgtgcttcagaagaaaaagatttgagatattaaaaaaaaaataataattcccatctacatgttcctgagaactttttttgtaaccctaaaggttaaggttgtagtttcatttttatagaaaatcggttttcagcagatagaacgtgaaaattactgt

SEQ ID NO: 59432 - DNA, 1066 bp, Bovine  19866880615661
  misc_feature (1)..(1): n is a, c, g, or t
ntgggatggagggctggggggaaaagtcatttgctgccacttgtaagttttttttttttccagaaacaatttaagatgactaccatagactcatgttgttcttgttcagtcgctcagtcgtatctgactgtgcagcctcaaggactgcagcacaccagggctcccccatccttcactatctcccagagtttgttcaaaatcatgtccatcgagttggtgatgctatctaaccacctcatcctctgcctcctccttctccttttgccttcaatctttcccagcatcagggtctttccccgcatcagggtcttttctaatgagtcggcccttcacatcaggtggccaaagtattggagcttcagcatctgtccttccaatatacctgtaagttaactaagggatttagtgactttaaaatgttttaacattttcagctcaagacaagggagttttgcattgcactcctgaggtattcctaatttttaagcagggaagaaatccagatacaccagcacctcaggtaactgatcatcacaacgtacagtgtaggtgttggggaggagtgataggcagggatggctggggaaagcagggaccatggtcagcctatcttcactattaggtttacttacatagcctgaccttgaagtatgatatggagaccattccaccatctagaaggtggaggataatattttttacacaataacacacgtatgaaccatactgacacgtgcaaagagcctagtgaaattccctaaagagtatcaattctttctcttcccctctcctcctttcagcaattccaactacatcagtcacaccagccttcaaacagggcacagaatgtcgtacttctagaggtagcacaatttggtacagtttggcgaaatagcttaagaagcagagtgatgcttgccctcatggataatattaatgcaatctggttaatttagggagtgtgctttacagagtaatttggatgagcctagaagcaccaccctctgctaatggtcatctctttaaaattgtattaaggaaatgccgcagacccgggacccagagc

SEQ ID NO: 59433 - DNA, 2877 bp, Bovine  19866880676876
  misc_feature (1)..(1): n is a, c, g, or t
natttctagacctgggaatgaacacttttagggctggcactgaggacgacaattattataacccaacaatagccagggctgtaaactcctgaggaagtaggctcattttcacatggacaaacagctccactaacagagaacacaggaagatagaaggctgtccgggaagctgacatttcctgagtgcccacttatggcctggagtcccacatgcttcacttcattcagggaacagcttacccaacaaacacagtgataaggatgtggagagaaagaaaggagtgttttcagtactggcctggttgttagtgggccacagatatatttgtagatatgcatgcatgtacttctaacttaaaaattaaatatttaccaagcccttttccaggtgcttggtgcctaaagaggtataagccatagtctgtgccctgcatgaggcaagtgttataaagaaacacaaagccaaatagccacatggaaattatatagcatttctcaagagggttttagactggatccacagtgaacatttaacctagagtttgctaaaatggagtatgcacctcattggtggcatgcatgaagatgttataaaaaatattttaaaatttcattaaaaatttattttaacgtgcattagaaaaacctataattatgatatccaacccttgagtatatggatattccctctgtcaggctacatatgaaagtgaattgatttgaagattatctgaaggaaaatatcaagtaaataaataaccaggatgggatttagtgcatgctgtgtgtgctaagttgcttcagtcgtgtctgactctgtgtgactctatggccggtagcctgcctggctcctgtgtccatgggattcttcagacaagaacactagagtgggttgccattcccttctccaggggatcttcctgagccagggatcaaacccgtgtctcttatgtctcctgcattggcaggcaggttctttactactagcgccacctgagaagctgtgattcagggatatggtaatgattctacaagtgttgcttgaataacctgagtttagaaaacgcagatcaagtccaatttctggactgcagggaggttacatgagttctccaggtcagaaagccagcgaagaacacagaccagaatctggtcacctgaccggtcctctcaccccacatcctcattcaatcactacttcctattttgcatatgaggaaactacaaccctgaatcacatatccactcttggtacaacttacttgagaatctgtaatgcagaaagaatagaactggcttcatgaagaatcagttaacataattatagtgtacttacctaagcatggcagtattataaaaatatcatacttattaatttttggtcatccccaaaccagcctgtgagatatccttagctatttctaccatccctcttttccataggaggaaattaaggagcaaagatccaagatcttccctaagattgtaagttaacaaagctgggatttgaacccagatggttcagctctggaatttattctcttaaccaccccacacagagttcactgtacacaggggaaggaagcaaactctccctgctgaaaccagacagagtctgctcagacaatatatggatattacgccctgtttcaaactcccattagacccgcgttcatctcataaaaggctttgtttcttcaaaccatcattttttcatatgtggaaactcctgggaggaaccagtgattaccaaaagcaacctttgtacaagaataatttgttagatcgctatgataagtactataaagaaatgaagggagagatggagagagtcgggaaggtgaatggagagagggacagtctggggacactgctggtggggctgagagtgacccgggaaatggggatcctgcagggctcctccctgcgccacagggggccaccaggtgctgtgaaagccctgcaccagccctgcctggtgcccagtgcttggcacagagcaaatgcccagaagctctgtggggtgagtggaagcctggatggaaatcaaaggcaaaccaggaggcaggcatgggaacggtgattggaggtgagagggcataaaacccacacttgacctactttatcactgctccaggtgggcccgaggacgagagcactgggtgaatctgagtcagataaagtgtgctaaccacttaacagtgtcccgatgcgtccaggacgctttgctttggggaaatccatttgtcagagcagccccagttcaaccttcaggcctaggcttcctaagatgaaaagtcctcattccccctcaggacagggtgcttcagggtgaggccaaggccacctggggaccagagccagcctgctctatgaggctgccagagagggatcagcctccagcagcctcctgcacaccagtaggtgccgacagctaagctatttgacgcacctttggggcacagaactgctgaaaccaaggccaacctcagagtctgaaaattcctcagcagtctgcaaggagaagcccaagggtgcgctcacacattacataagctgggggttcgcggcggcccgctggtgtgcggagccctgggcctctcagaattgcgcaactgttacgcaggagcacttgttaagtgttgcagcatgactccacatctttatcaaaaatgtgaaacatccacccggcacacacttggaaaacaccaaagcttttctccaccaggtggttgaggctcttgatccggctgacaggagaagcagcagtccaggggggacatgacttactgtagctctcggcccaggaagctgaacacgcagtaccttgtaccccgctagccttggacagcgcaggcttctgataaatgtactttt

SEQ ID NO: 59434 - DNA, 1472 bp, Bovine  19866880696116
  misc_feature (1)..(1): n is a, c, g, or t
nggttttaaaaggaaatatagtcgtatttggttttttttatccagtctcacttctgactttagtatcaagccatcttacgtgcttttgcttttgattttcagtacttgcactcttcttctgccatttgcccttagcctacttttttcatgaaatttgattatagtcactttgaatagctaccacctctaaattattttaactataacttattagatacccattaacgttatatttgtgggtaattttttggtttcatcttttgctgtcattctgtcttcatcaggaatgtaacttctgttttgtaatttcctggaagacctctaatacagtatctttactatgatgtctatgtattaagtcactgtctgatgggatattatcttacctaattatccttccagtttcttgaaggtgttgtttttctttgaagctgtactttatggtcgtctttgggttggtgcattggtaaatttccctgtgattcttggaagttttattttcagagttgagctgttaagtcatgaggatttgtttaatttccattttatctaggtaggtcacctgtgcattaagatgttctttattatcagattctgaataaaggtcagcaaaggctttatgatcccagggtgttggctccctcattcaatcctgaacctgctgctgctgctaagtcgcttcagtcgtgtccgactctgtgcgaccccatagacggcagcccaccaggctcccccgtccctgggattctccaggcaagaacactggagtgggttaccatttccttctccaatgcatgaaagtgaaaagtgaaagtgaagtcgctcagtcgtgtccgactctttgcgaccccatggactgtagcccaccaggctcctccatccatggaattttccaggcaagagtactggagtggggtgccattgccttctccgaatcctgaacctacctgcatttaattattgacctcacccacagtggggtggactggaagcataggtagtatgactgtacagaattgatgctgaaatagtccagtagattataaacactgggcgttaggttatctcatatatggagatccactgttagaattgttaccactaaatttatgaactggatattactgtttcctaatcccaatgatcttatttactttaggatggcaattcaaagagtcctcttagatttgggctttatactgagactgggtatagagctgtttgaattttcagggtgagaatgagcaatgaggaaattcgggctgagggtttgggattaaattgaagttttggttccctcccctctgccttttgcctatttttatatgcagttgtgcaaagattgatttttaaaaaatatagcgtatgtaaccatgaggctcccgctacttcctattttatgatattataggtgatgaaaacaaattaattaccctagctaaatcactacattataatttacctgatgtaat

SEQ ID NO: 59435 - DNA, 1796 bp, Bovine  19866880749874
  misc_feature (1)..(1): n is a, c, g, or t
nccagacttttatcagaaggttgtgttaacacacctggaatcagaactaggagagctatgaggttattattggaaaagtaagtatttgtagctgaagagaacatggtacaaaaggatgcttagtgataaagctcacctaggcctcccctgacccttgctgcttagccccttccccagaggcaacccttattaataatgaacttcttccacatgttggattgtctgaggcctccatttcctgagcagggaagttcctgctgtaccggccaggtgccttatatcttctagttaggctaccttcctggatcagcttttacttagtagtggatggcagacgggaggtacatgagcagtgggagtgacagaggcagttgggaggagaggtgcgcaggaagctgctgagttaaaaggatctgcattctctagaggggaggatccggaggaggggtgtggagtgacccaggagcttcccagtgacactagaaaggagtgctcccaggcccctggcagggagcagatgccaggtccctggtagagtattccctgacccttcctgggccctggggaacagaatggggggaactctgccccaactgtcttgaaggcacagcacccgccccagaacaatagccccaaagagacagagcaagatgaaaagcactgtgagaggtgccccatccccactgccccctcccagccccagagcagccacgccattcaaggtcagtcatatcttatggtgcaaaaaggcgccttccagcttccacactgtgacctggagacaatgcgggagaacgtctgtagcaagaaggcacaattagccgattcattacgctgacatttctagccacaaaataaggcctttccccttaattagggttgtgacagataaaagcgtattcccagccgacttctgttattcacgcgggcaggcctattatccctgcttggtctggccttgtctgtatatgagggcttgctctgtgtgtgcgctcttggcagctttgtaaaggattcagagggaataaacacagggcctgcttcctgccctgcatccagaagagaagacacattcatacatatggtctgagccagcaaaccgtggtgcttcaaaagcaggaaaagagctaatcagggggtggggagtgtctaacaccagttcatgtgaggaaaataaagctaatgggggatctagaagccagttcaagtgaggaaccaagggtggttagagtggaagaggggaactaaaaggtgccatgaacatcatctccgatcttcgaaaaggtggtggaatatagtgatggtgactaaaagccagattattgttgttgtttagttggtaagtcatgtccgactcttttgcgaccctgtggactgtagccccccaggctcctctgtccattgggatttcccagacaagaatactgaggtgggttgccattcccttctccaggggatcttccccaccaaggaatcaaaccagtatctcctgcttggcaggtggagtctttaccgctgagccaccagggaagccaaaacccagattgcccaagtttaaattctggttaaggcactttaagacctgtgtaaccatgggcaagtgacttcacctctctgtgcctcagtctcctcatttaagaaagtgaagatgatgtgatgcctatcacgtagggctcttgtgcggcctgagcaggtcacagcatggtgagctcttgtaacagtgcctgacaaggtaagcactgcaagtatttgctactatacataagacagggagcagaaagttatgcaccagaaaa

SEQ ID NO: 59436 - DNA, 1222 bp, Bovine  19866880786393
  misc_feature (1)..(1): n is a, c, g, or t
ncgagtggacagcataagtattcagggttgggttttcatttttttggcttttttatttttggcatattatattgcattataagttgttacaagatattgactgtaattccctattctattcagtaaatccttgttgtctgtttattgtatgtatagtagtttgtacctagctttaatatgcataatttcacttcagttatatggatttaagacctgtccttttggtccaccaatggctcacacaagggaaagagaaaacttatttttgcagcacttgtttggaagacaaagaggaaggaggactggagttaaggaggttctgtgtgtcctataaagtttaccggaggtcaaattagtcaagccagggagaagaaaaaagaagcaaggtatacacagcatgaaacaggtggtggttattactgctgctcaccaaattggtctgttttcctccttgtaccacagaggaggactggatcgcctggcccccttgtggctgggtagctccattctgcagagttctggccaatgatctgagagtagaagtggcagcatttaaatgcaaacaagccattctcagatttctcctttcccactggcctccgccacgtttgaggaggtggcagctttgccagccttggttccagaatgactaggagaaaagttgctctggtgacacatgtatgagcagagaaatctgtgttaaaaagcaaatctttgttgttttaagcctaggaaaatttggggttgtttgttttgcagcataacctagtttattacgactgacacattatttctataatctacctctagagaaaggaaaagggtaatagggaagagatggtgtgttatggttgccctggaaagagccctaaaggagattagaggaagagagcaaaggtataaattcagatgtaaaagatccttctaatatggatgcccagggcctggaagatcttgtgttacttctaaaatcaaagtcctgaaagtgaaagtgaaagttgatcagtcctgtccaactctttgcaaccccatggactatacagtctatggaattctccaggccagaatactggagtgggtagcctttcccttctccagaggatcttcccaacccaggtctcccacattgcgggcagattctttaccagctgagccaccaggaaagcccaaggatactggagtgggtagcctatcccttgtgccaggggatcttcccaaccca

SEQ ID NO: 59437 - DNA, 1077 bp, Bovine  19866880883110
  misc_feature (1)..(1): n is a, c, g, or t
ntgtgaattcatttgagtggcagctgacggctctaatttctcagaactggaccccaaagctatctttctgcataggcagacttgggcagttttcctccttttccttgtatttagctgttccatgaaatatccttaaaagggctcagaggtagccattccacaattagagctatgcctttaaatcctcattcctgtgagagttgactcactgactttaattcacactaaagtgtgaatgactaatgtaagtttctttcctttcttggaaacaagtgtattaaataagaaatatgagagagtatgggagagaaagaggaggaggagggaaagagagagactgaagtctgagagggaactgagtggaaggacgaaggaatggaattctagagactttatagctttataacaatggtcagctgtgctgtgctgcgctgtgctaagttggtcccagttaattttctggaggcaattccttagtttaattctagatttctccccataagtttctagcactcagtttcaactagactttctattggttggtttccttagcctctcatatgagaagctcttctgtgggtaagatgggaaagtggcaagagagagggggaagtgctaaaatggatcaaacattgttcagaggatgatgttttgtcaccttccatgtaatttcatcagatggcatctcaaaccagagctaacatgctcttttctacctcgcagcaaacaaatcttgggagaaattcttctggctaagcgcttctccaaggcatccttctttaaggggagaatgtgtaaacaatttgatgttgattttcagtctggctgccatttggtaactgcctgggtcaccaagcgaagaaacataatgtgtcacctgttccgaatataaatatcacctgattgtaactgctcagtgagctccgaggtcaaaggagaggttagcaccagtggaaaagtatcactttcaacacaggatgtgctgtgcatattagcaacatgtaccgcattaagcaatttgtgcaggtttccatgaacttgccagcctggtctatgtaaacttcacaatgatatcca

SEQ ID NO: 59438 - DNA, 931 bp, Bovine  19866880957605
  misc_feature (1)..(1): n is a, c, g, or t
naaaaatgacagaccctaagtaagtaaaagtccctttaattttcacaaagcatttgacccctttaagcatgtgtataaacttggtaggactcacgtcttcctaagtaatgaagaatcagaattccaaggtgaaaagaatcctgaaatctctgaggaaaaatgaatataatcatgtaatattaattatatatttcaggggaaaggaatttcttttcaagaatggctatattaaggacagatgggtcctgggtcattctccttgaagcctaattacctttctctgaagtagtttgagatcttaatgacttgactccttcatatccactggtgtcaaatttaaaaccgaccacacaaaatgttgggggcaaaaagtagttcagtaaacaaacttattaatagaaatgaaatcccacagggaacacagacacactcaagtcggtgagatattaaattcctgtgataagttaacatggattaagcaaaactttttatagtgcaagttcttagtatcaaattttgaagcacagcaacatctaataatataattatttatattaaccatttcttagtagtttgcaaataatgataaaggaatatgttgaaggaaaatattgatttattcaataaatagttattggacacccattctgttcctaatttgggaataaaaccagggacatctcttcctggaattcactctgtatggatgaggtagacttaaattattacaagctgaattacaataggaggaaacactatttaagagtagtttgtaggtgtgacaactgtagtagcttagatcttgtgatcattaaattaactggaagctcagctaggtgtcctgtgatgaccttgatgggtgagatgtgggtggagtggaagggaaggtccaaaagggaggaatatatgtgcacatatagctgattcgctt

SEQ ID NO: 59439 - DNA, 1167 bp, Bovine  19866880972937
  misc_feature (1)..(1): n is a, c, g, or t
nccctgtaaactctagtaggaaggactaataaaggtattggaataaagttgaagccatttatctaaaccctaatcttcatacagctgaccacagatctgcccaatgggagggcaggctggtggacctcttgtatccttaccttggaaaggtaagagcatgcagacatgaaaggtatgactgtctctagtttctaggagcatcctgccaccatctcatttctttagaaccagggatcctagacagggaaagactgagaattttgtgcccagcagagaggagatagttaatttcaggaagaaattacatagagccacatctacgttatatactaggaaattatttccaacagtatctttttgtccagccatctgcttgaaacaagtttctgtcagcctctggaagtagtaattattccctcctctgaaactgagccccatgctggctttctgctaagggagtagaccatttggtcgtctgtggtctattgtcaagaattattttgacacttattattgttagctgctgattttccaacagataccatctttgaggctaaaaataaatcctcccaccccaagccccctctttatgaagtgtgaaagacaatatgcaccaatcaatcatggatataattttgcaatagggagaacacttattaatgaggaatgtctcagagaaaaggggcatgagtttttatagaggccaagaggccttgccttggacttgtgggactcctgagaaagggtggaggtgggtcttgtatcagaatatgggaaggctgggttgtcctttgtggtggttgactgtttcttggaacacaaagaggggtatttcttaaccatccctactttcagagagcacaggggataaactccatcattgtcaaaagtcatatcttcttcgacttttaggaaccgaaagcaaatttgaaagaaacaaaaatgtctttgtaaggtttaggtaggagataaaatcagaattctggcatctcaattgcctgttctagaaaagacacttaagctactcctcctttaactggagtaaagaataccaaataccaacctacatgaccaaagcttaacataagaaaaggaattgaagctaccatggctttcttagggaccttgaagaacccatggaataattttcaacttgggccaatgatg

SEQ ID NO: 59440 - DNA, 904 bp, Bovine  19866881047898
  misc_feature (1)..(1): n is a, c, g, or t
ntggctgaacctgtgtttattcatgctcagtggcctaatgagaggggatgggacaagaagcagctccgctaataactgtcataaaaataataatatcacttggctccatatggcatctttcattggaaaatcttgaatcatttttttttttttctcttaggtaacaattatttccattctacttccactaaaggaaaaaccaaagcatagagagaggttgtgacttgcccaaggtcactgagctaagcagaaaggcagtttttaaaggctgagaaggatttggggatatatgaaatccaatttcctttccagcccagaatggttctggttcatgactcaggaaggaaaacagcatgatccatgctcagcatctctttaaaaaagtcatgttacagggactcaggcataaggatctatgtcaagtgaatgttttaaggttacatattgtccctgcccatcacatttcaacaccaaccactgaactgtgtcacagacaaagaaggttggaaggtccagcctacagaagtgggatatggcttgggggtgtctatcctttctgacaattcccctagctgtttccccctctcaagtccaggcctctccattactttattcatcagaagtctattcttagggtacccacaagtctgtgatgatccttgtatatgccttttgtcccagggtagtagtagcaggagtgttggtggctcagtcctgtctgactctttgcaaccctatgcactgtagccctccaggctcctcggtccatggaattctccaggcaagaatactggagtgggtagcgattcccttctccaggggatcgtcccgatccagggatcaaacccaggtctccttcattgtagacagattctttaccatctagccacaagagaagtcccag

SEQ ID NO: 59441 - DNA, 1862 bp, Bovine  19866881072942
  misc_feature (1)..(1): n is a, c, g, or t
nagttctgctatctaagcctcccagtctgtgatcctttttttttaccgtagccaatagcagactaatccaatgggaaggagctctaagatgggaaagaagggagtgagtcacggaacagaaaagtgtcagttcaggggtgtccaccgagtgagcgagagagacaagccctggctgaaggtgatgtgtgtacactattaactccttatgaacttgaggctttgctttcttcctcgagttcagaaccaagcctgggaatgttgtatgggataagctactataagaaagagaccgaaacatacggtggcttaagcagggcagaagcttgcttttctcccatctaggggagcggaggagggtgagaggtctggagctgggaaggtcggatgatggtaagacagagcagccatttttgacggcgacctcctctggacccgcagccgtagctcaggtgacagcaggtgaccttccccagcaggtgacaggagggggaagaaagagtggaggcctggagcttctgtattaaaacatcgcagtttgcaaggctcatgcatggcttctgtcctcaacccactggctggaagtcagtcaggtgaccacacctattgccatagcacctaggacaagctatcactcgaagaatccaacttccaaagagttccctgctaactaatgcagagagctgtgtttcttaaaggaagaaagagtctagactccgggagcagtttgtaggctctatcccagccgaacgtcagatagcaagagagctggactcatctcacgtgttttcctcaaggctccaagtcggtcgaggtgacatctgaagtggactgtcacttgtctgctatcatctctcccatgatttcccaaaagggctcttctgatccggtggctggccagcttgcgggtgccaagtcctgtctctctcattcccagctctgaaaaaaatctccacacctcatccgcaggaacccctgcccggtcattgtgttttctgccattagggcctcatcttgtatccttcatgcttacgagctgcctggggcaggcagtttatgtgtctggcacgctctgtgactctccagcggcctgaacctttactgcctgtcagaagcatttattaatattgctgctaataatagtaccgagcaggggcagactggcttcaacacgtcagaaggcagtgtttcccgttactgtgctttcattgttcactgggacatgaccggcagggtagattcagacttgccttttctcctactcaggttacggatcccattactagaagtcttgctctgctggcatccgtagaaaacacgtagcacatacaggccgtagggtattctcatgctccgtttatgcaggctgaaacggaaaatttggtgtctgtgaaagataaaagttccagctccgtagcctgaggttgtcttgaagtgaggtgggcatgaaagctgagtacgggctgaatcttgcctgtcttcttggttgcaaaatggaaaaggacaggcaaggaaagccaagttacctgactttagatctgcacgcctattgctcattctttaaaacgtttctctgtccaggactgtataaattgatataaattgataaactcattgaatccaggtttatgtcaaaaactatgcagggagctttctatgaatttccctttttgaatctcccagcagctcactgctgtagacactgtcagttgctagctcacccttcaggccaacagaatccattgcatatcacagaggtagaaaaggtgggttctcgggactttcttggcagtccagtggctacgtatctgctttgcaatgcaggggacgtgggttcgataccaggtcggggaactaagatccta

SEQ ID NO: 59442 - DNA, 1040 bp, Bovine  19866881097971
  misc_feature (1)..(1): n is a, c, g, or t
nccagtgtgaataagagaaatattagcctttaaagattttctttacagttcccttgaaagctggctggatgaagtcagccagagaattatataacagcaagcctcatttaaagcaacagtgcctttctataggactctggggtttcattgacgggtttttgctataaattataaagaaaaagatacaaattttatgaaaaacagatagagggaccctcccattcttactttctgttctttcaccgaagggataccatttctagggtgttcatttaaaaagaaagatacaaaacctctttcaaggaagataagaaaaaaatcacgttcattaacctcacgcagtcatagcatgcttaatcttgtttgaattaagaagaaaaaaaagaatgaagagaaaatcttcctaaagcattcgttttaatttaagagattttgtgaaattttacaaatatccagctatttttttcctctttcaaatggaaccagaccctttgaggtagggaaggatacaagcatcaaatagtctactgctgcagtgttttctgtggtgcttgaatacctctcaaagtacccaccatgcattaattcaactgttatttccacatacccttggtttgcccttctctatctttccattttagagataagaaaactgaggctcaagtttctgtgacatgcctggcagcacacagctcaagtggagaccacattccgcgagtctggcatcaccctcagaaggcccccatctcctttcctctgtaccagtagtactcaaccaagagcagctttgcctttcaggggacatgtgacaacttctggaggtatgttttgtcacaactggtggagggcgggcatggtgtaggtgctactggccctcagtggttgcaggttaaggatgctgctcaacctctggcggggcacaaacagcccccacaaagaagtacctggtgccaaatgcaatcatgcagagaagccatggtccgcatcagaaggaaactccaacttctgggatctgccagagctcctctgcccagcggcag

SEQ ID NO: 59443 - DNA, 1126 bp, Bovine  19866881160346
  misc_feature (1)..(1): n is a, c, g, or t
nacacacccgttgctgccaacattgacatgcattctcttttaatcctttctcttttcctcccttggctttgcaattatggtagattttttttttttgtttgtgcatttcttccttgactgttgaggcattctctcctggctatactcatttcctttaaagaactctattcaatataacaaacctaacacagctccttgtacagagtagttactcggtgaagttttgttctgtgactgaataaacaccaagatctgcagggcttttgtgatgaacatgaagatgaagaggtcatttttatgcctgtaagcgggccacttcagaatctaaactcagtgtttgtcaggaaccctaataaaggggaggtaaggacggtgtggaaggaactttggagaatgaatttgacactgaacctcagattcagcctctgttctggtttttttatttaggcggatttttcagggagagaagtatagttgttattattgtgaacaactgaatcaggtggttaagaaaactgttctgaaacttggtgataagatgataagttagagatacagcttttcaaagtcaaagtagagcattgtctagtaagacctaagagtcatttgattctctggaaactggaactttgttttacttactatttgctgttaattagtactcagcctctgttaaagttagaacttaaaaaaaattgttattgatgcacataatttcttgcaagtagagaagataaccccaaaggttatattttattgccctatagagtattaactagttttgtatgtaatttagcagtcctattccagtattctttttaaaaaaatttttattatatcaatttctttgccaccttgctgttttcctcattatgagttacttaagtttttgacatgtgcctagtatatattggtatgtgagttatatttctaaccttttaaaacttatattttgactttcatattcagtaaagtccttagacatgcatgaatgtgcaagtcactatccaaattcccctcattttattctaccacatggggcttccgtggtggctcagtggtaaagaatctgcctgccgatgcaggggacgcgggttcaatccctggggtcaggaagattccctgg

SEQ ID NO: 59444 - DNA, 1547 bp, Bovine  19866881207455
  misc_feature (1)..(1): n is a, c, g, or t
ncagagtgtcttggttcagagtgaggagctccgaccagtaatcctgggaagcatagttttagaatctttatcaaacatttcgaaagtgattgaaatggacatccttaaagatgtagtttgttgccatccgaggaacatttgcataggttttaaaattattcgtatttgaaaaactagcattatacaggcaaaatatttttgaaatagagatagcctatgaaaagtgaaagtgaaagtcgctcagtcttgtctgactctatggattgccgtgctgtcctccaggggatcttcctgacccagggattgaacccagatctcctgcattggtaggcgagttctttaccactagcgccatctgttttgtaagttcatttgtatcatagcttctcatgcttctttctagttcccattctgccttttggtcaaggttaaaacaaactccaaggtgcagcctggtcctgggaagagtggtgtgtcttgctctttctttgatattccccccttcacagaagatggctattttaggcataaatggtatcaactatcttttgccgggtgggagagtcaaaccttctaaaatgtaagctccgtgagagcagtgaacttactctgtccatccctctctttcccagtgcccagaacaggtcctggaacattgtagagaaagactggtggctaaaggaatgaaatgttcctgtcggggctccctggaggtagttggctcagcgtagaggtctgtgcatcaggactcatggttgcaagtgagagaatgggctcagtacatctctacgattctctccctctcacttgtacccacctagagactaagctcttgtcttttctgtctaggcccaggcagaaagcccattgcctgtgctctccaaaatattaaatctcacattcacaaagaatctggtttcttcaggttgatctgtatgttccaaggtccagtccatattcaaaaggtctcagcaagtatatttatgatttcttcatatcctttcccttccagagactgggtgaaatgttaagctgttgttttctatttttcacttcactcaagctataattgtagccccttcttatataagaagccttctctgatcaacttcatttcccttagatccctgtgtaccttactttgtgtttcctttccttattgctacttagacccctgtgtaccttactttgtgtttcctttccttattgctacttagacccctgtgtaccttactttgtgtttccttagcatattgctactaagttgtgttgttctgtctcgcatttgatatgctatgtatacatttgttctgtttgccctgttttcagcttttaaaactaattcatttactgtatttcacaatatacacacagtagtctcaatgtaacagtactaacactaccaccaacaaagtgattactgagaacaatttagtatttaaaaattttcaattctgtttccttcctctatccctcccctctttccttccttagaccactactctcttagcaagtcaaatttcagttatacaatacagtattataaa

SEQ ID NO: 59445 - DNA, 1646 bp, Bovine  19866881378738
  misc_feature (1)..(1): n is a, c, g, or t
ntaaaagatgcttgctccttggaaggaaagttatgaccaacctagatagcatattaaaaagcagagacattactttaccaacaaaggtccatctagtcaaggctatggtttttccagtcgtcatgtttggatgtgagagttggaccataaagaaagctgagtgccatagaattgatgcttttgaactatggtgttggagaagactgttgagagtcccttggaatacaaggagatccaagcagtccatcctaaaggaaatcagtcctgaatattcattggaaggactgatgctaaagctgaaactccaatactttggccagctggtgggaagaactgactcatttgaaaagaccatgaggctggcaaagattgagggcaggagaagaaagggatgacagaggatgagatggctggatggcatcaccgactcaatggacatgagtttgagtaaactccaggagttggcaatggacacagaggcctggcgtgctgcagtccatggggtcgcagagagtcagacacgaccgagcgactgaactggactgttgataccatcaccacaatcaaggtttttaataactccaaaagcttccttaggttcctttgcttttgttgtttttgttgtaagaacactttactagatcttcactctcagcaaatttttcagtgcacaattccatagtgttacctataggcagtgtgttgtacagccagatctctagaacttactcatttttataactgtaactttatatctgttgcacttctccccaattccccctgccctcttcccctggcaacttccacttttttttttctgcttatataagtttgacaatgtaagtagaatcatggaggtatttgtcctactatgattgacttattcacttggcataacgtcttctaggtctatccatgttgttgcaaataataagatttccttctttttttaaaactgaatagtattccatcatatgtatacatcacattttatttatccattcatctcaatagacggactattttctatgtcttttttttctcctctattcaagctctgagtgttttcagagttgtaacctcacctcatgttctaatttctacctgggcctggcaagttgaatatgggttcttgaatctgttgtgaatcataaccaggattaacccagctattcaactttgcaggaagggccgagccttcagttcctgccagggaactgggatttgattctgtttcatggtttatcaaatctagatttgtttgttatcatgaaatcactttaaagcctttagggtgatctattttaaatgctaatatatttttctccatctgcttttatatgcatagagagattgacagaggaagggcattcgttgggtcagtgacagggactaagggaggagagaaagaaaaagttgctcttcaattcccacctttcctttttgaatttttttagcgtaagcatgtatcatttttatgataaaaattaaaatatgcagtgaaacactgtgttctagctggtataataagcttagcatttgatcctgagattctctcttacagaggcagctgtaggacagatatgttactaaaggataacttcagtttctaggagaaatcattacacagaggtgcgacttcaagt

SEQ ID NO: 59446 - DNA, 718 bp, Bovine  19866881605361
  misc_feature (1)..(1): n is a, c, g, or t
ntttgtgaggggaagggttgggaagatgagtataaaggatttccatcccacacatctctagacaaactaagcaaagactttgtctggtgtaaatgaagaaaaaacaacaaaggacatttgtggcatggtgactaaagggcaagcagtcacatgtttagttaaatgttctcagagatggagctaacactgttagaactcccgagagcttggcacttcttcagcaaactctcatttagaatgaagagcaggcttcctggagttccggagcaatgctctctggggccatacgggagcctgagacaatggagaaatacctgctcctatgtacattcatcaaaatatccttcaaaatattttgaaccaagtgagaaaaattaataaaagctctatgatcaaaagacgtgacaaccatgactcgttgatatatggcagaaaccaacacaatattgtaaagcaattatcctccaattcaacataaaattttttaaagacatgacaacacataaagccttgcactgcccaatcttttgcatacattgtcaagccttataatataaacctgcctagtgagcaatttgaggaccttggaaccaggaaactcagggctcactggacatggctattcccatcacacaacaatgcagagaagtaacacaatcaacaatagcctgtcttcacttaaaattttgttatttttttcactagaatttatttcata

SEQ ID NO: 59447 - DNA, 752 bp, Bovine  19866881708838
  misc_feature (1)..(1): n is a, c, g, or t
nacggggaaggcctgcactacggtgtgtcttacccctcccaaatgacttatcatgtaggtggttatgtccctacggcttcccattttaatgggcttgagaaattattctttgggatgtacaaatactatgtagcatgcccatgagaaattaggtggagttatgaagtgtcaaagtagaagggatatgagaggttgtagggcccatctgtctctttttgcaggtgagaaaccaggcccagaggggtaaagatctgtcaagctcttatgattaattaataactgaagaggataccagtggctgttgccttcctcagtccttctggggaatcagcccctcccactctgtcctagcatcttgggtggtgctaactttactcccaaatccacagtgagcaaatgagccaagcctcactaaccagagcatcagaacatgtgttcccaggaggccaatcaaaactaaagagacttgatttcaggacattggaatagagaagttcatggtctccactggggttgctgggagggttggactgtagccagagagccaaagacagcagtgccaagatgtggagagagtgagtctgtctttaatgacatcttggagaccctgatatagctgtatctgatccctgaccctggtaggaactcattcatctctggattttttttgtttgtttggtttttgcttaagttgaatgctgtcactttcaactaataagttatcctaactgatgtcatgttagaactagaac

SEQ ID NO: 59448 - DNA, 802 bp, Bovine  19866881857078
  misc_feature (1)..(1): n is a, c, g, or t
ncctttaaaacttgcaaggggttttcccacatcgagctggatggattctatttgttaagctctttcctctttgaatgaaaaggtgggctgattgatttatttttcaaccagtattttactgaatgccttctgtgctccaggtactggggcaaagaaggcaggcttggttcctgatttcagtggaaccatgctctaggtggggagacatactgaacaaataattgcaggagacattactttgctatagatgagatatatgctaccaaggagaagcagaggctgctgggaaagggtgccagctgaagtcttcacctgaatctgaggcatagatttcctctttattcaccctaatgctgtcttccctgctcatagtgctgccaaaggacagaaattctgtccccacccctcaaacagatgagtcagtgccttcaaggctgcacgtccccaggtgaagtaagagagtcattcttgctggactctcctctttactccttcacactcctgggctcggtgccatgaggcaaggcatcagatattttgcatgatgaaatttacattacagtttcctcctgaggcctgatgactaacaaggtctgaaaacaacaattctaggtactacctcctcctccttctcctcagtgtttattaagcacttactaggaatagggctggatgttcagccaaggatgcaaaaaagcactggagacaaaaggaatatgctaataaaacctgagtagtgatacaggctaatgactcccaggatttgggattttattaacagctaaaaatgagagctttatta

SEQ ID NO: 59449 - DNA, 2329 bp, Bovine  19866880667026
  misc_feature (1)..(1): n is a, c, g, or t
ncttctgcaaagtaagcctgctgtttggaagtatctacatgtacaagcagggcggtgttacatattcgatttgcaagccgatctttagcttctcaggtatagagtgtccccagggatatttaggggacattgctgggaggaacattcgtactggcattgtttctttctggtgggcacaagcttggcacaattagccgtatccagagttggcactcatttgggagatgtttgctgattgcttaatcagatccagtaattctaagcttttgagcttcccaggtggctcagtggtaatgaatcctcctgcaaatgccaggagacgcaggggacacaggttcagtctctgggtcaggaagattccctggaggaggaaatggcaacccactccagtattcttgcctgggaaatcccacggacagaggagcctggcgggctacagtccgtggagtcacaaaggagtcagacatgactgagcacacgagagcatataattctgagctttagagaaaaccaagacttgggtggttgggaggtgatttgaacccatcagtatggtgtgaggatgtaacttctgacagagaggctccaaccacccctagaatacttccaaggcttttaaccatttctgtctagaaaaagaaaccattttcttcattaagaatgcattcccttaacagtgaggttttgtggggaaattactcaaatgacttaatgcaggaggcttgccctggggactcagctttggcatgacccagacactggagggtcatgttgctttctgaggatatagacagtgatttctttgtactgactgtggactcaagacactgtgtcactgtggatgacctataacagaccccacccctccccccaatatgcagcttcacatgcaagaaagaaatgagcagaaaccataagttttcctctccctacagtgcttttgaggaaaaagggtgcgattcagcattcccaaagcttgctttctgggcagatccacatgggcagacctccctgcaagacagactctgccctgcagtgagtgacgtgtcctcccccgccgtcgttgtgcctggtgtgtgggaggcactcagatacttcttgaatgaacagacctctttgaactgtgcccttgtcttcattttcagtttcttttgacaagaatgcgtttaccatgtaggcgtctccaggagtttcttctgagtcctgcatcaccttctgtgtgaactcactgcattatgttgtttctttaataaggggtggtgtttgagtattgattctaacacctgctttttaccattatactccagataacaccacctattcagagagtaaagggattaactagtaattctatagaaatgacccttggtttgccaaatgcttgtgggaatcatacaaagttcttagatttaatcccccttactttgttcttaggtccttgggagctttttgtcttgcttagtggcctgggattgaatactaatagattgttcattgtctttaaccggacccatttcatagctgaaaaatcaggggcaaccttgtttcctgtaagtcaacaacaaaagtaataccgttattgttcactgtgtgatgggtactgccctgagttcttttgctgattattctgtttaacagtctcaacaactccataactattattttatagatgatgaaatggaggcacagccaggatgtggctgagtagcccaggcctccttgcagggctcacatatgctacaccgcgtattggcatccaggcaggggctctcaaaatgcctgcatattggaatcgcccttaaggctgtcagaaccctccgtgtccaggtattctcccacttcctgccctcgtgtttttatttacttggtctggggtcttggtgaaagtgctgcgcactcaggactgagaacctttgaacctgagcagtggttcttaaaattttgtccccagagcagtaacatcagcatcatctggtcacttcttagtagaacttcttatgtcccacccacacctactgagttgaaattctaggggtaacgtctagccatcaatgttttgacgagctgtctgtatagttcttttccttaagttataaaaaccataaacttcaccagcgtaatctttgttgaatgtacagttcatttgttgttcagtcgctcctactgtgactctcaaatacaccctctgcatgccgccctctgcccagttctgcctctgcccctgttattctgagtcactgtcatcaagttgcttaacttccttgaggtgggttctgttctctccataaaggaggtaacctaacttgcagagtttgggaaaagttaaatg

SEQ ID NO: 59450 - DNA, 1082 bp, Bovine  19866881208547
  misc_feature (1)..(1): n is a, c, g, or t
ngtctattaattcgaactttgtgaattgatactactaacatttaattagaatactaaattatctttaacataaaataaaagctggcttaagccaacaataaactgtacagtgtacagagtctgtcttttttctctcccgctcctctcccacatatatatacctgtggatactggaattcagtgtaagcctcaggaacctaagcagcataatcgaggtgactagaatgcagggtctggctgcacagtatttttaacaacacaaaagaagccagaaatggtgaaattttaccactgcaactgtttgtcattattcttattttggctcacatgtaaaaccaaagcactgtataggttaactaacagaattctagccactgaaaatgtatagtacttaccctatgtaggagctcatttaatgatccatttggcatgtattcggtaactattcctaaaaattcaggctcattgcaaattcccaaaattggaagaatgtaactaaatcgagctttgtgtaaaatttcagcttctcttaagacatcactttctttcactaaagaaaaaaaaaagcataattactttcaaaataatgaaaaatacacaattatcatgcccataataaattaattctggatttttccattcattcattagcttttgatctcatgtaaattaggcaacttttcttagtttcttcatatttaaaggagggataatctctaccttacatattccataggtctgtttagagaccaaaataacatataaaccactgacagaaagaagtgctacacatagatcaaaactgtacttttcctaggaaaggcaaagaacacaatgtttgtttataaagtctatttgtattaaaacgataggtgcttgaaccaattacataagtttctgttgtattaaaatgataaaattttattagactgttacattaaattttacggttgcatatcatgtaaaaattttctaaatatcctgaatattaaaacacttaaatgttgtagattttaatgactagatgataatagtcgcataagggtcaataatactcagaaattataggctggaactcagga

SEQ ID NO: 59451 - DNA, 1210 bp, Bovine  19866881261132
  misc_feature (1)..(1): n is a, c, g, or t
nctagaatgagaagatatgtcgagtataaatgtatgtgtctgggtattatatagataaaaataaactactcaactgaagagagaccccataccatgtagtgcattgccagtaaatactaaaaggaaatattagtactgtaaagtcattattttctctataaggaaaataagatccaaggatgttaaagaatgtcagatagatactatgtaataaaataagtatattttgccctatacttagttatactagatatttagtttatactattctcatggaatatttcattttcaaagtggaaataaatttggccactaattttggttttatttattttcatataaagaaaatcgaatatcctgatgttccttggccattgagatttcgtattctgcatgaaattgctctaggtgtaaattacctgcacaatatgaatcctcctctacttcatcatgacctgaagactcaaaacatcttattggataatgaatttcatgttaaggtaattactgtttttcaaaaaagcttatctgcatccttgtgtttaatagttttaaagacttcttagttaatttttctaccttgccaatttaatgtctctgccttttccatggcccctaattcagtgccacttcttcctgctgcagtgggttagttattcctagactacagatattcataaaagtatggttcagatacaaagtcattatattcttaatttaaattgttaagtatacctttatttactttttattttgaaattattagagattcttaggtggttgcagagtaaagaagtctcatgtacccttcacccagtttctaccagtggttacgtcacatataactatagtaccatttcaaggccaggaatttgacattggtacagtacacatatgtagtttgtagttctgtttcactttatcttgtgtaaatttctgtggctatgatagcagtcaagatacagcactattctatcacaacaaagataccacttatactatccctgcatagtcatgttcaccttccctccatcgtccctaaccgctgtcaaccagtaatctgtttttcttttctataattttgttgttttgacaatggactcatacaatgtatgatattttgagattggctttgttcatttagcataaggcctttgagatccatttgagtctttgcttgtgtcaagaattgttttctttttcgttggtg

SEQ ID NO: 59452 - DNA, 944 bp, Bovine  19866881607620
  misc_feature (1)..(1): n is a, c, g, or t
ntatatgtgtctcttgtgtttgttatataaatattaaaccgtgcccagttgtttcaggacctcgtaacatttttcattctcagaatatcaactctctcaatatttgaagtcagtgagaactctagttaatggggcaaatccattccctggaggttgcatacagtcttgtcctaaaactaaatttaaatactctgttatgttcccaagtattaagcaagtttttattaaaacaaatattcttatccactgaagcagacaaaaatattgagtctgagtgagaaaaaaagccctaatcaatcaaaacaggaaaacttttctgacaaaaatgatactttaagtctcttttttaaaagcatattttgatgtaaaaagatacaaatataaatgtaagtatagtatttacttgcaaaaatcacagtgagattctgtggtatttaagtgtattgctgttaagttgttagactaggaaacaagagtccagaatggcgggggctaaaagacaaggaatggaaaagcccgcaaaaatagaacaagggaagctccaaggaccggagtgaggaccttaggtagagcaaacaacactcctggctagcccaatttacatagggcaggcccagggggagaaagaacatataaaaagaggtgccaaagggctgggggtctctctccctccacccccactccccgtgtgctggtgtgctcttctctttgcatctttgggtcgacatgccctcacgcctcgaggatggattttcctgctattatctaaataaaatagagctgttacacggagctgtaacactgatttgtctaagagctataacatggtccgtttgagacctgagagctataacacggtctgtccaagacacaagagctgtgacacgcttaggattttaatgtccgtcactccaaatctttgttggacgagacacaaccgagcg

SEQ ID NO: 59453 - DNA, 562 bp, Bovine  19866880604728
  misc_feature (1)..(1): n is a, c, g, or t
nctaatggtaggcatagcagagagcaccataaatgattaaaggatttggaaagctcaggttctagaattattttggcatattaaagagaaaactgaaggggaaattcagtcactgtttatgaagtttgtgctataatgtggctttaattttctgaagattctaagttaattaaggtgtattgtacctagagaaaactgctttgaaccagagttaatttaaggatttttcttgagctctgagttcaaagaataactgagtaaggtacaaaatctaaggtccacttcccttctgtaaaataggtgtgctaataatagtacagttggttctttgtatttgaggatgccggttctgcatatgagtattcaaccaaccacagacctaaagtagtaggaaaaaaatccagaaagtcccaagaagcaaaacttgaatttgctgcatacccgcagctatatatatataacatatgcattgtgtgttaggtattataagtaacctagagatagtttaaagtgaaagagaggatgtgcgtaggttgtatgcaaatactaaaccattttatat

SEQ ID NO: 59454 - DNA, 1743 bp, Bovine  19866880768409
  misc_feature (1)..(1): n is a, c, g, or t
ngtaagcccaatgtattagttagggtacaatttaggcctctgtaacaaagagaccccaaaatacactgcttgaaaagcaagatagacgtttattttacataaaaatccaggcaggtggtccagagctggtttggcagctcagcattgttggggaactttgctctgctttgctcagcattctgtgtgcctctccttgccaggttggctcttccagctgcagccatggcactttctttccagacagagggaggggagggaaagagaggaggggaatttgccctttccctttaagtgctccggagcagagcacacaaatttcagcttacatcccactggtcacgtggccatcctagctgccagagaccaggatatggaatattttaccgggctgacttgtacccagctaaaacccctatttagaaagggagaacagttattaggggatagccctgccctatcctcaatagtcacagtatatttaaggatttttttttcctttcttagaaaaagatgaaaataatgttgtgacttaatttttttcctaaattaagtaattttcatattattgaaacaaaggaaacatggtattcaatgaaacaagagaaactctggcaaaatacccttgcaaaatctttgcctaaaaatgtaccagcttgaacctgccccaaataaggaatggagttataaccggaccttaccacagataatcagttttcttccttgagaagctaaaaaaaggatgaacacaccctgctttgaaacactcttcttgtctctcagctcttggtgttcaacctaaaggtaatggaaaaagtgaaggaatcttgtaagcagagaactgaattcagcatggtaatgtctgaatgctgtgttgttttggatagggaataaagaggcaatagacaaccctttgtgactagtctctaagtctctgccttggtgttaaagaaccagatttaggcctaatgcaatgaaaggtaccacctctgctgtggggaaggatgctatgaaccttggtagcattcaatggagtggaggtaaagctgtcactgtagagggggttaggcttcttagagggcttccctggtgatttagacagtaaagaatccacctgcaatgcgggagacttgggttcgatccctgggttgggacgatctcctgaaggagggcatggcaacccactccagtattcttgcctggaaaatcccatggacagaggagcctacagcccatggggtctcagagagtccagcacgactgagcgacttccctaaggaatgttgtggctgatttcatcttctatacagatcactaaaactttctccatagtagcaagcctgctggctttcttattattcttatcttatcatagatattttatgatggggattttactttaaaaaaaaaaatttcctggactattacattatctactagattaaaaaatcatgtcatagttgagtccaattactgatgaaaacaattgagtttttacaagggatttatacttaagggaactggttggaactcagaggtaaatgtacaacaatccaacagtcagtttaattgtacaatcatgaaaagattacaaccagggattggactcacaccaaggagtatatgaggattctaaaagaaatttaaagtgtagaatctataaatattatgcttaaggaaaaagaaaatatatttttgtaaaaatccaaagccttatttcagcagaggatgaaatcattcaggaag

SEQ ID NO: 59455 - DNA, 829 bp, Bovine  19866880864458
  misc_feature (1)..(1): n is a, c, g, or t
nattgtatttgctaactttttgtccttactgttcattggcacttttatttgaagatgaaaagaggaagggaaagaagacaaatgcaatctttcagcttattcttatcactgataaaagatctgaagagtaaagtttaagctattagctaaaacaatattgagatatcactatatttatcattgcatataaccaaaggtaaaggataaaaagtaccttattgataaaagcaactgaaaatataattaattctacccaatgacagtaagattataatatataaatataatgaatatataatgttaatacacacacacacacaccgtgcaacatggtttggaagaaagaactctcaataaaaagcaggaaacctagagtcggctctgccagtagctgggtgaccttacgcatgagtcagttacctccactgcaccacaaggcggtaagataaacgtttctccttcaaactgacaccctgtacgtacacgcatatatacatgcttttatttacaggcaaggcgggcactcactagctcataccagtatggcatgacgggctgttcataggccagcacctgttccgattggtctgtcaatgctgtaccagttgttaaacagtgtgaattatcatcctatttacaaccacccccaaattacaaaatgtctaacatgtatatccctgtgtttgcagtctgccttccacacatagtgaggatattccaaagttaaataggccctccttaatctccagttaaaatttaagagcacaattcctttccaactccctttctcctctttcaaaaagagtttctgtacattttctgttctgta

SEQ ID NO: 59456 - DNA, 1586 bp, Bovine  19866881073902
  misc_feature (1)..(1): n is a, c, g, or t
naaataaactttcttttaaactttgaaatctcagtcatcagcaaacaaaggaaaaaaaagacaagaggagaatgttgccagtgccacagccttagaagacagaccccgattacttctttaccactgtgtggaagcagagaacagtgtctgttcctcctttcttcacatggctgcccagctagattaaattccgcagcttcctttatagccaaatgtggcaatgggccagaaatgtgccttcaccttgcctagaatgtggatgtgataccaggaagctcacagtcaggtcacaatgccagccctggactgctcaagacttcttcacatgaaaaaataaactcagtttttgaggtctctgtgagaacagcccaaactataccttaactgaccatatgtcatattttactatgctgtcctaataggttctaagttaaatatttctttaaaagaacaccttatttggctgaaagctttaaatcatttaactaagcaatccataaacagcagtaccaggattacagtattgattttctcagataccatctttcttatatgatagtcaaaaaactgctcgctctgcttacatggaagcagcatcagatcagatcagatcagatcagtcgctcagtcgtgtccgactctttgcgacctcatgaatcgcagcacgccaggcctcccggagttcacagagactcacgtccatagagttagtgatgccatccagccatctcatcctgttgtccccttctcctcctgcccccaatccctcccagcatcagagtcttttccaatgaggcaactcttcacatgaggtggccaaagtactggagtttcagctttagcatcattccttccaaagaaatcccagggctgatctcctgaagaatggactggttggatctccttgcagtccaagggactctgaagagtcttctccgacaccacagttcaaaagcattaattcttcggtgctcagccttcttcacagtccaactctcacatccatacatgaccacgggaaaaaccatagccttcactagacgaacctttgttggcaaagtagcagcatattataatacaaacataaaagtatctaaaaataacatttcactccttttttttgttaagtatgattgtgaaagtgagatgaaaaatctcatggaatcaccaaaatacctgaaaattaggcactagtagattttacactttaaaggtatagggtggcaatactactaaaatacaaagatttcttaaatgtatataaatttgtctcttcctgatttctggcttactttcatgattattacacagggatacagacatggatggcataagacaggggtgaaaagatcaggcttggctgaatgtagtaaatgcttctccttcccccaaagctaagttgttggcatgctttgatagtatctaaattgtctcccctttaaaaatagttttcatctttggccaatatcactggttttcctctctgctacatgtaaggatctgcttctttttctcccttccctccccctaccaccctagaatttgcctttttaaaaatcccattgaggctactaaccactgcagct

SEQ ID NO: 59457 - DNA, 1973 bp, Bovine  19866880351887
  misc_feature (1)..(1): n is a, c, g, or t
nccacagagcatggagctgaacttcctgcaccatatacagcaggttcccactagcgatctccttctgttttacacctggtggtatatatatgtcagtcccaatctcccaattcatcccaacctctccctcccctgtgtggccacacgtcaagaagtctacttcatacacaatcaacttaagatttgtataccttggtacatttttcccaagctctggaactccaggttttctgaataaccatacaaaaacctcttaccagtattctgagccacattgaatcctctgttttgaaacaagaatatgaattttactgaaatgattatttatagcaacatcaatattattcaacacttaaaatcattaccttgttattttctgattgggaggttaatgcccgacttcttttaaatggtggtgtactccagtactcttgcctggaaaatcccatgggtggaggagcctggtgggctgcagtccatggggtcgcgaagagtcagacatgactgagcgacttcactttcacttttcactttcatgcattggagagggaaatggcaacccactccagtgttcttgcctggagaatcccggggacgggggagcctggtgggctgccgtctatgggttcacacagagtcggacacgactgaagtgacttagtgttagcagtagcaggactaacgtatgaacgaaatgtgtcctacaaataacacatgaaaacaaagttagaaatgagtataatcctctgagtgtgttgtatgcaacagtttataccttcagttctgatcacagacatgcgcttccagctaagggccattaatccatttactgctacttgttggagtgaagagaaattatcaaagacttttccatatgtttcagtgaatacctctttaattgtggattgttcagcttccttatttttctatgtatatggcctctttgaagattcctaaagccaattctctttttactcaaattaaaaaacagcaacaacaacaagcaagctactgtggccacagttctgattcctttggtcgtgacaacgcctgcctcgttcttaatatttcatcctaacctacttccacactgagtgtacttctgcagcagtaaaataagatgtaaaaacttagaatcagttaagcaatgcagtagcttaagacccacaggactctttgtccttagtgttataatttaaagctttgccaaatagatagcctatccattctatatttcacgtaagaaaagagaccatccaaaaagaagtttccagggacttccctggtggtccactggttacgagtttgccctggaatgcaggggacgcaagtttgatccctgtttgaggaactaagatcccacttgtcgccacggagcaactaaggctgcaccccgcaacgactgagcctgagatgtaatagccaacctgacccagccaaataaataaataaatattttctttaacaatgtctccaaaacctaaattaaacatgtatgtcaaagtattaccatacgtaaacagcatgtatttattttagccttcatcaagaaaaataaaatatgccttgtgattatactatgcacattgaatcaaaatgtcagaatcttctaaataaattgttattatggaataaggcagaacttcagccctgaatttatataattcactccgttgtagattttttttcattgaagaatacatttcactgccataaattgcactgagtatgaacagcagagtcatttgaggttcattgaaaatataggagaacatcatgtttcctgtccttttgttaaacttggcatattgatttttttgcacagcttgcagcacagaaatgtgatatacagctacagcaagacaagctaaccacatgtgaatttgttaagtactgctggattagcagaaattgtctgactgtgcaaatagcaagatttgacttcgccaggaactctttatgacttaatcaat

SEQ ID NO: 59458 - DNA, 1384 bp, Bovine  19866880571464
  misc_feature (1)..(1): n is a, c, g, or t
nttacggcatacagcttctggaggatcacctgtgctcctgacactgggatgtcttttcaatttaagtctagaatttgccctcacctgtctgatactactttaattttattctcagttctgtcccccaaggcatttcctctctgaatgtccttttcttaaacaaaaaaaaaatcacataatccaactgccttctacatgagaagaatccttacaggatcctgaacttatttacacaacaccgacaatacatatagaataatatctcccattaagataaaaaatgcattgattttaaatgaaatatatattcttaaatatgtcatgtaaacacagtaaattcctattattcctagtttagaaaatgatgtgggcatatattagataggactggttacttcaatgccagataatattttagagtatcagtccttaagttccactaaggactgagttatgattaaaaactgaatagaaatagaaacggctaagtaattattaggaagggttatgaaaattatttataattataatccttactgcatctgtactaaattttatcctaaaaagacatttcaaaattctaattggactgtccatataggcttttctgcaactgtccagaagacttacagggggaaatctttcattattgctcaagaaattaaattttcctctcaggaattaaatttacttttgggtttgtaaacagttgcaatactggggtgtgagatattgcaatggatgtaaagtagattttacatgtggtacaaaatttgccaagtacatattgttcctacttgtttgctttgtaccctggttccaagcagcattttaaagttaattatagggtcataaaggtctcttccccgcgccccccccccaatattttaaaatcattgttacaattattacttggatcttgttaaagtggcaatggatgggaattaccacccaaagaatctcaactgtatcctttgggcatcactgaatgtgaatggcatctattattttatttctcttccacagagaaaatttaaaaagtcacactgatgggtgggaaagcttgtgaatccactgagaaggttaactacggtggaggcttaatctgtacagtgagacatgaagaagttggttactgacagtaagatgtcttcagttagtcagactgcagtgtttgggggcacgacaatgtctatggactggtaggatcatgagttgttaaaactttcctacaaaaaataaaggaagacctgtatcatcaagacaaaagtacttcaggaatctctaataaagaatgctataacccactgactagaaaaaaatatatttacaaaatataaaaaatggggctaaaattgtatctctacagtattaatccctacag

SEQ ID NO: 59459 - DNA, 1375 bp, Bovine  19866880769105
  misc_feature (1)..(1): n is a, c, g, or t
ncatggataaactaaaaaggagatgctgtattgagttcagctaccagggtaaataaattagtatacagaaaaacaaatctgttcactacctttaaatgtctttaattgtcataattatagcatgcctttctcaacacagatgcatatgatatattcttaggaaaattgccacaactgttgatacttatactcaagtgttatatttatatgctggataccatatacatgaaatatatttatacacacctaactaatgtccttgaatgcatgagtgctcgactgctcagtcatctgcaactgtttgcgaccctacacactgtagcccaccaggctcctctgaccatgggatttttccaggcaagaatactggagggggttgtcatttcctcctccagcgcatcttccccacccagggattgaacccacgcctcccacgtctcctgcattggcaagcagatgcttcttactgcggcaccgtctgggaatcccaactaatgtccttagtagacatcaattatacaactgtgcaaacaaaagcatatgacttcctcgtaattctgcatgcgttacaggaacactgagagtgcatcactgggtagaaagacgggattaagcaagactgctctcgacaacttcaccttcgagtctcacccacggctgtcttcttactgtgtcagccaacctctgtattcctcagctgagctttccctagtccctctcctggttggaaccatactatggacaaccgtagtcaatcaagtgatagaatggttagattatctggaccagtttacgcaggctcaaaatatgaactttttgatacagttattatttagggctgaggaaggcacctgagggcttccctggtaaagaatctgccagcaatggcagaagacctgggttccatccctgggttgggaagatgccctggaagagggcatggcaacccactccagtgttcttgcctggagaatcccatggacagaggagtctggtgagctacatccatggggtcacaaagagttggacatgactgccgctacttagcacgcaggcatgcaaggtagctgagctagtggtgcctgtccctgaaaagaaatttagaagtttcctcttgttttacattttccagttaggctaaactcagtgaattacttcagccaaggaggagataagaaaaaaaaaaaaataggagaaaatgagtaaagtgattttaataggtcaggggaagaaagaagtaggttgaatatatacacacccgtccccctcctgctccatgccaaggaggccgtgggaagggctggtcagggaaacactggtctaagggcatttgcgatgacagagcagggctgcctcctgccagaccacagcagag

SEQ ID NO: 59460 - DNA, 1198 bp, Bovine  19866880926990
  misc_feature (1)..(1): n is a, c, g, or t
ncacgtttttactcaaagcctgtgcaaagaaatttccctacattgtcccacagatcattttttcctttcccccagttgtcctcttcactccattcttcctattctatgtcatctttccccctcctctccacctcctccctcttgtgcacacacctccagagttcaagtgtggataaacccgctggtcatgacaacacaagttcaatcagcaaataaataaaactcttacttttttttttggctgccggctgcattccccctctggccgttgcctcctttaattataggagctatatttcttccctgggagatattcgaggggattttttagcaggaaactcgcttctgctgagttactttagagccaggaccagtgagtgagtggccggtactcagaggctttgagtgaagtgcagattgagacatatcgagttccctctaaaaggatcatttcatgtgggaggttggacacaaagtttgcactcgtgactggcattccagtgagagacatgcatattttaaaacaacaaagcaagctggaaagaaggcttaggggaggagaaaaaaacttggaaagaagttactaagtgacaaacatctgtcaacatgggataatttgtacactatctgcctcctttgatggtggttcaaggcagaggatctaggaaagcaaagtggatacactactttatccctgtgaaatactggtgaaaacacacttttctccccaagtaggtgtaaggtgattaaagttgcttgaatgaatattatttttaaatgtttcttaaaatagtagagacctctaaaattgcttatttctgatagtacaaaaactagatcttatttaatcttgaaagaagttcatttaaacaacgaagagtgataaagtaatagcaggatatttattatagaaaataaaatgaatctcatcataacaacaacaaaaaaaaaaccccacaaaagcaagctgaagaaagaagagaaacaaaaagctcaaacaacccctggttgctatagtctagaaatcttttaactacaagtaccagatttacatgtgtctgtgagccaaacatataaacatccacctctctgcatgtcaacaaggagaaaaggcaaaatatttttcagaggattttctgtctcatttaagcttggagtttcaacaagcctattatagcaaaaaaagtttccttcttgg

SEQ ID NO: 59461 - DNA, 966 bp, Bovine  19866881034902
  misc_feature (1)..(1): n is a, c, g, or t
naacctgcatttggaactaagatctagtactgaagtctatccttgagaaatatcccccaacactgctgtgttcagactgaaaaatgaggtcatctttccatttgcttactcattttgggcaaaattcaatgttagtcagggggagaaagaagatgagtgtaggtttatcctggcaaatcctaacgtgcctgactggattttgatgtcttagtagaattcttggggaaaaaaattatatatatgtgtgcctgcatcaataagtgtaaaatttcaagttctttagaatatatttaacttcctgatatttattgtcagtatataactttcactgatttattcagctaacagtcttaaagacttcctttgaatttggagtcatctatattctccaaatacaaaagaagtttgtgagcagttctagataagctcagacatacctactttaaataatatttcatgggtatgtttagaagggggcccagtttctggaccggtttatgaaatgaccaaccctgtttctagagtcttgtaagtccagtttcatttcaataataattattagtagcaccttataatgaaaaaacattttttaagtcaattgtattgactattctccgatgcatactacatggaaacacccatccccaaacacaatagggaaaaaaaaaaaggtgttaattgtctcttttccttctcatttcccatgcttccaggctcatttggcatttcctccgtagtgatcacacttagacttactaatgttatcaaggctatgatgaatttgtaagctttcttagggagctcctctcataattcctcccaccccttgaaaaccaattcaatgtatgaatctagagggacctaaggagtcaaatggtctgaagcaattttaactcctttatttttttttctttcctggtgacagtctttatgaaggatgaacaaatttccctggtgataaagtca

SEQ ID NO: 59462 - DNA, 787 bp, Bovine  19866881147123
  misc_feature (1)..(1): n is a, c, g, or t
naagtcttgaaaaagtgctttacagaggaaagaagttttctttttgctcctcacaggagcgtccagaacgccactgttccaggacttccactgtgatgtacaaacaccggcactgactacacgcttggaaatgacgacctgcttttctcattagtatgggaagcattacaaacccttaaaataagacattttgcatagactttatctgacaggacactagtaatttcaaatcctccagaatcttgaagaagccaaattagtctaacaacatgaattcatactgtcattattactgttatatcaattgttaccgggaaataatgctcaataacaattttactattagcttttaaacaactaaaaagtttggaatataagaattataatagagagacaaaagcccaacattcagttttcgctatgtgaagtaagaataaagacaaaaatccaagtgtaaaaaaggaattttggctgataaagtaagctaaagtagaattacagtgttacttgagagtttcttctaaatggcaaataataaaagctgaagactgaacttcttaaagacctttatgtataattaaaaccatcccccaaatctgattagtaaaaagtgggaattacagctataactagaaattgaaaacatcgtcagtctttagacgttattaaaaaataaagcaaaatttggtttatagaaaaaaaattggatttgtaactgattctttccagaattttccagtaatttttcaaataagctcttaagctgagtaagaaactcaaagctcag

SEQ ID NO: 59463 - DNA, 1588 bp, Bovine  19866881245531
  misc_feature (1)..(1): n is a, c, g, or t
ngcctgaggaaagccatcttaacaggtggagagcggcccacacaaggtgacttccttctggaaattacctgtgacatctaaaagccaagcgttcccttttctaacccaaacacttgctgggtgactgagaatctgaggggcctttgaagtcgatttaaactactttagccacccagctttgctgaaaacatcaaaaaaagactgtcttggggctggctctcctccaggaatctctagggccccggggctgcggccctcagccgccgtggaaggacaaggacgggcccaagggagttaaaatctgacctttgcccccgacacgcacaactcaacctgcgaccaggcctggccgaaagccctggggtgggggatgggccccctcaggaccacctagggcttctggaactctcccctcggggggttcaggctcacgggtctctggctgctgcaaagggggtcggtcagctcctggaagccccgcgggccaactctgcgccaggagcgccggggatctgcagtccccctgcacccaaggctacctgagctagtctgcttgaaacaggcaaaagttggtttttatttatttattttttgaatcctccttctccacctccgctggtaggcagtccttctacctcctacagtggcagcatcacctcgtaagctcctcgatgtctcagaacacatcacctgaacgtctccgcagtgggaaaccacgaaggagcgttgggaggggattgcggggaaacccaagtggggaactaataaaactcttgttagagggcctgctcgggatccgtggcgtcactgggccttttgctcggaaagccaaagagttgtattcctaaatgagttaaagacccatttacctctgtcgtgttctattcatcaagccccaagttgagagttcctaacatgaaactatttgtttgcttacacaaccagctgggcgcaatttcacgtctgagatatctatctgaaagcgcccctcatttattatctctccttgtcagcgaatccattttccagctccccctccccccttggactttatttatttatttagggggtggtggtgggggggcactcctctgcctggaggacctgggtctggaaggctcccaggggactgcccgctcctacccggtgtctgcgtggagcaggggcgcggaaggctcgtccgccgccaccgctgaccccggcggccggcgggtgggcccgcctggagacgacagagctgcctttctgcctggatgtcctccccgctagctcgtcccagagtcagccacaaccacctgtgcgaggcaggggtgggcggaggccggcccggggagttcacgagcctctctcccggagtggggggccccagatacgagatacgatccggatttgagagatgctttactcaaagcctcacctagtcccgtggggccaatttcttctccgggggcccggagcgcggagtgagtaaccaagatgtaaatagttgtgtgatgggctgggggaggaggtgcggggtggggtccgggtgggggacgcagcgcatttattgtgtgtgctgagggacgaaggctgcacgggtttcaat

SEQ ID NO: 59464 - DNA, 813 bp, Bovine  19866881536852
  misc_feature (1)..(1): n is a, c, g, or t
natgagaagtgagctcagatgtagtattttaagcaggtttctgcaatgactgtaacctatgctcactttttcccccttaagttgaacattgcagttaagtgatgcaaaagtgagcttaacgttttcctcaggaaatacaaacttccatattctacagaatgcttattaaataaaatttcaagaagtggttagagcttaagattttcagtccttcagggcatgcaaactttaaaatcctttccatattgtatcaagtccctaatgcacagagtataggttgacacataaatgatgctgttgactaaatgatcaacaacatttgatctctatgttgacacataggatcactgagtgtaaaaaatgaagccatatactcaggtaaaagcatctgatttattcccaaatatcaatgggcaagagtgtccttaatactctggaacaaaaagttcttgtctttattaaagcaaactgccccctctatgctttttgtgatccagagccttctcaaaagaagttatttctttcaaacataaaatgatttatctattaatgaaagttattttgtattaaaatgtgtttcctttaactatttgtagataagattctggtttttctaaagtgttagctcaacagtatataatttacacagtagagtttctatgaaagaaaaggaccaaaaaacagaaagaaagaaaatttacagaaagtctgtagaagaagatataattatacttttaattttcctactttcacccctctctctgtaaagaaaaagaaatgatgttcccaataactagcaaaatactagttcag

SEQ ID NO: 59465 - DNA, 991 bp, Bovine  19866881571610
  misc_feature (1)..(1): n is a, c, g, or t
nacttaagacttagagctacgcaggctctatcattttcccatgtggtttgacaattccaaggattaaagggatcacaggggaaacgaggaggaatccctgagggcttctattacaagtttcttccaccatttcctatttcagtgcttcagggaagtcagtaccaggggttcactcttagcaactcaggactaacttctgctaattttcagtacatggtacattaggaaagaaagatatcttgctttgatttctccattttaactagccagctcttcaccatggcctcataattccttggtgttttaaatgcccacaaagatctttctcttcgtattatcaatgtcattttgtcttctaatgtgtttctttatgcagaaaaatgattatactttaaattctttttatagaatgttgtttgtataaaattaaatggttctaaagctttaaaaagagctacttggtttgaagaaatggaagaatttttcagaggtctgcaaaataaagaagcctgagaaatatttaataatagttctagattaaaagaatcaaaaacattctaactcagctaacactagtaactctaatttgacataacaaacataagaaagcttaataaaaaattagttaaaatacagtatctaatagcctcaaatttcatagccatgctctcactctttctttgcatcaaatgtcttttctccctctaaagagagcaatgtctctatcatgtgctattaatttattgtctaaaaaataaattactgcattaaaaaaggaagaattctgaacaatgatgaaagctcacacagaaaacagtgcaagccatgcttctaataccaaatgatgcctgttggcgttttgaattaaaaatctctctctctcttaagttcctttaaactctacatatgcagatcccctttcactgaacaggacctaatgggaatctaattcactgttaatgctgcctcagcagcacttctgcaccttaat

SEQ ID NO: 59466 - DNA, 896 bp, Bovine  19866880784691
  misc_feature (1)..(1): n is a, c, g, or t
nacagctggatgtgcattcatctcattaaaatttttttcccagagtttgggctttaatgttgtgtgtcaccagtaatgtcatgagaaattcagagagaaaaatgtggtctatgcaattagtagccctcaggcagtaaagcttctgtttcagacagtgtcaaaacactgcaagatccagcaaggcagagccaactgccagagcagatgcctaaactcacagttcctggctacacaatgcatgcacattcctacacacatacacaagcatgcacacactgcatgcacacactgcaacagtgcacacatgcacacacatgcaaactgcaccacctcacatgtgttcgcacatgccatgcatgcatgcacacacatgggtgatcacatatatgcatgccaatcatatgccatacacatgcacaggtataatcatatgaatggtcacacacaatgcaaaaacaaatgccatatacaaatacacataatccccatatatacaaatatgcacacatgcatactgcatatccatacacacactgcacatgtacaaacacacctattagcaaaataattaactgaacatagcaattaacaacccaatgtccttatatgtagctttaactttatatttatattctttgcactcttcccaattttgaatcatgaaaactagcctgatggatgtgaaatttattttaggaataattaagtgtattcttaagggctcacattattcaaataggtttccacacttgaatttaatgaattcatctatgtaccttgagactacaatgattataattttataactataaaattctctctctccaaacagacagtgaaatgttttatttcattattatattctacttacagccaaattatagctatataataaa

SEQ ID NO: 59467 - DNA, 2778 bp, Bovine  19866880806766
  misc_feature (1)..(1): n is a, c, g, or t
ngactgcagcctaccggctcctttgtctatgggattttccaggcaagagtgctggagtggggtgccattgccttctccaagtgacttcccacatatgcagaaactaaatatgaagaacattaaatctagagaaacaggaggatcctgagttagggttgttaaatctctaactgcaaagaaatattttgtctatagttggtactggagcatcctttaaggagcaatagaaggtctttaagggccaagtggattgctcattctgtatacaatttccgtatttgtgaagggagggaaggagttaagcgattggcgagagaagtcataattctaaacgttcatttgcttgattgctggccctcttaataatactctttttccatttaatgttgccaagtgaaactgagtattctttatagactcataatacctaagcttgggtcttttttcagttcaggtgctattaatatttctccagggcccatcaatatggtcagtcagatcagctattaatgtatgcatcaatcacaaaatggtcattttaggttgattgtgcaggattcgatggatcacttactatcataatagccgagcaaattaaatcaaggatcaaagtttcattatatggagtcatgaagattcgagtttctcccccttctggtttcctttcctaactctcttgttctcaacctccattcacttattttcctcttctttaaataataatattattattttatggattctaaggaaaaggcaaggagtagagtagttaacatagtgagagggtaacagttttgacagaaattaagatggatttgcaatattttaaacaaacaaagggcttcccaggtggcacagtggtaaaaattctgctgccagtgcaggagatacaagagatgagggttcaattcctgggtctggaagatcccttggaggaggaaatggcactcaactccagtattcttgcctgggaaattccctggacagaggagcctgacggtccatagtccatggggttgcaaggagtcggacacaactgggcaactgagcacacacacaatacaaacaaaaccctgctggaaatataatcattggtctcttatgaagggagttctttctgtattagaaggagatgacaaatttcttgctgctcttagtatttgtcttcccgtaaatcttatatttgtcagcctgtgctcttattacagacttttctcttcatgtgcttagactaactgctaaagcaatctgaataatcctgtgattattgctcagtttgttgctcaaaatcttgtgatttttctccgtttctgtgccttgttttacagtatttcctgtaattagaatccacaaagtgcctgctttttgcagttcctactgaacttttattcaaactcacaagtatcaaaattcaacagtatcaatctgattttgctctgtggccattcagatggttttaaaataaaaggcaaggtggaaaaatgaacgtaatgctacatttattatgacaacattgaaagggaatgttgaaaaggaagcaggaagtttgaaaaagtcttgattatgtttccataaatatttgctctgaagatgcagtgaattctaatatgcagaagctattaagataaaccttttttttttcttcctcaggagttttgcaaaaattctaactacatttttcttctctccattcagtattatacatctgcatgttttgaggctacatatttaataattgtgtagaagtagaaaactataggcacagttttatgccatgaaccacaggtcttgtacatataaagttgctgatggaattagaaacacaatggaatcagtgtattaaccccatttactgcacccggatgatttttgaaggaagtggtccagacttcacaaagtcttgtgaaaaacaagaatatatttcagtttgtaagataaaaatgaaccttcatgcatatttgcatttattttgcttaaggggatggaattgtgctttcaaagatacattgagaatcttttctaacaatcaaattcttaacatatagaccaagggcaagactttactcagaaaaaagtgtacattatacaaacaacttggtcaaattaagcaaggtcctataaccttgtttaattttttcccctcagttaaaatccagtagttaaaagtgttctggagatcacagctaggcattttctctgacagacgaacatctttccaagaatgaaaagttcattgtggagttgagtcgtgtccacctctttgcaaccccatggactgcagctaggctcccctgtccttcactgtcttcctgcagtttgctcaaattcatgtccattgaactggacatgaatcttgtcctctgtcattcccttttcctcctgccttcaatctttcccagcatcagtcttttccaacgagtcggctcttcgcatcaggtggtcaaagtattgtagaaggaagatcccaaatcacagatctgtcctggtgatacagaatccaagttcattcttaagaaagtgggtgaacttcctctgcctccatgggcatcgcatactgatctacttaaaaaaaaatgtatatatatttttaatgtggaccatttttaaagtctttattgaatttcttacagcactgtctctggttcatgttttgttttttttggctatgaggtatgtgggatcttaattcccggaccagggattgaacccaaactccctgcactggaagccaaagacttagcctttgctagacgaccagcaaagtcctcctgacctatt

SEQ ID NO: 59468 - DNA, 754 bp, Bovine  19866880941373
  misc_feature (1)..(1): n is a, c, g, or t
nctagacgaccagcaaagtcctcctgacctattctttaaaagtgggatgaagatggcaaattaggggaacttctaatgggtggtgaggtacttaagatcttttgccccaaatggtagaccaaaaagatacagatctttttgcttacaatctttgttctttccttgagcttgtattgttgctacaaattaatttctttccctgtcaggattccttttggaacctaagttccaaagcaaacataagttctctgctattttcccccctcaatcagtctcactcttgaatttttcagaaatggatatgactatcattttctttttcagccttaggaaagaggcataagctagttgaataatgacaggttagtagaaaatctatgtcttactgttgctaaagcgataaacagtttgtggcaaaatgtggttagaatcagcattgtggcataagatagattttgtagactcagaaaaaaagatccttgtgtctagctttgaatccaagcttctggttaaatgggtgagggaaaagaaaatggacttttctatttgttcactcagttgcatctctgagctttgcctggtccaggacatctccctctcagcccaccttcaaccttggtgtacttggttctttgtgtccttacctgtactcctaaagctctacctgtttcacataactttcatcaatcaactggataaaatttaatgcatttggataaccctctccccttcactcctcttcaactcttagttt

SEQ ID NO: 59469 - DNA, 1871 bp, Bovine  19866881285750
  misc_feature (1)..(1): n is a, c, g, or t
nttgtttaaggtcagtcatctgaatccatgtcttgggagagttcccatgaagttaccatagggatgaaaatctggggccagtattcacatgcctgattattgaagtcagaacagctggctttatttcaacattccccagcctcacacatacatacatgccagtgaagcttagaggttaaaatgtaagaggaaaatcacaagtgggataataagaaaatggaactgagaagctaccctggaaaaaccaaatacatgcctcagctaggctggaatataaaactgaaaaattactaagatatggtacagaggagaaaaagaaggagaaatgtaagaggttgtgaaatgtggagggaaaaaaatgagaaactctaaagtgcatttaattagagtcttagtaaaagagagtgagggtgtagagtataggaattacataggagataatatctcaaaatttccagaagcagttaaaatcattaaatgacacaaaatgtaaacacaagatatattaaacaagtcaacaaaacaaaaacaataattcttcacaacattgttaaattgaagaacaacattaagaaaaagagaaaagagaaaagatcttagcatcctaagagaaaatttgaatcacaaagaacagtgagacagacagcagacttcccagcagcaacagtgggagataaacaggagtggaatatcttcaaatggtgaaacattttctgtcagtagagaaccacaaaactctcctgcaagaataaagtaatcctcaaaacattttcagattttaaaagacctggaaaacctttaatggaagagctttagcaagaaaggaaatgattccagaagaaaaagatatggtatgaaaagaaatggatggcaaagaaattggtaaacatgtgtataaaactaaacatgagaaatataaatataaaaaataacattggtaacacctaacttgtgaggttgaaaaaatagatgaatctcaaagactgggcagtaatagcaaagggacatgtaagggattagaagaccttatattcttccaaagaatgaagaaagttaatgctacactttacactttacataacttcaaaggaatccaacaagtaataagaataaaatttaatttccacacagtgggagatgaaatgaaatggagtctggggcagagaatataaaagacagcaagaaggaagcaggtgaatgaagcataatgaaagcaagacaagcgagaaacaataaaatggtagtaaaaaatgcaaagctgaatagacacaaactcagcagttaagagacatgaggcaattacaatctctttggacaaatggaatctagtcacagttaataaacaaaaaatgaggtccagagagcagatggtctattactaaaaatgagtatatgcatcactaatattgatgctaaaagcagggagagaagaggcgggtgggagcaatgcaatggcaacatttgcattggcagtgatttgatgatttgacctcaaacttctgctcaatatctatgtgatcctgggcaaatagttagcctgcatttattttctaaagcaatagaattgagataggagtggtacctattcatagttattgtaggagcctatgaaataaaagatgtaaacttctcttgacagtgcctggcacagaggacagacacagagaaattattagtgtagactggaagggctacagagggttttatactatgaaaaacccttgaatttgaggaatgggtgagtggaattaaggatggttaacagtaagaaggacagaaaatagaaaaaccgagccaagacaaagagacaaaactaggaagatgagatgcaccgggcctgggtgggactcagacgaacggctggggaatct

SEQ ID NO: 59470 - DNA, 1348 bp, Bovine  19866880354417
  misc_feature (1)..(1): n is a, c, g, or t
naaataattgggtgaaacaaccctgggtgccgagcagctgccctggtgtcggagcccagaggagtcggcggcaataacagtcacagcgctgcctggttcgtgtcagagcaaatctttgaacagtgggctgtgctgacaccacatagtgacagctttggaaatggcgtgctagttaccgcggcgagagaggccgctcacggagacgtgacaagcagctgtcatttccacacaggtgaacagctgacatcccagcacggggagggcggcaggcaggtaaggcaggactgtgcagcgaggactcgcgagtgccagggacccttctcgtgggtggcagacaccgaccttggagtactcgcatgcacacacccatgcacccaggtcttctctgttgttcctgtagagctcatctgagaaagggctgtggaatacagcatcagcttaaaaaatttttttaatttccttttggctgtgctgggtctttgctgctgcacgcaggctttctctagctgcagcaggcgggagctgttccctagttgtacatggacttgccactgtggtggcttctcttgttgcggagcacaggcttcaggagttttgtctcatagacttagctgtcccaaagcatgtgaagtcttttcgtgaacagggatcgaacccgtgtctcttgtgttggcaggtggattcttaaccactggaccaccagggaagcccccagtgtcagcttttgaggatatgaccaaggccgtgctgccagcccagtgcccagcctggcatgcttaaagaacgtttgcagttcaaatctacgccctcctcacccgcttgacgtgtcatggttggttttccaaacccagtatttagtctcgtagactcctagtttcatggtgtctgccgataagacgctaactcaccattaaaaggaatggatcagatggaattcaggtgcaggatcaggtctgcatagtggttctcaaagtgtggtccccgaaccaacaatatcagcatcccccgatgccattagacgtgcaaactctcctgcagcaggggtccccaacctccgggccatggaccagtaccccccatcagatcagcggtggcattagattagaaataaagtacgaaattaatgtaatgcacttgattcatcctgaaaccacccctccctcccacgtgtgtgtgaaaaaaccgtcttccatgaaaccggccaaaaaaggctggggaccactgctctacaggatcagaagctcggactgtggcccagtaggctgtttagaccaagtcttccaggtgcttctgatgtgggtgagaaccactggactagatcaggaaagcacgtttgctggtaaggttt

SEQ ID NO: 59471 - DNA, 791 bp, Bovine  19866880360005
  misc_feature (1)..(1): n is a, c, g, or t
ncggcccggcctcgggagcgccctccgcctcccacagccccaggggaggcccagcccctgcagggaccctcggatcagggcgctcggaggccgttggtcgggggggaccccgggagaggggatggcacaaacttgggatgtgggatgcacaacgccgtgccagccctgcccccggtgcctcgggttctgtccccgatgtccactggggaccgtctcggggaccacgagggcggctgtgaaaacgctccccataaagaagggctcatgcagaaagatctcacccctgcttcttcatccagtgtcctgagcctcggcctctgcacacagggcggggccgcagcgagggttcagcagcactgtgtcttttcatcagcctgacagccggctgcgtgacagcatctgctcaacccctggacccggggccgctaactcgcctgggggcggggcacgctcgtctccctggctcaggtcccccgcatcccctggttcgggggtgtccatgcgggtgagtgcctgggagtgaggcggtgatgaaaaggacaaggagatttgcatccctggcctcctgcggagacccgatctgccatcctagtgggcagcaggtgcgcgcgcctgccgttgtccctaatggttattaccagtgataagcaggacaaatgggaggtcatctctcctgccggcaggtcaggggggctggatttagagcccccaggagatgaggaaattagatggtcggtgtccgcaatgggggctgtcaccaactctgggctccagtgatactggaaagggag

SEQ ID NO: 59472 - DNA, 1109 bp, Bovine  19866880537298
  misc_feature (1)..(1): n is a, c, g, or t
natcctaagttgtttagatgctgctggtcaagcttcctattacttgcagctaaatgcacttctaagcaacacaaaggccaggactactgactggatccttctttctccttttcacctctggtctctaaggagcaagtgtcctccttctgctactaaaaattctcctctgttcttaattctgtcccttaagacctccttggggaccttgttccatcagtaatcccttattccttctccaataattccaactcaacctaaaaacacaatcatgtttctccaatctcaaaaaaaaaaaaatttcattttacccccttctgcgaggaaaatatctttgggttcagcgagcatatttacttaaagacttgtgactttaaccttgaccacttgcttgttcactttttcgcgtggtaacgatgtactgagcagaccaatgtgcaaggcgtcatgcaagacacagggggctccacgggatgcgggagcagacctgggcttgcctttggggagcctcgggtcgtcagctcatcacaccacaaatgcaagatgtgaagcaagaggagcttcacacctccactgagcccacatggtgcccctgggcagccacaaggccctgtcggattcttatcagagccaaacggtacctcacccgtcagtcatgggtaagagagtggccttcaggctggcacccgagttaggtcctggctcctctgtgaggtagttacgtgatgctgaggggacgctgagccaagtgtcctcacctgcctggggctgaggctgttccctccaaccccgccttcagatgacacgagacatggcgtcaagagttcggcacagcgtctggcacagagcacacctgctgaagggcagccatgagcactcttgctgtttgcacttctcagtggacacaggtgagcaaacagggaaaagcttgaagatggacagaagccatttcactcaggtcttttttctttttgagtttaatgatccctccatcgaataccttctggtaaaataaaacttgaaggacagaacacactgcctttaggccttgtccccagtcttatcaagacaggctgtataccggttaaaacagcctagctgacctctgccac

SEQ ID NO: 59473 - DNA, 2033 bp, Bovine  19866880594276
  misc_feature (1)..(1): n is a, c, g, or t
nctgggctggatttttgtatcattttattgccgagggaaactcatattctgcaaggatttctgcttgggaggtgtttgaagacgtgatactatgctgcacaagagcagaaacaatgacctaaacaaacaaaagcagaaaccaccgctgcctctcaaagagaacaacaggaatcttcccggtaacacacggttttatttcatgcataaaataccaacaaggaaaggcgctgtagaattcaatttactaaacattccttttggttcttactgcataattctgaaggtgaacagaatttggacttattcttcagtcaaatagtagtcagtactaacccactccagtattcttgcctagagaatcccagggacagaggagcctagtgggctgccgtctatggggtcgcacaaagttggacacgactgaagagatttagaagtagcagcagcagcagcaaccctatgtagaagggcttccctggtggctcagatgacaaagaatctgccagcaatgcaggagactcaggttcgatccctgggtcagaaagattccctggaataggaaatggcaacccactctagtattcttgcctggagaatttcatgggcaaaggagcgtggtaggctacagtcctgtccaggctgcagagagctggacacaactgagcaccatttattcttttattaaccctatgcatagggcctaagtaaaatgcatagatctaagatgtggaatctgtacctgtagattacgcactgtgcaaattatgacttatgctttgacatcattaagatgttcattcaaattcaaactggcaaaataaatatgtggacagatacacagaataaatatcaaaaactcaactgattatcagtgcaactaggaaagccagtcattttggaatttgtccagagaccttgaccaattagaattaggggctatttggatagccctttgcacagagtttatttatatgcaagatctatttaaggatggagctaaaaaaaaatcagccaacagagtaaccttgggaagagaccaaacttttgaaagcattaactttggtaacttcagaaacggtgaataactgagagactgtaactaaagtgctcgtcactcagtgcgcactcagcagtccagcagaggaggtctacccgccctggcacacaaagacgtgtgtgcccttttccacaggcatggacttctctccccaaacctacctcagagtttgcttgcatcttgctcttcctaaacctggcacccagtccatgctcaataaatatgtgtgaaagaatgaattcataaactacctgagtcaaacatctcagggaaagtgtcacagaaagtgtttaattaaggagaccaatgattgaacagcagttgatggaatggatgctaacgtgtttgaaggtggtggccatctgaatgcatctatcagaaagaacatcagtataattccgagataaaagtaaatcctaaaaaaaataacaccatacacttgtaagaatccaatgttaaggttattcttttaaggaaatgaggaaacttgaaatcctaaagtatttcttcttaatttggactcatgtcaagccaacggaaagcaactggacttgaacaggaaaagggagcagggtgctctcatattgctaaaacgtaacagccgcattatcaacttcccaccgatcagattttctgttttgtttttaaattgcaagatggtgaaaggaatagaaatatggcttgagggaaactgatttacaaatgtcaggaggtagttcaaggggatctgaagacatgttgaactgctgtatcacagaactaaaccctgattcctttccttctcttcatgaggtacttaatgtttgctcctcttagaattcatcgttttcataactaggattttaaattaaattatatgtaacaacagtctttattttaagatggcttgaaaactccgtcttctatatcataaacaaggaaggctaggattactataaattgtctgcaagaaaaatacaaattgccaagataaaaa

SEQ ID NO: 59474 - DNA, 1274 bp, Bovine  19866880595759
  misc_feature (1)..(1): n is a, c, g, or t
natggggcgagtgtggtgttcatcagagagggagctaggaaaatgattccagggtgggctcagtgagagactgaagacgaagagaagggtaaaaccattaggccagactgcagcgagggcattcaagatggggcgaggggggagagtgaatgccatgcctgtagactcttcccagtgagaggacaaagtgaggggaaagatcaaagtaaatacagagtggaggaagccgggaaggcacagccaacaggaaagggcccccttaaccccttgaaggcagtggctgttgtcatccgtctagtgctcagagcacctggtacattccaggctcagggtgcagtcgttgataatcatcacagttctgccgacagagtacagctggaaatgacttgtccctccctccccccagtctgcaggaagctgcttgtgtttggtaacgaatgggaagagtcaggaacccttacagccagggatcagcccggaggagctagttaggagccaatgccagttggggcaggcagctctcacacacacctcactgtgagcttcctttgcccactgtgctggtgatgcccggcacgcttggagctctgcagccttcctctttagacatgtgccctaaaaaatttcacagcacgcacaagaattaacaatccctgcaacctgaagagaattgactgctgtctcgagatgattctcaaaaatctgccgatagcaacacaaggcattataaatccttccaggttggttctgaccatgttgtagaagtaatttcagctggcatgtcacatgaaagaacagacttgaaaacagtggtgtgcgcagccctgaaggtttccacttggctaatgttctcagtaccttatggcactagtttggattgcagcaaaggcaccaaagaaaatgtctgaagtctggatttactctgtgtgtgtgtgtgtgtgtgtgtgtgtgtgtgtgtgtgtgcacgtgtgcatcttcatgtatattctcacctctgaaaaagagaagtatctaatcatatagcactctatttgtacacccttgttatgagtctagaggaagattgatcactcggtattaatgaggatgttggtacacacttgtctactctcacttggtgtacatgtatttatgtatgtacagtaactcattaagtatgaaaatgagttatacctggtcagtccaagcatggggctagacaggaatgtagattatcagtttggagaaggatttttcactttgtggacatttgtatatgcagaaattcctaagat

SEQ ID NO: 59475 - DNA, 1592 bp, Bovine  19866880617936
  misc_feature (1)..(1): n is a, c, g, or t
ntacacttcaaaaacacattgccttctgtgcttacagtcatgtcttaaaaatcacagcactgaatgaattacattatattaataaaactgacagctgatgaaataatgcaagaaaaataatctactaggtgacctcaaatgaaaccacaaagacattaggctaatggaagtaaaatcgctcattgcacagtgattttacttttcaaattttatactcaagtaaaaaaagtcaacctaaaccttcctcaggatattacatattgaaactaaccacaaaatacctccagaaaggaggcttatttcagaaaatctatatgcattttgattttttcaagtgtgagcaagctttctatatcacagggtggttaaccgtggaagaaaataccacagtgatatgacataagtgaagatcattgatctgaaatagcctataattaccattttaagggtagaacacctgttttactgagggaacatacatatgcagtgcacttcctcactataacgacaagaagagtgaatgatggcccagagtttctcaatctccatctcttttctctgactttcacttctgtggttaggcggtgagacagcccatgtgagagagacatggggatgcagcctcacttcccctcccctcagaagctgagcacttctcttcactctctctgcgaagacaacaggagtacaaaggtgaactttcatgatccacgcagatcccattaagacagatgaacccaagtctggctgcaccacgtgaggcatgcgggatcctagttccctgactggggatcgaacctgcgcccctgcaatggaggcactggaagtgctgagtcttaaccactggaccacagaggaagtcctcaacaactttttattttcaaaaaatccttccatcacaaaatcgagctccagaggacagcacatataattgggaataataaacacaggtgggattacgcacaggtgtttcagagcagcataaaatctcttgtgactttagaaataactgcagtgcttccttcatttcagtctttagaggtaagagtttagttccttaaattttcttaaaatttcagaaagccgtatgactactgggttacatcagagaataaacatcctttggtccgatctccagtgataaatggaactttcctctcctttacaatatcctgccaagtggcgagtgcttggtgatggcaagagcactcattcctgaggtaggtagttccatgtttacaaagctccactgtgagattttagctcagagcaagaaagagctctctgtcttcctgtagtttccatacattcttcctagctctatccttagacatcccacaaggtgattctaatctctttttcacttgaaaggattttaggtacagcagtgcagaaagtctctatattcctcagaactttctctatattcctcagaacttgtcttctctgggcaaacatttatagtcattttaacagttcacagaactgagcttcaagaacacttcagccatcatttgcttgttcatttgtgtgttcattcattcaattattcaggtaaacatttgtaattatttcaagtattcttcataaga

SEQ ID NO: 59476 - DNA, 1804 bp, Bovine  19866880927038
  misc_feature (1)..(1): n is a, c, g, or t
nccccagttcttcgcactgaagtaatgccttgtagcataaatgcagacagccgctctgcatttaatatcagaaatgtaaatcaaaagcgtccagtctggttggaaatggcttcagtcttccccaggatgaaatctgtggaaaaaaaaaaattctctctgctgcttctgacaccactgctttggcagacaggccctgaaagaggctgataattattaaacaaagtatcttgtttccctactgaggtctctggatcgctctgtcattagattggatttatttctagggtttcattcatgctgtgacagcctgggattgataagttctgtgttttaatttcaggcagaaatgaaactggtcaaatgcaatttgggaggggaagagagcccttgataagatggctatgcctcttaatgccaagacacagagccagaataaggaggcatctgggtggggccggccagggggtgcaggctgagcctgcagccaaagctatctgcacacccagagtcggcctcggaggaaggacagaggcaggaaatctgcgttagtgcaggcccagagcacctctcaaacgccaggtcccacgtccaggttcgggagcaccatggccaggcgggtgtagtggtggtgactgtgggttttcctgtctcctgggctctgctgtcatttcacagggcagagggctggcccagcccaacccaagacgtgtgtagcttctcactgcaagtccacactgggcttctcagggcactggataagctcagggtccatgtttttcttcatagggaagccacaatcactgactcctctgatactctctttggctccaatttacttactgagcaaacgcccagttgagcactatttcacatcttagggctgcaccaatcaccagtggagagtagaaagaaaacctgattaccagtgagctcagggcagggtaattaagatgctgcatggaacagcagtggagagccctgacaggtcaactcttggcggtcctgatgctgctgtggaaacagctagactgactggaagttggaagggtgttgaggttgtcagtggggttctgtggatttctgtagtattttactgtgctcaaagcacttccctgaagaatttaagctttcaaactgtggtgctggacaagacttttgagagtcgcttggactgcaaggtcaaaccagtccatcctaaaggaaaccaaccttgaatattcattggaggggctgatgctgaagatgaagctccaatactttagccacctgatgtgaagaactgattcagtggaaaagaccctgatgctgggaaagattaaaggcaggaggagaaggggacaacagaggatgaggtggttggatggcatcaccgactcgatggacatgagcttgagcaaattcaaaaagatagtgatggacagagaaccttggcatgcctgcagttcacggagtcacaaagagtcggccccaacttagtgactgaacaacaacaaagcactctttcacgtgggcaaggtggtcctgggcacagatttgggtgttttacttctggatgcctggtacagcgcccccgcagttcagtgagagactgatctgagcctcttgaccggggcagcaggcgctaacctttatggaacactgcgtgccaggcatgtgggccaagcgcttcgtctggctgtttgctcttatttctccgaaggaggtgtttggatgagtcacatgaaattgccatttttttgttctgaaaagagaatggcaaattttcgtggcacatactttcagcagttttatgaggcacaatcta

SEQ ID NO: 59477 - DNA, 1700 bp, Bovine  19866880952280
  misc_feature (1)..(1): n is a, c, g, or t
natagtacagtagacaattaacattaactgttgctgacttatgtttcgtttgctccacccctcctcctgaagccctagaaacaccttcatctcaagtatccatcaaaatccagactcaccatcttctgctcagcccacacctggccccctcccaggctggtttcggtgatgacatcacccacgcaatcactcaactgccggagtgaagagtcttgtcatcatccttgactccaatcttgagcagatctatcttcctctctcaccccgcatcatcgattctgttttctaagtcctctccatcttcacggccatggccgccgctttccttcaggcttttattttatcattacaagaggctaatgacggctttccaaggcccaaggtctcttttgtttctgatccaagtctttactgaacagagtggatttcctaaattccaatttgctcatgacacttcccatggcctagagggcaatgaaaatgctacacggcttcccggctcttccactgccctctgctcctccaactcagtgcttctcgggctttctgtggaaaggaccatttgtttttgttttaattttcaatatattgtagaccaatactttgtaagatacaataaaaaataattgctagaaaaatggaaaaggaaagcaaagacatataaaaatatgttattagatttaagagatgtaaaattattctactgaattgctgtaaaagttcccaaatgcttactctcaaccgctatactaatctcacagtaggcagttacagagagctcacaggctggctttggtctgcatccacgcttggagtggtataatcctaacacatccagtcacaccccggtatactggatcacactctcaggtcctcccatcttcgcacttaacaatgtcctctacctggagttctgttcttccaagtttccccctaaaaacttataattcacctttaaaaatacaatttcctctgagtcctccaacactcttcttggaattgagaattctcagaattccagtactcttttcagaattaattgcttctgtctccatatcttacaaaactgtcttttcactgttggccacaacagtcttcccatcagagcacgggccctgtgaaggtaagggcctcgttcatcttcctccaggccttgagacacaagcagccgctcaatcatagtgataaatccatctcactcattttcagaattcctgatttcatgcagtataagcaaacgctgatttaaaagacaagtaattccaaagaaagaaaggcacagaaaacactgactaacttaactgcttaatacaaaggaacgtatgcttgaacacaccaggtagggtaaaaattattagcagaagcaagagaggtggccactggctcagcagtaaagaatccacctacaatgcaggagacacaggagaagcaggtttgatccctgggtcaggaaaatcccctgcagaaggaaatggcaacccactccagtattcttgcctggaaaatcctatagacagaggagcctggctggctacagtccatagggtcacaaagagtcagacacgactgagcatacacacatataagagagctggggcccagaagaaaagatgttattatttagtggctaagttgtgtcagactcttttgcgaccccacggactatagcctgccaggttcctctgttcacggatctccca

SEQ ID NO: 59478 - DNA, 1172 bp, Bovine  19866881018209
  misc_feature (1)..(1): n is a, c, g, or t
ntaatgatgctattttttagttagaggagaaaaagacacacacacaagagacatgcagaatgctgcccgtgtgatggtgtccctgagagcctgatggatgctggtccccagaggtccttcgagggcacagaataacctcactgtttttcagggcagagcatttctctgttttgatggttctcctgcatttttgcagtccagcatgtgtagctgaggacttctgtccagctcaccatgtgagtttggatttcgattctgacattagcggaagtgattgggtaaattattcaaccttgctgtggctttatcccctcatccataaaatggggaagataacctgtagctcttgcatttgtgtattaaaggagaaaatttaatgcatttcaggctgttcacagtgctgtgctcagtcatgtctgactctttgcaaccctttggactgcagaccgccaggctcttctgttcattggatttttcggggaagaatactagagaaggttgctatgtccttctccaggggatcttcctgatccaaggatagaatgcttatctcctgtggctcctgcattgcaggcagattcttaagccactgaaccactggggaaacccaatttaacatagcgctaggccacagtaaatgtccagtaaatggtggtcattggtgtcctcaccagatcatcctctctgtcccttaggttggtcccttgtgtccagcgtgggagatgactgcggtgctgggaaggtcagctacgacctttgggtgacagatccccatcaacacaagtaccccctgcacttgtacaatccacacccaggaagaccaaatggtcttcaggctccaaggagcccatttcctttacaggcggtgcctgggagggagaagaactggccaaacaatggtggccaaggtgtctgaaggtgagaggtgcaaagcacgggtacggggtcctccaggcgttacagcttgcctactgtgttcttcaagatgtgagaaaagcagatggctatgaggagaggccctgggctcaaaggtttccatggggtcaatggacgggaagagggaacctccaacctgcccacccaggcggcaacgctcatccttcccaggtcagagaaggcacacagaaggcagctcgtgcctggtctcccttctggagaagcagctatttcca

SEQ ID NO: 59479 - DNA, 1861 bp, Bovine  19866881198248
  misc_feature (1)..(1): n is a, c, g, or t
ntttaatacgatttaggagcagaatgtgtaattgttgttcggtcgctcagtcgtgtccttctctttgtggatcccatggactgcgccatgccaggcttcaccgtccttcactatctcgtggagtttgctcaaactcacgttcattcagtcggtgatgccatccggtcatctcatcctctgtcgtccccttctcctcctgccctcaatctttcccagcatcagggtcttttccaatgagttggcgcttcacatcaggtggccaaaatattggagcttcagcatcaatccttccaatgaatattcagggttgatctcctttaggattggctgatttgatctcctttcaatccaagagactcccaagagtcttctccagcaccacagttcaaaagcatcaattcttcgacactcaatcttcttaaagaagtcacatccatatgtgactactggaaaaactacagctttgaccatacagacctttgtcggcaaagtgacgtcagccttcttatggtgcaactctcacataatagactgaattttaaatagtttcttggtgctaatgttaatatggttcttcctggctatcaatgtggaagctatcctgcagttcgggaacaccgtctacatacattgcctcttggggagtagggtacagcttgtctttcctcctgctcccccaaggcaaagttggaatcatctacttttctggaagaccttagtagaaataacagtagtatttctgtgtgtgtgtgcttagtcatgtcccactctttgcaaccccatggaccatagcccaccaggctcctctgtccatgggatttcccaggcaagaatactggagcaggttgccatttcctactccaggaaatcttcccaacccagggatggaacccatgtctcctgtgtcttcctgcattggcaggcgggttctttacccctgaaccacctgggaagcccagtatttctgtatactggaggcctgctgtattcctgcccatgaattagatgaaaatactcccatctttagagctaatagttgccaggagccgtatcctacagacaggctcctcaggtgccgagattaaagagcctgtgcgatcaacagcctgtatagagattgcagcccagtctgtctcatgcaggaacacacgctctttccgctagaccccatgacccaaagccctgactggggctcgaccagacctttggttgggcaggttccatctcccctctgtggatggtccgtgtgcttcaagggggagaggagcacctgagaaaggaatgttcatgcaccagttaaaatgagtgtcgcagcctcttatccccccttcatattcacaaatgttcacttctttctttctgtttttttttttttttttcattcttcctcgggatgatgactgacagattaatatatgtctaactacatgtctcagaaatcaaaaggaaggtgctgtcagaatcacttgtcagaaaatgagattaggcgcagttgtcatttgctgaggattgcagtctttcagagataaggtttcatttaatgaggctaaaaagcctcctttaaaaaaaaaggaagaagaagagggagttagggaggggtagaggagaaggagtgatgattcttttttctggtgtcagccgagagttttatcacctgacgcgatcccggggtacctggtagccactgataatggcagcctggccttccccacctgctctgcaagcagccttcagaagcggccgccgtgacctgcttttacctctcattggaagctgaagctccttctcctgtagaaaaggggagcaaagcatgcactctagatttaaaagcaggctcaagaaagcatgcggtataaaggaa

SEQ ID NO: 59480 - DNA, 1127 bp, Bovine  19866881210515
  misc_feature (1)..(1): n is a, c, g, or t
natcttgttacctgactaaggggagattaggggaaagtgcatgggattgagagtccgacacgactgagagactgagaaagcacaaaagcacatatcttataaagagagcaaggaaaaaaaaaaagcaccctcagtgcaggtgattcaagaaatctgattttctcaactcctacttctgatatgtgaccaagttactggctttaatgcacattcagaatctgcctgcagtatgggagacccagcttcaattcctgggtcaggaagatcccctggagaagggaatggctacccactccagtatgcttacctggaaaatcccatggacggaggagtctggcaggctacagtccgtggggtcgtaaagagtcggacacgacggagcaactaacatttccacttttcatacactttcaaatttattttagaacagattaaatttaaataataaattgaagtgaaaagttagtttatgaaagctaagttacatgataaaacatgtccacgctcactaaatcttcaaaaataaaaataagacagtaatcaaagaactgaccctttaagtctctctgaaatccacaagacttttggatctaaaatattaacgcatgaacatgttatagatcttttaagaatttgcaagagatattgattttctggtttgttaaggcgataggcacagaaaattgtttaaaattaatgtaaagaatgtttcagcagggatcataatgatttaaatttaatggacactcgctcctgccttctgggttcctgagccccacttcccttatcaattaacctgtcagcttgatagtcaagtctaattagttaaatccttttttaatgaaaagattatgccttaagcatcctgccagttccagggctgttggcaactacaaactaatctctgcaaatttagggggtgggggagggaatccttaaactccagtggaatctggagctccaaaagctcatctaagttgtaattatttatagcccataacgtacagcaaacctgcagcgcacagatgccaaggccctgatctcttcatgggcttccctggtgactcggacggtcaagaactcacctgcaatgcaggagacccaggttcgatccctgggttgagaag

SEQ ID NO: 59481 - DNA, 1957 bp, Bovine  19866881226484
  misc_feature (1)..(1): n is a, c, g, or t
nttcagttcagtagctcagtcatagtatgtacatattaagttatgaaccaaaattgagtgggaggagatgagtgaaatttaaaaattatgacaagtagatgagacggactgaagttaaggaggccagctgcagtattaacaatgcagtaatatagtgcaggacattcataagtggagtgagaaagttatgtggtgctgagcaggctcaacagatgagtaggggcatatgtaaatacagtagctagctcagttgtagattctagagcaggacttagagacctttttctgtaaagggccagatagtaaatgtttttaaggtttcaatcacaactgctcaactctgcagttgcagcagaaagctgtcatagcacataaatggatgaacataactgtgttccaataaaattttatttacaaaaataagctgcagaccagatttggcccatgagctgtagtttgccaatttctactctacagtacgtaatttatcttatttacttgtttgtagctcaaagcattgcataaggtttgaggccttgtaaaaatttatagggcttccctggtggctcagtggtaaagaatccaccggccaatgcaagagacaagggttcggatttcctgatctggaaagatcccacatgctgtagagcagctaatccagtgtgccataactgcggagcctgtgttctagagcctgggagctgcaactactgaaacccatgtgcctagggcttgtgctctgcaacatgagaagccacctcagtgcccacgtaccacagctagagggtagcccctgctggccacaactagagaaaagcccgtgcagcaagagagacccagcacagccaaaattgaataaataaatgctatttaaaaagaatttatacaacactagatgcatatagcaagttagagggtcactgggacctgctgaggttttgtgggtaggaatagagtccgctcctgtttaccctagattgaatgcatacactgctagcaccagggagtaacttgggagcaaaaccagtgtctgtggaccattttgtttccctgtcactgaatattacacacagcctgctttgaggacctatttagatgcccttcatatggacattggtggaagccttccagattcagtagctaattatctcccagtgatcattcagaaagattatgctcaattcctatttgactataggcaaagagacccctcttttcagtgacttggaatactcttagatgccctgagaaagaaggtgggccctcagcacctgaggggtgatggtgggacaaggggaatctgcatctatactggggtgtgactaaacaggactaactcaacccctccatcccctaccaaatgtaacagaaataaaacatcccctctatatatgtgtatgtcctttaataatgcctcttgcagtgatctaccctaagaaaaattctacagtagcttgtaaaaatttataaattatgtttgaatttcagtctaatttattaaacaggaaattggaaagaagttaaatatccaaagtaccgtagaattgatgcttttgaactgtggtgttggagaagactcttgagagtcccttggactgcaaggagatccaaccagtctatcctaaaggaaatcagtcctgaatattcattggaaggactgatgctaaagctgaggctccaatactttggctacctgctgcgaagaactgactcattggaaaccttgatgctgggaaagaattgaagggaggaggagaaggggacgacagagggtgaaatggttggatggcatcacccactccatggacatgagtttgagtaaaccccaggagtcggtgatggacagggaggcctggagtgctgcagtcatggggttgcaaagagtaggatgtgactgaactgaactgaactaaatatccaacaagagaataggtaaatacagtatgctatatatgag

SEQ ID NO: 59482 - DNA, 1046 bp, Bovine  19866881274606
  misc_feature (1)..(1): n is a, c, g, or t
nttgtgaaactccctgagtacttggagagcaattcagtataggtcacaggtgagcagaaagtttgcaggtgtccctaaatagcctctcattccccattagcagatcctgtggctcccaacctcccagggcagggacctctcttagggcacctgagacgacagggcgagtcctcggggtttccaggcagcttctctctgcctttgcaacgtagcttgaatatggcagcaagagaatttcagagcagaggtgtcgaaagcaaaaccctggtctggtcctgctctcaccctgcaagggcctctgcacctatggtgacaagcccagcaaccttacccttgtgccaggccatccaacttgccaggtgcccgctcaaacttgcagggcaggaaacccaagctccaagtcccgacttggttagcatcacagatcagatgatggcacaacagaatgtgagccctggtctgtcgacaccaggccccgtgttattatctgagagctctactttacaggttgctaaggatgaatgatgggatgttttggtttttgttctgtaagtagaccctctcccaggagggtcagggcctcacgacaccacgcattagtgtttggtgttggcaccgtgtatgtccctttgtagtaatatattccgaaagctctggggtcaccctcggtctcgtggaggaaagtttcagaagagagcagagaggttggagcgttagggtatatcctgagtgcacttcaattctcgctttctcccaggagcccttcaggtggccgggtggtgattagaggatgagagtcactgttgcttgaacacagtcagcaacagaaccctggcactgggagttgagtgggtcagaatgtttgtgttctgtggctagcccacacgcagcagcccaacttctgctgttgtccccagctgagcactctcagatgtgccttattttgtgtgggtatttttgttgttgttcagtcatttggtcgtgtctgactcttggtgaccttacgggctatagcctgcaaggctccttcctccgtccatgagatt

SEQ ID NO: 59483 - DNA, 1847 bp, Bovine  19866881744040
  misc_feature (1)..(1): n is a, c, g, or t
naaatgtggtatatccatacaatgcaaccctatttatctacttaaggagatgaagtcctgacacatgctacaacatgaatccatctcaaaaacattatgccaagtgaaataagacagacacaagaggtgacaccgtatggttccatttctatgaaatgtccataacaggcatctccatagagacagaatgcagacgaatggccatcagccctgggagaggggtgtggagagcgactgctaatgggtaagggggtttctttctggtgtgatgaaactggatgtgaaactggttctggaatttttactgacagttgcacaaaaccttgtgaatacacaagtcacaaatgactgacttgaacacttggaaattgagaagttttattacagagatagaatgtgaaccttctctccttagaattgttattaaaaaaaaaaaaaggctgccttggagggggtggttctcaaacttgagcatgcagctgtgtgtggagaactggtttaacacaggcaagctgggcgccacccctacagcgtctgcctccgcaggtctagggcgagcctcaggactctgcgtctctgaccagtccccgtgtggaaggtctcgctggtctggaggcacattccgagaaccccagcctagagcggtgcctctccccactcccgtgtgcctgctgggcaccatccagtgaaggaatggctagccagctgccaggagggctggcagtaggactgcccagcaaggggcagagaaggccgatgctgctctggagccacccacgtggtcagggaagcctgtctccaggcgcagaccccagcttgacctctccttccacctacctgcttccctcccacacatgctgatcctcccgcgaaaataacgagcttgctaaacgctatccgtctgcatcaagggaggtggcaatctgtcaaaacacataccatatcaccggggggctcttgttagaaaaggagattctgatttgaaaaatcagggcacaggtgtggggatcagcatttccgacaaacttccaagagaagcccaggccagggtccctgcgatctggagcagccttctgacgccacgatgggaagagtctacgagccagcagcttgggcactacatggaaaaggtcatctcactttagaggcaacaagaaggcgctgacattaccctgcccttgagatccaggccaaggaaccgggttatgggtgagtgtgtttcaacaacacctttcaggtactccagtagttcatccctttggactggggcccagaccaacataaggcataccttcttctatgctctattgttacagcatggctgcggggcatcacttgggcaaaagtcagtcatgtgtgttgtgcaaccagcagacaagtggtgacggaaacccacaacacagcctgtccagggagcctgagactgagtgggaaagaagacaaaaaaatacacaagcaggggttgtgaccaccaaatcttttccagtgtcttctgccctcagactaacagtgtgttccgagagccgagaggccactggtgtcttgtttctatgtcggagcctttcactaagggtttggaatctactctgaacttgctgggagccccataatctatttctcgatttttctactagttcaggctgattttagacgaatggaggggtggcagattataaaaagaagagaggtaagttgaaaccaaaccttcaagatgttatcatggagggaaacttccatgccatcacaccaaacacccactatccaggacaagaatcaggggactgggtaaaccaggggcagaagtttggaaagaaagaataaccatccttgactcttgtatcacagaa

SEQ ID NO: 59484 - DNA, 676 bp, Bovine  19866881833019
  misc_feature (1)..(1): n is a, c, g, or t
nccccttgccacatcagagaaggaaacaccccgaagaagaggtcgggctgcagggtgcatggctcagtgcaaaaaccacctctcttttaaaacacagctagaagcctgccctgccttcctcggagcagccaaagcgtccatgtggcctctcgccatcccctccatagtctgagcagaaatagcacctcctgcatcatggcggctggtggctgctggggctccctgggcccccccgagccctgacctaggaactgacccccgattcccttgaagctaattttcatcagcaccagcttctcggtctcatcagccccgtcaaactccacatgagctaagggttcttttgtttgtttgtttcttaagttctcagtctgtactttgggcaggaaatggtcctttagcccctgctcccatacttaaataaaaatgctctcctgttctccgtgatatatttgcttattggatttgtttaatgaaatatggatttatcccataaatattggagttggtgtagtccatatttcaattaatggatcatttatgtgtcatgctaactttgtaattactgaaatgtagaaatatacgtggattgaaatgagtttctggtcttcttggcattcctgccccccatccaaccatgtctgaagagcttggatccgtgaacaggaaggattga

SEQ ID NO: 59485 - DNA, 1060 bp, Bovine  19866880421406
  misc_feature (1)..(1): n is a, c, g, or t
nattgggtggggtagggagagggtcacaaaactaggagttgctcttgtatttggtgctaagaaacacagggatgctgagggtcctgcaatgcctgggacagtctttcacaagagattattctttccaaaaatgctaatagcatccctgctcagaaacatagtcacagaggcctgagcagctggaagaacctgctggttcttatcttccagggagaaagctctattgccctaacagtggcttcagttggagttgctcctctaggttactccagggacactcagtcccattcaggtagctctgtgcttggtggcctaggatcttgctgctgttcactgctgccatctttccccaggttgttaatgatgagatgtgtgatgtctgtgaagtctggacggccgaaagtctcttcccgtgcagggtctgcaccagggttttccatgatggctgcctacgccgcatgggctacatccagggagacagtgccgcagaagtgaccgaaacggcccacacggaaacaggctggagctgccactactgtgtgagccttggctgcagggacggttagccttgcactgctaaggactgggccctttccctggaggcccagtcttacaacactggtttctgggcagtgacctgaagagtgttccaatagtacatacaagggctaggacaggctttccctagctcagtactgttgacacttggggcacagtaattctttgttgtgggggctgtttgcattgtaggatgtttaacagcatccctagcctctacccattagataccagtaacactcacccgcagtggcaacaaccaaaaatgtctccagatgttaccaaatgtgtcctgggggaacaggacattccagttgagaaccactgagctggagaacagaatgcataggatgagacctagttattcaaaattgattctgcttggagcagtggtggtttagttgctaagttgtgtccaacttttccagacacatggactgtagcctgctaggctcctttgtccatggaattctccaggcaagcatactggagtggattgcca

SEQ ID NO: 59486 - DNA, 1606 bp, Bovine  19866880509585
  misc_feature (1)..(1): n is a, c, g, or t
ntactttgtaattttcctacattacaattaattatattcttcttatataattttttaaaatctcagggttggcaacatgatgacttcttttagttttacatataacattctgtgactcagaagacattgctttattgccctgggttcagtttccatgtctataaataaatattggaacagagagttaccaagttccctggctgtgataaacatctagaatgatcatgtttattttaaaattcatttaaaagtgtgtgtgtgtgtgtgtgtgtgtgtgttagttgcttagttgtgtccgactctttgcaaccccatagactgcagccccaccaggcccctctgtccatgggattctccaggcaagaacactggagtgggttgccatttccttctccaaaaagaactatagaaataaagaaagtgaagtcactcagtcatgtccgactctttgcgactccatggaccgtagcctaccaggctcccccatccatggaattttccaggcaagagtactggagtgggttgccattttcttctccaaaagtccatggacctaattgcagcatccattgatagggcattagccatgaggcagtggaggagtatgggtgtatgtataaatgctttatagacttcatgtaggaatttcttgaagtgaaaggctggacctgtagtccacagacactgcccacaggcttcatgcacacaggctgtgaaagcccccaacttacagcaaaaggaactggcactccacacgcaagaaagagagtgcaaaacccagcccttcactgtggacctttctcatgatcagttactatttccacggccaccgtgttttcctcagaaaccttctgtgaaatgtttttcacattttttttttattgtgacccatagtaagaaatgtagtttatgatgtggttctctatacacagttataaacatatgttcagagatctataactgaactcaattttttatggagcaatcctaattttactacatgtgatttcccctgatattttctaacctctctatcctagttcattaaaacaatcctgattgtgactctctaaaatgatttcatgacttcctaatgggtctggacatgtaattttaaaaacatagccttaggatcattatatatttttgattagtgaactatacttttgtcttttgatttaaatatagttacctctagaagacaagggcaacattgtgggctaaggtatgctttccctttgactggagtgatgtgagcacagcattctcaagcttgtttttagagtctgtgtggttggaagttctagcagatctgttctgatactgatatacctttggctgaagaaaaccctgctttgtataagagcctgatcctctaacttgtggacatatgtaaaagcatatttattggagcattgcttttagtgatttaaaggaagaaacaacctcaataggaataggaagtgtagagcaatgattattaaatggtgagctggctggatcctaggcagatgggaagtgtatgtaagaaacttcaggaagagagggagaaagaaggatgaaaaagcatatccattattttatgcatgtttatatttagaaaaca

SEQ ID NO: 59487 - DNA, 1431 bp, Bovine  19866880825809
  misc_feature (1)..(1): n is a, c, g, or t
nctttaccttcagtgtaccttagatatgggtcttcctttctgagctgaaagagtcaggcagaatgcttacctacctgtgaaatgggtttaagctccataccatatagggtgtacaatctaactcctctactctctccatcacataccacattgaaaacaaggaggcacaaacacatggttctttgcttaaaggtatagagtttattcagagagggaatgaacaccagaatattaatggaaatgagatgatgacagccttttcaggaggatgcagaagtctgggaacccctgagctccttcttcctggacggggtactctcctggggttgacaagtaccttctgctgaggtggaaactgagacatgggatggattttctggctgagtggcacaagtcagcagaggactgcgcttggagctgccactggagaggggcaggaaacaggactggctggacctcacggactccatggactgtcgctggaactcactgtccaggcactggagcgcgtcaaagaagccctcctccttctccaacttagctcccttcatggggcgtttggtggaaggtggactcttctcagccttttttgtcttggttttggccactttctcatccttacagcggagaatgcattccttatgcccttgacctttcatgtcagggttaatccactgtgtaaaatgcttcagcttatttcccaggtcggcttctacagcttctggaaggataggctcttgtaagtatgagctgtctttaccagacgctgcagctcttgcccctagaaagggtggccctataaattttggccctgcaaagtctggatctgaaaaatatgtggatccttttaaatgcaaactgtggaacaccaagttggtcctataaggtctggctctttaagccctgaacacttccagacacggcattcgcaggaatccttgtttgggtgaggtcattcaccttgttctaacagccttacagactattctcatctagtcctttggtcccagggaatcttggaggatgctctaggaactcaaggtaagggagatgctggtgaaggtacggacaggggacactaagctgagagtttggagatggtggctctacagatccagatagaaccttgctagtccctactcactcaaggcaaccatcctggccaaactaaaattttacctaagaaagatcctgaagatacatttgagaagtcaggggctcttggagtttcaacttaaaagtgtcctactagaaccctggcacagcaaatgctctctctggatggagagagatttggcactgcaccccttctctgtggttctctgaagctttgcgtttccctatgtccctattctccctgctactgcagggagttatctaaacaaggtgattggtaacagcatctggtgaggcttactgctgcgggttcag

SEQ ID NO: 59488 - DNA, 1682 bp, Bovine  19866880851438
  misc_feature (1)..(1): n is a, c, g, or t
ngcttttagtattcctgtaggatgtccctgaatccccttctgttctgtgtaacactgtctcctggtttctcagctaggagacattcctggaaagaagctgacaagctgtgggagctgctctcagtcatgcgaaggtgatctcttgctctttgcagtctcccacctcctagtatggcctgtggtaatttctgtgtttggcctgcggcagggttgggcagaaggagaatggctgagagggagccagacacatggagcctggagccctgggtgagagttggtggaggagagggtggggtcagacgtctcagtggagaggggtcttccagctgtgctctgggctaggctcacaaaggtgctggaagtcaggatttgacagaatttaacgatgtgggttttctcccaaccatgagacaagttacccagtcaggagagtggatagttaagtgcataaacaagtcatagttttcacattctctttacagccgctccctttcaagggcagacccctggaccctgctgacattacctcctctggttctgtcttcaggaaggccagttcctgggacaaccctcaggcaggagcttgtcatattatccccttcttaagagctctgcagaatgaggaattggctcttaagagatgtgtacatctaatccccagaatgcagagctcccacaggacttccgtggccccaagcgaggctgactccaggttctacctggtgatatctctggtgctgccccatcagctaaccattggctcccccacctgcctggttcccttctcctaattcagcttctcagcacaggtcagcagagagctcacccgcctcccagtttctcaaggccctgtatttccatccgttgtctgagaccttgcccaacaagctccaggctctcagcccagcccactacagcttgccaaatggcatttccctaggaagaaaagtagacacttaaacacccagtggttgcaggccccagagtttactggactaggggagggcaggcccagggccacacactggccaagagtaacaaacagtaacaaactgtccatcagtaacatacatttgctatgtttcccttcccagccagggctggctacctcaggaggggaatgtgcggcagatcctgtgtgcagatccctgctgccaaacctgcaacaccatggctctggagattcagcagttgttgggtgagaacaccctgatctcccccacttcaggggatacctctcagggctcttcttgccaagaggttttgtccatgtctaatgtgacttttgagcagagtctggagcatcgttccccacactccaaagacctttcacttccatctgcaaccctcacagtgtcacagaaatccttagtccagtcagtggcccagtcacctggtgcagccggcatccatgattactgggctgaacatctcaagctaaggcagggattccaagtgctagagggtccctcagggactgaggagcctagaatttcagtgaatctgcaggagatgatgcagagcaacctcagcctcatctgtgggaaccaagtccagcagcccttaaatccccaggtctctctgctgaccctgaaacaagaaattactaccctgacacatccagtggccttgccgatggtcactgtcctccctgcccacctgccgttcctgagtcctgaagt

SEQ ID NO: 59489 - DNA, 619 bp, Bovine  19866881061128
  misc_feature (1)..(1): n is a, c, g, or t
naactgggatacttttaatatctgctaaagccctcttgttgttttcccttgtcctccaacttagaggggagtttaccttgttcctgcctagggaagtcctcagaacctccaaacaatcacttatagttacttttgagcctttttcaaatagctgccattcccatacaagaaccatatgaagacaagtaaatgtacttgacatttagcatgcctagtgaagagactcctgcctatggagagggctgcttcccaggctcctcagaactacaaatctttatagagaattttggaagaggttccctcaccgtcttcccttttcttatttcttcaccagctcctgctatggagcaacccctcctccacttactcccaccactttgcccttataaataatcccactttgttgtaagcatgtgctctgcagagaatgggtgtgccttgcacgcacacatttaaggctgcccacatatgtattactgcctgacaaatgcatgtaaagacttttcttccctgaagaaaggttctggttgtcatctgttttagttttctccagatcatagactcagacagccctgttctaccttcctctccctcttactcccaccacctgctcctgctc

SEQ ID NO: 59490 - DNA, 962 bp, Bovine  19866881774801
  misc_feature (1)..(1): n is a, c, g, or t
naactatataggctgaaattgtgatcttaaaaatcaatgggaaaaattacagttgtttagtgacttaaaaaattttttttgtcaaaacattaaagagtccattatggtcagtggtaatgaatagggaaatgaaaaaagcagtaaagctaatatttagtacactttaattagaaatattgagatgtaaagttttgtgttttttttgtaaagaaagcttaccaagatactaccgctaaggattttcccttcctctgtctctaaattcttaactaatgtcttaaggcatacagagtggtctttcctacttacgagatattttggagggtgcgttttatatctttttcaataagtctttcaacactgaagagttatgtaggtgtaagtacttcattgattttgttaaatgaaaaatcccccattatttttgttcactactattcaaaagcttctgagtattaaaatcaaactactcactgattctttcaagtttcaaaattatggagtaatttgtataagaaaaaaaggtttaattttgcaatattatagtccatatacatggaaagtttgtgttctttgaaacactttttttaagaaggttgcatattgtagcagtggaaataatgttctcacacaccatctgaattgttttgctaggattcattagaacagtttctaccaaaagaagaaaaaactcatcaagaattgtttgaatagtgcttgccttcttataatgtaacttagggtatggagtgagcatcttttctatgcctttccaaattctcatattcctttccaagtctagatcaggttccaacattttatcttttttttttcaatgttataaaatatctctgagggtcactttaatgtgaactatttttccagcatcacttgctctgggacatgatcatcctttcctcatttatgctttgctcattcctctcgctgcttttctagggtct

SEQ ID NO: 59491 - DNA, 934 bp, Bovine  19866881789870
  misc_feature (1)..(1): n is a, c, g, or t
naagggataaaaccttgtctgaggtgtaattggttcagtctggtcatagtgtttccctacccggcagcagttcctgttaggtcccaactttaaacctcggtggttctttttcacttgccaaataattaatgcaataataatgatggagccataagtgtaaaagggatatccaacatcccacaaaataaaagtagggctcaacataatctaaaccttactagccatccctcttcctaggcttcctaggctttaagggtcttagaacctaacacctccaaatcctagacctattgtctctgcctcacagagcatagaaccaaaccagcagactgcatcacaaagccctcctgtttcctaagtcatgcatggcatcacagacctttatttgtctaggagaagctcatgtgacacagtgttaaggtgagggtgtctggttgactacatgggttgcagagcctgagcctaaagattccaagtcacaggaagcaaatactccttcatgccctctctattctctctatcctgatggctcagccttcagctctcagataacagtctggcatctatccccagataactgagtctttatgtacactgtgtgccctaaaagagagatagtggattggtcagacaaactccatgaactatatatatcactgttctgagaagataactaggaaacacacaagaggacagtgtatacattatcctattaagtcttggacagtgaagtttgatgtcacaggcaataggtgggcagtcatgaaaaggactgtaattattgtggcaagaaaaggacatagcttctgttcttttaaacaactttctgagttaaaggagtgctcccagtctgtgtgatcaagcttttgatggacaagaagaaactgtaaacagtgcccttccaaggaggaacatgatttgaggctcacttctg

SEQ ID NO: 59492 - DNA, 954 bp, Bovine  19866881825107
  misc_feature (1)..(1): n is a, c, g, or t
ncctgttggtaaccctggggtcctggggatgtctgaaagtacgacacctgacgctggacttataagcctgacagaagtttgttaattacttacattcatagcccggggttggggaggaccctgcgcaccacacagtgctacattgggtcaggttaacgggagactgagagcgcttgcagcagcacagagcaggaagcatgaacttggttggggaggaataatgacaactgtaaaaaattcaagtcactttttaggtatcttgacttgctgctaaaaagccgatgcaagctgctttttaactaattattaataacctgtcattcgggcttcctgggtggctcagatggtaaagaatccacctgcaatgcaggagacctgcatttgattcctggggggaagatcccctggaggagggaatggcaaccaattccagtattcttgcctggagaattccatggacagaggagcctggcaggctacagtccatggggctgcaaagaatcggacacgactgagcgactaacacatatacacaacctgtcattcagttctctttaattggaaatgtcttctcattcctatattacagaatttacaagtttaggaaaaatgttgaaatggttcaaattcatcccattttcaggatgagactcttcttaaattatcttaaatttaaggatctattttattttgattttcttctgtaaaaaaggacattgaagaaaaatattcagtaatctgtttctttgccaaattattttcagaatattcttccttatagatagcaaaaaaattcctcatgccaatgactggtttttttttaaaattgtggtaaaatatatacaacatgaactttattcttttaaccacttttaagtgtacatcagtgacattaagtacattcccagtgctgtgcagccatcaccactgtccattttcagaaccttttcatca

SEQ ID NO: 59493 - DNA, 2318 bp, Bovine  19866880953651
  misc_feature (1)..(1): n is a, c, g, or t
ntgctcagtatgctttataatggtcccatctataacactactatgctgtctgcccacttctgccttgacttcaaataagtttcatctttgttccatgaccaagcacaatgcttaatattatatgcttaatacaaaggcattccttcattatggaaaaactagcaggtcctgctaaaggacaccaggtgagccttttctctgtttttaatggagatggtgggaaagaatcagtaaagaaaatgtgaggtaaaaattcaggaatgtaactaggttttctgataagaccctcatttggttatttcttctccatcttcattgaacatgatgaaatctagtttaatcggaatcactgagagaaagaggaagggcagggaggaagggttgttcacaaagtgtggttctttgaagaagaaggagggaaatgagctagaaactggaacaggattataatgttaattatatttcctaattgtaattctgccaagcaccttcttcgtcgttttcccttgctccccatagtcactagactgcttgccctggctgagtggaagagatggtcagatgtacaaaaaaagaagcaatttttccaccttagggatgtatttattttgaaattccagagtgctatagaattatagcaaacataatgccaaatcaccctagagtaaagggatctataaagaaataggttcaataaaactagcagatacgtatcatgcaacttcagctctccaaatcctgtgtacctttaaatgactcaaaagtgttttgagccatacatggatatgcccttgcacacttctagagggtttcctcataaagccctcaacagtcatgaacagtgtcttagctcagttgctctctggttaatgagcagtctttacatcttcaaacggaagtgaagtccctgctgccactgacctggcttgatgcttttatgattttttcattcagtatgctttttattgagaatcaacattatgatgctcatgaacaatagaaatattgttataaacaagaaaagaatagtatttcttgagcgtctgcaaattgaacatacattatctttgcatattatcccttttaagtctaaatgcaacctccccagaaaattattatcgatattagtcatgaaagtggatctcatcttgattacagagaaattctgggttgatctgagtaagtattattgagaaagggtcctaaagcagtgatcttgtttacattctggtcatagttagacacttaaaagccttacctcacaacatctttatatgatgcttcctctatttgtaatttcctttaccattagtcattcttcaagattcagtcacccacttctgaagttctcctagatcctcatgggaagaagcaagtatttttcatctctactctcacaattaaaacccaggaatccctctaaaagactgtacaacactggatttaaaaatgtactttaaaattatacagacgtaagtattttttattccattttgtctcttaattatgtgatgttctgagaggctatgtaacttacacaaaatcccatataagccctataaggagaaaaattttgtcctgatcatcagtgatcccctaatgacaagaacgaagaaggcaatggcaccccacttcagtactcttgcctggaaaatcccatggacggaggagcctggtaggctgcagtccatggagtcgctaagagtcagacctgactgagcaacttcactttcacatttcactttcatgcattggagaaggaaatggcaacccactccaatgttcttgcctggagaatcccagggatgggggagcctggtgtgctgctgttctatggggttgcacagagtcggacacgactgaggcgacttagcagtggcagcagcagcagcagctggatctcatcaatgtatcttctcgtgtctcatgattatataagctgatagtctaaccccagcacccttaattttcagaggggaggtttcttgaggcttcaatgaaatactgagttttggagatatattgaattttttcttaattttaagtgaaggaattgaggggttagttgtctagtcttgaggatgggatccagcaattggggtttggatggcttagtatttgttattaattggcaggtaaggaaaaaaaaaatataccagaaacttcttcctaatggcacatttctgagccctttcctataatcaccaaattataataccctctttaaagaggttagtttcttttgtttcaaaaacaaagtaatcaaaatgctgaaaaattcagtcattctagttaattcattaaaaatttttaaatgt

SEQ ID NO: 59494 - DNA, 1421 bp, Bovine  19866880356039
  misc_feature (1)..(1): n is a, c, g, or t
ntcttctgtctatgggatttcccaggcaagaatactggagtgggctgccatttccttctccaggggatcttcccaacccagggatcgaacctgtgtctcctgcattgcaggcagattcattactgactgagccaccagggaagccaaagaggtgaccaccagcttcatcactgaggtcactgttgcctttctcctgtcactttttacctttcagttgttagacttaaaatattatgacaaagcatctcaggatagtaatttttctccttcctaaaatgtaattttcatcttaattttaattaacttctcccatctagtaatgtaattctcctgggtggtgaaagttggagtgatgggtgctgcttacaaatttcaggtggtacaatgttagtaatattctgatgtttacctaaatagaggagcagcaatgctgcacaaaagacagggctcgattttgatacaaaatctgatatacaaagagacttattttgggaacaaaacaactgaaaatactggggttgtatttaagttaacagctgtaggcattagtcatgagtgtcttacaaatgagttaattcagttccttgggtgaaagagatgcagaaggaagtctaacacagtcttctgatgagatgagtcactgtgattataacagaaaataacacaacggttgaagaaaactctgattcctaattggttgctacattgcaagatcagcctctctaaacagtcacagaccaatagtaaactcagagaaaaatagtttagtgcccagtaggacctcatagattcataaacaatttgagttttcccattacattttttttttttaaactgtattttcaaggaccaagggaaagtgaaccagttctttgattcttgactttggtggagtgagagagggttgagtttaggcagtcatttccccatcttgaatccaagtgttagagagtatatttatttcttaattaatgtgaacagctgtttatgacaaagaaaagatgaaagataagtaaatccattaatacttctttcaacctcatggtttactacattgttttcatttttctctttctctctcactcaccagtcttatattttaaggttctacccttaaatgcagtgtgtccattcctattggtccagcttcatttatcaataaattttttgaaaaaaatagttttgatttccctgtgttttccctgagttatttttcacaatagatgaaaagtatcattctcaaaaccaaatcattcacatcacttctcttcagttgctcccctgagtttccacattcacttaacattaatggcccttcgtaaagacatgtaaccttgacctcctctccagtcttactgacttgtggtttcttcttctgacattatactgtcgtagctattaaatgcatgtttcttttgtat

SEQ ID NO: 59495 - DNA, 2728 bp, Bovine  19866880431937
  misc_feature (1)..(1): n is a, c, g, or t
nagagatgaagtatgaagtgacatgttcaatgtcatgaccagaagatggcaaggcacagattttaatccagtggaaataatttgacagttcattaaaaaatctttttttttaaagtgcaatatgtgcacatatccaactcattggaaaagaccctgatggtaggaaagattgagggcaggaggagaagggggcaacagaggatgagatggttcgatggtatcaccaactcagtagacatgagtctgagtaaaccccaggagatagtaaaagacagggaagcctggcatgctgcagtccatggggtcacagtcagacacgagttagtggctgaacaacatctacactgaaaagtgtacatgttttaagtggaaataaagcccatgttttaaaccactgtgctacttttatctttctgtaattcttttgcataaaacttattgactacctactgcataatcgtttaatgattattactgtggagaccatgctgctgaagagagctgggacttagtagggtagatagcctcatctgtcttcagatcacaaaaaaccctgaactccagactaaatagttcatacttatccttaagcaaatctgggtcattattgatttttaggtaggatagagacctgattaaaatgaaatctagtgtgtgtgctttgggcggggttaggacatcatgagaaatgctgggctggatgaagcacaagctggaatcaagattgctgggagaaatatcaataacctcagatatgcagatgacaccacccttatggcagaaagcaaagaagaactaaagagcctcttgatgaaagggaaagaggagagtgaaaaagttggcttaaagctcaacattcaggaaacaagatcatggcatctggtcccatcacttcatggcaaataaatggggaaacagtgagagactttacttttttgggctccaaaatcactgcagatggtgactgcagccatgaaattaaaagactcctgctccttggaagaaaagcagtgacaaacctagacagaatattattccttctgttattgtctagcatccctttacttccccttctaggactctttcaaaccatttcctgaagggcagttctaatcataatggattccttcagcttttgtttatctggaaatatcttcattttactctcactcttaaacagtttttcaatatatagtattcttagttggaagtgtttgttttcccttttagcactttgaatataccagactttgctttctggcttccaaagtttctgatgagaaatctgttgatggtcttattggggatacctaaagcttgctcatcctgtctccggcaaactatgtgctggcttatttaggaatatgggcacagctacctgacagcaggtgtagaatggatttgagtagatgctactgtgctaagggctgaaattacctgcatcttcctaatcaggcctttccttgaagttgcaaaccttctaggcactagagttccaaaacagttatatcagattcttcaagtgtaatgttgtctagttggagaaacagattcctgatgattcctactttaccatctttccagaatcctctcttatttggttctcttttgtagatttttatttcttctccaatatttgattttcttttctcattgcgatcatatttttatggaacatagttataacagttattttatatcatcttcttataattttagtaactgcttcttcttgggatggattttagttgatttttttttccagaatctgggttacacattcctgatacttcatgaataaagcagtttttaattgtttcctgtgcatcgtggattttatcttatggagtctctggattttgttatatttctcagaagtgtgttggtgacttgttttagttggtcattcctttggttggagtcaaattacaaactttgtctcttggctggcaacttagatatcagttcagttattttatctttaactgtatgtgtttgagttttcccagtacctgtgtagttcaggggtcagctaaatatatcaacagagtataaaagcataaatttggattcacaactatgactttgttatttctttgatttcacctttacttttgaatatctgtgagtttcctgaacttttctctcatcttctagtatagaaaggctgtgggttttgtattgaaatctcagccacttttatggtgctaacttcagtttgccatcaggataaaacctgtagtaaccaaaaacttactctaacctagccgcttctagtcctgtagaaacttagttattacagaagactggttttgagtatcttctaaaattttgtggactttaaaattattttaatatcataatttagagttttatattatcacctcattttatattcaaatgctgaatatttcatgatgattaaatctttctgaacactccttcaaacactttccaaaattgaattctcccaaattatattcagatactgatagagtgattttacaactacgaaaatagaatgtttttcactttgggtatttaaattaaccaacagtatgattaaactctattgggatgctgaatattgtgaagcaaactaaaagtctatgaagcaggtatttcagtattcagaaggcttcagtgggaattttgtctctgtaaagtccaaaggtttgtgatctatgttggtggtgaccttaggaaaaaaatcaagggaataaattat

SEQ ID NO: 59496 - DNA, 3063 bp, Bovine  19866880686251
  misc_feature (1)..(1): n is a, c, g, or t
natagatacttcactaaataagatacccggataacaaataagcacatgaaaagattctcagaaaacctctggcaagaagtctacagagaaatagaaagtgcaaataatgtaatgaatgaaaagggacacataactatacttacagcagatactaaaaagataagaaagtcatcatcaacttaatgccaagagattttaaaacttaggtagaataaattcctagaaaaaccacaacttttcaaaatcaactcaggagaagtcaaaatagccctataaatactaatacaattttgatacctaaattagacaaggccccccaaaaggaaaactacagccacttaatttacaaatgtagttgcaaaacctcctcctaaaatgtcaaaaaatcaaatttaacagtgtaacgcactgtgatgcagctaggtgaatcccaagaatgcaggatagtttagtattaggaaatctatgtcatactctgcacttatagataaaggagaaaaatcatatgatctccatagatagcagaaaaaaatttaataaaaatcaacagccagggaattccctggggctctagtggttatggactcggtggtttcactgctgggactgggttgaatccctaattggggaactaagagtcatgagccccacagtgtggccaaaaaaaaaaaaaaaaatcaacacccatttatcacaaacaccttaaactagaactagaaaggagctttcttaacttgataatagatatgtacaacaacaacagaaaatcccaaaatggaatatgacctgagaacaaaaactatacaaatatactctatatttaatcacattattggtggtagagttagtatcgttaccgcgagtgttttgtctacaggatgagacagaccaaatgaacaactgattgagaactgagaattttttttgtagtaaaatatacataatataaaatttaccattttaactacttttaagtgtaccgttcagtgacactaagtacattcacgttattgtaccaccgtgaccaccatctatctccaaaatgttcatcgccaacataaactctacatccattaaatactaacaccacattgctccccgccccactgaccaaccactgagaaccattattctacttcctgcccctatgaatgtgactattctgggtacctcaaatacgtggaattgtgcagtatttgtcctttggtgtctgccttagggacttccctatagctcagtgggtaaaagaatctgcctgcaatgcaggagacccaggttccattcctgggtcaggaagatcccctggagaaggaaatggcaacccactccagtattcttgcctggagaatcccatggacagaggttgcagagtcagacatgactcaacgactaacacattggacattggacccttgaacatttcagtggggtggtggggactggggagaggtgttagatgtacttatcctccccacagttaaaaatcatgtataactcatagtcagtcccctgcatccttgatttctccacatccattccagatttaaccaaccatggatcctgtaaactcccattgtttaagggtcaactgtatatcatttagaaatatggaatacatcaggaagtaatgtgaatattttcatttgtcttcatggccaaggttttctgaacagtgtaacagaagatagaaaatgtttctttccccaactgctcttcataccattaagggtagaaaccacttgtccttcatcttggaactctctggtccccctaaaaggcaattagggcaataaaacttttatctcccgcaaagacaagacctatatttgagggtagataccttcttatctttccttaagaaaggttctttgtcttgttactgtctctccctctgtctcttgctggaggggaggaggaatatatgtgatatctcctatataatctcctaatttcataatttatggaatcagatatacagatacctcctgcccccaacacacacacacacacacacacacacacacacatgcagcaaagtgatattttccatcatcttgttgccctgtggatgaaaatagaatgtggagaactgagcaaaggtattctgtagggaaataataggtctgcctatggtactaaaacctaatgtttactgttaggataaaattaatttgtataagtgaaaaaacttataagaatcatctaaaataattgaatttggttatttcaaaattggttaatagaattgatatcagtgatatcaaggctctttttcttattacaagcattttatctctttgactcaaaactgtgtgtgatatttggcaaaactaatccaattatgtaaagtttaaaaaaaaaaactgtgtgtgtaattttaatagtgaactttgagttaaaattttaaatgatcaccctataaacctcattatcaaaaaaaagggtaaccatttgacattgaccttaaaatcagcacttgtacaatgtttacatagcagtttggttttacttttactgaattgtatcttaccaagaatgaattaacctgcattacacacttatggttcaacacatgaattcaagacctttatggttaaaggagctgagctcatactgcaattatttaagtatggacacaaatacccttcgaagagtgccttgggattttttcattttcactgggtcaaaccttttctctccaggaccttttgctgcagatgtaattgcagtttatcaaggcagttagtcatacacaaaggatttctgagatgccagtttgagaaggtctgcacagtatttttctagctatcagctatataacttggtgacacaaagattttattcttgttgcacattttttcttcttaaccttgaatagtacttctttgtgtattagttatctcaacagcttttgttgaaaaatagatgaaaattgtctaaggaactgttaatacattttgatattaacatgaaatctgctgcttcagagaaggagattgctaagtaataagtaatgtgaatttcctaaatttgctggcaatcgaagttattacatatacagaa

SEQ ID NO: 59497 - DNA, 2518 bp, Bovine  19866880700574
  misc_feature (1)..(1): n is a, c, g, or t
ntcactcagtcatgtccaactctttgtgaccctatggactgcagcataccaggcctccctgtccatcaccaactcctggagtttactcaaactcttgtccattgagtcggtgatgccatccaaccatctcatcttctgttgtccccttctcttcctgccttcactctttgccagcatcagggttttcccccagtgagtcagttctttgcatcaggtggccaaagtattggagtttcagcttcagcatcagtccttccaatgaatattcaggactgatttcctttagcatggactggttggatctccttgctgtccaagggactgtcaagagtcttttccaacaccacagttctgttataaaattgcttctcatcactttagacatgatacaagacatataaatccttaagaatatagaacatttcccttttttcttcttctcaatcccactctgcatattgaaaaaaagaaacaataccaggatctcagtatcagcataaattaaggaaaggaagttgaggaaatatttatggagcgccatccatttgccagttactttatattcatcatgccattccatctctgcaccaattgctttaatgcaggtaacataactgaagttcagagaatttaaagattttatctaaggtcacagagctaaatgatagagctagaattcatgtgggtctgactcaaagcctaggctctttacacctatgctgtctttttatctgcatcattcagcctttggatgatcagagaaggataagccatgggctcctactttcatcaagctgaaaatcctctggaggaaaattagcaaatgtgaatgtttttactaaattagaagtatgagaaccaatcataattctgcattggaggctaggttttatcaaaatctatataggactttggggaagccaggtggtacgagtggtaaagaacccacctgccaatgcaggagacataaataagggttcagtccctgatcaagaagatcccctggaggagggcatggcaacccacaccagtattcttgtctggagaatcccatgaacagaggagcctgatagtctacagtccatggggttgcaaaagtttggcgacaactgaagcaacttagcgtacacatacacacacacatatttaaaatataattttatatatttatcattcatatcatgtgactcagagctcttatatcttatattttatgaaaggtatataaaagcagttatgccattagctatataaaaagtcccatatgagttataaaatggatctggtcttcttaaaggtattcctgctttcaaacaaaaggaaacagagaatgtaatctagcaacaaaataataatataccagaagacttcagtttttactatgtttattttcatattttaaattatttacagatgaattgttttgtaatgtttcgatttgtgctgtcaaattgtgctgaactggttatttgcctagtgactttgtgcagtttctagaaaggagtgggactgtgagcctttctcctagaaaactcattcctggggtaaacaaatcaaactcatactgactaataagtttatctcgttaacatttcacatagcttttttatgtcataaaattttaataaatcgagggtttttttgttgttgaaatggttgtcctataaaattttcttttacgagggtaatttttcatctccctctacctgtaagactgtttctttacttatcattaatcacacttcatgcaaatcaactacacaggcaaaatgccaacaccaaaagtcttaatgaaaatttaaacattttttaaatgaaatactttcattatgaattaaactacattagttataagacatgatatctaattagcttctagatataaatatagttccattcccccctcaaagagctttacttcttaatttccttcaatattgaacatttcattttaacccttgaactgtgaaagtgttggttgcccagtggtgtcaaactcttggcgaccctgccaggctcctctgtccctgggaaactccaggcaagaatactggagtgggttgccattcccttctccaggaaatcttcccaacccagggattgaacccaggtctcctgcattgcagcagattgtttgccattcgagtcattgcagctaatcttcttataaatttctagagttccatattaaaggaaatgcagaatgtgagaacaatgcagttatcatggatggtgggcatgcatgcgtgcatactcagtagctcatttgtgtccaaatctttgagaccacatggactatagcccgccaggctcctctgcccctggaatttccctggcaagaatactggaatgggttgccatgccctctttcaggggatcttcctgacccaaggattgaactgaatgcatgtctcctgcagctcctgcaggctggttctttaccattaagacaccagggaagccctgatggggtttttatgtcataatttttttaacatagctttttttctgtgttggt

SEQ ID NO: 59498 - DNA, 1779 bp, Bovine  19866880706788
  misc_feature (1)..(1): n is a, c, g, or t
ntaaaatgagaaagaagagcctgaaggattatgcctcttcttgagactgaagcaattatctctcaatatctgaaattctgcttctttgtcaaaatgcagttcaaaagttgagtcctccgtgaagtattacttctgctttggaaggcttatcgcatctccctctacactctcttagaattgggttaaagcgtctgcctggaatgtgggagacccaggttcaatccctaggtcaggaagatcccctggagaaggaaatagccacccactccagtactctggcctggagaaacccatggagggaggagaccaaggatcaagcaacacgagtatcacctggaaacttgttagaaatgcaaattctcagattcttcccagactgtctgaggcagaaactcagggggtgggatccaacagtctgttaagtcctccaggtgtttccaatccccactaaaacttgagaactatggctttcgcaactcgtacaatatttcatttctgttttattgtagcttgcaacgattcctccactggctctccaaggctttaggtatgtctgtttagtcttttttttttttttttatcttgaactcctcatattgctaagaccatggagtttacagtattttgcattcagtattaatgaatatttgctgttaagttgatattatacttgaatttggtatgtcagtacattagttgtaaaatatatatattggatattttccctagaaaaatagcagagtacttgagaaaataattttacatattttctcttgatccagtgagtccttaaaaaaaaaaatgacacaggttttcaaagtctggtattccttgtaccatcctcagagaaggttccttagtgattctgctgtgtgcttcttatcctcttggtaaaattgtaatgattgaccacaggctttgaaatcagatcaatagaaattttgccccagccctgctacattttctctgtgcttgttcaacgtacttaacctttatattcttgagtttccatctgaaaaacagggtataatgctcattttgctaagttcttacaaggtttaaaagtaaaaactgtcacatgtaaagtaatcaataaacataatgctgttatttaatttttggctttattattatcaacttgaggaaagaacagatatacattttctactgtgaataattatagtatgttcaactgattattctaaaagtactgcataattgctctactgtgaaagaatatagtatttctgcactagggaaaaaatacctggacaatggtttattctctaaattgtccaattgatgaaattacttttttctaaagactgagttgttacaaaacccttaaaaagagacaacatgctgtttaagaaagaattgtagacttgaaatcagaaggcccacattagagtcctagttcccttctcttcatggttaggatttgagttaggttacaaatcaaggtgcaagttacttagcaatctgaacttcagtttttcacctttgtaaaataaaaccaataaaaatttgtaaattagttaatttcattgagttgctaaaagaaataacaaaaccataaatgtaaaagttgtaaagtagtacataaatacaaggtgtaaaaaacaccttgctgtggctattattataattattataaaaattgagtttctctgctactcattatttgctagtttcttgtattatgtgggacatggggttgttttggagtccaagtgagaacaaattgagtaatattattttaattaatttattttttaa

SEQ ID NO: 59499 - DNA, 2955 bp, Bovine  19866880735752
  misc_feature (1)..(1): n is a, c, g, or t
nttgagaaatttgtatgcaggtcatctatctactactactagctactactagcaataaagactgggtttgcccagtggttcagtggtaaagaatccatctgcaatgctgaacacataggctcaatcccagggtcaagaagtcgggaattctttcctgaagaatcccacagtcagaggagcctggcaggctacagttcatcggatcacaaagagttggacgtgactgaagctactgagcactcacacaagcatgcacagcaataaagactgaactgctatattcacatgtgtaaatttcagactccaaagagtacatataatatgcattcatttacatggagttctactgagcaacttcactttcacctttccctttcatgcattggagaaggaaatggcaacccactccagtgttcttgcatggagaatcccaggcacgggggagcctggtgggccgccgtcaatggggtcacacagagttggacacaactgaagcgacttagcagcagcagctaccaaaaaaactaaatagtggtgaaaaacatcatcataactgttacatactgaatatgaggaacagaagtgggtattaacttagtattcatagtaacattcaatatcttgataggagtttggattatgcacgtctatacattagttcagttcagttcagttcagtcactctcatcaaatgctacacttaagatgtatgcatttcccagttggtaaaacctcccttaataatggaaacataagtgtagagtcagttaattatatgcatgctgatgtgtctagggtaaagtatagagctgtctgcaactaactttgaaattaattcaaaaaccaagattgattgattggtaaagataaggatagatggattgatatatgattgagaaaatatggcaaaatattaattatagaatctaggttaagactatacaatctttaactattttgtatactttattttttttttttataatggatgggtgggaaaaggacagttttccctctttaagttttcaactcttttgaattgaaatactcaaaagtacttcctcacaacctgtcgggccttcaaaaatgccctttattaaataatataagacttgttagggcttcccaggtgacacagtggtaaataagtcacctgccaatgcaggagacacaggagatgtgcgttcgagacctgggtggggaagactccctcaagtaggaaatggcaacccactccagtattcttggaaaattccatggacagaggaacctagagagccccagttcacagggttgcaaagagacacaactgagcaactgaatacacatgcacagaagacttgttagattattttccagtatctttcttttgaaatgcaaactcagacacatgcaaaatatagggcattgctagaagaagaaaatctgtgtttaagcaactagttatgtacttggtactgtcattatctaatttaattcttgagaaaatttttaaaattaggtattattttaggtgccaaggtcatgattttagtatcagtggccccttaaattctataataacttagaaatcagtgttccatacaacactgtagattttattaatatcttgatgtctttggggcaacaagatcaaaaatgttttaaaaactctgaatacacattctgaagaatcattttaaaaaggagaaaagatcttccttactttccatcaaaatccagtcctgtatgttagcaagggagctccttaggagatgcttttctgtcttttcataagtccaagttcggttcaattcggttcagtcactcagtcgtgtcctactctttgtgaccccatgaaccgcagcacttcaggcctccctgtccatcaccaactgccggagtctacccaaacccatgtctattgagtcggtgatgccatccaaccatctcatcctctgtcgtccacttctcctgccctcaatctttcccagtatcagggtcctttcaaatgagtcagctctttgcatcaggtggccaaagtattggagtttcagcttcaacatcagtccttccaatggatattcaggactgatttaggactgactgattcgatctccttgccatccaagggactctcaagagtcttctcctgcactgcaatttgaaagcaataattccctgcgataaacaatgtacttttccttcattataatctggtgtcagtaaattggctctactatgtgttgagcaagcaaacccagtctggttttgtaatgggagatgcatccagcaccactggttctgcaagacccttgaatatatatgtcaccctaagaattctggttagtgtgcttcatgagaaacagaatattatagattagttacatataaattgtgcatcagaaagatgctaagcaatattgacataaagtgtatcgagagactagtttgagccatcttgcaattgtggttttatcattcataacatggtataaatttacaactattcctccattatattattgatattatcttctttgggggtaatgcctttcagtatcaatgatttcagaaagagaaagggtatattgaataaaacaatcgggcttaagatctaaatttctgttggaaatctgctgatgaattgatggatgactaatttgataaaatgttaatgttatttgccatgaggtccctgaggatatctctgactacatgaaaaccagaagacacaaatatgcttaaaaagtatcaatattcaacttgaatattttgtagcaatgctaaaactgtgccaaaaattaaccatgtaataaatgcaactacagaatttaagtacacagatcattctttggtacatgacttccacttgaatcaagtagaggtgatggaattccagctgagctatttcaaatcctaaaagatgatgccattaaagtgctgcactcaatatgccagcaaatttgaaaaact

SEQ ID NO: 59500 - DNA, 1356 bp, Bovine  19866880758621
  misc_feature (1)..(1): n is a, c, g, or t
ncattgagagaaatattagaagggatttagagtattctgtttcccgagtacatgagcacaaatgaaaggttagagtgggatctgatattccaggtagaaatcaagttcagctaatcctgatattctaaaataataagcttacacaaagccactccccagtgtccctgaaggccatgcccaaatacgaactctctcattaaactttctaagaaatcccagccatcctttctaccttggtgttctaaagcaccaccatttgtctggttttattatgtttttcatagacatctcccaccccaatggcctccaaacccctaaaattagcaaccaggcattttccacatttgtgattcttccagtgaaaattatattatctggtacatcaaagctgtaaataaatccaaaatgaatgagaaattaaagacagtacatcaaattttttggatcataggtataatgtaggagttttctttcaatttaccttattaaaaccatatgctaacttccatttgcagttgaactttcatatcatagaagagcaaagaatgaccctgtgatgatgtaaagatggaataattcatcttctctttacctcaggtagacagagtacggaggccgttgagagcatgtttaaattgtgtgcaaggtacttgcacaccccataccttagtttcctcttctataaattcctggcaaaattagatgttcttgggggcttccctggtggctcagatggtaaagaatccacctgcaatgtagaagacctgggttggatccctgggttgagaagatcccctcgaggaggacatggcaactccagtattcttgcctggagaatctcttggacaaagaagcctggcgggctacagtcccttggatcacaaagagttggacactgaatgactgaccacatcacacagctgtgggaaagtgggcaggagaataacaattgtatgtgggttctgaaagaagatatgagggaagctctaaatttttagctagagatgaaaattattaatatgtgtgattaatgaacagaaaagggacatgcatgctcgagttggggagcgacagaatggggtggttcttacaatttgcagagacccatgcctctgaagtaagaagtatatgccaacatttagtcatgaaccaaaaaagatattgaagaaatggtaaccatgctaatgaaagaaataaagattaatggcaagaagaataacagggaggtaaaagattgcttagggaaaaaaatagctaattggcagtactcatttcaaaataaactatattctgcttcttacacccacacaaaagtgaaatcaaacttgccaaaaggaatttgccaatgtcaaagca

SEQ ID NO: 59501 - DNA, 3072 bp, Bovine  19866880881381
  misc_feature (1)..(1): n is a, c, g, or t
nctaaattcttcttcaattttctaccctctttttctctcttttttgcccaaacttatgtctagcttttctgtgtcttatacttgacacactgaagggctgggtcccagcgctcttcaaatccctatgtcccctgtcctctcacacggcttcactcttttgatcctctggtcccctctaccttgaatgaacttttctgcttctttctctctttgtgactcagtccagatggcgtatttgtcaggagacctttgctgaccctttcctcagctcagtctgagtgttgtgcctctcttagtaattctggcatcctgcccttactcaaatcatatttattgctttggtttaatatggtatgttttatgcagtctcctaagtttgaattatctcacttttttcattcatatttatatatcaattgttaggttcaatgtcaggtccagaatgagcagttaataaatggtttaaaaaagttgtactagttgggctaaatgatccaaaaatcttggtgaacaatgtagatcttttgtcttatctacttttaatctgcagggacaaagaacagtaaatatattttcacctgaccactaataaagtatttaattcagtctttagttgttataattaaaaataatattctagaaatcttagagtaatgattatctacaatagtctttcaaatgggtctgatcagttatttcccttcctgcgttacttgcttttccacgaggtagtgtcgatttcacattcccttaaatataagctgagttgttgacttgttttggtcaacaaaatgtggaagaagtgactgtaagaagattaaaggctttaattttcattttgtgggcatttgactgtaatatatgtggtatatctactgtgataccaccatactgtcaggacaaatagtcatgtggaggaagagaggccacatgaaggaaaacagtccatgtgaaggaaaactgaggcccagatttatgagtcaagcccttctgtacattttaacccagtcctgcagccaagttaaatgcacccaagtgtgtagtgccaggcacttccagctggaacagaataaccactcaactgagttaaacaaaccaacagaaataacaaatcattgctttaattcataaaagttgggtggccttgttgtacatcaatggattactgaattaccaggtttaactttgcattccctttaaaaatctatcttgacattataactttgtactaaaaaggttgatttctaattatggccctagctatgaaggaagtcaagcatggtcactcagtttataagaatcccattgagtgtttcccgtgggtggacccttatggagtgcactatggaatgagcacaacccagaactgtgcaccttgcccagtggtgataagcacacagtaaaccatcattagatgaataatgagtacagaagacctagaaaaaagagcaactggtaaggagatagtaagtaaaggaaaagcattgacataattaagaataaacttactaacctgaaatcatgcaattccctaataatttgtccagtataatgtagtaatgacaatagccataagaaaacttttatggaggttttctatgtgcccagggaatagcatctcatttaatactcagaacaatcacgtaagacagttactattaggaaatccactttacagtccatgaaattgaaatatagagaagttaaataacttatgccaagccacacagcaggagttaaagtctgaaaagttctctgacacggcagccttcagggttaactactagttgtactaatgtgtaatttttgtttgtataataacctgtattataaatgtatacacatataaaacatacaatgtaacagaatattcataaacctactatctatgtatatgtatatatgagtatatattatttatcatcttaataatgcatactgctgttccaagatgtgttggaacattgatgtagtgatttgccttgattagtggcttattgacagtctgaccactcttgcctcctcctccttccttcgcttatctggacattgttgtaaaattctccagtccccttcactgctcattggtcacagcatgaaccaacttgccatgcatatccattactaaagagtgagaatctgatggtcaaagagattaaatacattttgaacatatcaaaatcggttatttactcattactgtgctgtgctgtgcttagtcactcagtcatgtctgattctttgcaaccccacagatggtaagctcctcagtccatggagattcttcaggcagtaatactggagtgggttgccataccctcctctggggaatttgcccaacccagggatcaaatccaggtcttccacattacaggtgcattctttaccatctaagcaaccaggaaagcccaagaatactggagtgggtagcctatcccttctgcaggggatcttcccaacccaggaatcaaactggggtctcctgcattgcagtcagattcttcaccagctgagttacaagggaaggccttgctcattactattaccccaattaattattactccatagttttacaagtcagaaaaattcttattacctcctctgtgatcactcttataaaatatgcagtgaccagaataggagggttgggagaagtcaattttaaccattcaggcacatacacccatacacattctgaatgctatttcacccatcaactctttgccaccaacagtttatttgactcacagtcatggccaatcactgccagctgcagttggctgacagcctttattgatgttgtcaggaccttttattcatattttccattaatctcagatgctttacagcatatctaaagacaggaaaacatattgggtcaaatttagaactatttttgaactcagtggtaaaatctgataagccaaatctagatttaaaccagcaaagtagctttgaaatgttagtttgaaacaactcaaaagctttcttagatgtcagttccttgtgggagaaaaaagaaggaaatctcattttaaggatttaagtctagttatatcacaagtacaaca

SEQ ID NO: 59502 - DNA, 1856 bp, Bovine  19866880890935
  misc_feature (1)..(1): n is a, c, g, or t
ntgacaggtaaagaaactgaaggcactaagaacttaagaaaatgaccatagaagagtaagcataaaggaagcataatttttaatctaacaaaaatgtattgtatagcatctcttgcttgaaaacgcctcacagagaatgaagcatgtgagttgatacttaagggatcaggcttctcttaataaattaatagaagtagaaaagagcattcaaagccacaaagaccgctcccataaatgcactatcaccatcacgcatttgacagttgcatgcaatcaggacactatatctccatggtttccaacctcaaatggcttgtgaagttgcccagcaagcctatttttcttgctagagtgttctctccaatgccatttcatgcttcttcatcatactgaaacctacaaataccctacttcctgctcactcctggtacatggctctgctttctatttcataggagctaatcaagttaatgtttgtaatcacctcaaattcctacaatgtttgggctaagattatcagagaaaatacccatctaccttatttatgttatatattggtatttttaaaaataagtaacatgtaacaaatcattatataattatttgtcacctaaatattccagaggtctcaggctaaataaatatgatgagcctaggaatcatgggttcagtaaatatgtaaagtaaatccttcttagacaaatgataataaacaaaatccagaggtaaaaagtcaaaggattatctaactagcccgtctgataagcttccatatttgcagacaagccaaataaggagctgaccaactgcagaatctttcctgtaacaagaagcagaacactgaggatgtcaagtgagacaggtagggtcattaggccagagagtcatgtgtctgtctcagagatgagattaagatttgcatctgccctaaaccaacccctagggtcttgccatgcaaaaaaagacatgccctaaggacagattcttccacaacattttctgtttctacatttaaattttgcatgtaccaatgtagaatcatctagaagaggtcctctcttcctatatataaccaaaaagaaaaaaaataaataaaaggaaaaaagagagcaatacatatagtattctgtgttttgaccacttcaccctcgtagttttagagactggatgtcaaaattacaaagttttaattagcctcctgcatggcagcaagaagtactgagaaatctatggttggttgcttttctcatccataggctctaaaattgccattctaactacgtttttgcttatattttacttcattgaaattcctttcccatattaagatcaattttgtgcagaacgttgtctcatccaatatcctcagagagctagcccttaaagattcttctttctgttccctgtatcttcaaatatttctctcttgtctccttttctctggcatttaaacatattaagctctatcactatcgcataaaccaacaatgatttgctttttacacaaaccagtggagacttctcagtcaatgctttactttatttgatctatcactctttgaaactctgtatctcaagaattttctttattatcatcattttcttcctgcttttctagtcatgttttatttcacttgtgaactctttcctccttattgacacttcaaatattgatattttaagtgacacaatcttagatgtagaacatccaaaggactacacacacacaaaattattagaactactacatgcatatagtaaagttgcaggatacatattaacatacaaaaataagttgcatttatatatactaatgatgaactacctgaaaaggaaattaagaacacaatctcatt

SEQ ID NO: 59503 - DNA, 1482 bp, Bovine  19866881017300
  misc_feature (1)..(1): n is a, c, g, or t
ntctattgaaggctgtgcatagagaattgataatcaagagagatgttcaataaacttattttattgctattttagtattaattttatgattacccatgttctgttggccactgtacatacattgtggtaggctggataatgaaagatatctaggtgctaattctcagaatctgtgaataaatggtcttatatggcataaggaattttgcagatgagatcaaatgtaaaatcttaaaacaaggatatcatcttggattctgtgggtggtccactgtaatcacatgagtcctcataagaagggtgaaggatgagtcaagaaaaagagatgtggcaatggaatcagaggctcaagtgatgtggttcaaagattgagaaaatgtccataatgcagcttctataaactggaaaagacaaggtaatagattgtcttctcaagcttccagaaggagcacagccctagtgacactgctttgggacttctgatgtcaaaaaatttaaggaactttatttttgctgttttataccactgagtttctggtaatttgttatagtgacaatagggaacaaatacattgtattatgaaatcccaccagaattctctaaattgggactcagattttcaatttatagatgaagatttaattttggcaaattaaggaatatgttcagcttctcttcacaaagttgagatttgaacgtgggttcctcttcctctgaactttatactctttcacgcccttccatcaccagcatagtgcagaggccctggtgctcagctccctcagttggaattccactttattttttccagggcagagttattcaacatctccagaaagaatcataactccatttttcctaggattcttcatcaacaaaacagtagaataacagtacttaatctacagttttgtcataggaagtaaaggaaatagtctagtatttagtaatacatcttcatatctatctatatagtctggagtcctttataaccaaatacatccacaatttgatttattatccaaactctcaaacctgcctcacctcctatatagtctctggattcttatagcttcatcatctactttatattttttgcacgttattttctcttccaacctccagctagaaaacttgtcacctgtgactttcccttctgttgtacacacattctgaaaatctagttgtttacatgaaaaatgtatcacttggaacccagttatgggtattgcatctcatttatatggtcaattgtcttcctttcttccctcccacacaatctagaagcttatcctcctgtgattaccagtattttctaagatctccctctttaggctttaccttcccttagaaattgttaaagaattccagaaactgattccattcaaaaaaagtcactttttcttccaagggctagatgaagctttacactgataaagtacactgataaagggagttgctgatatagagaagcctggggg

SEQ ID NO: 59504 - DNA, 1489 bp, Bovine  19866881020535
  misc_feature (1)..(1): n is a, c, g, or t
naacacattacaacatatgtattttatttcttttcaggaagtgaatgttgtaaaatctttgggcataaacattttgttaatattgaataacaaattcctgtgattctcatctttgcttgcacttagttttaaatgactcctttcaaaaaagtttacacttttgcataagcagttatttcctaaaaaatcctaaagacaatggtaataaaaagatgggaatagagatgattaaataaaattaggcataagcatctttcaaatatccttactaagactgaatcatgaatagatacatttattaaataaatgtatatctatttctaaatagttaacaattcagcccaattcaatttgtctacatcagaaattatttaaagggatggtgaaaaaaattttaatttacatttggataagaagtaataaaagtatatatgtaaaagtagtcttatcttttgtctgttcaaaccacagttatacttagggagtctgtcctacctatttgccaggagtccattcaaccagaaagatttaaggagtttctttatgagaatcaaaaatagacccagggcattcagctgtcatgatgaatcagaaatctaatatatgaatcattttccacagtttgtgttttagattgattcattaacaaatggctctgatttacagaagttaataaattgtacttgatagttggaactaaaaccacttgagtaagtatgccatcatttactatgtaatgttagtcctgtttagacttgattcctattaaatcatttctgaggatcactgatttctttattctttctcctaacttgagggataagtttcagagaagcagtgtcttccactcactgccatgcatgattctgagtgatctattaagacttttaatttaaaaattttatccatgtttcttataaacacacagtctctgctttactcatatctatataatgatcactgacacattgtatttgtcaggcaaatgtcgatcataaagtttgctgaaaataaagacacagtaattttgactttcccattaggctccccctcaacaacaacaaaaaaagaaaatctagattgaagtctctactagccataatagaatacgctaatttcaggaaataagtgttttgatggactgttttatagagtaaggttggcattctcttggaaaatctgactttttattattttaatgacaagtatgttttataatgcatgaattacatgtgtagtgttgagatagtctctataataattgaattcagctaggtgggccataaaccagtttaaaaaaataaacgatctgttttaattatagagcttcccttggctcagctggtaaagaatctgcctgcagtgcgggagagctggattcaatccctgggttgggaagatcccctagagaagggaaaggctacccacgccagtattctggcctagacaattccatggactgtatagtccatggggttgcaaagagtcg

SEQ ID NO: 59505 - DNA, 858 bp, Bovine  19866881037088
  misc_feature (1)..(1): n is a, c, g, or t
ntgaagcaagggaaaagggttataccattacaccttgcagaaaatccaaagagataaatatttatcacacatgtgaagttggaatcagattgccctaacacttacaagacagaaacctagtcttaatcatgtaaaataacaatatgataaatactaagtgcttgttatttgtcaatgattattttaaatgttttacatgcattaatttatacaatcttcataaaacctatgacatcattagtatgatcattcttgatttacagatgctggaatttaaatatacagatattatgaaatttttccaagttcatatacctaataaatggtgcaaaaaggattttaacataggtactcaataaatagaagctattttttacttaaaatattttaaagtgatgaactaaaaatctctataaaatactggctgaaacaacttttcaaattgaaaaaactctgcaaacatcatatttttattgctggttccccatttccagagattaatgtattacatatttcttatataaagactattcaaaagaagagtagattatacagaaatggaaatcagcctaaaatattcgttagccaggaggcattgttctactaaaaattactggaaatagtaaattaacctagggcaatactgtattgctgtatctaaatgataaaaaatgtaatttcatgagtcatttatcaaatgcaactgaataaattactaagagttcaaacaaacatgttaggaaaaaattaacaagtgtttaaaaaagaaaacattcaacattatgtccacatatttatagggtgtgtgtgtgtgtgtgtgtgtgtgtgtgtaaattcacagtaatctgtatacatgtt

SEQ ID NO: 59506 - DNA, 1454 bp, Bovine  19866881112246
  misc_feature (1)..(1): n is a, c, g, or t
ntcatatatcatgttgtaattgcatatggtccttcaatgaatgtgcttatgtattatatgcctgataaactttcactaaacctaaattctaagtcatttaaaaattatgttgtaaagcatactcatttttaattttaatttagtgtcatactgtacaatctcattcctaaatcatggctatgtttccacttggaatcatttaacttttccgccttttatcatgttaactggtgggaagagtaatatgttacagttaaatattgtgtgattaatatccataattataagatgtgactgaattaaaatcaataaccctttatttgaagtagatatctcttaacccttaattgctgatttagtagttaattgagaaaatccttgttaatgatctgatgtagctctgaagactgttgaatgagtaagagatttctctccagtagaaatagttttcccaacagcatacgactgattcaaaagaaagattggtggaggggacaaggaaattcagtggttcagtctctctcagccacagtcagccatgacatacacacagaaaaaaatacgtaataggaatttttcgtctcaatgcgaatgttgatcaatggcactcaacataaaggaaaaagtcagaaagaataatattccctagaagctatgttttaggagcacatgaaacatacatattttgttacagaacacctatctgttcatccttctttgtctcatctgtcttttgcttgactacttcttccttcttattcactcactgcttactttgctgctgagataattgttcctggaaaggagattgttaatggttctggcagcaaaaattctccagaattaaacatctgatctcatctgtattatattccttatgctaattttaaaaaccattgcccttcacagactttacagagggatttctcattttaaatatgtgttatgtgggaaagaaacatgatcaattttatgagatattctgtgtagaggaaggtagaaggaaaaccatattcactgaagcccataaggcatcaagtattgtggtagatatttcagatacggtatttactcaaattctgacaaccaccatgctgctgctgctactaagtcacttcagtcatgtctgactctgtgcgaccccatagatggcagccccttagctcccccatccctgggattctccaggcaagaacactggagtgggttaccatttccttctccaatgcatgaaagtgaaaagtgaaagtgaagtcactcggtcgtgtcggactcttagcgaccccatggactgcagcttactaggctcctccgtccatgggattttccaggcaagagtactggagtggggtgccattgccttctccgataaccaccataagaagaacttattattattatttccatgttaaagataaaaaaaaaaaagactcacagttgttggggtaacttga

SEQ ID NO: 59507 - DNA, 2209 bp, Bovine  19866881156598
  misc_feature (1)..(1): n is a, c, g, or t
nattttaaagccctatggcaagaagcatctttcccaggaaagttggtcctatttatgcaacttttacaaccaagagcatcaataaaactggctcactgaggcaaaactcatacatcaaatccccctgagccagtgacaaagtaagacaggtatgtagaaaccactgaattataaatgctatggttcaattcctaagctattgaccaaggaaagaaagccaatgtaatggccagtgatggctggactgtattatctactgatgacaggaatgacattttctcataggaaaaaagcctttgataactctctactttattttagcacttgcagtacttgcagtatcatctcacaagtatagtgataaaggaccatctttctgattttgggtggtgggaagaagaaaatattttaaccttaatttatttgaggaatctttaatatcagaagcatcaaaagttttccctttcctaatgaatactctcttcaacaatccataaaaggtcagcatgccaagccattaacactccctcagtttctaatcaactatcacaaaacacagtgtcttaattcactcagacacatatatctctagtaattccctttaatggtaacaaaagttcagtacatgaatcataaagataattcaagagacatgaattgaagcacttttcaaatgcaatctgagacttgttttggaacataagtttagatttacattcagatacttgctcaagtagaaaatatgactttttaaagatacaattttcttgccagctctctctctctgtcttaggatcaaacaggttgccttttacattgtcaaaaggttagttggctatttgtgatgaaatctgacacagaaactctttccatctcttctcaaagatgttatagaaacttaccaaatgtcagtactgctgacaactgtgtcccagcagacaatgaagtaaatttctcttctcattgcattttaaaatgtgatttaaaacttgagacattgtgaccaaatagaaactttaaaaaatatcagtaatattacatatgtacaatttatcttctagtgaatactgaaacctaaccttttggttttatgacaattttaagttttgtagagaattaacagatatgacaaatttaagatttctgtaaatttttacacaggtaccccacagctacaatgattatcccaaacacattttcctgaacatactttctataaagaaaaatctaaattaaatacatttctgcagttggaaaaaaaaaatcttgatcaccagaaggttgaaatgattttggagacataaatatactaaatataaatttatgataattgtgaattgaaatttgtaaatttaaatcactgagaaaagacaagtcaaaaaattattgtatcttggaaatacttaaaaatcaccattataagggaattgcagtaaaagtcttctaacatattgtttccaaaacagagctatattttgtcaaataatacactctcttgacaaatagactcaggaaatatttacagcaacccaaagctatcacaaagagagaatgaaattttcatgtagatggagaaagtggcagatttttaaagaaaagcctgttcatcaaatgttctttttacaaactgtagaagatttgacaggaagatgacaagaaagcaatggtttcataatccatagcataaaaggaaaacagatgtgaaaactggataaagatctgttgatgatcaacactcacctttagctaaaaatctttaattagcagactttatgggtaagtgtgtaaatttgagacacttaacccacaaattaatcagatatttttttctttttttcaggaccctagttcagttcagttcagtcattcagtcgtgtccaactctttgagaccccatggactcgaggagcctagtgggctgccatctatggggtggcacagagtcggacacaacggaagcgacttagcagcagcagcaatgctatattcaagctgagaatagaagtcaggatatatgctgagaactggtaatattagactagaacataaaataaacgttatcacaaaattttatttttccttggatttcattctctttcactgaactacttatgataagaattcaattaaatatactgtatgaaatatatgaactagatataaaccaaaaaaaaaaaaaaaaagaatttgctgaaaggtttgcaagtca

SEQ ID NO: 59508 - DNA, 1215 bp, Bovine  19866881247530
  misc_feature (1)..(1): n is a, c, g, or t
nacatattttttaaagattaatctattacctttgtgtaggtctccatgttgtttcttttttaaggagagaactttaggcatattttccttttatttaagtagcatacattccttaagagatttgaccacattgaccacatcatctctcttcatcctagaaacgggaaggagcgggccataccacctcagaatctaaggtgacatgtatgggtttattgtacatgtttataaaaccttccgggtccattaattctgcagagttgcacaagtactttattatttgttctgggaggagtaattcaggtgcagcttggtgcaaactgtctcctggtcctttagggctcactttcacagtcttaaaaaggtgaagtgctagcttgtgtgtttggatgagaaattccatcatgacctcttgtagggactgtgtctgtgtcacatcatctagatacatgaccggcgcttttattactgaaacatgccactgcataaagagccttgttgggatattgtgggacatgacgataatcttcattccttggataaaaaattccatttcatcctttttatggctcaggtaatctaagagaatttggtaaaaagtaccactggaggactccaggatatgcagaatggaagtaggatatatgagcaacagtcctgtcactgcttctcccaggtgacgtttcaaaattgactgaaacaattgttcgtagtagtcagcaatatcttttttttctatgtttgctgttatcctggccactaggaacatcctatgaagaaggaatttctttagttgtagtctttgcttttcttcctgaaattgcaagtaattgctacgtggaacttgtggcattagagattccagtggcaaattctttttgttggtctttcggggatgggttccgaaggacatgatgagtcttatttattctgccagatgattccagtttttagcttattaaaatagttacattacttctttggtgataaactcatttttgtttcttgtgacaaaaaaaaaaaaaaatttagttgttcaaatgcttccaagtgtaatcaataaatagtgtctttgaaataaaagagactgttgaaacaagaatcaaattatagaattttgttttaaaatttacaatgagataactaacactcatatcctaggaagaaactctccaacaaactgggggtaggaagaagatagagctaatctagaat

SEQ ID NO: 59509 - DNA, 2590 bp, Bovine  19866881375990
  misc_feature (1)..(1): n is a, c, g, or t
ncatactaaaaagcaaagacattactttaccaacaaaggtctgtctagtcaaagctatggtttttcccatagtcatgtgtggatgtgagagttggactatcaaagaaagctgaacaccaaagaactgatggttttgaactgtgttttttggagaagagtcttgagagtcccttggactgcaaggagatcagtcctgaatattccttggaaggactgatgttgaagctgaaattccaatacttcggccacctgatacgaagaactgactcattggaaaagaccctgatgctgggaaagactgaaggcaggaggataaggggacaacagaggatgagatggttgcatggcatcaccaactcagtggacaagaatttgagtaaactccgggagttggtgatggacagggaggcctggcgtgctgtagtccatggggtcgcaaagagttgaacacgactgagcgactgaactgaactgaactgaagccatgatattgcatatggaaatgtccctattgttggtattacctgcagttttatgtgaagtgctcaggaattacctataatctagcccttggctcagtgaatatcagtcatacctatggaatccttactaacatggtactgattctgccccttaggttgcctgatgtttataatcaaacagagccattcaatttatggttactgcttgtaaaaccatcttaataggatcaagtgattcttttgtagacttttaagcccaggcaaagtataaattttttaattgaccatatttaggataatcctatttcattcatcactgagcaggggagtatcatcacattattgcccctttgcctgacattaatatcactaagtgattttttttcactatagttttggaactaaatctgaggcagacaatcacaatagcttatgaatatgttagatgaaaatatattgattattttcaaagacagttttaagttaccaacatataggagaaatagtgaaagttctgataatagaactacattattttttgcttataattactcactaaagcatgtattttttcactgcatgttaataaaccattaataataatatactaaaattatatatggtagaattatagtttttacatttaataaataatccagattcatgaagaatttggcctaggcttgattttttacttggtcataactagaggctgagttattactgaagctagtattattttatacttttatagcaggtgatggtatgctcagcactctcccaaacattggaatgaaatttgacttatcagaaaatcagaatatgacaggttgatgtatgtgtttcttttcagaggtctttcagaagttgcatatatgtcaggtaattatcttttcagtagaaaattaaagattgccttatgaaaacttttaagtttccagaaacatcaggaatatttggttaacatgtaagccttagttcttttcattaatgctgaatttttattattttactcaaagagaatatcagaaataactgtggaatgggaatacatgtactaccttttgttgaaagtgaaagtgaagtcgctcagtcgtatctgattctttgcaaccccatggactgtagcctaccagactcctccgtccatgggattccccaggggaaaatactggagtgggttgccatttccttctccaggggagcttcctgatccagggatcaaacccgggtctcctgcattggaggcagatgctttacctcctgagccaccagggaagcttttttagaaaatgcagttgttatatgcaccatccctgaaaagaaagaaacattatgaagatgtgctatgctaatcttgactgctatttacattagacttctacctactgttttcaggtggagggtcacccaagtcagatatacagatatatcaataataggctcaattctctttattggaaatttcttaaatgaataaaaatagtacttgagaacaaacatgtatataggaattgaaccatgcattttttaatatgtattgatacatttgaaaacacatataaaatttatataaatattgtaaagcactttctgacatcagtactgaatcttcttagctttcaaatgtagtactgtcagagctatagactctattttttatagacggcatttctcgagttaacctatcctcctcatcccacatgtgtatgccccatgtcattattgtaccacagtttgatactgtgatagtcattatttttggttaattcctaaaaattctcatttttgcattaataagtattcaaaattgatttacacatcatagcttaggtaaagtctacagtgattttgctccctgctattatgttctacagaatgctggctgcattttgcaggactgccttctatctgtcaggtaatatagctttcactttttcttaaatgtgtgttcttttgttaacttctgatagacaaatgtgaccaagagtatccttttcttgggaaatttccttttatcttgaaatctcagctgaggaatagatgcaaagggccatgcagcttcttaataatactagaaagactatgtggatccctctgctctagcg

SEQ ID NO: 59510 - DNA, 1052 bp, Bovine  19866881381757
  misc_feature (1)..(1): n is a, c, g, or t
naataaaatatactttgaaatgctgttgccatataagatgagtagtagtttaaatatgatataatgaaatgcatcattgagcagtatttggataaaacataaatcaaattataggaacaatgcaagggtaattaatcgaattcatttagcatctttgagaatcttttccacttggagtcaagataaaaagagataattttgttttgcttattttatctgcagcaagtaaagatggaggaaaatctgagacagtaatttaagaatgaatcagttggagttcaaatccaagcttgagaagtgaacagctactcctgagtgaaaataaatcctattgagaagcaaatgaagattagtaggattaaatgtcacatgtggaggatctaaaagtggatttgttttttattactgaagatatatttatgggttaattgtacggagattcggctcatttgtgttttctaaactgagatgagtcagaatgtctctggggcagaagaaacttgtattccttctgagaatgtgtattatttgtttcagtattatgcatttgcagctaacagtcccgaaaaaaagattataacttgatagtctcagaaggaattaagtgttattgacatggtagttatattaatagttacaatattttctttatccaagcaatataatttgtatacacattcaaattgctttagtattaatgcccagtatttcacacaaaattttaagaagttcaaggcaatagctaaaaaaatcattatttctaaaaacttgagttacatgtagaacatgattgtcaaatctagaaattcattttttattgttgaaattgaaaaaaaatagctttgtaattattgataagctttttctaaaagaagcatatctcaatttttattaaattatagaaaacattatttggagaaggcaaaggcaacccattccagtactcttgcctggaaaatcccctggacagaggagcctcctacgctgcagtccatgggggcgctaagagtcagacgtgactgagtgacttcactttcactcttcactttcat

SEQ ID NO: 59511 - DNA, 1146 bp, Bovine  19866881433394
  misc_feature (1)..(1): n is a, c, g, or t
ngactgattataatttttaaaatctataaagctcttgaagctgagacaggcactaggaaagaacaaagtggcagtcctgtttctactggatgtacatatgtgtcctgattattgaaaaggaaaagaaggaatcaactgctcttcttagtatctccttgatggtattggagctttgaggattgaattcatattctttccatgaaagtttcatatttgacctttcactgttatgtgtaagagactgctttaagaattttaatattctctaatttgttctgttacactggccacgaataaaatcctgtttcaaagacagtgaattttcctcctcctctgaccaagtgactaacactgattgaaaaccctctctaggtccccactgtcttcctggatctctgtaacagtttgggtaatgaaacacttgctttagacagttttctttatgtgtttattttatgtttgtgacagggaaaaataatccttgaagactgactaacttggatctcagcctctttcttaaaagtttaaattcttaagtttttagttttatcagtattagaaattaaggggaataatgagtagcttgtaggattgttgagagtataaaatgagatcagtttcatgaagcacttactagagtatatgctaaaagtgggtacttgatgtttttggacattttgtgtgtgtatgtgtctgtcttttgtgtgtatcactgtattcatgtgacattaattttttaaaaatatcataccattctcctacaagtctacaaagtaactttcattttctgatgaaaatatgagcaagtgataggagtccttatcctcttcaacccaccatctcatatgaaagcacaatccctgatagtaaattcaaacctggtttatttgaatagaattttcagggtgtttttatctcacaatttctttttaacatttggactgtttagaaattccacaaataggcaaatgagcattggatgccctaacattaatattactaatattgatttccctaaatatgtgactggcttattttattaaaaaatggtcttgtattgtatctagtttgttacctgttacttagaaaatactcagtatttgttgaataaattaaattaatgataagaagtataacttcctacta

SEQ ID NO: 59512 - DNA, 882 bp, Bovine  19866881598533
  misc_feature (1)..(1): n is a, c, g, or t
nctgtataatttgctccattgcccaaatactaaaggcttcccaggtggagcttaaaaacctacctgtcaatgcagaagacataggagacacgggtttgattcctgggttggaaagatcccctggagaagggcatggcaacccactccagtgttcttgcctgaagaatcccatggatagagaagcctggtgcaccgtggtccatatggtcgcagggtcagacacgactgaagcgacttagcacgcgcacatgcatgcgtgactaactactatctagtctcatctcttgtgatttcctttcatatttcacgtcttcacttactgaaattctttccattcttctagcacactatgactcttcttgcccataaatatgaatgtatatcctctgccaggaacactcccctcctactccttgcctttaatttggctcacttctatttaactttcagaaatccttctattttttttccccctcagaagcatcccctgatcctttaaactaggtaaagttaggaaaggaaacaactgcaatttgtatacccactatgataacaattatcataattgtttcattttcttttatgtgtttggggtagtgggaggcagagactgtgtacactctaaggtagaaatgatatgtatttgcttgtgattacattgcacccctgagcccccatgactgacaaacggtctgacacagtttttcagttcatgcttgctgaatgacaaatgcagagagagaataaaactcattgtatgagaaaagcaagaggcaagtcattttacgataatgccaaaggatacgttttcacttaaatgtttattgcaaatggagtaaatggtgtaccaagaatcggagaggactctaggaaccttttatg

SEQ ID NO: 59513 - DNA, 1115 bp, Bovine  19866881734318
  misc_feature (1)..(1): n is a, c, g, or t
nttttctactagcatagcttgttatgtttggcacattctgatgagccgcctgattattctgaattaatgatgtttcttcactattcttaatgaaatctggttgatcacaatcttcaaaaaggcaaatgagaggtatgagaaatcaccaccatgtaggaagttggaaaacttaacttctctatttaagaggggaaggtgaaagtgaaagtgaagtctcccagtcatgtcttactcttagcaaccccatggactgcagcctaccaggctcctccgtccatgggattttccaggcaaaagtactggagtgggcaagggattagtttgaattcactctctgaactcatggctgacacttctgttgtcctctgtattctttaaggctcagtgtctaatgtgattcctttgtctccttgaagagcctcatgggcatagggcacactcatatcatctgaggaagcctgcagagcacctagcagaccaggatgcatagccattgttgataatttcaactttaatcttttgtacttacagtgagtttacagaaaaacaattcatgttggattaataacaaccttgtatataaaattgtcaaataagctcttcattaaataaaataaaatgactcagtttatccagcatatttccattagaaatgaacagtttataaattatctgtaaagtttggtgagcaattcctcagcatcaagaattaatctgcattcaacaagtgagcaatttaacttccttcccatccatacaatcagcagcaacatcatatccaaggggaggaaagcataaaacatgtttggatatcataatgaattcgattacaataacaccaaattaagcctattttcattttgatattataaaaaagcagcaggagggttgactagataacttgcttttactttattaaattccttatgttacagtcagctggattgagtgctcccttgggagtaaattaagaacatttgggccttgtctttacattccaaacagtggggcttttacaattcattttacttgggatgccagagggaaattaagaagagctccctagttccttggcttggttattgccttctttatgcagaaggggttactcccac

SEQ ID NO: 59514 - DNA, 4914 bp, Bovine  19866880339755
  misc_feature (1)..(1): n is a, c, g, or t
ntgaggcggtggtatgagtgtggcaaatttagatggaaggatctgcagatgacctggtcctgagtctggaaggccatcacatattcctggaacagaaccaatgagtggtgggtggtgaatggaaagagaagaggcagagaggaagctggaactgcagatggaaacaagagcacatggggtctttcacatcatattaaggaacttgggttctattctgagaacaaccagagacaaagaatattagtattttgaatcggcttaatctctcttgctctttcttgttcaaccttttttagaggatcaaaccttatcactgcttgtaaacatgattttctcactttacccatcattctatattaaatgttcccccacaatgtatttttttaagtactgctaattaatttcattatatgaacttttccattatttacttagctgcactcctgttttgtccttctgcatttttaattgtttttagctcttgttaacactgatgtgataagcattatcatagataaatatctgcgcacattcatgactgttttttaaggaaaaattcacaaacagtccaaagggattgctctgtcaaaggaaaagccatttgcgagcttttcacatgaattgccaaatcgccttccagaaagattggagcagttattttcaggatagtgtaaaagaccatctgtgggaaatatactttttgaacctaagttacacagatgactgggggaaattttcagtttctgtgatacagtttaaatagatattcgtgagactgaaatctacttgaaggtttgtatttgataattaagtttgaagcgtgtgcctggaaatctataaaattcctgtcttcttatctaattgtttttagttaagaatgacattccccccgtgatatccttgtgcagtgatcactaaaatatgttgtcaagctttgaaattcgtagaccatctgtaattttgaacgttttgtacaggtagcaaaaagtttaacttatacactaaagacatatatttatagaaactctgttaatttgaatttggggcaaattattgaaatgaacaattaaccctctttgaggccatatctaaaaatacaaagcatgagagaaataaatgcaaaaggagattaaaagttatcaagaaaaattagaaaatatctttgcgcttagcatgattaagtctaacctcagatgctccaagctatttttaagaattgcttgaaattttcaacaccagggctgatatgctatcactgggtttctcactaattccacttctgactcttggcagtgtacgccagctttgatctgcctccggctctttggcttccacattcacattttgtcctctctagcttttgctcattgctcttcctaatgattttggtgtctttgggcgttttggtgttcttaccctgtgcagcattagacgggcagattctgcagcctctccttcctctcaccccacgtggctgcttggaaatgggcacgtccctggaaacattgctgggacagccctggtcatcgcattcttgggctggggctcatatttgaacaaaatatgtattttcttaaactgttcaagtacttgtttaaattacccggtacatccttagctatttagcatgatttccttttgtgcaattttggcaaaaaaaaaaaaaaaagttaatgaaagacaccctcctatgttctcgacacttaaaattgatagttagagtgaggtgtacctttgaagtaatggattgatgttttagttgaattaataaatgggatacagtatgttacaacataatcatcttgacagtgggtatactcactggaaagatgtatctgtgtgtgtgtgtgtttttttttttttttttttctgaatgctttcagcatttctctttttggagaactgagatttagacctggtaaatgtgaaatgtgagtggatatgttcttcctcttgtcccttttccctcctaagcgtgtggacttgtgtgctgctgacatacataatcaagtgctaagacaagtggctaatgcagcaagggctctcggagtttaggaaagggggctgctcattgtatgtttgagtagttagggaaagtttcttggagaaaataggccttgaagagtaaataatgtttaggtaagtgggaaggagaaagcagggttcggctgaagggaaccattctggcaaaataaaggaaacatatgacacggagaaaattttaatgaagctttcacagttttgccaacctttgtgctctggtaattgacaacatgtatttttcttcagacataaaattaatgcactcaactgacccacctcttttgggaggtgtgcattttaactgtagtttctaataatgctgatggctcctttctgcctcaacctgttttattcttactcaggaacacgtgagactcagagatgaaaccctgaaaagttatctctgtactaagcaaattgaatggagcaaacagttacctaatcctcccattttccagccttttggttattttttgtagtctttttctccctttctgctgccataaaacaatttttgacttttgttggattttccttcccaattgttcttgttttccttttggctcctcaagtctctgtgattcaaacatggaatatgatggcattctctcaactggtctctgagaccctctctctctactccaggtcatagatgtcacagtcattgaaatagtttaaaaataactttcatttcatttctgtgatcaaaattcctgtgttggtttctgtcacctggaagatgctctccacagtgccacccaactgcatctcccgctaaacgctttccaatggccctgtcactcaaacgttgttcatgacaagctcatgactggtagagggacttccctggtggtccagtggctaagactccacactccccatgcaggaggcctgagttccatccctggtcagggaactagatttcacatgctgcaactaagactcagggcagccaaataaataaatgaaaaggggggaaaaaaaaaagctcatcttctgttggttccctccccagcttgaagccttctgctgcgacccccttttgaattcatcgtggtcactttcaatgtttgcttcctttttcactaagcaaaaagtctcagcgtagatcctacaacctggatgatcagttttgttcagagaactttcttccattatgttccaaatggacttcaaactcacatggcacttacagtctagcttgtattatacaagcatttacaggcagacctcagtgatactgtgggtttcattcctgactattgcagtaaaggaaatatttcaataaagtgagtaatacagtttttttttttttggatttcagtacacataaaataatgtctatattgtactctattatgtataccatgatattatgtcttaaaaaatgtacttaccttagttaaaaaatcctttattgctaaaagaagctaaccatcttgtgaaccttcaagtgaatcataatctttttgctatagtaacatcaaagagtagagaaggaaatggcaacccactccagtgttcttgcctggagaatcccagggacgggggagcctggtgggctgctgtctatggggtcgcacagagtcggacacgactgaagcgacttagcagcagcagcagcaacatcaaagagaggcctgtgtgatgatcacagatcatcacaataaatataatactagtgaataagtttgaatactgtgagatttactaaaatgcggcatgaagtgagcaaacctcgtcggacgaatggtgctgatgacttgctggacgcaggtggacttggcacaaaccttcagctgtgaaaatgcaacatctctgaagcacagtaaaccgaagtgcaataaaacaaggtatgccagtatgtggctgtcgcagttaaaagagaacctctttgaagacaaagcagattttctttcttttttttttttttttgagttgttttatttggggcaaaatgggaattgtggtctgggatagcacctcagatagctctgaggaacggctccaaacaaatagtggggagaaggtcaatatgtaagattttggagaaggggagtgttcagtgcagtcaagtgcttttttatgaaaggctttgtgctggtcacgaggagctgatgtcaccataaagggacttagtgcttttctaggtatgaggagatgcaaggattaggatcacaaaatcagttcccgaaaatatctaactgtctgaagaccgttgcacctgtttccctggagaacagtgtctcactctccagcctgagctcccttcagggcaggtcaaaggtcaacagctgcagtagcatgggattcagcctcccccgaggcagatggcagatgctcttggcaagtgccaatttgtagttgacagggtcccctcatggtaataaattcgaccatactttggcaagcatttcacgaccattccgttccacatcgctgggaaggctcattcctagctcgagaagattttgctcgcaggcctctcgatgagctgtcgctggactaggtcttaatggtcaaaaatctctggacacctgcctcctagttgtgtgccaggagaatgttccctcttgttgaatcttcacatgtctagagttacactattgttgaccacaaagctggttttctactcccctgcccctgaaggtcaaggacagtgtttgcccacatagtagggctaactaatgacatttatgatgggggatgataaacattccttgatgagtatgctctttagaaaaattaagctatcaagaataaagtccaggactacagtctggtttgcgtcttgctttttgttgggttcggttgctaagtcatgtctgactctttgcaaccccatgggttgcctcacccaggcttcctgtc

SEQ ID NO: 59515 - DNA, 1697 bp, Bovine  19866880375688
  misc_feature (1)..(1): n is a, c, g, or t
nctaatgtcaggtggggggaaggagaagttgcagaagaaaaggaaatcataataagcctcaggtgaccccctctgagtaggaagactacaaaatagagcaaagaaatgagaaagttaggttgtgccagtaaatgtttgaaacttgagtgcatctgaggagatgctggaggcaaagatgccatctgatagcagaacttggtctgagaaggcagggctgggctacctcttccatcaggcagtcggagctgatgagccctgacaggcagctctgaataattgctctaatcgcttcagtgagccctctacttcatcctaggaaaggagtcatgcctcagctggcttcagaagccaggcacccctaacctgacatctctaacaaagatgcatttatttccagggaagcattgcttgtcggaagcagtgatggggggagttcaacagaaagttggccgtagatcaggacctcgttaaaccactctggagtttgtatttgcaggctgccttgatgtgatgaccagttagtagagactgataatcccaagaaaggcagaaatatgtcacccggaattgggttgtagattccactctcccagagagtaggagataattagggcagtgagtcatcaaaacttttcatgtcaagtgtagaacacactctctccaaataagaaactgtcagatccgcttaaagctgtgagcgacagggacctctttccagcctgtaccttctcatcggagatgccagcttattttagagggcaaagggctgagacacttcacttgagcctcagtctcctgtgcatttgtttgttttgctacagaatgaaacataaatgataaaatttctcagcccttgaggcaattatatgcttgtggctttccctgatactcgagcatttttgcctcactactcaggtaatttctacagaagacaaagtagttgattctgatactgagcaatgaattatcccaccagtccatctaaagggaaggaattttcatgggaagaaagtattccataaaattccccataatgtgttaaaaaaaactatgggagctcataggtgtcaatccaagtaacttttagagcaatgacatcaaccatgtactcaccaatgtgcacacttttctattactgattgtagcatatcttatttgagataattatttttgtgtccgtgcccccacatcaatttgagcttcaagagggctggaatcaccttgttcaccatataatcctagggcttatcctagtccctggcaattaacaggtgctcaatgaatgttgcacaatcaaccttttttcttggccgtgccatgaggcatgtgggatcgtagctccccaaccagagatcaagcccacacccctgcagtgaaagcacagagtcttaaccactggactgcagggaagtcagcacaacccattttcttaaaccctgagttaattctttccattagcacaatcccaaataatcatcttaactaaagctgtgcttctatacaaactttcatattgtattgataccattcctttactcttttctgttgttctctgtgtcgctttctttccccatccttcattcattctatttcatttactatgaggctaatgtagggttttcctgaagagtatgtcagaaaaaaaaaaaaagtgaaagagaatggatatttattgagtgattagggtgagtgctaat

SEQ ID NO: 59516 - DNA, 1946 bp, Bovine  19866880480561
  misc_feature (1)..(1): n is a, c, g, or t
naacatgagtttgagcaagctctggtaagatagtgaaggacagggaaggctggtgtgctgcggtccatgtggtcgccaagagtcagatactactgagtgacagaacaacaatcctaattacaaaataggttatcttctgtcctttgacatttgttttcttaagaatattgaccaaagcaaaagggttgaccaaacactcctctgaaccagcatgcatgaattcctgagatatccatggatgcccagtaagttgaattcacccacagtctcaaaaattaacaggggcccaatgatgaaaatgcacactattcttcattttaagcaccatgaatgagttcttgcgttgttcgtcctctgggctaccatggctcatttttacacttctaagcacgcttttatttttcctcatctcctctttgggcacaaagtgatcaatgagctctatgcttggcagatgatggattcttaataaagatatcatgaaatatattgaataaaggataactacagtgatagttgtaaggatacattttaaagtttatgggatgttttgagtgatccacctgtttttggagctgtgaaattagaaattcccacccacaaggaaatttcacagttcaatgaaaaggaaggctgttgttgatgggaccaccaatgtattagtcactgtctgcatgcatgacaaatgttccagaagcagaaacgcatcacagggctcttgtaagatttttagaaaaataaataatagggatacattttcctaaatatgtgttcagtttaaaaaaatgctaatcttgaccttcctaatccattatcctcacttctaaaatacaatttgctttggttttatataggtttttccatatgccagataattaaggatcctgccttagcaatttcagagaaatgtgaattaagccttttatgagaccatgtgggtacagtttgaatctactaaagaaggaaattgaacattaagcattaacaccttccttttgctcaaccacaccttccaagggctcacatacggagaacacttgtgatggggtgccagcttttggtgccgctccgcatagccagctcacatttagggctcctattaacttgaaagagagctccaggtgcattcaagttctgctgaagaaatggaaatttggaagctttattattagcttaggccattttcaactctcacgtgaataagagatggagaaaagttattagaatctattttttttttaaactactgctcttaggagtgacgtcaaactaaacacaaaggtaggtactgagacaaaggtgtcggggctctttctttctgagtggtaaaatgacgtgggtctccctcatctttaccaaggcaggcaggcttcaatatgactcaaaataaatgttgatataggtataaaacttgaagtatttgacactcaggtaacaggaatcctttggtgttaaggagtaaaaaactattctgacaagtgaaaatggagcattggttggaattctaaggggatagttcacagaatccaaggataggaggtagaaccagaaacagatgttacggaaaccacacaactgctaacatctctgatttctaaatgtgcactgggctccttttgctttctccatagggcagctgttttctggaatatatctacacacagcagccatgtcgccgccgtgttaccgagtttactaggtccttcagttcaagggagcagaaagaccacctactgtttctttgtcttttccagtccaaccttctgatctggaagatagaacttgatcagtctagttcaagggcaaaaccaagtatgcagcccttgtcaaggatgggaggaacaggatcacatagtacaaatcccgccacaggagtttcatcttgcttccttttttcttttaaaggtgtggacacctactctatgaggcaacgggccatcaagaca

SEQ ID NO: 59517 - DNA, 1458 bp, Bovine  19866880526420
  misc_feature (1)..(1): n is a, c, g, or t
ntataaacagttggattccggcattgaggcagcataaacgtatgactgtgtttaaagagggaccacttgttactttctttgctacctatacaactggaggaaggactctggaaaatctcatgggtgtaacagaaacctccattctttcatttatgaatgcccgaaacatgcccaagcgagctagactgtggaactggaaccctccaaaggatctcccaggcaccatagcaacaaatcacaagggtttctgaacaatatatcatgtcagtgaggatatgactgccaaggctcctttgtgtgtagatggttgataagatcaactccagctatcctgaccattacagtattaaggagtctcatgtcaacacagctgccttatcaagtttaatgtttttatgactctgatgtggtaaatgtgcaattactttgatagttatgacttgcagtacttagaaacatgtggattaagcaagactgaaagtagacatgaatccaacctttgaaacactcaatctctgttgcaattccttctttctctcccttgaactaacactgattattaatagcggattattaagctaattaaaaatttttagagaaatagaaaaaatcaaatagcacaaagagaaaattaaaattcactcttaattttaccataaaaatataatcataaaatagagccaatcttaagcacttcatctttaaaatttttatttttatttaacattttatcctgagcattttactactatcctatttaacatataatgttccatgctctactttcagcattaagactatttctaatttctatatattataaaaaaggtattactggaatgtttttctgtgttttaacacatattcaacaagtagtctagaactgaaactactgaatcaaatattatacattcttctaaacttttgatataaatttcttccaggaaagtaagtgtaaaataatttgaatttactttcacttgcacagcactaggtgctactacggtttacaagccttgatggctatcttaataacattaatctacaactatgtattatattacttgtgtttacttttcagatttattgtcaatttgcttattttattgatgaagtgtgtgtgtttttatccagtttttataatcactggattagatttagactaatccttattatttgcacaaatactttgcttttcttctgacttgaaaacactttcttcactttttggtttgcttcacaattttacttatgtatcattacattcggaagtctgttgcttactcataaccaaatatattgaaaattttatttggaattctctacttacttttatgatccctatgccagattagataaatatttccaacttttccttttagatgttttattatttataatttcttatttaattttattacctatctggaaaataccccaatgctttttattattata

SEQ ID NO: 59518 - DNA, 1206 bp, Bovine  19866880539563
  misc_feature (1)..(1): n is a, c, g, or t
ntcctgtatcctgggtaccctcagcctcaggaaaaccagggtggatgatcatcctcgttcacaccattccccagatctagggcttagctctgtgatgggaaattatgccgtgcttaaaatatttgcattaaacagaattgaatgatgcttaaagtgagtaaaaagggaattatcttttactctcaataaccttatgatctcaacaaaatattgctttgagaaggggagaaagatggtgaaaacttactcaaaatgacttttggggtgtgatcccgatcttttaccttgaaagtcgcaagatggatttaagactgaaaatacatggtcagaaattaataagaccagcctgctgagaatgggggcctgcattcattatctcttcattcattcagcaaacagaagttttttcctgcctgtcctctccatacccccagccctctaccagattcactagcaaatactattcattttcctgagaattttcagaaattccctaatcaaatgcaaatacgttgccaggacattaccttaaactctgtcagatgcaaatctgaagtggggagaggaggcttacatggaaccccaggacaaggaggactcctagggtggcctgggttaggctgtgtgacatcctgtttctatttcgatgtcccctcttcactcacatccctgggaacatgagtgtctctctcagtaaatgcctgatctgtgcttctgaagaaatgaagggcttacaaggaacaaaatgtcctgagtcacttaagtaaacaaatccagtaagtcccctataaaatcctttgtcattttaaacactctagactgctttcaactgtggaggagtatttatgaacacggcatgttgaagagacagcatccaggatttccatcttccaaacaagaaaattggaaagcatgtcctggtttccactgagacagtaagggcaaaagctattaggacacctcatcttctagaatattaaaaacaccctcgcacacttctccaggtcagaagaacagggacccacccgctggagaacagcggtaaggcagggcttctcagacaggtacgtggtacccgagccactgctcatgaagacagaggttaaagtggaaagaagggaaacaggaatgtttctctgtggacccgtgatccctacttacttctcaaaggatgaaactacttcagactttgggggaaagctggag

SEQ ID NO: 59519 - DNA, 1328 bp, Bovine  19866880597479
  misc_feature (1)..(1): n is a, c, g, or t
ncaatggatgtgagtctgggtgaactccgggagttggtgatggacagggaggcctggcgtgctgtgattcatggggtcacaaagagtcagacacgactgagcgtctggactgaactgaaacatgagtgacaaaatcataagggaaggtggtcatgtagactgagtacatgaggttgagtgtgtgtgaccacaccaccagggtgtgaccactcttagcgggtgtacagtatgctcaaagatattaatttctctgaacctaagacacgtgtagactaaggggaaagaggttagggaatggtgtgctctgtgaagagctctaaatcggaaattgaagctcttgcctttagagtaattagtcctggacactactgtatcggatggtgaaccttcttcatgaaataagtacactttcactagggaaatggatccatccaactggtgctttctgaaatggaacaggtacacactggccactaatagtttgcttccaaccctatggctaagatctggggtgccacagaagtataagctcatacagtagagccaatagagtcttgggttggacttgctagagtaacagtaaggcttaggtcgggcagtataggaatgcaaggcctacagacagtgctaagtgattatagatccacagcttccttgtgggtgtggtccatttcaagacccacaagaattagctatcacaatccaatgtttttactctgtttcagatccaatccattccagatgctttgtttctactacatttcagatctaatccatttcagatgctcaggctactgccaacctgatgctctccttaaaaaaaaaaaggaaaataaaaagaagtgtgatctagatccaaccatttgaacatctcgtaatggttttggcagaggagaaaggtaaaactctcgattaaatagcttaagaagacgtcacgtgtgtaaaggctctcacaataagagatcaaaactaacatttactatgtgattctacttttcaagctttttactctttgctattctaaattcactctgatgcctctcttgtttataaattttgacaacagctagagttccttgagatttagaaatagccgtatctccactctggttcccacttcttgcatccaggttggaactggcaaagtaggctgctgctgctctgggtgtgtagagcctgggtgtctctctgtgggaggccagggaggctgtgaagctacaggattggggcctgaactcagcttggatggcaagggaaggagcctattacaggatcacaaagctcctttccttccttcttggcaggagttgttgcttggcgtcagcagg

SEQ ID NO: 59520 - DNA, 1084 bp, Bovine  19866880668179
  misc_feature (1)..(1): n is a, c, g, or t
ntctcttgaacaaaactgttggtagtgcccataatgagctcaactattacaaataattaacatattataacaaataattttttacctgtaaatatccataaattaggtaaaatacaaaaactccagcaacacatataaaaaactgagtcagtttgttgaatctgctgagatttatgccaagcacgacaatgtcatctatagacttgatgtgtggtgacattgcttgggttttggatgggacagtgatagaaatgtatttcctggagctgttgaacttgagatccattgttcttgttttgccgcattcagtgctaccaaagttatctttgttggtttcctctcctttgttcaggcctccttctgcctgctgagccaagtcctaaagaaggaaacaaacaattcaagcaaaacatttagaccatcaagtaaagtgctatgctccaaatactatctcagatcgcattttgaaatttatataggtaagagtcattctctctggattttaatacattaattctcttcttcaagcttccaattgaccaaaataggtttactctccaaacaatgtaccttcacctgataaaaaccaatacatcactaaatatacaccattcttatctccacagcaacacatcaaaagctaaccttgtatttatttcaaagaagggtgcctttattatgcttctatttgtagtgaggatataatttttaaagcccacaacagtatatgcagaacgtcttcaacattaaagtcaatttctaattgtagaaaagagtaaagaacagcccaaactcctacagctgctaagccaactgtaaaatttatttgctaatgacactgcaaaataaagtcaaacttatgtaagttatgtaaaaatccagatttatctgagattatagaaaagatactacgctttagcaacagcatctcttgagttaaaagggaaatgttttcttcctttggagaacattactgttatttaaaaagtctttggtatagttgttcagtgggtataaagcttcaattacaccagataactcggtcctagacatcacctgttgcagagaccctataacacagtgc

SEQ ID NO: 59521 - DNA, 1718 bp, Bovine  19866880706728
  misc_feature (1)..(1): n is a, c, g, or t
ncccggaagtggtatgtgttgcttaaccacttggcaactccatttggaaccatatgaggaactgccctgcttacttttaaacgacatatttttatgattttaattgtgaaaaaaataagtgaacaacctttcaaatctccattcatccctcttgcttttccaactgggcaatattcacacaacactgtgaaaagcagactgattatctgccttgttgccgctaatagaaaggaggagaaaatgttcaatttctgtagaataaaaagcaaaacaggaagggaacttcgttgccaaattccattataaatggatggtgtctttttgaggaatactgaaaatccttcaagtccaggaatatttatgaagccttgaagcctggcttgctccgcgatgccaatgcacagcaaagagttttagagttttgaaacaaaaccccctagaagccctcatggaacctccccaggaagctggtctttccttatcttgctccttgaatcatttatttaagcggcaataataaaaggtgtcagcaattcagctgtgagctctggaagatttctgtgctcattgacctttaagcatttgcgtcttgacaggtgagctgttggtaacgtttcctgtgagatatggggcggccaggggtcaggcatgctaatgataaaattaccatttaccttttacctcggcaggcctggtgcctgacattataaatgtaggtaacctttcacctgaagctcttttttttttttttttgctctactagagactgcggggacgaacacagttctggaggcagatgacttatggaggggaaaagactgaatttagtgcattttttcccctcttgggcttctttttgggaatgccttgtcctctctcaacctggttagaacactgtctgtccttggggggtgggcttggggagcagggaggatgtgtgctttgtcatcctcttctcttgacatttttgaagcatggcggtggcccgtgttctttctctaaagctgcaggtattaatgaggttttattggtggcctgctttatctggaacatcaaccccttcctgctgattccagtagagtggcatttcactgctactggagaccggacacggtttagtaattagggacttggtggcaatttacagagacctgtgcttctggctggtgcaaaagaaatgtaaaacacagagggatgctggtaacagaagaaaccgctggcagctcagctcaatcagagaaagttaaagggaaatggtgttaatgcccgtttcccaggttggcgatttgatgcggtagaagctgtttttttttacatatttattgatttgtctttaaggagccttgggatgatctgattctccataagtaagtcttagtgacatctttgaagactctggactgggctgaaattgaaatcaaaatcctgtattatcagatagtaagattcatttttttggatatcattttaaaattaactttcatgggagtatgttggatttgcaatgttgtgttagtttctgctgtgtagcaaagggaatcatttatacatagaagtatatccaccgttttttagattcttttccccgtaggtcattacagtgtactgagtcaagttccctatactctacagtaggtccttattagttacctattttatatgtagtagtgtgtatatgtccattccaatctcccaatttatcctttccttccactccc

SEQ ID NO: 59522 - DNA, 1598 bp, Bovine  19866880732423
  misc_feature (1)..(1): n is a, c, g, or t
ntgtcctgcatatatcctcttcttctattgactttttgcatatatatttctaacttataagaattatgcccaactttccttctgatttgggggcaagaggagaaggggacgacagaggatgagacggctggatggcatcactgactcaatggatgtgagtctcagtgaactccaggagttggtgatggacagggaggcctggcgtgctgcgattcatggggtcacaaagagtcggacatgactgagcgactgatctgatctgatcttccttctgattatttcttttttactacagtaggttgggtggcatcactgactcaatggacatgagtctgagtaaactccgggacttggtgatggacagggaggcctggtgtgttgcagtccatggggtcacaaagtcagacacaactgagcaactgaactgactgactgaagtactggggacttgatagatagaatggtttatcttaatgtatcatagtgagttagatgagacagtgagtatgtctggaatgagctgttttttattactaatcatgcccatgttttcctatcacttttgttaaacttcttagttaatttttaaagttcatagtctgctagagttatttaaaattaaatattcagcactttcccagggtttactagaagtaatcatttaactaggatttcatttgctgcttaagtacacacctccctcccccacacctataatttctgtgcacacaaatctacttatattttaacaacctaaatataaactttcctcaaaacactatacccactcagtgcttatttttccatgaatgattaatgacaacaatttacatagaatattctactaaaaatcaccttaaataacaacattgcctgtacaatcccatatctcattgcagtggagagctgtgcttagaataaatgctgctactttaactagttgcaaatcttccaagctgaatctctgaagaaataaaatagttgaaagaaagtatattaataggtatgggtgctgactattttatccctattcccagaagcagcgtcaagtaatcattataaattttccttctagagccagcggactgggttcagatcacaatttagctctatgctcttgggcaatctatttaacttttaagaccctggtttctctgtgttggcacaaggattttaaaaccatagtgcatatatttttaatgcactatatactacatactcccaggatacttagcataggcttagcacactgcaagcattcaaaaatattcatttttatgatcaacaaaccaaatggcaatctctcagaggaaaattattgcatctatgtaatccccaaagtgatttcatcttttttatttcttgtcaccacattgcattttgtttttacctccagaataggtcttactacactcaaattatgtgtataaagtcattttttctccatttccagctatacatttagaactgagtggccagagatagtcacctttacccttcagcatgactagtgtgaacattgcctgaatagctcaaatggtaaagcatctgcctgcagtgtgggagacctgggtttgaatcctgggtgggtaagatcc

SEQ ID NO: 59523 - DNA, 1162 bp, Bovine  19866880761498
  misc_feature (1)..(1): n is a, c, g, or t
nggaaaaaaaagggaggggaacaccctaatacactcatggatactacaaagcagtgaatggagatgaatacagggggttaacacttattaacatggacaaatcccacaaacaaaacgtcaagcacaaaagcaagtttcagaaggatatagcgattaatataaactttcgaaacaggcggcttctacaaggaagcaggaggggctgggtcggtttgcagttgctgggaggcacctggcgcggagaaaagggggcgcacccaggccagggtcccccacccccagcctgccgcaaacccgaggccgccggggctcgacccgcggctcggccccgggtcagagggcgccgcctggtcgctggggctgcgctgggaccaccaggcgagagccctgctacgccatacccttgataatgaggtgcgccggcgagcccgtgaacccctgagagtccttcttcttgccgcgccgccgccgccgccaccctgggcggcctcgcaacccaccggggtctccgtcccaccgctgctcatcccgaccagctccgcccacccgcgaccgcgctgcgcctgcgcacacctctgcggacggctctccctgcgcggggttttggcgtcatcaaagggcgtcggggaagcagagtcaatccaggggcggttcccgcaagggcactacggtgtagccagtgacctgaccttgaaggaagccggtgccgccatgctggattagggcagatgctgccggcagaggaggatgtctgaaagttagagctaaacttattcctcctccctaaacccgctggcagtggtaacccactccagtatttttgcctggaaaatcccatggatgggaggagcctggtgggctgcagtccatggggtcgctaagagtcggacacgactgagcgacttcactttcacttttcactttcatgcattggggaaggaaatagctacgcactccagtgttcttgcctggagaatcccagagacggcggagcctggtgggctgctgtctatggggtcgcagagagtcggacacgactgaagcgacttagcagcagcaaacccgcttgagaggtttggggaggttggcggagagggaatttagttatagaataatattaataatgtgtgtgtgttagtcagtcgtgtccgactctttgcga

SEQ ID NO: 59524 - DNA, 2163 bp, Bovine  19866880768066
  misc_feature (1)..(1): n is a, c, g, or t
ntatttaaatacttggccagccagcgtgtcaagctgcttgtgttggggtgtgaccctgcgttggtgaccgaggaaggtttccgtggccactggatggccccgccccctgtcagtcactcagggccctcccatcaggccccacctactccacacgccccgcctcccctgctctgacctgctgggtgttaatacctctccgctctcactctgtccttacccccggcacagtttcctgacctcctgcctcctcccagttcactccacatccaactgctccatgtggtcttcatagtccgtcattctttgactagttccatcttttctcattcagtgaatctgaggctcctaattttgctaaagtcgggttgtggagacctcatgtgaggttttcatgcctcatatccaccttctggaggtttgttttcctccctccatggagaaaacttccaaaactccagatgtgagctaccttcagacttcacgagcaggaaaagagaaaggacaaggacttggaaagccagcatctatcaaccccacaccctggctctccattcttcctggacagccaggacatcacctttgaacagtaaaccatttgcttaatcactttgcttttccctgactgctggtaatgaaatgctgcactctctaaaataatttcctgactatttgctaagattcatctctgacatttcattaaatatgatcatttaactgtacaagtacaaatgcatttttaatttagcttaccgcagatattacagatgtggggaaatgaattcacattgctctaggacaaatatatcattcacatatgcaagcgacaaaagaacaaattattaaaaattactgaaacttccatgaagatttatatttaacttttccattttcaacctccacgtcactgggaaaacacatagcatatcacgctgtcagccatgattctgtgaagaatgtgggcggcattctgaaaggctctcgatcaacagccttgtctctgtcatcgacacactgaggcaggaaagagatggagacgatttcaagagcgaagttatgaggttggcagtcttatcactaaagcagtcgctaatttgccttccctacaaaaacaaaacagcaaaaggaagtatgtcttctatgccgtgtgctataatccaatcagaataaatgcgaaagttattgaataggaaagtgctcacatgcgaactgacattcttgagcatcttattgggatctattgtcattgaattcaaagctgactgaggaaggaacaagcttggtttggggccttgagctgtaaagtcaagaacttaaaaaagtcatgagctaacaattacaatctcatagggtgtcaagtgtttccacagaatgggcttttattactgtggaaagaaataggattcttttccaaaatctttaagatatggtatggcggctcagcagtaaagaacctgcctgccgacaggctaggatcaccttgctgcgtcatgaagcaattaggccagccagtaagagctctgattcctgagccccgagcctgtaaaatcccaccactcataagtgtcactgttctgctgctgtcacaagtgatgtcgccgagtgaggctgcacgcctgtgaggactctgctcattctcgacaaaggggattgaggggtgtctaaacctcccaaaatgattaaatgaccattagcaaagttgtttttttttttttttaaccacaggagcaagtgtgccatttgtcaaaagctgaaccttgatgtgctaatccaaaaggattttgaatgcaatgtgttgaaacattaagagactaactctgtctcttagcaaacagctggacccaggatagaagtggacgtgtctcctcccatcagtgtttgctttccagtttcgtaggtttgcatcacacctttcgtttcagaagcttggcggcaggcgcttttttgttttctggaagaacagcagcatggtttcagtcgcctctagtgcacagggggaaacttgaaccctctgttggttccaagaaatattttccctcctatcgtgagcggtaaggaaggagcagctgtactctgaaggcagcgggaatgacgggacggtctgctcacctgcaatgagacagagcttccagctcccccagcgatcccccaaggagaaatgcaggt

SEQ ID NO: 59525 - DNA, 1452 bp, Bovine  19866880770864
  misc_feature (1)..(1): n is a, c, g, or t
ngagcaggaggcttgataaagttccccctgaacctcacccccaacttttagttccattagccaaataaaatgaaatgttgttgatccatagttttaggcgggtttatttcacttctgtgtgtgtgctcagtcacgtccaactctttcagaccctttggattgtagtctgccaggctcctctgaccaagggaattttcaggcaagaatactggggtgggtccttgtagccaaaaccatcacaactgatatgggaaaaattccatctgccaatcaggattatttaaagggctaaataaagaatccacgtgggttccctggtgactcagctgcatagaatctgcctgcaatgcaggagatgcaggtttgatccctgggtggggaagatcccctggaggaggaaatggcaacccactccagtagtcttgtctgggaaatcccatggacagaggagcctggagggtccatggggtcacaaagagtcaaaaatccatggagaataaccttgtagacatcaagggcaccgttaaaagtggcttccctccttcacctgtagcttcaccatctcttcccaacggtcactggaattaagaagtcgggatccatgaggaaataagttgattgaaagactaagtttcactttcatatgagtaagagtattaaaatataagttactgagttgcaaaattatgttttaagactacttatttatactatgttatatgataataatatgctaatagtacagtctttggactattggtctattttatacacacatatttatactatatacacacgtgtatgtatgtgggtgtgtatatatatcttcaggcgttacagagcactatcaaagccaataaaatagatacacctgggctattttatattttgtggtttccaagaaaatagtgcattttttcccaaaaatgtgtgtaagtgatattttaccttactttgaaacttcagttcttccagattttccatattgactacttgggaaaatatgttccttaaaaaaatgtgtttttagtacaacacttgctcaaatatgtatagaatgtttgctctgaattgtattcatttacgggaatattttaggatgttttcataagaggggaagcaaaacccaaggctttcagataggatctataataatgcttcacaactgaagacagttttcttggggtctttgctctttctaaaaaagaagaacaataatgcgccagagaccccaaagggaaatatattgttaatggaaaaaattgccttcattcactctttctatttaagggagctcttgctgccaggttataatgaaaacataaaggtctaatacaaaactgatcaaggggaaggaggcaggggaaagtaacccagcatacgcagcgtctaatccagatgttagcattagtggggtagccttagtgaaagacagccagcaattgttatcct

SEQ ID NO: 59526 - DNA, 870 bp, Bovine  19866880848903
  misc_feature (1)..(1): n is a, c, g, or t
naatatatttttgcactggttactggccctgttaaagcaattgaattattgccattatccattatgtaacagatttggatttctaggacagaaattaaaatacaaacaatcagacaacaaataagtacgaatttaaaaatatccaatgagaaaaagtcaaatctacaaataagaaagatcatcatcacctgattgttatgaaccatctgaatatagttttcaagatattgttcactctgaatagagaaaaaatgactcccactggataagagaaaaaaagcagtaagatctaaatcttaatcaaatgttattcagacctctgtatctaggggctggctttacaggaacatttagaaagttgtgtgtgtgtctccaggtctcaaatgttgctttaaagacctcgtgtggaatacaattgcattcaataatttcacattgtgtaactagaaattcaaagccagtaacaagtatttttgtcctcttttgaaataaagaataatatcttcatcgactgacaaaagggattcttaggagcagggactatgcctttaggctctaggacgatgacttttttagtgtctaaatgcaaactttagttgaattacggctctaattgatgggacttgaaaatcagagcacccacaggccactttgctacatagaacatcgtcattttcttccacattgaattaattttcaatcaacattgtttaaaaaaatgagcaagaggagaaactggctaccaatactctaatgctatttcaaatcccaaagcacaaagattaattaagaaccaattaatatagagggtatacgtcaaaagcagataaaggagagatgatgaggtcaaagtaaaagtcgttttgtttt

SEQ ID NO: 59527 - DNA, 1063 bp, Bovine  19866880864235
  misc_feature (1)..(1): n is a, c, g, or t
nctttattaactgaagctgtaagttaactcttttttttttttttcagagagaggtagtggggacagcccctcgtaaagtcagaggtgtaggttagagcacaaagcagaaagtaggcagactctggttttgggggtagatgctcgagaatttccagggggactcctgaggctcgatcccgcctttgcgtatgccgagcctccttcctcatgacctttgccacgggcagagctcctgctcccggcacagtcctgtgttcctatgtccttgggaatcactggctcagagaacacgcttcacagagtgtaactccccatcatctctgagacctgcattcaagagctcttttcatgaagtcactggattttcattagctcgcatgacctgttgcactgcatttgtaccaggactcttggggagctttattatccattatattgcttcactgcatgggccaggtacctctgtcattaggctgaaagaaacaataagcttgccttcctgggcacagcttgggcaatgccatcggatcagaaaggtgttgtaatctgggagacggcttaacggcccgcgagatgcagtggctctgcaaccttcactgagtctcagctctccttcccctttagagagcaggggaaacacaaagtataagcccgcatcctttggacgttcatttcaggtgggtttgctctaattatctattcccagacctctgtgttcattcattcttccccagctaggaaaggaatgcagtctttcagatgttttgatatttttaaggaaattttataaacatttttgcaaaatcattttgttatgttctcccttaactttcccaaaattcacaagttcaatttactgatttctagggacattacctcttgattctgccctgcctttctccctccattcaaaggcagtaactggctcaccagatatattatatagttagttcatggttatatatagggttttctttgactaataagagctaaactttctggtggctgtcttccttcgtttgggctacaccactcccatctcgcctccaagttcacagggtca

SEQ ID NO: 59528 - DNA, 1072 bp, Bovine  19866880871479
  misc_feature (1)..(1): n is a, c, g, or t
ntggggaaaaggagaagagtcattgagttaagaagggtgtgccatattctgggattgagaagaattgggctggtctacagagctcttattgggaaggagtggagaatcaggttggataaataagactagattaccatcttgaaagtcaggcagaggcatttgacaggatcagcaactaatggctcttgagatgaattttttaggaagaatttccaagtgacattaaacagcaaggacaccaggaacagagccccgttagttatgaagtataacctaatgcgaggtgatgcggcagggacagtagcaactgaaaggaagggagagatgccagagatgttaaataggaaaaaataagatgtcaagttgtgtttaagaccaaagggaaaatctacctaggtacctgaaataatgaagcagcacaagtgtctaatttattctggaaatgaggacaggatcagcaatatttctaagccaacaggctgaccttaaagcttgctgtaaagcagagtaacaagcccatatcaggaaacaacactggcctcgacccaggagcaaaagagtctaacctaagacagaataacaaagatatatagatattggctatggtgaccttattttcagacttaatcagtctccttatttttaatgcacttacacaaagacttataaaaaggtgaaaacctaaatcatattcaatgaagtgtttttcaagggtctgtgttattcttattatattttaatttggtttgttgtaaaaattacatgatatctgaaaaaaaaatgtatcttttatatctttctaaacttttagacaaatcttgttccctacttttgaaaaatatactactccttcaaaaatattggcacttatcacatatttatatgtcattacatgatttcaaagaggcaattcaaaatactgatgtctgctttataaacagtgataattatttatagctattggaactaattctttttcccccctttcttcatttttaaacgatattttaattagtggaaaattgatttacacttttgtggtttgtttctgccatacaacaatgtgaatcag

SEQ ID NO: 59529 - DNA, 945 bp, Bovine  19866880912282
  misc_feature (1)..(1): n is a, c, g, or t
nccaggtaggatccaaataacttaaaagcgtgcttatttttcatattgtttccagcatgtatgactgcagagttctaaatgccttgtttacatggctaccatttgaatggctgaaagatacattgtgttgatttagacacctatttctagagatgaaaaggcacctaccaaaagcacaccacataataggtgtgcttttgctgcagacacaaaacacaaatataaaatgcagaaggtaaatcttcaccaggagaattctacttttcccctggtatgtttacacacaaagattacatcaaatgctgtcactggcaggatcatctcatgtcgttgataaaaacacatcacatcattaatccactaaactaaatgactgcttttagttgcttatgtattaaattcttataatgagtttatggtacagaggatataacattgtagatgcatgttagttacacaaaatatacctaattaatccaggcccttcatattattgaaaatatagacagatataaagcatccagtggaaaatcttatgatgtataaattctatgctatgtcttattaaaggggaatctattacaaatggaatttctttatgtccctctcctgcccatgttacttctttctgcaatacttggtattagaggaaccatcagagaaaatgaaaaataaatgtggacacttgtaaacccaatgatgttgctttctaattttgtgaggatggatgttgagcaaatctgtcccactctgtctgactctgggttggaggactgtggtactaagtgctggtttgaaccccatttaaaatttcctgaccatgcacaaacacacacacacacacacagaggaagaaaagccagtgcggagagagatcaaacttgagcccttctgctacataaaatttagcagccattcaacaaacaatgcttcatgttagaagcg

SEQ ID NO: 59530 - DNA, 1368 bp, Bovine  19866880933059
  misc_feature (1)..(1): n is a, c, g, or t
ntgacctgctgtaggaggcgaagaaccgaggggtaacacctgtctgcagatgcagagatggggacccctctccccagcctgcagcaagcactcagctccccttctctgtgcagtaacagtcacacggctactgcttaactgaaaatttgccttttatgagtctgctttccatttgaaggtacctactactaacaccctggagaaggaaatggcaacccactccagtattcttgcctggacaatccccacggacagaggagcctggcgggctacagtccatgggatcgcagagttggatacgactgagcgactaacacagacacacacacacactactaacacccaggacttccctggtgggtcagacggtaaagaatctgcctgcaatgcaggagacatgggttcgatccctgggtcaggaagatcccctggaggagggcatggcaacccactccagtattcttgtctgaagaaccccatggacagaggagcctggcgagtatagtccatggggtcacaggtcactaagagtcagacactactgagcaacacacacacacacacacacacacacacacacacacacacacacacaccccacacatgttactaacacccaatcctcaacagcactctcctttttttcactatgctctctaagttcaagaggtgaaattcactgttcttttctgtttaaatgacaatccactttttatttcttgatcaaaaactacacaaaggtgacacgttaagctctggttgcctggattcacagtggatgtcttacaagtcatatacatatatatatatatacacacatgtatgtgcatatatatatgaatacatgtattatatgtctcaatatgtaaaaagaagaaagagaaaaagaaaggaaaactcaaagaaagagggaggaaaaaatctgtgtttcaagtaatgagcatgtgcacctttttgcctcaggccttcatacacaatttagccaggaagccagggtagatcatgatttagcttttgacatctcctgcctccaggccaggagagactaataccgatttctgactctgagcacgccacaggaaaaaaagtgagagagagagagaggccttttattgactaaatgataaagaggtttgtaatgataaataacagtcattttattgtggaattccccagaaaagatgcattctgctgtgtctgaaggagcctaaaagctgaggtcggttccctctggagccgaacctgttaaactccaatttttacagctgggaatggggggtcacaaattgtggggacctctggctattaaaactgcacgtgcatgctgcatacccctggttgcagcctgtttcaggctcaagaaaaagt

SEQ ID NO: 59531 - DNA, 1215 bp, Bovine  19866881008372
  misc_feature (1)..(1): n is a, c, g, or t
nctgacactgagcccatcttgctacatgtcactccagacccagggaaggataaggaagaatggatggatggtggaaggcctttgtctcataccgatgggattcttgttgggattctggcctcttgagtcagagctgcctcgaaaaataaagcaagaccaggcgatgccatgtgataagctgagaaatgactgtcagtccctcagcctccgtgaggctccttcaggaccctgtcaacacaggtcaacacgctggatctgatctcagagttgcaacaaaaacttaccctgtgtgctgtcacgctcaccagctcagagaggaagaatgggaagaccaaatcttcttgaagaggacaccatggcccttccttccatgcagcaaggacttcccaatcagcaagcttccgaggctatttggggcacagctcttcagtgagaattctctccgtgcctggaaagaatgaaaattagcagtccaaccatgtcatgggaacaacctgggacattacttaatagatctaattacatgagaataatttcattagcaccagctttcagttgaatatgctacaaatggtccccaaaatgtgtatttccttcctggaacctatccgtaatgagatttttgtggctgagggtttattccataggacacttccaaggcccccagttttgagctagatgaacacattaagcaatgaagcatgctcaggtttgtatctgtcgttatttattcacaaagtcttcctataaacaccaggataatgtcattgaagtcatgtgggcagtgttagagagactaagtggtggacacatttgcagaggccaggaattctggctcctcattgaccatccttctctcccaaggtgggaactaggggagccccatgcatcctcccgggctcctcacgagggagcacttcctctcattgtgatgcagtgacctgagtttcctgctatgaacaggcttcagatgaaatctaaccaaagatcttcccttcttttccttcctctcctctcctttcatatcttccttcttcttttcaatttctctctcttccttttttttccctttctttccctacttctctccctcttctgccctccaactctcaacacactggagagcaaacattcaaaacaaaccttgtacacacacacacacacatatatatatattatataatggaatattaagtcataaaaaagaatgaaata

SEQ ID NO: 59532 - DNA, 1072 bp, Bovine  19866881053355
  misc_feature (1)..(1): n is a, c, g, or t
nctggaaaaaccatagccttgactagacggacctttgttggcaaagtaatgtctctgcttttgaatatgctatctaggttggtcataacttttttttcaaggagtaagcgtcttttaatttcatggctgcagtcaccatctgcagtgattttggagcccaaaaagataaagtctgacactctttccactgttttccccatctatttcccatgaagtgatgggaccagatgccatgatcttcgttttctgaatgttgagcttctgggtgattgttatgattaaaaatatatttttaaccaataaagttttcttctggccagactctgaggcaatggtccatttcttctaccatggctctgcgtggtccctggattccagcttaccccacgtgctctgcctctctgaatggggcttgtgcctgtgttcatatttcagagttcctgtcctgaccatatgcccactgtctgtctttgcttttaaaaaaatagagacctggctcgatctttctagagttcatgtcccatgaatctatgtgatatataactaataataagataaggcaaacatgttataattatcatcttggataagtaaaggtgaagacccttagtgatcaatgctagaaattcatgtggaatataaggcttcaaatgaaaagaagtacaatgaaaaactgaattatgttcagggagagtcaccgagatgggaaagagtctggaaattgtactaaagaaggagccattttataaaaataaagaaatagaaggaaatttggaagagagtttttgactatcttaaagggctgtgatggggaaaagtacgtaggtgtgattatggtcagaaccagtaccaataaaaagaaagaaatcttttcaacacttagagcattagcatccatgaaaaatagctgacctggaaagcaaagacagtcccattctcagagaccactttctgtaccagcacataggttagagagaagagtcttattttaaagagaggcatgggattagatgcccccaactgtcattctaactctctgactttatgatctgatcatgcttcaaggaattag

SEQ ID NO: 59533 - DNA, 972 bp, Bovine  19866881091640
  misc_feature (1)..(1): n is a, c, g, or t
nttcttagtcactaattttcctgaagacatgtagaaacactctgagcgacccttttcagatcaaaggaaatgctggtctgtgggctttccggcagactccacgctgcctccgggacactcttgacagctggcgttcctggattgttcggtagctatttcttttttacttctttctttctaaaagaatgatacctccactggtgttccaaactccaaaacaaatgtatttcaattgataacaatcttatagttgagcagcacgtaacattacaacggattttaataatcttgagtaacagcttgttcatgggggctgctgtgtaccggtgaaatcacttcaagagatcaatgagtcactgggctgatcacaaatggccacagtaactggcagtgcaacaaaggagaaacaacgtaacgctccccagagggaattaacagaccagatctcaggagtgactgggccacagctgaaagcggcctcacgcgaaacaaaacacagcgggatcgtttgatgacttgaaggttccctgcttcatacagggtgctgattgcactgattacatattaagtattcaataatgtgaacaaggaaatgaaggaacatacgagggtaaaaacaaatacacagccaagggaaaacaagaagctatgggatgaacttgagcatggagctatctgaacctcccatcaaccctgcctgaaattaatacccagaaatcacttctcacctgggtaagtttacacccaactcagcaggggtgtcattcaacaccacagggcaacacggtcacagcacaggctccgtctgtgaggcctgttccttgagaaggtgtttcctgctccgatgtaacctgcctgcgtgtgcacggagtggaggctttggttgtggactcatttgatgaacccaaggggacggtgaagtgatttacatattattccactcaattttgtttcagaaaaaatagcatagat

SEQ ID NO: 59534 - DNA, 1470 bp, Bovine  19866881168125
  misc_feature (1)..(1): n is a, c, g, or t
nttttcttcattaaaaccaccacgcctcttcatttaactcatgttttagtatcttgattcaacaggatcataaaaacttttatttttgttgccgctgcttctttttgccccagggagacgtaaaagagaaacaagttaaagaatatacagtcagcccttctttaaaaatatataactagatttctaaaggaatgaaaaaatatagtactagcgggaaaacactgcagtcaaatctatatttaacttgaaataacataacttttgtgggtgtgtttgacattctctcatacctgctacaacccctgtgagtcctcagtaaatattaattatggataattgacaattcttttcttctaatggaagctgcagaaccaattctcaagttttcacttcgtgctgctacagcgaagtgcagccttcaacaaaggtctgcgttctctgtgccttggaatgtaaacatgatcatcctgtgagagatgagtgtgcgtctttctggatcctcaaaaagaaatcaagtttctacagagaatcctcacctaaagcaaacaaacaagtcagcctcatcttttgtctttctattttttaaagaaaaagaattaagcctgattccgaccaaccattctacgttccaaatatactttccaatttacaagtttctctgatgtgaatgccttttattgaccatcctgtaaatggcttaaatagttacaatctcctaattaggagaatttaatggcagtgacacatgccaccagagcccttaactgtgtttcctgtcaattctgatcaatctgttgtgtttgctgtaaatctaactgcttagtgatcagtgaataacatgaactcattgcctcagctcactttaggaatttattttgcaatgggcatggatgcatgttttaaactagacacaaacccaaacctatgtgtgtatatattaggttggccacccaaataactgttttggccaacctgatatatacagacaaacatttatatatactttatgaataatatatataccacatattatatgtgatgctatatataagtactttcataatctttccaaattaaattacatgtacctttagaatagagatgactatagaatccatctccactatgattgtttttggtaaataaagagtttcagagaagcttaattattatttttttaaaaaagatttaatttattgacaagtttccagaaacatagccattttctcaagcaaagttcacctttgttcgctctcttcatcaccaactgcacgccaacctacagcttctccatgtttctactacatgtttcaacaagtatgtaatgttagacatgctgcttgctttttagtgtgggttgatcatttcaaagggaatttgtgtttagtaagtgcagaacttttggtaagaattaaggtcattccacctagcctgtcaattgtacttattcaaatatgtatccaaatcaga

SEQ ID NO: 59535 - DNA, 1156 bp, Bovine  19866881179542
  misc_feature (1)..(1): n is a, c, g, or t
naaggaaattgtgacacaggctgcatcatggataaatcttaagaatattatgctaagtgaaataagccagtcacagaaagacaaataatagtacatgattctgctcatatacagcatatataaaatgctgtgaacaaaatcatagaaacagaaagcagaatagtgactgccagggccttggggatgagagaaaggggaagttggtttaaaaagttcagagcattagctttctgagatgaaaaagttttgaacattgattgcaccacagtgtggatgcccttaacattaagtgaattatgcacctaccaatggttgtggtggtagataaaaatctgattaattttaacatgttacacatatttattctcaattaagaagttaaaaatatacatatattaaaaaatctaacaaaccaatacattttaattctcttaagacgtaggagttgttgaggagctttttatatttaaatggagaaaataaatctaacgtgagcatgatttataaaatgtccccccatctccccaaatagttggagtctttgaaattaccatagatggcactgtgaatatcattttctaatattttcttatttatttaaaataaaataagatgaataatatcctattttttaaaatgagttgatgtatgatttgtgatttcaaataaatttctgttattgtcaaagattgaatttattaaatttcagtgttttgctttctaatggctttctaaatgtttcaaatcaaatgtataattaagtttatttttattggtttttaaattaatattttgttatttgtttttctaggatcttaattcatatcttgaagataaagtctaccttacaggatataacttcacattagcagatatcctattatattatgggcttcatcgctttattgtgagtattcaaatagttactggctctttttgtctgcagtgttcagaatgcctttttttcatttgtcttgaatttaaatcaaatttgcattttcaccttatcaaatgaaagggattatttttatataaggcaccttatgcaaatatccctcccttccctggacccatcacacagaggagcttcctgctccttgacatgcctggttttgttcctgttcttgggcttgcttttctttgtggccccttggga

SEQ ID NO: 59536 - DNA, 3329 bp, Bovine  19866881242005
  misc_feature (1)..(1): n is a, c, g, or t
ncatttagtcaaggctatggtttttccagtagtcacggatggatgtgagagttggactataaagaaaactgagtcactgaagaattgatgcttttgaactgtggtgttggagaagactcttgagagtcccttggacagcaaggagatccaaccagtccatcctagaggaaaccagtcctgaatattcactggaaggactggtgctgaagctgaaactccagcactttggccacctgatgcaaagaactgacatactggaaaagaccctgagggtgggaaagattgaaggcagaaggagaaggggatgacagaggatgagatggttggatggcatcaccgactcgatggacacaagtagagtaagctacgggagttggtgctggacaggaaacctggcgtgctgccgtccttggggtcgtaaagagtcagacacgaccgagggactgaactgaactgaaccgtgcccagttttgatgctattggaacagggaccgttggaggagaaagggtggccagccttacacagatgctcagagtcaccggtgtgtgggacctagaacgtcacctcctagagcagtggctgcagctgaaccagcggcaccaatccttttggatttttcagctgcttttggaaatcactgacttcgaagttgattgacttcgggcgtgctggcttcactcttcagcagctgcacttacttgttcaaggagggcaattgtgctcagccgcacaaaagggtgcttcttagcgacatgtttattttccgatctttcttattcatggaaagctccaagtttaaaaacagaagagatgattttactgtatttttttaatcataaaaggaacttagtcctgttaagactagtgcattgctataaaggtgtagataaaactagatctgtagattgtaggcacctaagtgtgaaagctatccaagccctgttaacctcttcacatacatataaactcagatactcaacttttctgccaattctacaattcctcattaaggaagtttcaggaatacttgaagtaagcatgaatagcaaaaatcccctgttgaaacaaaaccacttatttctcactatgcaaccaaattaatctttaaaataatctatttctcttcatttgcgtctctttcatgcctacctgaattctgtcttcacttctttttatatatttttttccatttctcttttttccttggttctcattaattaaacaagagctgttaggtagctacagaatgcaggaagttcaattctagcttctcagctcacattctgaaggtagaaacaatagcaattttttacaggtgaatactataaagtaaaatgctaaattgatgcagtatatgtagagtgagacagactgtacattgcattttaggaattctttctcatttttctatatctctcaatctctagatccaactatgtatctatatagccacatatatacacatactatggttgattagcctatgcgggatgatagcattcaataggcaagaatacccaagagttttccccacttgatggtgctagaataaggactccaaggtaatccatttcccttcatgctacttaaaaataagcaaggtgcattttacattatgcactcggaggcaatattcagctactgcttaacattcagaggggcttctgcgatcctccacactgtcacggctgctctccctctccctgcggtacaagaaaacatggttatttaccctgggacacaggtgactgaacttataaaaatcactacaagacaagatgtattgaggcctggcatggaatgacaaattctggggaggttcaccaagaagagacatattgattcttaaatgattaataaggagaatataattgtatttcattaagatggatgggatttcatttagtctgtcttctccctttccacttcagatgcaagaggaaatcaagtcatcatcagtggcacctcgtgttagcctgccatggcaacaagctcattgatgagtcagagaactttgagatgcactggctggtctttaatgggttgctgaaagcagagataacagggccaagggagccaactcagtcaaaggaagagtggaaaatcacaatcagatttctcagtggttcctaacagagttaagcccttttataaatctcaggctggagtacaaaatgatacccacttccttcatttgggagagaggaggatttgccttgtagcataatcaggtctctgcgtgaggattttatgctggtaaattacatcaatacaaaaataatagttaagatattttgtatgtgctagacatttttttgcactgtcttaattatttttctaaacctccctcagtgctctgtaccatcaccattttactgaggagaaagcagatgtttagagtgacttgcacctatgaaggatcagattcagccttgaactcaataaaccgatcctgtttttaaaggaactcagttttcttacaaaggcctgtttgtttatagagaaaacgagctaaaggcagcaacagtggttcctgggtgtactttggagccagacgctctgggacaaagtccaactccaccctaaataattatataaactgatgagttattcaacctactaggtctctttgcttgtctgtattatggggttgttgtgaggcttgaatgaattgatgtagctaaagtactgtgaatgcattgtctcaatggtgcatagttaagtgtgaaatacacagacatgtgcctgggtttgagttctgctctgttggaacggcagatacccaagaggactgccttcctggtgacagcatattccaagcctagctttctctgttgcaaagcaagttctgagactatttgacttcaaagtgcagaggaaggacagtccgtccattcagaggtgggatgctgaaaatgtttgctgaacaataacttaaactattgaattgcttaactgctgcaggacttttgtcttctgtgaaagataatttaaaaatagtaaccatcacagcatacggtgaaagaaatgtgagaggaagcttagggtctgggaagaattccatacaagtcagccatcatatttattattattgttactattaagacagcatgggaataatagtaataggaatatagaaagatctaccaaatccaaaattctatttaataagagctttactacatggagcctctgtggtttccaactttcaaagaattagcacgtaataactcaatgcaaagagctgactcattggaaaagactcttgatgctgggagggattgggggcatgaggaaaaggggatgacagaggatgagatggctggat

SEQ ID NO: 59537 - DNA, 1189 bp, Bovine  19866881253650
  misc_feature (1)..(1): n is a, c, g, or t
ncccccgcctcggacccccttccccggatcgaccgccccccgagcccccacttggaacacttttgcaaagatgtctttcacgggtgtgtggtaatgtgtttcattttccaatctatgtggttcctggtgactgagcctgttgtgagaagggttatgcagtctgagagctcgactaatgacactgccttttttttttctacataaaacacaaactccactagagtgatttccatattggaaaaaaatgcataaccacaatccagccagtagtgtcattgttgctgtgtgcatttccatgtctgtactatttgcagaagcaagagagattctggttcgcatatcagacgttatagtcaaggataaagcaaatgcagaagaatcagaaggggaggggcataggcattttgatggaatttggtgtgttcctgccatttccaaagaatttaaaaatgagaacaatttgtgtttcttgatgatttgatggattccctgatggcttggatggtaaagaatctgcctgcaatgcaggagacgtgagttcaatccctggattgggaagaagggtatggaaaacccactccagtattcttgtctggagaattccttggacagataagcctggtgggctatagtccatgggatcacaagaatcggacatgacttagtggctaaatgactactaccatgatccttaaatcattgccgtaggatggcccaggtgagcccagctggggtggttggtgtgttattggccaactccggcttctaagagacaccactcagccacttccacctgctcagtttcctccacttcacagggggtgccctgcagttagactccctcccggcctggtgtgaatgagctgtagacggcctctgtgtattgatccttgcattctttatttctttccggtaggctgtgacctgttagctcaaaagccaatcaacaccaaactcaaatttttacatgccagttatttaacaaatcacctggaatggttttagagtctttattgaattttaaaagtaattatcaaagattataattgtacagtattgacaagtatagagtgaaatgcagtgattagaagacagttgctctccaacactgctttaaagtctttattgaatttgttacaatttgttacaatttgcttctgttggattatgttctggggggttttggcca

SEQ ID NO: 59538 - DNA, 1028 bp, Bovine  19866881258464
  misc_feature (1)..(1): n is a, c, g, or t
nacttaattttatacaacaacctattgaacaagctgttcttggacattcccatctcaactaaatgttaaaagtattaaaattcacattagcacaagaggaaattttgcatgggtaatcctttaatacagtgttttatggctctattagctgcacagcagctggtgacatgatgaatttaatccattaaaaaattcaggaagaggtttaaaagtcagctttttaaaacattatcttgctacaaggaaagggaacttctcctcggggccagaagtggcctggcttcacactgaggcaggtgtgcaaaacacacgtgcctgacaaatgcacatgctcagaggctggctcccagagaggggttagtgtgatggtgagccagggctcagggcgggggagccagagcaggctgaaacagctgagcatctttgacttaggtcttctgctttctccttgcttttcagagaaggttttacatggatagtaaacaatggtattgtttttagatgggtgcagcatttttgtgtcgaggtctgtatttctgtaaaatcagaaattccctgagcctttagtggtatgattatttatctgacaagggcataagtaagaaaagatgtttcaacccttgctataaataagcgtctgccaaatcccttgggtataaaagctttggtgcaagggatccagggcctcaccttgaagagatgctcccgcttggtacctctggagggccttgggagggagcctggatgcaatgcagtgaggtagcatcttggatggcttagtaagttggggacctgccttggaagtagatggatggcactggcgtgtcttaaccactagcctgctgctactgctgctaagttgcttcagttgtgtctgactctgtgcgaccccatagacgtcagcccaccaggctcccccgtccccaggactctccaggcaagaacactgggagtgggttgctatttccttcttcaatgcatgaaagtgaaaagggaaagtgaagtcgctcagtcgagtccgactctta

SEQ ID NO: 59539 - DNA, 1389 bp, Bovine  19866881347790
  misc_feature (1)..(1): n is a, c, g, or t
naagagatgtctatattgcctctagatgaccttcttgcttctgacattttctttaggaaaaacagcctactagggtcagatttgccattttttcaagtactgatttactgtattatttttctgtaaaatgaatctcctgaacacacacacacacacactctctctctctctctctctctctttcacatggcatattaaatctcaacacccacataaattcccacagatttttggtgtgtgaggatcaagaactgacctgagttttttttaaaactctctgtgtaggggtttgcaagtgaaaatttgcaagtgattgtgctacaaattagagaatatgagaaacattattcattatgtatctaagccgtgtccaactctgcgaccccatggacagcagcacaccactatctcccagaatttactcaaactcttgtccattgagttggtgatgccatctaatcatctcatcctctcctccttctcctcctgacttcaatctttcccagcatcagggtcttttccaatgagtcggctcttcatatcaagtggctcaaaatattggaacttcaccttcagcatcagtcctttcaatgaatattcaaggttgatttcctttaggattgactaatttgatttccttgctgtccaagggactctcaagagtcttctccagaaccacagttcgaaagcatcaaatcttctgctgtccgtagttccttcaccaggggtcagactcgaatcccctgtattggaaggcagattctgaaccactggaccaccagggaagtcatgagcaatgtggtggatttaagaagcccagatggttttgcagaggtgacagtggttgtgatctactcttcctctgtgtggttgctccagggttgaaggtaacaaataatatccgtatcaagtgaaattgactctttgaaggaggcagccaacgtttcaatctcttttcattcttgctaagggtctaagctccattatcgaaggcagtaacagcaggatggatgaagacttgtaaaacacgtaccatggcagccttcacatattgtaaaaggtgaagtccatttacacttctcatttagctgaatgagaatgagtcatttgcttaatggataattttaacttgatttccaataagtggattaagtaactgaagcacttcaacacaaggcagaatatttgttatagcatttggaaaagaaaccatagccagatctgtcagcaacttaagatggaaaattcctattagtcaatctatcaatcacggttcattattaagcaacattctaatggtctggcctgctgtgctgacacgttgccgggcgtttgcaatgttacaccaaggttgcaggctatcctgataggcatcctgctgttagtcta

SEQ ID NO: 59540 - DNA, 996 bp, Bovine  19866881455450
  misc_feature (1)..(1): n is a, c, g, or t
ncaaggtcccaactatactttgatctgtgtcagaattactccagatgtattgcctctaaatgttgctctgagtatgccatcattgatcaaaatagaagaaataccctaagactatctttagagatgaatctgaaaaatgccttcagtatgattttcaccatggttaaaacagttatatctctaaggcagatgaaaatgctaggagccttggcctgaaaacacaggctgcttgcacaaagtagaaaatgtttcttcttttttttaaagaaaaaaataattaaaatgtgaacctctcttgccttattcatggccctgccattgagctgtgtatggttcggttaagacaaaatgtatgcttattgttcttttatatatcagttaataaaaaattaagcccattaggactacagcatttagacaagagagaatgatatttttttaatgtcacactcaaaaccacatctcttttaatcaacatctgctccctgttaggccgcctataaaatctggtgccctgttgacagtagaagatgaaaacaagcaaacaggaaaactacaaaaggcgtggtattaacatcaaaggagaagagccctgctcgctttctttggcattttaaaaacgtctttattttgaccccaaacaattggattttctccccaccagtcttgattttggagctctggattaagaagactcgcatgcgaactgaaacatgagaggagagggggctgcgggcgaacgaggaactgtttgaacacattaaaccattcgcaattataaacccgcgttgaggacaatcagaaaacagcgccacgtttgttcgtagagtaaacccacgctctttagctgcagtggcaggtaccacataggaggggaagtgatccctgctgtggtcttagaatgctgcaaataaaggggttcaaaggttggctattacggagaaggaagagatcctttggattttactgtggatgcggcgtttaggagcaccacta

SEQ ID NO: 59541 - DNA, 793 bp, Bovine  19866881551297
  misc_feature (1)..(1): n is a, c, g, or t
nggtgaggctgctgctcctgctgctaacgtgtggctttgccaaggtatggcatggttgacttgcttccaggaggatggaggtgagaagcagagggaaaagggtgcgagcggccattcagcccctcacttgcgagctaactaggaatgatttctgatgatagcccctgcctccatcaagggcatttcttccatttaatgagcacgcggggaggcaggcatggctcaagaacaagagttcagtttgcagtcagccacaaatcacatttcatttatcaggccctacagatgacaggatatcatcgaatccctggagagccatattcattaaaaagaaatcttaagtaattacaacaattaattgacttgaaacagtttctggtggataaggtttacataattcatttgccagacaaaacaagcctgatcaagcctggaaaaagctatttccaagccttcctctatctgacactgtgtggtcctggaaagggggtttaccttttagaggtctccctccccctcttttttgggggcaggcaacagtagtttgtaaagtgagaaatgagaacctgaaagaattttatcgactcaatttggggtccttgagatggctctgcagcccttttattttttacttaccattgttcctaaaactgatgaatgaacataaatatgggttggatcaatcatgaactctctgaatttgtggttttgaggaggcagacatggatccaagacaaggctttccagaaacctaagagattatttaggacaaggtcaaggctccttccaagag

SEQ ID NO: 59542 - DNA, 1429 bp, Bovine  19866881899202
  misc_feature (1)..(1): n is a, c, g, or t
ncagcagggccaaagaaaaaactgggtacactctctatttgagctgagatagaaaatgagttactctgagcatttcctgcggctggagttctcctccgaagcctgggcagcctctctgctcaaccgcttcggaggatgagcacgtgttctgtggtgcctaacgacacattggataaacaagcagatgcgcattaaaatgaacgagtgtcaaaactttttcatgcttatttgttattaacgacagaaagtgaaggtgcagttcgaatagtttgttattcttttacgtttgtggcaatatattacaatttatgcctcggcttagaggttgattacaagttttatgagactgagtgcctgttattggcaatcttgatgttttcttttctcctgtaacgtgtcacagacaatggatttatatgcagtcagtgatttttgttttatatcatttcaataaaaaaaaattaaagaagaaagtgtggagtggggagcaaaaaggggataatgaaggttacattcgtcatatgggaggatttaaagtatattaataatatgtgttctttctggcatccattctcagagcactttatattctttgcaagagacaaaacaacaagtcatcagggactttttataaacacaggtggcgcttattaaactgagaaataaaaattttacactcctgatgattagcctagacaagttttcatgagctcctgcacttatgaaaaacggtgcttattttctttcctactttctccctcaattctgatgactttcattctctgtgaacagcttgagttagtggtgcagtgatacctaaaatatttctggcagatttttgaggcaagatattaacaatctattttacaacgatcgtcgtaataaaataccgcactctacaaattttaacagacatggccatgaacctcaatgcaaataaagacttcatatgtgaagagagaattaaggtttatatcaacaaatatttgactaaaaagaggaaaatccaacttgcctcttctatttgtcattgtcgcacattgcttgtgtgatttttttcttaaagtggcctgaattgattactttaatattgtttcaatacatatggagggcaaaccccaaaaaacacaaaacaaaattgagcagattctgttaaatattggggacagagcacacgaaattattgtgcaacattttcatttaaagaaagccttacatattacaactgagaatacatatttaaatgtgcaatgagtatttgtagtaacatctaaaagcatagggatacacattaaaaaaattaagatccaacaaaaattaagatttccccaacaagggggaaaacattcgtaaacaagatggaaacacgtctctaattacacacggtagcagctacctcttatgcttatccttcgtcctcagtcttttt

SEQ ID NO: 59543 - DNA, 1145 bp, Bovine  19866880340829
  misc_feature (1)..(1): n is a, c, g, or t
nggtttgatccctgggtcaggaagatccactggagaagggaatggcaacccactccagtattcttgcctaggaaatcccatggacagaggagcctggtgggctgcagtccacggggtctcaaaagagacacgactgaacaactaaacaacaggcagcggggctgatactcagtgtatgcagcaacccactgggaagggtggtagaataggatcctggagggttgtggctgtggtaggtgttaaccttttagttgctggattgtggggagaagctggactcagggggagcccagggtggggctcaggaggctcagagaagaggctacttctcaaacagcacagaatatttcaatattttaacaaccacagtcatactgctcaccatcagtcaagagtgaggagctcataaaggaaagactgagataggcagggagaaatggggaagaggggttcaaattagttagggccccctgctgggttcaatcccttggttgggaagatcccctagagaagaagatggcaacccactccagtgttcttgcctggagaatcccatggacagaggagcctggtgggctacagtccaaggggtcgcaaggagtcagactcgactgggtgactaagcacagccctgcttggaaaggcttgttgctgccaagaatgactatttggggtcactacgggttagcaatcccaggggcctggaactgggcagagaccaggggcttaccggaaatgaaggagatttcgctgaagagtagccagggccccgcaaagagaaagcggcattgcaggaagcggcccatgcggccgcccaggggcactgacacagtccgggctcttggggtcccccaggctgccccccagagcatggcgcacgggctccccctcccaggccatggccgggcccctcttgaagcgacactccaccccaccgggcaggcgggctcccagcgtgtgcatgttgttgcagtggacctgggggaaagggaggagggacacaaggtcaaggccaggagagcccaagcgagcaccccggggcacccagcctggtctcagagcccttcctgggagctggccgcacccacctgcatggccttggaaggccctcagccggtcaaactcaaactccatcttccacgtag

SEQ ID NO: 59544 - DNA, 4067 bp, Bovine  19866880458625
  misc_feature (1)..(1): n is a, c, g, or t
nccctcgaggtgggaggaagaggacccgggactcaggggacctcagcatgcgcgcatgcacttgtatgcacacgcaggcgttcagggctcacctgcagacatgtcaggtggtggaaggtgcagtggttctccttcccctttgctccaggtggacagaaagcccgagttgtgtttgcagagctggcctgtcgggagcccgatgtcctcatcttggtgagtgaatggggctgcggggcggggctgacaccaggaaaggtaggggtcgttaacacttggtttcgggatgcctcctccccataggacgagcccaccaataacctggacatcgagtctatcgacgctctaggggaggccatcaacgaatacaagggtggtgagtcagctcgggcctgccctcctcctgccccgcttggggatgggactgtaggtgtcctggggctgggcaccctcctcgcaggttttgattcccctcttcctttctgcctgtcctccattctcgctgtcttgccttgaagctgtgatcgtcgtcagccacgatgcccgactcatcacagaaaccaactgccagctgtgggtggtggaggagcagagtgttagccagattgacggtgacttcgaagactacaagcgggaggtgttggaggccctgggagaagtcatggtcagccggccccgagagtgagctttccttcctggacatcccctgtctcctctccactcggaagcttgctctggtctgcagccggcgtggcagctgctcgggcgtgtgaaagcggagtgtggtcttgatgtgaccaggatatttgattgcttctttttctctgaatgactcgtctgttctgcttctcttgagataactggagtggtgcttgtccttgaagtccctctgtacaggcagaggtgacatttgtcatcatggggttccatccagccagctcacgcagccagttgtctgagcctctgtcctcaccgggaagcctgcctctgggccgccccaagcttcgggtgcagctgccgtgtggtctgagtggtgctgcactcctccggtggattcagtgctgacctaatggataccaacagctgctgctgctcctgccacccaggatctggtgcctgcagtatctggtctgatgggggacttggggacaggaaaggaatgctgctgaactcgaatcaccctttacaaggggaagaaataaaggaaaggagttgccgccgccttgttgctgtttggagattcgtgagagctggaactcttgtgaatcttgatttgctgtgtccgcttttctagcagtgggtggcagcctgtcttccccactggtgcaggcgggtgtcacttgcagtcttacctcactttaggtagtgctcgctgtttgaggagcctctcccttcccccagcccttcaaatgagtgctagggaaagggagtcctcccttctagctaggactaggacactcgggtttctcactatccaagctccaccccggggtcagggaccagagtgtctgtccccacagacactgtgtagcactgtggggtatacgggaagggcgcagacgtggtctgccttcgtgcataatctagacagagaagacttagaagatgtgagtgtacagcgttgatacaggtaattgccaaatgtgcagagttgtagattctaagtggccttgagctcatagatgagaaaggttactcagaacttggttttgtggcaggatcacttgagggaggaccttgagaaatagtaaggcttttaaccatgagcagggagccatttttgaaatgtaggaaaaagagcggatctaaggaagaaagaactgttttgggagttaatgaagaacatggctcgtgtggccactttttttattagtgttagattggagagatgggtttggaaagtaaaacccaagtggttggttggtgatcatttcagtgagtgatgggtgaggtggactatatagacttacagcacaggccccagaaacttcctagtgcggatgaggtaatacatcctgaattaggatgtgagaggggtggaaaggacggacagatggatagagccaggtgtgtaaattgcagagaaaacaggtgcatccaattctcaggggaacgtgaagaaccatctcagggcttcctgaggtgggatgtcttaactttgggaagttacattctggccggaaatactactggactgcagttacaaggtttatactgaaagttaagatttggtatgaagatagtcacagagctagtaccatcaggtatgtgtccagccagattagaaaggatcttggaattcgagggaaaaaaaatcaaggtcttatgccaagtaagatgttacatgttaaagtagtctccatagtaaggtcctttgtaaaacaatgagaacagacttcaagtccatgactaacggagtgaccttgaacttagcttcttcgtacctgtttcctcatttgtgacatgaaggtgataaaaagtacatacctcacaaggttattaagattttagataagtatttataaagtgttttttttttttaattacatgtatttcatgtacaacttaacactttgcacttcagttgttcagtagtatagatgagatgatatataaaacagaggaatgttataagatgaacaccagaattttgcatttcaagtatttgatgctaatttcactacaaatacttcagatactgaaagtaacttccatccacaggcagaagttttgtttcctcaatatatatactgttgtaatgcacctaaatctggacaaaagaatgcgcttctccagaaaggggagcctaatacagtacagtgtatggctaacccaaagcctgaaaaatgaaatttcattaacaaaattaaatgtttgtattcatgacagtctttgtcacctacaaatcaggcaccaatgtggttcataatgagcactttggaatggttcaaaaaattcctgattattctgcacaccttcccaatgaggaaacagagaccctgagctgcccctggccacccagcctggaggagactgttcctgcgacggcagcccttgttttctgaccccagcaccctgggcattctccctgggctgtaggatgtggacagatcctcactatttctcaaggtcctcccttacgtgatcctgccaaatcatcagattctaggtaatctttctctcttctgagctcaaggcaacttagaatctacaacgcccacacgtttggcagtgtggacaaggtgaccgaaggatgagtcctcagggggcacaagagccaggacaggtgttttagggaagactgtcacgtcagcaatacagtgggaaaggggaacgccagggaggagcaccatggccatgagcgccgtggccgtgcagaactcagaggaggcctgggtacgtgagaagtggcccttgtgaggccagtgctgatgcagcagctcagatgcttgaactagctgctctaggaccatggttctcaacgtgtcctagaccagcatcagcagcagcacccagagtttgctagaaatgcaaagatagggttgacacagaggtcagaagttacaaggttatttggggggtgggggtggaaacggaataagaaggaagaagaggtcagttggaacaggagagctgtgcctgcaaggcttggtgaagaagcagaaatgggcacagtagcgcctttggagtttgtcacaggaaatggtgttagagtggaaggtagggtcgcctttagtgtgagtgataagggaagacttctcaggaagtaacactaaagacaaggcctgtaggtggacaaggaaccaactagatggataagaaagagccttcatggaagggaccagaatgtgcaatggctcagaagctggaaagagctggtcctggaagatggcttgagcttagagcttgagcagcagataggacacatgaggccttacacaccttgatagggagttaggatatggttctaggagcattagaaggccatcggagtgtatgcaggagtgtgaattttcacaaaattgttctggctgctgggtagagtggtgggtggggggtatagggagagg

SEQ ID NO: 59545 - DNA, 2125 bp, Bovine  19866880565667
  misc_feature (1)..(1): n is a, c, g, or t
naaatcgacgcgggcgtcctcggaagcacccaatgagcaaccccagggctccccctgcagttgggggcggggagccctgtgcagccccttgttgctgcctaccccaagaagagacagtggcctgggttcagtgtgatggctgtgacatctggttccacgtggcctgtgttggttgcagcattcaggctgccagggaggccgacttccggtgcccaggctgtcgtgcaggcatccagacctaaggcccaccgccaaagcaccagaggacagagccagcacctccaggccagggatggacagtgagggtgccaatgggtcctaagagctgccctcttctatccttgcctctccaggagggaatgactcaggagaagggtccactcctgtggattatcaattcaaggcctggagcagggccttgtggccaaggtgacagaagagatggcttcctgccaaagatattgctgcctccaggaagttaccagtgagctggaaatacccactgtcacaagctgtaggtccttgttgtcatggacactagaatgtttgtggtcaagagcatccatcaattgtagaggtcatgcctgggaagttataagccccagccttgaacaaggaagttcttaatgtttttgatggtatccctaaggcatctctgggaaaacctagagcacagaccccaaacttccttacattgtgggtggtcctgctgctgaccacaatcactgtgacctgacttctcagagctttgcttccatttccaaataaagaatgagcagctttatacgctctaaagtatttactctttgtgtgggtctgatactccttgctttctagttcttgagagaatggagttggttagtctggaaaattaattcagatacttataggaagagacaagcagatgaggcagaggaaaacaggaataggggatctaggtaattacagttgctaatttaaaagaaaacattcactgccgttaaaatgtcatttggatttgatcaaattcatgagggtggtggaacttctacaagtttcatcggtactaccaagaagagaaaacctgagacagcagctagagcagatgtcaacctggtgcagtatcaataaaacccacatatgctacattgagtctcttctgagttgcacaccaagtcagcacactgtcaaagcagtgtttctatagttcttactaggaaagtcctgtcttgacctatcttattgcaccctgcatgtccatccccttccttctctacttagacttaccaacccaagtttttttacggatcaaagaaaagctccagaggaagagccccagttaggaagtggcagagtcaggactaagtgtgtgtagtggtaggtgagtcacagacaaggcaaaaaccttaagtgaaaaccaaatggaccccagtatcaagaaagcacaaagtggagtttctggttggggtgatagaagaaatgagtaaaggtttgatttcttagcacatagccactgaggactacagagtagaatgggggaaagcaaaaaaccagatcctaatagggaacagactatgtaataactgcatctttgggcaaaggtgttcatctccaatttctgcaggaccgcaagtcagaggctcctaagaactagctcacacttataaagagccctatccatataaacttgggatccaaccccacacctccctctgacattgtgactctgcgcaatgtaaacagcaaccttcgtttcggggtcatttgggtcagagagctattaatacccactattaatatcctatccactcttcaataactagaggataaaccaaagacaaaaatatccacctactaggtcccaggcttctttatttaagaacaaagtgatgagtgatgtggggattaaagtcaagagcatcattgaacttcaccctccctccaaccagtttccccaaactccctgcccccacacccattgtgttcccaattcctttcttagtgaatgaaaaacttaatcccaaagccctggtacaaaccccagggttctctccctagctctccccttcctctgccccccattcctggggtgagcaggcacctcagtttgaatgcataggagagcccagagcggtgacagacaccg

SEQ ID NO: 59546 - DNA, 990 bp, Bovine  19866880572343
  misc_feature (1)..(1): n is a, c, g, or t
natgttttttccttgtttagctcctactgtaaacaatgtcattttcgcagtatgttcactgctacatattttgcacttttgtgctctgtgttggtgatttcacagttcagaatgcccccaagtgtggtgctgagtgccgtctagagttcctaagtccaagaagacttgatgtgcttgatggagaatatacatgtgttagataagctgctttcaggcatgagttatagtgctgttggatgtgagttcattgctaatgaatcaacaaatacattacatatggtgtctttacgcagaaatgcataaaacaaagatacataggactttcctgacaatccagtggttaaaactctgtgcttccagtgcaggggtcgatccctggttggggaactaagatcccacaataagtattggttaatccagtgttcacggctactttgtgaaaaccggaactaccatgaataatgagaatcaactgtactttgagacctttacccaatattatgaaattcatttttgccaagagttggtgtaggctgaaagcattaagtgtaacacatctttagttatgatattaaatccctgggtggcttgataggtgcctgagtgtggcatagtactcactgctcaaagtgtggtctgcctcccagcaacagcatatccctggggagcttgttataaatacaaaatccgaggctccagcccaacagaccaaatcagaatctatattttaacaaaatctctaggtgattcatgtacacattgaagtttgagaagtattgatttagtgaaaaccaccagcttgggtgggactttatcttctcaacatggctttccttgtctgctaatcaaaggatagcctggtttgggttctgttcaacttttattagtccctcgttttgtgtcagatttttgtgctaggtgctggaaaaataaggatttattcaacagagatctattaaatgcctactatatgccaggcattgttttgga

SEQ ID NO: 59547 - DNA, 3263 bp, Bovine  19866880575807
  misc_feature (1)..(1): n is a, c, g, or t
nctcccggtcgccgcttgggtccctaaccgcgccttgcgcaaagcgggcaggttggcgggacgctcttaagcctgtagggttaccactcctgaaggaggcggggaaaaggcgcacgcaggcgcagtagtgtctaaagccaggcccaattaaggcgttaggggcatctccgcgccctggcggctcctcccaactccgggaacccgggaaaacttgtgaactaatcagaaaaagcgaaaggcgggagatcccagagcgtcgcccaatggagaaaaggagggcaaacgaaatggccaatcaaaaacggctcgggggacgcgctcactccgctcgaagtccggacccgggaattccgaaggcggggtcagcgatgcccgcgcgcggaggccgcgcccctcctggcccgggcttcttcgctgtcaaacagccgcaggagcaccaaccccggccggatcccgagaggtcctgggctgcggcataagctggcattgcctggagagggaaccattccgagactgcacagcgcggtagatacgaatccgggctggggcggggagggaaaaggctggatttgtcttgaatcatcccgggaagccctttcctctgtttttatcccacctggagaaaccagaaagcaggggtttagctccaccttgttggacaacgtagagccccgtttgcactgcctttgaggggtgactgagtacgcttcccactggggttcaaactagctagttatgaatgagggattggtttagaagagtgaagcgtgagctagcaggagggttactctattaggaaaagcaggtttgacaggaagaagcttctcttctccaaattacactgaagtggcaagttagtatatcacacagaagcagcacccctccccccgccacacacacacctacagttctaatttccctagaaactgcctaatgtattgttgacttgcccagattgaaggctcctggaatattttgcggtctgagaatccgattcaacttcgtgccacaggacgcgttctattttgcactacactggaactttcaccaaattttttcagttgcaaagctgttgacagccaattttacatcgcatcctaggctccctgcaccctgaatttgccctactcagggagtgtgctcaaagtcgaacttgcacaaaacatagctcaagtttgcgtcagacggaaagtgaatttaggccagctgtgcacggcccagggagaggacaaggtgatggattcctgaggtgaagtggtggtgccgagggggccccgcccatgctgccctgcttccagctgctgcgcattggggtcggcaagggtgtcgatctccacaccttccacccacccagtggagctggctgcacctaccgcttgggctgcagggccgatctctgtgatgtgaccctgcggccacagcacgagccaggcttcatctctggggtccacgcagagctgcatgcggagcgccagggtgatgactggagggtcagcctggagaaccacagcagccaaggtgaggagtgagcagggcagccttatgctggggcagtcgcagttctgggctataatgaattaaaagagccaacagggattctgccggcctcccaaactccccatcaggttggatggacggttgtcatgcagacttatgtctttccaccagaaatgtgcagtgtcagaagctctttgtggggctgatcctgtttagctcatagagggggtgggaggtagatccacagactggagccatcacagtggggttgttctgagaccatggtgggtggtgagggggcaagcttagacttcagtttctagattgtttagacatttgttcttgccttagggcagttgtgaaatctgttgaattatcttaattatctggacatgtgccttactccctgacttggaggcagttaggcagcctcagaaggcctgggtttacatgagttctgctgttggcccctggtaacgtcactcagacctgccactccacctctctaggtcttagtttcctagaatatgtctttgtgagtgaggagtgttgtgggtattggataatttcaactggccaacattaatttcctgtttattattatgagccaagaactgttttatgtgcattaaatataggtgagcacaaatgccccattttacaaagaaaatgaaacataaagaggctgacttgtccagggtcacatgacaggtaaatggtggaatttgaacccagatagtctgagctatgctgataagtgctgagttggagctgagagttgagcgtctctgagacccagacctcagtggattgaggggaagttcgttccatgtgccttgagggagagcataaggaaaaataataatattcttagctcacagggagtttcttatctgatgacacctactactgagggacttagaatgtaaggatttcatgacatgcatgtgttcttcctcgtattccccagaaaaccagacaggaccagatttctccactgctgaccagtcatttgtttttgtcattctctgtatctgtctggtgccccacaatcaacagggactttggtcaataatgtccgactcccaaggggtcacaggctggagttgagtgatggtgatcttctgacctttggccctgaagggcccccaggaaccagcccttcagagttctacttgtttcagcaagtccgagtcaaacctcaagattttgctgccattaccacccccgcggtctaggggagaagagggaaccgggattggtttccggcccatgctgccctcccagggggctccacagcgtcccctcagcaccctctccccagcccccaaagcaacccctgatcctcaactccattggcagcctcagcaagctccactcccagcccctcaccttctcacggagtgggggtgggccacagagtccgcctggtcccactcccaccggggaagtggggactgccccttctgccccacccccaagaaaccggaggaagtcagctcaccgcgtgttggaagaactggatgatgagagagaggctcccaagagcccctcaccagtcttgctggagcctaggaagaaactccgtgtagaaaaaaccccaatgacacccagtgggtaagtcaacttggctttatttcactgcctttggttttttaagagccctaggctgagatgtacctatctgcttgggtggtgggggtgggaggtggaacacctgttgtgatgacaaaatctgggttagctgtgctagccagattcaccat

SEQ ID NO: 59548 - DNA, 675 bp, Bovine  19866880688147
  misc_feature (1)..(1): n is a, c, g, or t
ncctgtttggctttcgcagcaaaaaaagaagcgagacacccgaaaagggaggcggaaaaaggatgtggatgatgatggagaggagaaggagctcatggagcgtcttaagaagctgtcagtaccagccagcgatgaggaggacgagggtaaatgcactgaggggagatgggtacctggaacccttgagtcaggaagagtctagggttcattccttgatcttggagttggagtagattgaggagtggacatggccattctctttcccagctcaccttctccccttgtcatttcagtacctgccccagtaccccgaggagggaagaaaaccaaggtaagccatctgtctcagtggtagacagagaccccaggggtgcagccttgaccatcctactgacttctgccctttcattctccagggtggtaatgtttttgcggccctgattcaggatcagagtgaagatgaggaggaagaggaggaaaaacatcctcctaagccggccaagccagagaagaatcggatcaataaggtgatatggctctgtcaagtccctcccaccccatgtggcacctctggctacagtgtggtgattccctggcttcttttcatgctttcaactagcttttctaggccaggccagtcttgcttatactgtcagcttatcctgtcaaagtcag

SEQ ID NO: 59549 - DNA, 1599 bp, Bovine  19866880723318
  misc_feature (1)..(1): n is a, c, g, or t
ncttcttgtctgaccgctcaggacgtttcgagtccgatccttgtcccgctgccgaacccgctcggcaaacgcatcgcgttcctccaggtcctgaaggcgctctcgctctgtccgctcccactcatcctctgactctggcttttccgtctgctctttcttctccctgcagcccagcccagaggattaactgagggcactcagaggcttcccgtcccatcaaccacctgccccattctctcgccccctacttctgacttaccctgtcttcctctttcctttctcagaaacttgttcctcctcctcgtcttcctcttccgcctcacgtttcttcctgaggtgtttccgttttttccgcttcttctggatactgctcccggccctgcccacagtctcctcgctgctctcctcactgtcctccaacaacatataagagcggttcttttccagcagggctcgggcttctcgctcagctgcccgagctggcttttccaccactgccttccgtgggacctgtcgggagagagaggaaaagtcaaggggatgtgagcaactcctgatctctgcccacctactctgcccggttcctaatttaaggagtaactgatcttaagccagctgtcattctctctcttccgcaaggcttcataccatgtccatcagcccaaatggggtctctcagtttctaagcctatcccgtgcaccccctgctaggtactagggatatagggataaagagacaaaacttcctgccctcacggagtttacattctcacacccaattctcgactgctcagcctctgttctccccaatgactaagtcattcctacccaaggactggacaaggattgtccagattgttttgcagagccctgtcacgggccggcactgtaccagcctccagagataccctggtgaacagattaacactgagctcctaccctcacatcaagtacattctaacctcatctttcaccaagtgcatatgggacagccacaccaggttatctgccattctctgaacaagttcaacacttttagtcttactgtatatttctgagctcttgttctgcagggtacaattagatggtatgaatacaaagacaaaaaacacagtcttgtcttccaggagctcaccattacacctttactcttcccctttctctacccaacaaattccagagaatctttgggctgcttttcgccatcaccgctacaccacttctaccctcccacaacactgcccacacatctcttctatagcctcactcttcgaagggtgggtaagtttccagcatcacccggaaacttgtaagatttgttagaaatgaagaaaggaagaaaccatcccagacctaccgaatcggaacaaaagccgtggatgaatcctaaacctgtttgagaaacactgctctatagacccttaagccctcctcaatcttctccacgggagtggtcgtccagcccgaaagtaataactgcttgcaaagtgaagtcgctcagtcgtgtccgactccttgcgaccccatggactgtagcccaccaggctcctccgtccatgggattctccaggcaagaatactggagtggcttgccatttc

SEQ ID NO: 59550 - DNA, 1870 bp, Bovine  19866880724399
  misc_feature (1)..(1): n is a, c, g, or t
nttagtatactgtatttatgtttttccttctggcttacttcactctgtatactaggctccagtttcatccacctcattagaactgattcaaatgtattctttttaatggctgagtaatactccattgtgtatatgtaccacagctttcttatccattcatctgctgatggacatctaggttgcttccatgtcctggctattataaacagtgctgcgatgaacattggggtacacgtgtctctttcccttctggtttcctcagtgtgtatgcccagcagtgggattgctgggtcataaggcagttctatttccagttttttaaggaatctccacactgttctccatagtggctgtactagtttgcattcccaccaacagtgtaggagggttcccttttctccacaccctctccagcatttattatttgtagacttttggatcgcagccatcctgactggtgtgaaatggtacacggttgcaaaaccacactcggaccacgtccttctccagcccgagctgctgggcgatgtggctaatttgctgcagggtgggcttcgggcactgcaggaacatgctctctaggttgcctctcacttggttctcgatactcgtccgctttctctttcgggcctgcacaagggtctctgccttgcatatctcctgcagattctcgttgttgtcagcttcctccacccacttctgcagcaggggccgcagcttacacatgttcttgaaactgagctgcaaagcctcaaaatggcagatagtcgtttggctgaacacctttccaaagagaacccccagggtgagccccacatcagcctgggtatatcctagtgtgatcctcttctgctttaggagcttggcaaattgttcaaggtctttctgaagagctttgatgtcctgggactcctcagggttcggttccagcttctccttgtccagcttcgcggcgcctgcgagtgcggcgcaggggtccggggaggccccctcggagttgttctccaccccggctcccgcctggccctcgggctgaggggtctccaggccgcctgggggcaccggccccactccaacctgcggcgcacagtaggccatccctccacacaagtcatagggcggggggcacgggggaagcccccacacctcggctccaggcacaacccccggcccgatccccgacccaccgggaggcccttggaagctcatccaggtccgaggatcaacccagcccggctctggccctcccggcccatcgcctccaccgcccggcgggggcgagaaggcgaagtcagaagcgaggtgtcccgccatggggaaggaaggcaccccgagccgggggcctaggaaaacgagggatctcctagagactgctcaacacctctctccctccccaatcccacccactagccttgacctctggccccgccccctggatgggtgggggggaagggacggtgggggtgggagaaactgaggcggagggtgtttgcctgctggtggcggtggtgtctggaaggggaaagccagggatctccacccaggcccctctccaggccccagactcctagactctcggtgcaggtcccccatgcgggccttcacttccagctcccaacaggctgcccagccctccccaggcccacatacaccaggggtgaggggtcccttccataccccctgcacgttcttcaggacccctctccagacaccctggcacctgagaccagccaccctctcaactcctcaaacacatttatgctgtatgtgtcaagtcccactggggctacccctcaattcttaacaggctccttccccgttgtcctccagcatcccagtccaggaacctaggcagttcccatttagcaca

SEQ ID NO: 59551 - DNA, 1700 bp, Bovine  19866880834326
  misc_feature (1)..(1): n is a, c, g, or t
ntactggagacagaggcagacctagggccaggtatcccctgtgacctcctgccccctcccaggcttgaaagcagcgacggagatggcgcctggtgccctgcagggccggtgttccccaaggaggaggaatacctccaggtggacctgcggcggctgcacctggtggcactggtaggcacccagggacggcacgcagggggcctgggcaaggagttctctcccagctaccgactgcgttactcccgggacggccaccgctggatggactggagggaccgctggggccaggaggtgaggctggggggatagccctggaagtctaggtcccctctgtgccccagctgtgtgctgtacactaatgactctgcagtgtgtgccctctctagcctgggcatctcccctgagctccatcaagtgttgcaaacctgaccacttcccacctagatgtgtaataggcttctcaaacttaccataaacttctcaggctgaacttgatccccattcccaccccaaacctcctccgcctccagcattctctaactcaggaaatggtaccactgtaagctaagatgctatccctgattcctcttttctttccacctcctactttaaagcatcagcaaagcaagtctgttctgcctccatgatatttcctgaaatctgctcacttcttagcacctccatctctactgccccaggccaggccccaccatcccctgcttagacgaatgcaatagtctccaaatggctctccttgcttctttctttcctgaagtcatctcccacctggaggctacatccaagggtgcctgagaaaatgccaagcagatgcctcatgcctggctcactccctctgctggctttcctccccgccagcacaaaagctgagctccctcctgggtgcagaagctcagcccaggctggctcttgtccacaccccttagtcctctccctgttcatacaggccatgctgattttcttgctgttcctggaacattctagggctcaccccacagtctcaagataccttcacttgcaagtctctgtgcctggaaagctctctctccccagctgtgcccaggctttcctccctccattcagttctcccccaagatatcacctcctcagagcctttttggactccccacctcctgctgcctcttgcttgtagagctgcctctcctcttggactctacaggggagggatggatgctcaccccctagaggctgtgcctggctggtgcagagtaagtgctcagccagtggctgctgagtgaacagagggattggggtgacggaagagggaagccagagcaggggtgcagagctgcgagggcctgggtggaatccgggcacaacaggatgagcagagccaggcaaggaagggatgggagagctgacgctggaggtcaggacagacggtccggctgggagggggtgtcagagggctctgctgcagccccttgacgtattgaaggccccggctgtaccccacggccccgggtgcttggtgccaccctttgtgggtctctctgtgaccactaagggctgggccaggaagcccctggtggctggggaagttagatctgatctggagccttcttctctcatctatcccatgtcctggcccacaggtgatcttaggtaatgaggatcctggggggagtggtgctgaagaccttgggccccccatggtggcc

SEQ ID NO: 59552 - DNA, 1854 bp, Bovine  19866880882602
  misc_feature (1)..(1): n is a, c, g, or t
ngtgccgtcacagttaaagaacatattcactggacttccctggtggtccggggaagggatcacccttccatgggttaagggttaagaactcgcctgccagtgcaggggacatgggtttgatccctggtgtgggaagattccacatgttgcagggcaactaagcccacgcaccacacctacgaagccctcgctctagaatctgtgctctgcaacaagagaagcctgggcaccgcaactagagagcagtccccactcgacacaactagagaaagcccacaaacagcaaggaagacccagcacagcaaaaaatacagaagtaaatattcactgagcacttaaaccacacgcaggtattatgccagcctcctaggagttctcgctgaattctcacaacacccctgtgatgcaggtatttccatcagccctgaattttacagacccaggagactgaggctgacaggctaacagcctgtcaggagccacatcgctgggaggtggccagattcagatgtgaatcccggcaggctggctccagagtccgagctctcccccgggctcagagctctcacaaacccgcctctcctctgcctcacctcaatatccgagatggcggagcgtaaggcacacgaccaattgaccagctgccggctccggtacaacaacccagccttgtagagccgcacgaaagcttctgtcacggccactgaggagccctaggatgacctgagtgtccacatccaacagcctcctctcagcccaccccctgccaggggcccaggcgtccccctggcccccctaacatacacagcaacccgcctccttgcacagaactctgaacacctccctgacacccacagggaccacagcaccaaacactcacggtatccatggtaaagcactctcggtcccagtccagggaggcccccagcgctcggagctgctcacagatctcgccacctttcctgtgcccagacagatttgggtcagcaaacatgtcccagacatcaactatgtcccgggcctagtgaagccccagcggtgctggactctggagtgagttcgagactgatctagcctcaagaagctaatggagacacacaggcccagtatatggctttctgtgatattgaaagaaacataacatttctagtaaaaggggaaggggcagccgatttgtgggaaacacaaagaagctttacagagaagacagcatgtgataacagacctggaagaaaaagggtaatttcaagaggatgcaaagtgggaacaggtgaggagagatgatgaaatccaagcaaaggaaaatgggataaatggaagaaaaaacatatatatatatacacacacatataaatatatgggggagcgcatgcatgcttagttactcagtcacgtccaactctttgacaccccgtggactgcggcctactgggctcctctgtccatggaaatttccaggcaagaatattggagtgggttgccttttcctcctccaggggatattccctaaccagggactgaacatgtgtctcctgtggctcctgcattggcaggcagattctttaccactgagccacctggggagcccatatatatgtgtacatatatatatatatatgcacttacacataaatatatgcattttaacatatacaatacacaacaaatgcacacacaccaagcttggagaccccaccaaatgctaagggacttcagagcttacactcccacgggaagttagagctgaatgggaaaagccctgactacaagttaggagaggggctgggaagcccagatccaaacctgctgtctcagcccctcctgccctgccccccatactcactcctccttcca

SEQ ID NO: 59553 - DNA, 1084 bp, Bovine  19866880911363
  misc_feature (1)..(1): n is a, c, g, or t
ntagtgtgactgtcaggcccagcatgccaggcttcagttgatgaaaagctggtctcactgttttacagtttccagaaagagctgtaggcaagggtggaccaccaccatggcctcacctctgccagctacaactttcacgggctgcaggtgtgatctgccatcactgaacctagcacactcaaggcgcaaaacttgagtgtcctcgaaggttgcaaaagtctcacttgagaaaggactcaatgtaaaaagcctgtgttcggggaggggtggggacaatgtgttccagaactcaaatccagcctgattgagccctctcagtgcagtggggtacacggtacccctttacatccccacccatggggaaatgaacgtggctgggaggatttcgtaagtgcagctgatcccacgtcagagttccttgtgcatgtcgaagacccacagcaggagagcagaggtgttctccaggataaccagctctaggttctcaggcgtgaagggcaataccggaaaggggcttgggatacagggcaaaactcctcaaagagtgaagccaactgggtctcctcttcagcagtccagggtacagaatgtgtccagtctctctcctccccagactggaggaaaatatgtacattgatgcgcaccagtgatcagaaaacccccagaacccaggcgtgtgggcactgaggggccggctcctcatcagctgggggaaggggaaatgggcctcacagaagccataagagagtggaaggagcaaggctgcagtccacagggcggggcgggcgggggcctagggcaggggcggcccgttgacgcccgggtggtagaaggcacagttgttctcgtagcggcagttgcccttcatcatgaaatgccgacacacggggcggttcgacatgtctgtggggatgaggatgggggtcgttagacaggaaggctcagaggccagtgccactcacccccccagtccaaggcatcctgagcgccgtctttcagagacctagtcttgggggcctgggagaaaggcaaaaggggatgctgggaactgggactgaggtgacctcatgtcctgcctgacata

SEQ ID NO: 59554 - DNA, 946 bp, Bovine  19866880927765
  misc_feature (1)..(1): n is a, c, g, or t
ntctttacttttttcatcgcctgcggcattcctgacagccctcatgagccggatcctgagccctatgagcctatccctccaaagctcatccccctagatgaggtgagtattgcatgctgatggaggttgtgattgttaatgcctctttcatgtgagacagtctcttcattctttgttggtcccgattgtccacttgttcttccaggaatgttccatggatgagaccccatatgttgagaccctggaacctgggggagccggtgggtcacctgatggagcaggtggttccaagttgcctcccgttctggctaatcttatggggagcatgggcgccgggaagagcccgcagggtcctggaggagggggcatcaacgtgcaggagatcctcacctccatcatggtacgagcctctctcctgcccctctcctgcctcccttgctcttcactccccttctgctcgcctccccatctgcttgcgcctcagggtattacccttcttctctgttgaccttgtcctcaatgtccttgccttacagggtagccccaacagtcacccctcagaagaactgctgaagcaagcagactattcagacaagatcaagcagatgctgggtaatgctcagggccagcccctgggcctgggcgaggggaccggcagtggacttgggggagctcgggtgttgaggggaagactggatagagagtggcactctgccaggttggtgggaagggctggctggacgtgcctaagcgggaggacatcatgctgctcttctcgaattctcttgctgactgcttcactccttattcaacagtgccacatggactcttaggccctggtccgatagccaatggtttcccacctggaggtcctgggggccccaagggcatgcagcacttcccccctggacctggggggcctatgccaggtaggggagagcaagcg

SEQ ID NO: 59555 - DNA, 848 bp, Bovine  19866880964461
  misc_feature (1)..(1): n is a, c, g, or t
ncgggtcagctggctaggatcactgggactctccactggcttcacatccaaagctcctggctccaaagaggctgaaagcagaagtgatttcagaccagtcccttcctttcaaagaacccccaaacctgatccaggttctgaactcaccagtatccatgagctctgggacttcaacagggggaactggggtcccgggacgttctgtgtccatagtctcaggaggtgctggctctggggaagaaggtttggccacgcttggttctgtgcttgtttttccttcaaatgggcttggctattgtggaagaaaaagaagtcactgggcacacaggaaaggcaaggtcaaggcagggcaatcagttcaggttctaggaaggatcccgacacttcctgtcaaggaagaccacctctgacaacgctctgctgctgccaccagtctacgtctgagacaacgtctcttgcatcccccaagcgctccaagctgctgggcccttcttttccctgtaccttttctacctggtcactggcacctactgcccagtgcccgtaccttggcagctgtgggtgacagcaccttcttcttcttcttaattttgatgcctgggacaggagctgaattgagtgcatccagaaagcccaggccctccatagctgcaaaagaaaaaaaacataacatagcatcatcagacctctttatgagcctattcttacaaagtctgggcagaaaattggtcaatagaaattctgctgcctgaatgttggatacaataagctcaaggtaaccaggaagcgtatgtaggaggatttgcccaagaaattcttgtcattctttcttctaaaggcaggtaagc

SEQ ID NO: 59556 - DNA, 792 bp, Bovine  19866880969483
  misc_feature (1)..(1): n is a, c, g, or t
ngggggtgccagcgattgagtgagattgttttttccctaacttggttctgagtcacacagggcaactttccttcccagaaaaccgcctcaaggctcaccccctggcagccggtcaagccccagtcctaacacgcgatcctctggggctgtaaacgggatagccgggagcacccgccccgccccgcgaggcctctctgggcggagcgtgggtctctcccaaccttcaaagaaaaagggcctatggccgctgctttggaggcagcagggaggcacggctgaattttgaaccagaggagacgccaatgaatcacagagctgcaggggagggaggcccctaggagagcctttaatcttaagttcgactttacgaatcaactcatgcggtaaatacagggtgtctgaaaaggcaagacaaaaaggggaatactttatttattgcacttcctgcccgccccccgccatgattatgtgggttagtcgttcggtcacgtcggactctttcggtcgtgtcggactctgcgacctcatggattgtagcctgccaggcttctccatccatgggattttccaagcaagaatactgaagtcgattaccatttccttctccagggtatcttcccgacccaggggttgaacccgggtctcctgcaatggaggcagactctttaccatctgagccaccagggaagccccccatgatcatggtttgagttaaatctcaatcatatactccagtgctgacactggagcagtggacagagcaatatccacatgaacaactttagcattaat

SEQ ID NO: 59557 - DNA, 1037 bp, Bovine  19866881011788
  misc_feature (1)..(1): n is a, c, g, or t
natgggattcaggaggctgggtgtgtgtcctcccgtttgaatctagcagacccttagtgttaaagctctataatgagacttaatactgcacttacagggctcttctgctcagatcataaatgtgcaccccacttatttgccagtaattaagactacttgtacacatttaattaacattttcacaagcatcaagtcttagctaagtatctccaccaacaggaagttctagaattataccgtatgagccctaaggatttggagaacattatacacccatcttaattcaaaaagttgggtgcctgattaatgaggtcttgatcatggccaggctgtatatttaggtcaggcctgtttgtgcagctttatatgctcagtgcttagcgtaagtctagacacagttagacctcaataaatatgttgttgaatttgaataaatcctgttaaaaaatctcacttggagacatcagctgtgacatctcttactgctgcttctcccagaagttcctggtataacccaggactgacagcagggggcgcataggggttgttccaacaccagagggaccaaaggggattggactttgaccaggcctcaaaagcctgaaatgacctcccctcaccatgttgatgacacagttcctaaggtacaagtgggagcatgagcagagggagtggttttgggcctcagaacccactgaattaactcctaaaagaactcttcttttgcaaagagaatgcatgaaaagagaagggagaagagcagccagcctcccacagctgtcagcctgagagctgctctcacctcagtccatctagggaaggggctacaaagcagacaatctttattcacaactggggcggcagacgggagagacccccgggtcagtccaaaagcaaagatactggggaggtggggagatggagtagggcagggactcagcactcgtcctcgcccagcagggcgtaagggtttcgggcggccaggctggaccctggagccgaggttggggtgtcctcatccccttccccctcctcat

SEQ ID NO: 59558 - DNA, 1555 bp, Bovine  19866881046787
  misc_feature (1)..(1): n is a, c, g, or t
nattctgaattagagaagtctgaaggacactgagactgctgaattctgacttaagggcagggaaaagtttgatggaggtacaaagagaggtgatggcttccagtgtcagtatggcaaagccaggcgccagttaagattatttaactgttagatatcctgcatgagaagtctgagagggcagcacctcaataaatcacaaagtcccaacctctagagagctgaaaccagcttataagatgattcttgacacagttccctcacttaggcccagaaccaaagcactttaaaaaaattattttttccgctgtgctgtgcagcttgtgggatcttagttcccaaagcagggactgaacccatgtccttctcagtgaaagcttgggatcctaaccactggactccccagtacttttttacaggatctgtagcctatagaaattaagtgactggacaaaggacccctagggggtagccaaacaagccacagagagtctccatcccctgatgctctcacactcctctttcatcatcctgcttctttccctttgacagggtcccagggagacccaactgcaatcctactcaagaacaaaatggcagaaggatggtccagtacatgtgggaaaagactcacacgaaacatcaagaattttcatagacaacacactgacagagagcatggccagctccaccagatgaactcatacaactacagcacccagtctgtgtcccagcccacacttcttcagcctgccttatactacacttagtacaatcagctatgggtcaaccaatttcttcccttaggatttaaaattctttgatatcaggatctcttatttatttttgttatctttgtccctagcatctagcacactgctattatttatgcattgtagacaccaacaattgcttctggaaaaaatgaacaaattgtggaactaagggttgaaatagggtaaggactctattacagtgaagaaggttcactggcaagcaagtccaagagaacagttacattagatcgtacctgcctctccactctggttcctgccccttgccagaaacttcctgttcccacatggtcacttgaggtctctggttgtctggccgcctctctaagacatcttgatgggttgggcgctggaccaggggagtgtctgaggcccatgtgggagccattctcggcagtgttggaaggggccgaacttggaagtgggatgggggaatcagcccagtggaacctaaagaatcataaggacaaaggtactcagttctccagggagacacaatcaccagtccccatgccagatcccactaacctgaaggtcgaaacatctcccacattatttgaagtctctagagtcggtgtacagccatctatgaccccctgaacaataggagaaacaaggacactccaattcaattttcaggccttcttccaaagagagagcccctacaataacaaagtcataatccttaaataacagccaggtccatccaactcatagcttttcttatcctatttcccaaaagaagcagaagtaccccaagatcc

SEQ ID NO: 59559 - DNA, 1476 bp, Bovine  19866881051537
  misc_feature (1)..(1): n is a, c, g, or t
ncacactcccacacactgcagccggccctgctgctgagtaggcagatgctcaaactgattgcttcagctcctcccggccacaccaacttcccccaggcacttaccccctccgcccctcctgccctccccacagtgactcctgtcctgagaatgtcctgccctggcataaaggccccgggtgtccaggagctgctgtcagtcaggaggccacgcggtccaagatgggctcttcacgagcatcccagatagggtgtgtgggagggcgaggggtgctggctttgctgctggctggtctcctcctgcaaggtaggaggttggggccctgggagtggggagagtggggagagaagggagattcaggcgcgcagacaaccggtcagggaaggctggagggatgagagtccaggagaggactcagagaggggagatttgggggagggctggggctctgggaacctgaggcttgagtctagaggctgctcctcactgccttggcacctcaggcaagctacttaaactttctgagcctccctttccgaaagttaaaaaatgagcttaatgttaacacctcgctctagtttctctgagtctctaattaagtaatgcatgtgacactgctgtggaaattctagacggttatatgttgatggatattgttgtaattatattattattggggtgctagaagatgaagattggatatttagtagtcataattgctaccattcatagaggcccttttatatgccagaaactattagcactatatttatttttaattttttaaccatgctgcgaggcctgtgggatcctaattccctgaccagggatcaaacccgtgccccctgcgttgggagcacagcagtcttaaccagtggactgagagggaagttgcatgtactagcactttaagtacattagcttttttaatcagtagaactgtgtgagagatttgttattcccactctgcaaaggaggacacagagcttggagagctgaggaaactggctcaagattacaaattagaaggcagttaagctgggctccaaaccccaggctgggtgactctggggtctctactgggtgaccacagctgtgtggcatgggggagcaggggaggatagtggggtgctggctgattggtgcagtggagtggagggggctgtgggcagagctgggggttggtgtgaaggtggacgtgttgaatttcttttttaggagagaatggggactgcacaaattgtggagatctggtttttggtgggggttgaagggggagtaataaatcatggaggttgagggaggagtaaataaatcatggataacgctgtctgtttttgtaaagcagtttctaatagatgatcacatccagtggtcacagtaacgctgggaggaaggcagggccaatctggcctctccaaatatataagctgaagcacatggctcttggacggagggggtcgaggaggggagcag

SEQ ID NO: 59560 - DNA, 1022 bp, Bovine  19866881053251
  misc_feature (1)..(1): n is a, c, g, or t
nggaggaccagacccctcccgcaggccatacctcagatctgtcccagaaatggactgcactgggcaggctgagcccacggagaccagctgcacgtggtgtgctatatgttaatatcctgccctggagccttggccctccctgcttcccaggcgcttgctccgcaactctgactctgagcatccctcctacgcaggtggccaagacgaaacagcagatcgaggagcagcgggtgcaggtgcaggtggtggagcgggcccagcaggtggcagtgcaggagcaggagatcgcccgccgggagaaggaactggaggcccgcgtgcgcaagccggcggaagccgagcgctacaagctggagcgcctggcggaggcagagaagtaaacaccccctccctgcccccctcagggttctttcaccacctgggcgcccccagacaaaaagctgaggccttttctacctgtcctcctcctgccgaatctttctcccagagcaagggctcttcttcaactaccccctccactcccctttgcccaggtcccagctgatcatgcaggcggaggcagaagccgaggctgtgcgggtgagttagccaactgatggagggagtggggtgctgctggtgctggggtctctcatccttacctaccgtatctcacgtgtcttgtaccctcctcagatgcgtggagaagccgaggcctttgctataggggcccgagccagggccgaggctgagcagatggccaagaaggcagaagcattccagctgtaccaggaggctgctcagctggacatgctgctggagaagctgccccaggtctggggtagggatgggggtgggggcggtggagggcatatggacaagagcagtggagggacaggagggaacgaggggccaggggagaaccaggctaggggccatgaattaggggcgggaattaccagccagtgaccagaacaaggaagggtgatgctcacaaaagcgaagaacacaggtcttaaaaacccagagtaaggagtcttagg

SEQ ID NO: 59561 - DNA, 2784 bp, Bovine  19866881075970
  misc_feature (1)..(1): n is a, c, g, or t
ncgattgggcagggatgtggggttggggccactgaaagagaggcaggggaacactgtaggctgaccagcccatggaggcactacatttagctctaggcagtgaagagtcaacttcatggaattacattataacttgggttttgaatcctggctctgtcattacagctgtgtgaccttgtgcaagttactcagcctctctgtgttctgtattactccatttaagtaataactgacacttaaatagcacttattctgtgccaggtattgtacatatcttagctcacagcaaccctgtgatacaagcaatattattgtctcttattctacggatgaggtaattgagtcctggataaaatgagaaggatattgatagtatccagctcaaagggctgttggggggtaaaatgagcttacacatgtaaaccgcttaggtgcttggcacatagtaagtgaagtgaagtcactcagtcgtgtccaactctttgcgaccccctggactgtagcccaccaagctcctctatctatgggattctccaggcaagaatactggagtgggttgccatttccttctccagggaatcttcccaactcagggatcgaacccaggtctcctgcattgcaggcagatgccttaacctctgagccacctgggaagccctggcacatagtaagtgctcagcaaattagtctggttcattatccttactgtttttgcagaaagaggagctctgagaaactgagttgttgagggaggccgcagtccatggggagagctgagggctgggcagcttagttaacccttcctatccatccctcatctcataggcctgcgagttccggaaggagatgaatatgggtgttgggtttgtggctctgtgaccccttatggctgccaccacgagcccaccagccagcactactccgtcaagtgaaggggcacgaccgggattgcctatgcccctctcccgatggccttcctccttccttccctgagcagactcattcaagtcactcgtgactctgatgcagttttctcatctgtagaaggaaggaccagggcaccatggtctccaggggtcttccagcctttatggcatcccgatctgggcagtgggaacctcctctcctcattctttcttcctgttcccattctcttccccaactatcagagaacttagctgaggacactgcttgggacccctggggaacaggatgggggtccccctttctataaggagcccccttgggctggctcctgaccctcttgagaccttcaattctctcacctcagtacaggtgaggaaccctgctctgtgacgccccctgcttagaccactccaggtgggtggtggacacaactcttgctaaataaaacagtagtgctcccctggtctcccagccactgtgtaattatccaagtgctttgccgtcgggcaggcaccgaccaggtctggtctctgcctcttaccagatatgtgaccttgggcatttaaatcatttccctgaaccaagcttgtttgttctcaagctgtaaaatgaggctgacattgctaacctcataggttacaacaaggtaaagtgctcggcacatatctctgtacctagaacagctcagacatcagtagctggtagggttgttttgtgaccctctcagcccaggttgtgcagtggtatagaatctcctgccaacacaggagatgcaaaagacacgggtttgatccctgggtcaggaatatcccctggaggaggaaatggcaacccactccagtattcttgcctggagaatcccatagacagaggagcctggtgggttgcagtccacagggtcgcaaaagagtcggacatgactgagccattgtgcacacacaacctaactattacagctcagacacaacaacctcttctgacatcaagagcctgcacatacctctaagttcctccacctctgatgcgtgtgtcctctgggggacgttgtggctaaagaagaatggggaatatttatttacacagtgaaggcagagagtctcaacctgagcaccacttgatgtgagctggagagttctttgctggggggctgtcctgtgccttgcaggatggccaggaccccctctggcctctacccgctgggtgccaggagcaaccccctccaaggtgggacaaggttgtctctagacatggcgaaatgtccccaggggacagagttgcctctccttgttgagaacttctctcctagagacctgggtccctggaggaaagtgtgggggtggggccagattagtggaaagggggattttcagtccctcctgggtccagatggagaggcagaggaggtctacctctgcctcagtctccctaccctacaggacgcattgcctgggaggcaggctacccagttctgagcagtcaggctttggtctgattccatggagcctaattacttgcctaatcatgttaatgagcagctggcctctcctcttcccttccactccagccctgcctaggtcttagggaccaatcatgcccagtactagatggattcacaagttcggccctctagtcctcccatgagccccgtggccccagggccctggcaccgtgccctccaggtcaggccgtctccaccccctctgcctgctccactcacccctagaggtaggagccagccctggcttccactccgttcagccgagtcaacacgattgactgcgtcccgtgtgccaggccctcactctggtgctggggctgcagcagcaatcaggcaaagaccggccggctgcgactccc

SEQ ID NO: 59562 - DNA, 1192 bp, Bovine  19866881088665
  misc_feature (1)..(1): n is a, c, g, or t
ngagctggaagatgcagggaaatggattctcccctgggggcctccagaaaggctctacctggacttctgatcttcacaattgtaagatagtaaatttgtgttgtaagacattcagtttgtggttacttgttatagtagccgtaggaagccaatataccaccatcttttaaggatgggaaccaggtctatttcccatgacacagggtcttatctaggagcagcccctcagatgggggccacttctgtaccgcagaagctcctgcagttcgaggtcacgatgatggagctttggggatacatgagaaagtgctggaaggcataatctggatcccaaacagaaagagaatcaagtgtttctattgctaagaagtgaagagatggagaccccaagggtgaaggtcctcatgtgcttggcatagggaaccaggaagagtagggctggcaaccagcgatgagccgaaagccagaacacctggattcggaaggggtggggagcttgaggaaaagagcagggtgggaacacctagcttccctgggtctttcaagtggcacctgttgccacagaatgaattagaaatgagggtggaatgtggggatttattgtctccataaccactggctcagcctgtttttggtgtcccccaccccactgacaggataaagggctgcatgtctaggggctgagggagacgcagagcaagatgcagggctgcgtggtggggaagcgggctcccctggggctgctcctggtctgtcttcatctcccaggtagagaggctgtgccgctccttggacaggagcagactagggggcctcaggggagctgggattgagggaaggggtaaaggtgggaggctgtacacttgggtccctgaggaggtaagagctggctcagggaaagtgaagggacttgaaacaaaggggctcagggaatcagggaggagagggcattgggaccaaacatctggtccactggatgcatcctcttccccttccccctcccccaggcctccttgcccggagcatcggtgtgatggaggagaaagttcctcgagacttggggatcagcttgcctctgctgggaccatctcccttgaccggcccctccaatgccgagcatcctcagcccaaaccagcccctgggcctaatgatttggccagggctgctctgaagcccaatccttctccaccg

SEQ ID NO: 59563 - DNA, 1266 bp, Bovine  19866881098553
  misc_feature (1)..(1): n is a, c, g, or t
ncggacatgactgagcgactgaactgaactgaataccatcccaacaggagagaatgaagtggctcctagggcaggggtcagttcctttgcagccaagcagaggctctgggaggtgccctgtgcttcaggttgaggcccttcctgtagggataagcacagttcactgtcccctccttggggtgtgagagctgcctcggccttggcgtctcccctgttgtctccaggacatagtcacgtggccctcggtacattctccacaatcttggtgttctctgggggaggccacctctccttcccactgtagcgcttccctctcacctctccagctctcactgtagacccacagcagaggcagcaagagagtgcaggcagaaaggacactgctggccgtgttctaccccggctggggcctgtcaccgtaggccagtgagtcaccgtgctgggctgcacaccctgcgtgctgccgcactctccgtcttttactctctccacccacagctcccaaaacagcacccgcctgggctcctactcagtccccaggaatctggtctgggctgttgtgttccagccttcccaaggctccaggtgtcccagaaacccaggaaatcgatgctcaggacacccagagaggatggcgtctgaaagatgaggccaactaaaggtagaggagaaggagccgggtgtggggcggggagggaatcattagggctcttcgtaaggagaggggaggacccctgggtgaatgggcagtggagagaatgaatttcctggggagttcgagagaagagacatgggaggaaagagctgggagaccaaggttgcttgacctcctgctttcggttcaataaatatttattgttttcctcctttgtgggaggagatgtaagatgtaagaaataccagggccaatttacaaatgaaagtgggggacacaggacctttagaggcagaggagagcatcacccaggtcctaagaggaaaccctggacaccaagaaggcgaagagtctaatctagttctcacagtttattgaaacatctgtgctggacccagtgagagcagggaggctgtcccagtctccgcagagagcctggtatctccccaacgcagggtgcgaagcatctgagtgctggactgagatggagtctgagagacaaggaggagtgtttgggaactcacaaagggcgtggtgagctctataatggagggcgggagtggaactgggagtgtgagaacccaatagcatatctcgcggtgaccagatgg

SEQ ID NO: 59564 - DNA, 1212 bp, Bovine  19866881200062
  misc_feature (1)..(1): n is a, c, g, or t
ncccagcctgttgtcttctactgccagctcctcgaagaactacaacaggagttaagatctaggtaaacacagctcagagaccaatcaagcccttcaccaccacgcatgtacccagggacctgccatgcacatcatcccaccttgctccctctcccgacaagacctctttcccctccctcctgcccccaccgacttcacagtgccaccttctgctcggaaacaccacagtcccctctcctcacccctcactgcctcaccgtctttttggtcttcttgtccttcttccctttcttcaccactttgtctagaagggttaagcagatgttgtaaatgatgatgtgcaaattccaaagccaccctgatctcacctgccaatcctcagtggactctactctccctagtcactgtttttctagctccctccctggacactgtcccatgagacagacaatcgtggctggtctagtgggaggcagcaaaggagaatccacaaggtgatggcagaggtgggaagtaagacagttttcagagatgatgccaatgttattaagtggcaaaattagctgagctagtggtaccatgaataactcaggatatactgagagagaaagacctttccccactccagtcatccatgggggagaaaagtaggacaaagtattatatgtcatttttagaacctgcagaccatgaaaacaaagccatctgctaagtcaacaaacacctgggtctctgccgaacctgctccgcttgcacttccggcacaaactgcgctgtgttaggcttaactgggcatcggtccttcatctcagagtgacctgagacactgcttagcttcgtgttcccagggagcaaagtgggaagttgaaaaaagttcactgacaaatcccagcctctcctttctgtccatctcctttccttttccctgaagatggagggttacgtctaactccttcccaacataagacggggaggcagccagcagcctcgtgatttctctctactcctaggcctatctaccatcacattcacccctaaccatcccaccgcctactgctgttcgattctatccaaaggcactcctggagtcacttaatttcccccatccccaaacaaaaacaaagccttctgctatctaccacattaagtattctcagaccagaatgccaccgagtccaaaacaatcatttattcagatgctgagcatctaca

SEQ ID NO: 59565 - DNA, 723 bp, Bovine  19866881201497
  misc_feature (1)..(1): n is a, c, g, or t
nccgggctgggtcgggaccgggcaggagacagagaaaaggacagaggagcccggggctccaggggaacagctgcctctgtgaggagaccgggtagtgtgggactgagggtccagggggggtgcagggagagggctgggtgggcttgggacggaggcagagaacctgaccggactcccaggtccctccctccgatactgatactgtgggcaataccagtgagcaattaattggctggggtggggccagggttaaaagcagagggtggggagtacaggggagagggaccgcccccctcttagcagaccttggagttctgctcctccaggcctgcccttcatcctcagggactcgggagtccggtgacccttctttgtcctacccaggatcctacccaggccgagccagctgcttcctgttcgctcattcaggccgggcagccagttaatgggcggcagggccaccaccttcccaattagtcttattagcctcttgctcacccactggagtcagggtcacccctagaggaggggctgtgagtggcctgtgagtaaccgaggcccagctatgacaggggtccccagcccaggccggtccccagactgaggcccttggcgtccagcgcccacatgctgtccctggagccccccagaaggggagagatcagggggcctggtttttgggagtgcagactttcgaaggcccactcactgctggaacacaga

SEQ ID NO: 59566 - DNA, 1303 bp, Bovine  19866881230302
  misc_feature (1)..(1): n is a, c, g, or t
ntgagttggggggaggctcggtgcagggtttggggtgggactcgggctgtggagcaggagccccggggagtttctggggacctcccctctgacctctgttttccctctggcagtctgcatcgtgggccctaacggcgtggggaagagcaccctgctgctgctgctgacaggcaagctgacgccggtgagtccaggagtcagggaggggcgtggtgacgggcgagcagaggcatgagcacacggctatccctggaggctccaatgggggagccctctcttctatggagagttaaatacagaacttgtcatggatggttcttttccttaagaggtgctatagaggaggacagtttagatcagtcagggagacagacctggagaagtgggcccagatgaagggcatgcctcccccatcccgcttgtgtgttctggttatataatcgttagaaattgtgtgaaccagggaattccttggcagtccagtagttaggactcagggcttttactggcatgagcccgggttagatccctgatcagggaactaagcaagggacagatgaaaaacaaattgcataagccgcagaaaaatctagagataacccgtattaattttaatggatcgttttccttttttttccttacaagcatatatgtaattatttttcttaacaaaagtgggttatcctgtgaattgttttgtagctaccttttttcagataatgtattttaagcatttttttgtgcctgtaatcttacatgcatttttctcatggatctgttataatttgtttcacatctgtcgtttagaacatttctggtttttcactgaaggacagtactatagtaaagagtcttactatacttgttcatgaatttagtttttccttaaggtaaattccctagaattgctttggggacttttgcggtatatgtagtgctgctgctgctaagtcgcttcagtcgtgtccagctctgtgcaaccccattgacagcagcccaccaggcttccccgcccctgggattctccaggcaagaacactggagtgggttgccatttccttctccaatatgtagtgctaggtggttgtaaccatctgtctgccctccaggcaagtgtggagaaggcacattgcctcacacccacagagtagatctttagaaaggtgtcctagatcctcgcacaaactcattgccatctgaggtggaaccctgaaaaattctggctggaaggcggggacagggtttttctgctcgtggtcagcctgctcctggttctgaatctccacttacctcctcgcttttc

SEQ ID NO: 59567 - DNA, 1730 bp, Bovine  19866881425042
  misc_feature (1)..(1): n is a, c, g, or t
natgggcggcacacggggtccccagctctgtgactcagggagccatggacgctttgtggcattcagtctcttctgtacagatggaggggtggctgatgctctagaatcttgtgaatctatgaacccaaagtacctcccccatccctgaagcttcctggaggacaggagggaaaatctgaatagggactggatatcagattttgtgttcattttcttaaagtgtgaccatggtattgaggttacataggaaaatattctccttgtgggatatgcagctgaatagtcaggttgtttgcagcttactctcaataactgccccccaaaatgtatatgtatcaatatgtgtaaatatgcagatagacaggaaatgtgatcaaaggttataaactgctgctctaacgggagaaggtagatgagtatccatcacatgattcttttaacttggctaagtgtttgaaattcttcccaataagaattgggggtaatcgttggtatgtcacgttgcctctgtgactggggggtgactgggacgagctggggggatctggggctggtccaagtgctattgttggatctgggcactggctatacaggtgtgtttaccacttgagaattcatcttccttgataacttcatgacttgcatacttcaaagagaaaaagctttcaaaatagttttgacaataatctcatgccttaatacctcctccttcttggaagcccacgtgcctcccagccactctcaccagccttggtgtgttccctacgagcctcgttcagtctcctctctgattctgagagctgttcccgcagccgaccttccacttcggccaccttctcctgcagcgctggggtggaggtgcacacagcgcatcaggggagcctggggtcatggttcccaccgctcccgaccccaggactgcccctgtccgctcctgcacaccttgcccatagatctcctgctgctgggtcagctccttccggaggctggcagcctctgccgtgctctcctgctggccctggcgagctgcctccaactgtagccccagactggccagggactcctgcgtgcgctgcagctcctgctccagctgctgggccacctcactcagcttctgccgctctgcctcccctgggaagaggaggtgcccactcaagttcctccctgccctagaccccagctcttccctcctcctctttctccccaaggccccatgactctggcccccggcttgtgctcgctgacttggaagcaccaggcgtaccttgctcccgggcccggcccacctcctgctggatgatgtgggcgctcagctgcagttctgcgtccagacggttccgctcctcccgcagctgctccagctcaaggctcatgtctgtggtcggtgggggtggcgggcagctgagacaggaagggaaacagagatgggggaaatcacccagctgcctgacccctaagcccttatccttcctccatcctcgtgtttttcaggtcccagcaaccaacaccctaaagccccactcctgccccccagtaaatctaaagtggcccggacttcacctctcctggcgcagctgagcaagggccacttttcgagccatcaggcctggggagaaaaggcagagagcgtgagacgtgcgtttgcaaagaggaggggaaacaggggcgtaaggagatgctcagaccggggaggaggaggcaggagggtaggtgtaggatgagagagctgg

SEQ ID NO: 59568 - DNA, 1426 bp, Bovine  19866881513434
  misc_feature (1)..(1): n is a, c, g, or t
ncaggtttgatccctggtccgggaggatcccacgtgcttcagagcctgtgctccacaactactgagcctgtgctctagagcccgtgagccacaactgctgaaccagtaggccacaagtattgaagcccgcacaccctagagtctgctccacagcaagagaagccaccgctatgagaagcccacacaccacaactagagtagcccctagagaaaagcctgggcagcaacaaagccccagcacagccaaaaataagtatttaaaaaaaggaagaaagaaaaaaagtgcatttgcacaaagaaactttggaagggtaaaaaagtcactattatattaaaaatggttacttacggggcaaagtgacagaaaacagagagaaggacctaaatgggagtgatgtttctcatgtaccttttgatatgtgtttcattttaaactacataaatgtaatctctttaaaagattggaaatgtaaaaactccatacatgatttgttaaaatcaaagaatccagaggccagatgttcagtaagtgaaaagcaaaggacatgcatcaaaaatatttgggttttacttttctgagcaagccctcctcagtttccatgccctttttatttaaataattaaataaatccaaatcttggagacgtttcacgaaaatcctgccaaggaaaataccaagaattcaatggccagaggagccctcaatgcaataaaggaaaagccatgaaatgttccagatggcttgagaagcatgttacatttatcatttttggttacaaagtgtgcatgaaatatcacattcctcatttttttctcaattaaatggaatctgttctgtgtcccaaactgccagactgcaaggaaattcaaccctagtcattagtggggctccctcctcccttcaggagactgtaaaacatcaggggtttaagcagtgccagaagagctgagagcaagtccctggacttgctaactggggtagctggcagctcaggctgctgcaacaaaataccacagacaaggtggcttaaagaacactcgtctctttctcacagttctagaggctgggagtccaggtgctggaagcttcagtgtctggtaagagttctcttcctggtttgcagatggccacgttctcactgtgtcctcacatgacatggtgttaaggggaggcgtgctctgatcgcttcctctttttatatgggctccaccctcatgacctcatctagacctgattacctcccacccattacaacaccatcacactggggatagggctttaacacaggactctggggatgacacaaacattcagtccatagcagcagccattgtttctgttgttctctctgatttcagaggttgctgtcaaccctggagccccctgtgtcaggcccagcattgccccttacagatgcccgtatca

SEQ ID NO: 59569 - DNA, 775 bp, Bovine  19866881528178
  misc_feature (1)..(1): n is a, c, g, or t
ntgacctctggagagtccagcacaacctctgacactggatctagcatgacctctggagagtccagcacaacctctgacactggatccagtgtgacctctggagagtccagcacaacctctgatactggatccagtgtgacctctggaggggccagcacaacctccagtactggatccagtgggacctctggaggggccagcacaacctccagatactggatccagtgggacctctggaagggccagcacaacctcctgatactggatccagtgggacctctggaggggccagcacaacctccagatactggatccagtgggacctctggaggggccagcacaacctctgatactggatccagtgggacctctggaaggaccagcacaacctccagtactggatccagtgggacctctggaggggccagcacaacctctgattctggatccagtgggacctctggaagggccagcacaacctctgatactgggtccagcacagcctccagtgggaccagcacggcctccaaaactggatccagtgcaaccacaggaggctctgatacatcttttccaactggaatacacacaacttctaacaaaagtagcacaagtgctggaactccagtggaggatgtgaagcccagtgggtccctgaagccatgggaaatcttcctcatcactctggtctcagttgtagtggtcgtgggattctttgctgggctcttcttctgcgtggtgagtgcctaatacgtaggaaagtgcctgggggaag

SEQ ID NO: 59570 - DNA, 1663 bp, Bovine  19866881545189
  misc_feature (1)..(1): n is a, c, g, or t
naccaaggagtccatcaaaggtaagggatggagggcagggggaccctgggaacctttcccccaggccctctgcagggcttgagccttgttctctgtgaccctggaggcccacagcctgccttgggccaagagctctctcccttataaccctcacacatccggtaggcccacagcctgccttgggccaagagctctctcccttataaccctcacacatccggtagctgcgctgttcctcggcactgtgactgacacccttgtccacctcccgtccctccaggatccctttctgtcttgctcgatgatctgcagggcctgagtgaggccatttccaaagaggaagccatttgtgaaggggacagccagacctcctcttcagtctgcctctgaccagctgtgaggaccaggaggatgaggatggaaggggaatgggtcgggaaggggacttcctccagccgccctcagggacaccagccgccaagatgtcatgaattctcccgtggctcaataaagatgacaacagtcagagtcatggtttggtcacttctttctgggaatataaggaagttttctccccgtagcctctcttgtccgggaagtgtgagaaccagtccctcatacagctcttcctctagatggttcctttttcaaaacccctttcctaggctgcccaggaggtttttggagaagctccaggttttgttttattcttaacttttattttaaaactacctctggaaaatggtcagggcaagggcacgaggcagatagaacattcacgtgctcagcaggactcacagagccaggcagcgtcctgccttggggggccactggtgggtttgattaacgggtaggtccctgctccagagacacttaccttctggtgggagagacagacgatgggcgggtacctacatgaacaaacgaatgtttcaaacaagtgctgtgaagaggaaaaaatgacagtggcatgatagaaactagctgtgtggggaggggtgactttagatgagggacaggcagggcttctctccggagggatgtgctgctgaggccggagtgcggtaaggagcgggctgtgcagccacctgggagaagcaccaggatggacaggtcctgaggctgcggggagccaagggagggtgctgcagggagaggccaggcctggtggagcttgggttttactctaagtcaataaaaagcccttggagggacgttcctggtggtccagtggctaagactctgcgctcccaaagcagggggcccgggttcgatccctggtcagggagctagatttctacatgccacaactaaagatcctgtatgccgcaactcagacctggtccagccaaattaaagtaaataaataaatagacagcccttggagtactttttaaactgagaacagccacacaatttgacttacatatttaagagacccatcaactggctgtggaggatgggtttgggggcatgggatgaggaaagagaggaatggagtctttgaaaacttgagccgcaggggactggtaatcctggccactggggagcagaccaggttgtggaggaagtgagttcagttttgggcatttgcttctgagcggctcgggagatcctcacagaggagtccttgctgcagaaaagttcaagggacatctctgag

SEQ ID NO: 59571 - DNA, 711 bp, Bovine  19866881736647
  misc_feature (1)..(1): n is a, c, g, or t
naagacacaatgaaaagacacaacagagaagagagtggggtgtgtgggggacacagtaacaggatgagagctctaggaactgtgggaaattccggagggaaattatacactagggacatgagtaacgtagagggctgggaccagggacacagaaataaaaaaatgagttgaaactgggaaagacagtttggtaaaggaaaagaaaggaacggtaaaggagagaggaaaggacacactaggaagacaggcagaggatggaggtgggactggaaaaaggcaggtcttacccgagctgttggggacactgggagcagagtggggtggattcccacgaggccgcggctcctgataagggggtggctctcgggggcctgggcggttgttgatgaggatggtatccccggggacagagagatgaaccgtcagctcctcttctaataccctacgctcggccttgtcgtggggaacaggaaacattaagcgcagctactgctcagctgtttgttaaatgctctacacgtgtgccctccttcaggcctcactacaggcctgtatcgtgtctactattactccatctcaccggcaaagaaacaggcttcagtgcatttaagtcccacaatgtggttccaacccaaatcctaccagttcataactatcaactttaacacgttatcaccaccactggactctcgcccagaagatgtgggcagg

SEQ ID NO: 59572 - DNA, 2578 bp, Bovine  19866880341813
  misc_feature (1)..(1): n is a, c, g, or t
nctaaaggaaatcaggcctgaatattcattggaaggactgatgctgaagctgaaactccaatactttggccacctgatgcgaagaactgattcatttgaaaagaccctgatgctgggaaagattgaaggtgggaggagaaggggacgacagaggatgagatgattggatggcatcactgactcaatggacatgagtttgagtaaactccgggagctggtgatggacagggaggcctggcgtgctgcagttcatggggtcacaaagagttggacatgactgagcgactgaactgaacagaactgaagttagtgtgagtctcccagtggttgacaccaggttcatgggactcccagctcaaggatggagacttccattgtttccctggggtgagaaaagctggccattctttttcctcaggaagcacagctgctgacacataaaccagagcatctccctcattctttgcccatactctctgatgtgggcctcaggccctggctgtggggtgttctttaaataatagctttttcttcaaggccttgcctgtgatctgattgatggtggcctgggagaagccagctgcttcagtgggcaccacacacagacgctgcactgtgtttcctgtgtgtctttggcaggtcttactctgagctcctgcttctttccttcattcagcaagtgttttctgaggggtagctttgtaccagatactggggtgcagggatgagcagtaacacatggtccccaacctccagagactcagatttaggacagaggactggctttttagaatatctatctatctatgtatctataatttatttatttatttgtttgttttggctgtgctgagtcttcactgttgctagagctttttctctagttgtggtgagctggggctactctcttgtggtgtgcaggcttctccttgcactgtcttctcttgttgcggagcacaggctccagggcatgcgggtttcagcagttgtggcacatgggctcagtagttgtggctcctgggctctagtagttgtgcacagaggactggtttttgcaataaagtatggaacgagctgtaacagtggactatacagaggatctgggagcccaagggggcagggaagctgacacagattgggaagaagagggaagccttcctggaggagatgttgtctccacagaaatttagcaaagacaaaggatggctggattggcagggtcccaacagggaatgatggcacactaagttaagataatttgaggaggctttacatacagaggggttatttgcaagagtgtgggtagggggtggaggaacattataaaatatcacagaaacacaggctagcagcagcccctaggccagaagaaatgaggagggggtctctgtaccacagaagaaaagtcctgcagatgagtctgcctcgataggaggaacggacctccatctgggaacaggcagccttataggactgtccagggaggcagtaactaccctggcttcactctctcctgtgttacagttgctcctggtgcttcccgttgggccccggagtttacttatggaatccatacagggcagcctctggggcacagagcaggatgcagagtaaatcaggaggggccagcaggtcttatccagaatactgggttagggaagggtaggtgtagaaaagcatgtagatgggggaactgtgttctttatggctgtagtgtggagtaaactgggctgaaagctgtccatcatgaaaaccttgcatatcttcctgaggaatttgaaaatttatcctaaaggcaggaggagcactgaaggattttaggcaggaagtgacaagtttagatttgtgtctgtaaacccttctagccctggcatgcagctgacctggaagtaccatttcagattagagatggtgagggctgaatcaagacaacagccatggagagaggaagatgtggatggatttgaggaatttttaagaagtagactcaagatgtgatcagcaattggataggaaagtgtcaaggcctcagtttttggctcgaagctctggcacaagagggaacttcatgggagcgggttggctgtccagctgtcacctcttgggctttgcttactggattcagaagacttagattggccctcattagcaggactgtgagctttcaagggggggctttggaggggctttttagacatgcagcaggttggccccaccttggctattccgtgagcaaatcaagctggagagcacgagacggcatcttctgctgcctgcctgggatcccctgagccaggacctgctcccctccaacccttgcccctttccatatggagacaggatgtgttttcttttaaagtgcttcactgcaggggcaaatgaggcccagctgaggggggagagccagcaatgaggcagagcatgggctccacaagctggggcgagccctgggttcctgtcatcccccgtttccttcctcgcttttctgaaggccctggtccccgtaggctcatatttcatcactcggcaactctgaggaacctgctatccagtaacagggcccattcctcagagttct

SEQ ID NO: 59573 - DNA, 796 bp, Bovine  19866880438085
  misc_feature (1)..(1): n is a, c, g, or t
ntaaacatcagccatctttgctacctcaggcaatacaaatacttgcacatatagtatttctcattattacttatcagtttataacaaatgtcagcatcctatgggctacaataagttcagaaacaatccagatccctgggttttcttcttcctcctgtccgctgtcttctggctatttcactatttataatcttcattaaagagtgagcaagggaaaaaagaaaaggcgctaagaaggaatttacaaaagcattcacagtaacaaccaaggaattatcatctgatttgcttttttatacactctcttcttgactgtagtcatttacctaatcacgtccaagatgtaccccagtaaaaaccctattaaaatactcacccgatctgcaacaatagcctttcgcttactggcatcccctgataaccctgcagagaagcaaaacccacataaatccgaagttaatccacatcttcaggagtgaaattgctctggtcttctattgataacctatgctaacaatagatataacaaatctaggtaacaaaatattgggtaatatgccataacaggaacacctcccatcaactggcccagacagcatgtcagtgtactttccttttgttctaacagttaagttttccttacgaaatgaattttaaaagtgacatttaaaattctatatcctgtatttgtcattaaccttttttcctgaaaatctgtaaggtctgataacatcttgcttataaaacacttgaacactaagtcaaaagtattctgtgaatgattaatattattcat

SEQ ID NO: 59574 - DNA, 1946 bp, Bovine  19866880583899
  misc_feature (1)..(1): n is a, c, g, or t
nttgaaatagtaactctaagtggaccgtgaaaagttaaggatgtatgttgtaatccctggggcaatcattaaaaaattaatgcaaagaagtatagctacaaatccaatagatatatttatatggaattctaaaaatccaaaagaaggcagggaaggaggaacaaagaaatagaaaacagagggggcaaatgaaactaaaatcaaccatatcaataattacattaaatgttaatgggctaaacattgcaattaaaaggcagagattgtcagaatagatttttttttttctgtaaaaaagatgtaactatttgcagtgtgcaagagaagtattttaaagtcacagataagttttaaataatgggtgaaaaattataaacattcaaaagctggagagactatctcaccagataaaatagacttcaagacaaaaggtattaccagagataaagggggacattttataatggtagaagggttgactcatcagaagggaaaatactcctatgtatttatgtgtatgcaacatatagcagtaattcaaacacacaaagcaaaaactgacagaattaaagggagaaatagataatattgatcctattaatataatcagagatggagatttcatcagtgaaaatggagtttcatctccaggacaaatgggtttgggaggttagccccctaaacaagtgctggtctgtgagctgcggtgagacacctcaaagaagaagccaggagggagccaagtagccgttcaacagaacctggagagatcctttgaggccggcacactgacggccccaggtgattgtcatggacagcctgcagcccagctctcccctgaggtggggaggcagtcgctgagggtgttgaagctggttctgaagataggggtgataaagcccaagtggcaatggttacttttgtaggctattctggaacaagaggccaagttgtggagtggaaagcaacagtgaaggccaaaaagagcttcccgcagttcattattagcagctaaacctgatgagggctcaggtgtcaacaatcacaacaaaagctaacctttcccttaatcattgccaagaactgatggggtctgaagaagcaagaggcagcccaatggttatcaaacttgagtgtgcagcagaatcacctggagggcttgttaaaacagaatgctgggccccatgcccagaatttctgattcagcaggtatgaggtgggatcagacgctgacgctgctggtctggagatacacttggagaaccactaaaggtaaacaagtgccaaggggacccagaagaggggagtcttttatgacacactgagtcagtgtggaaggtcatagttgggggtgagtgcgagggacatgccaagtagaggagacagaaaaaacaaggttcatttatggggctgaactataatgtccatataaggagtggagcaggaaagcctggtaagttgtaccagaacccaaatcaggctttgcctaacttagaaataaagagctcaggctcagaaatcagataggtgaattcaaaacctggttctgccacttattggctgtgtaacttaaaagatggagaaggaaatgttaacccactccagtcttgcctggagaatcccatggtcagagacgcctggcaggctgcagtccatggggtcacaagaatcaggcaggacttagcaactacaccaccaacctaaaagaggttacttaaactcttggagcctcagttctacaatctgaaaaatgggcctaagtctgatacctcctctcaggagtgtcttgtgagggagtgcaagcgaaatcctggcccagagtaagcgctcaggctgtcaacactcagattctggctgaacacaaggctagggtttgcaggcagagtgcatggctgacccatccgtgggccagtgttgaccatatcaggccggtctgcaactttagc

SEQ ID NO: 59575 - DNA, 1256 bp, Bovine  19866880598745
  misc_feature (1)..(1): n is a, c, g, or t
nttttttaggatggactggttggatctccttgcagtccaagggactctcaagagtcttctccaacaccacagtccaaagcatctattcttcagcgctcagctttcttcacagtccaactctcaatgctttagccagtgggaaaaatagaaaacatgcatagatttccaaagaacctgctcattgaaatttactttttctttctgtgcttgaaaccatgagagcaaaatgtatacaagctggaacaagcctgctggaggatgaaatgtcttgtggaggagaatggaggtgcccccagatgataaggcccagataattgtctatcaagcaatagaagcatagtatagaagtatagtgaggctatactagattaccctggacctacctgctgatcacagaagtgagaagtccagtagaaccctgcggagccagtcctgggcagagcaaccatgaggatacaccacggaatcaggagctacataaaacagctgttgtttcaagaggctgagttttgagtattttcttacagagtaaaagctcactgatgacatccactgattctatcttgttgtgggcaaagtaatagaggattcaagaggctaagtgacttgctcagagtcacagttcagcaggcaaagtgtgacaggttctctgggactgggcatcagaacaatggagatggttcaaatctaagctctgttgttttctggttaggaggcctgggcaaatcatttgtgctttcctgacttcagtttctttgtcagcaaaacaaaaatgatttcccagaatatctcttggcactcaaaactatgacctgcccacttggttatagatggagcaagtgctagaaaccttttggttcagttgtcatttgtgaatagtcagccattctcgattgcacgtttttgtctaatgctaatgtgagttttgtccacacacaccaaccactctgaacactttgataaatcgagtcattaaaaatcagttacttttggttgcttgattgaaccaagcaactaattccaccatggttataaataacctgctagtaattggtcaatttgtcatattaaagcaattagaatgatgaagtggatggagaagcttccaaatgaggtgcaactatattaagagtcttcagtggggagggaggctgcctctttagcattgccactggcataattcagaccctcatcatccactttgatgtaaaggaaagagcagtagacttggaatcagacagagcagaatcaaagct

SEQ ID NO: 59576 - DNA, 1820 bp, Bovine  19866880614276
  misc_feature (1)..(1): n is a, c, g, or t
nttccaaaatgactggtggtgttaggcatctctgtatatgcttattggccatttgtatatcttctttggagaaatgtttattaggtcctttgcctaattttaaattcagttgtctttttactgttgagttcaagttctttatatattctgatacaagtaccttgtctgatatatgatttgaagacatttttttcccatcctgtgggttttttttcactttcttttttgtgtcctttgaaacacagaagtttttaattttaacgatgttcaatttatccgtttttttccctttgactgcttgtgttattgatgtcatttctaagaaatcattgcctaatccaaggtcatgaagatttcctcataagagttttatagttttagctcttgctttggtgtttgatcattttaagttaatttttatgtatggtgtgaagtagaagttcaacatcgttcttttatgtgtgaatatccagttgtcccagcaccgtttgttgaaaaagtctattctttccccattggattatattggcacccttgttaaaaattgattttccatacgtgtgtgaatttatttccagactcagttctatctcgttgatctatgtgtctgtcctttatgccactatcacactgtcttgaatactgtagatttgtcaaaagttttgaaattgggaagaatgaatcttaaaactttgttctttctttttctatactgttttggctattctgcatttcttgtatttctatatgagttttagaatcagcttgttaatttctgcacaataccagttggacttttgatagttattgcactgaatctgcagatttacttgggtagtattgccatcttaacaatattgtcttctgatccacgaacatggatctttcaatttatttaggttttctttcatttctttcagtaatgttctttggtttctcatgtgcaagtcttaaagttcttcctcaaatttattctgaagtattttattctttttaatgctattaaaagtggaattgttttcttaatttcatacttagattgtttattatagaaatacaattgatttttatatattgatcttgcaccctacaatcttgctgaacttgtttactatttcgaatagtgtgtgtgtgtgaatcctttttattgttttaccccctggagcacttaatacagttcctaacattaactagtattcaatctacctgtagtccttgagttgctatctctgaatgccacgtttccacagaaaccttccattcactgaattatttcccattttccaataccattgactcattcttctctttcacgcttatctgcaggcttaggaacaatgggccgaggcattgtcatttcttttgcaaaggcccagatccctgtgattgccgtagaatcagacaagaagcagctagagactgcaagcaagataataacctccatcttggaaaaagaagcatccaaaatgcagcagagtgggcacccttggtcaggaccaaaacccaggttaactacatctatgaaagagctcagtggtgtagatttagtcattgaagcagtttatgaggacatgaacttgaagaagcatgtctttgctgaactatcagctgtgtgcaagccagaagcacttttatgcaccaacacttcagccctggacattgatgagattgcttcttccagtgaccgtcctcacttggtcattggcacccacttcttctcaccagctcatgtcatgaagttgttagaggttattcccagccgattctcttcccccaccaccattgccacggttagaatttatcaaaaaagattaagaaga

SEQ ID NO: 59577 - DNA, 2295 bp, Bovine  19866880637927
  misc_feature (1)..(1): n is a, c, g, or t
ngactgtcttaatgagttctttatctgccacgtgcctgtccctgacagcttagtccaggcacctccacggaggctgcagaggagacttggtttattgggaagggcagagtccatccccatccggggtcccgagaatggactggaagagaacagctgggtctcagtgggctttcttgctgtgcgggatggtcttggggaagggctgggggcccagccagagctgcagcaggatgactgcatggcatgcatgcagagcagcagagctgcaggacgtggatgggtatgtgttccaggagagctcgatgagccccagcaccagcaacctagaaagaagggagaagctctgggtctcatcctgtctctagacctgcagctcttcagctccccactacccctccacggtcatggccttgggatgaggagcttcccacccctgtcctccccccagggttgtcccagccagtacctgagcaggtgagtgagccagcgggcaggcgtggcccacaggaggtagggcagtgtgtggaaataccaaacgtagaactggtagtgaagggagcggctgaagcagatgccaatgaagttggaggtgaagagggtagaaacaatctgtaggcggtggtcaaggccaagggcaggagcagaggggtagggagatttcaaagcaggggggacaaaagtttgggggggtctaacagcacctggctctgtagttcctagatacatacttttgggcaaatttctgaacctctttggacctgttcctcagtctgtgtggaggcaataaaatctagaggtgtaaggcctagggagccatcactcactagctgtgtgactttggcaaattacttaaccttttaaaaccctaattttgtcatctgtaaaatgaggataaaacggggtttcttgtgagctttaaacatacgtaaagctcttaagacaccgctaagcagagggtgccccctcataatggtaactcaatgatatttagaattaagaataaaacacgcttaaatatgtacagtgctcagcacagggtttggtacagagtaggagctctatgaatggaccctgtagctattactggaacctcctttccctctcccagagcagcagctgtccagggttagttgaccaggaccctgtctgcacctggagagggcaagacttaccttcccatgacttaaaggatatggttgggtgtgaggggctggggtggaaccttccttttggagggatccttcagcagcgacaggataccttcccctgtcctggggagaaaccattgagacaacttatcaaaccaccacagtgggccacacagagctcaacgtgtccccaagcagcccctaaggcctaggcccttcactctttcccccatgtctgcccaaggaactgccccgctttctcacctgtgccacctgcagagcgcaaagagcaagagcacggtgaggtgggcagtcaacagtgccaggtggaaggcacgatgcaggaagagggcctcggggagaaagcgccagttcactgtccatcggaagagaaactggcggccaaggtcaaaggagcgggataggtagccgacggggttcttcagcaggaagggcagccctagcaccacctgaggatgagcgtgacatcagcagagctgcccaggctcagcctcagcctcatgctaatcactgaggggaggggagatagggtatagatcccagaggttccctaattgccactaggaatagcaagaaagccagcccacccagtcagaccaaaatcttgggccaaaaaggccaaggaaggacataataacagtgctttatatttaaattcatctagtcataaatgtgcacagctagaacggttctctgagaccatctaattcaacacccttgttttatagctaaagaaaccaaagtctagaggtgatggctgtccagatcagaatcaactccaaaactgtcccctggctttgaagatgtctcaaaaacgaaaggagtccagacagagtggccgccacttcatcagaaaggggacagggtagggatggaatacctgaaggacagcacagatgcccaacttggggagggccccacggaggccaaattttgtgaggagaaggaatagtaatccaggggcgaagagcagcacactcatcttcacagagactgccaggctggagtggatagtggggaaggaagagtgaagatcagcttcatcagggccatgtacccctgaccatcaccacagcagctccctgttccctgccagcaagctccaggcagagggtgagcattcata

SEQ ID NO: 59578 - DNA, 2033 bp, Bovine  19866880665586
  misc_feature (1)..(1): n is a, c, g, or t
natgtacacgaagccagctgggtacctggaagagagggaacatgagtccaggtcaagctactcagcctggcatccagtcaaccccctcccatcctcgctgaacctccggatcctactcacacaagaggtccagtgtcaccttgcagttgagtgtagtcataggtgccattgatgacgccctctacctcagccatgtaggctttccagtcaatctctgtatctgcaaaaggacaggatggtgtggttactttgtggtccagaattgctctgcctcactccatcaaagcacagagttccagctcattcttgggatttctatcataatcccttctctaactaatctattctctgcatgaacccaagtatctcaaaatcaaacatgtctgtaatggaactcagaactttccactccatatgtggtccccttcctgggttccatgaatggcaccattaacctctcacttgcccaagtcacaaacctgggaaacatccttgatacttctctttcatttccaaccctcagtcaccaagtcctgcctcttcttcatcctaaatatctgtctcatccttctccgctcaatttgggtgtaacaatctctagcctcaatggtgcaatagctccctaattaggctcccagcttccactttccctgcactacattttattgtccaccctgcaaccacagagctcatcctataatagaaacatcacatttctctgcttaaaacccttcagtgattccccaaggctcttagataaagaccaagtttttttattattcccatttttagaagagaaaattatgaattaacaaggttaagtaactagctcaagatcagtaagctaggaagggaagagttgagattggcacatatggagctctaaattctttttcttgagctctaaattcttaatcaccatactatctccttaacacagcttacagattccttcatgatgtgaaatctcatctcttagtactaccctcacttgatttctgtgttccaactctaattatttcatttctttaaaggaagtagactttctttcaatgggagctctttggaacaagattctctcctagactataatctgccccctacccctttctctctttcctcaaggaactagctcttattgttggaaaaggactctaggaagccttctctgactcctcaggtctggctgaagtgcccacctttgtccattatagaacttggtctagtaccattatgatgaatataatgtaatataattttctgtcaacttatctttgtccaggtccgcatacacaagtaggaaatctgtctatctttttcgccactatacccttggcacctagtatggtgttagccatataataagcactcagcaaatatgtagtgaactaactgtctttagcaagtaagcttgaaatccagtgctttctgcctggaaaggagtgaccaataatgcccaactgactgcaacaaaacgctatcacagagaaaatacttcgagacctcagaattcaacagatgaggagactgagacccagcaagggatgtaacgtgtccaaagccatagagacaagcagttgctgctgctgctgctgctgctaagtcgcttcagtcgtgtccgactctgtgcgaccccatagacggcctcccaccaggctccccggtccctgggattctccaggcaagagcactggagtgggttgccatttccttctccaatgcatgatactgaaaagtgaacgtgaagtcgctcagtggtgtccgactcttagcgacctcatggactgcagcctaccaggctcctccatgggattttccaagcaagagtactggagtggggtgtcactgccttctccggagacaagcagcagcagccattaatttagacccaggttttatgggggagattaagatcgagtttggttttctgtggagcagactttggatttgggtaaaagatattggtctgcaattgatggctgagtggatcaggagtctgagttccgaatgtgggtcccagttttgattggggg

SEQ ID NO: 59579 - DNA, 1417 bp, Bovine  19866880795029
  misc_feature (1)..(1): n is a, c, g, or t
nctgctggctaatgcctaaaattcctttagatgtgggtaaagctaaagatttttcctatttcaactggagatgaaaggtttaaaatgactgactgagatatcacagtgactgaaactcatctgctcaagattaatctatcagtcaacaagcacagatgactgttatcaggcactgtctccttctgagacccaggagcactcagatgacagcagatgatgaaatggggtgagacaaactagagactcgtggtcacttttggtgtgggggctggtaataaaggttagttctgtttacctttacttaccctgtggacaaaataggagttgggagtaaaggaatttaggtccaacacagctgtgtactagccccattttctggaatgtggccaccctgacatatggttcccatcaactatatttttgcatgattcttgaatcctgcctcccaccccccacctttttctattcgactgcactgacttcattacaatggaacttctcttccatgggttctaattgaggcatgaccagtgccttgttcaagaagagtttcttctgctgcttgtttctgcagaactaggaatacatagaaaacaatcagatgggttggagggatacagacatatggaaaataacagaatgacaagaaatgttcacaccaagcctggccctacctgtgaacggagaaaggtatggacaggggactgagaaggacttgaatgtttatttattttttaaaatcctgaagcaaaacatgacaaaatgttaacacttattcattctgtgttggcatttgctattttatattactctttttacttgtcttcatgccctttggtgtctttaaaagttgtcagtattgcatatatatctttataaataactgtacacatgattatagatgaataaagaaatattttgatgactaaagagaattcttacagttttttatgttaatgattttatcataaaattaaattaataaagcctcacagaaaagttgaaaaatataagaaaatagagatgcaaattaacatttcccataaaactaccatccagaatgtgccacagttaaaaatttttagcaatttatttctttttattatttttgtttgcactgggtcttcattgctgttcatgggcttttctctgattgcggtgagcgggggctactctctaattgcagtggaggagcttctcattatggtggcttttttgttgcagagtctagatggggtctagatgcatgggcttccgtagtggcagcatatgggctcagtagttgaagcacacaggcttagttgctcacagcctgtggaatcttcccagagcaggaatcgaacccatgtcctctcaattggtaggtggattcctatccactgtaccaccatggaagttccagaatttgccacattgt

SEQ ID NO: 59580 - DNA, 1031 bp, Bovine  19866880808984
  misc_feature (1)..(1): n is a, c, g, or t
ntgtggaagaaggaatgaccccccacacacacactgacccctgaagcctaacaccccttctctgggcactcccagcctccacacaacttgtggcccccagaaggaggctggtcgctcagacctctgcctcaggcctgagaatgtgggcctgagaatgtgggcgctggggctctgccagctgtccttcctggggcctggttcaccccacctgtgctgggagcagaggatgttctagagctgagcccagagcccagccctgccctcggtagaacttagctgccaaactagatgcaaatctccaccttactagccacccctgcctgcctcaaacaccttctctagtcccctggagcagaaaaactctatgtttcgggtagtgcagcaggggtatcaagaggaaactggccctgtgcacagctagccttgtgaaaaaaatcataggcagacccccccgggtgctggttcatgctccctaactgtcttcaccagcagaaaggtcaggcggagaacctcttcaactcccaccattcccaagactttgctctggcccagagtcagacccccacagcgtagaaggtctcttcctccaggccctatacccagaaggtaggcagaaaaggttttcttcctttgtttataaaaaaaggagtttgaggcccagaaatatttagtaatgtgtctaagatcacagcaggacttgagccctggccaccgccgaggctgagttgtccaccaccctgcactgctgggtctgggtcagcctggaggccactcttcagcccaggacacctggccctcataggggctgctgatcagccatctgcaaacccctatcctgggagatgatcctggagatgggtccaacaatctgttctgccgttcaggtgtgtcatttcctgagccctcgggtgggggctggtttgggtacggccctgttggcactgattcagcatcttcattttgcatatgcagaactaggctcctagcacagagaggcacgtcaagccgcagccctggtgctaagccaaacg

SEQ ID NO: 59581 - DNA, 939 bp, Bovine  19866880837990
  misc_feature (1)..(1): n is a, c, g, or t
ntgtctgactctttgcgactccatggactgcagcatgccaggcttccctgtccatcatcaactcctggagcttgctcaaactcatgtccattgagtcggtaatgccattcgaccatctgatcctctgtcgttcccttctcctcctgacttcagtctttcccatcctagggtcttttgcagtgattcagttctttgcatcaggtggccagagtatttcagcatcagtccttccaatgaatattcaggactgatttcctttaggactgactggtttgatctcccaagccaagggactctcaagagatagtagatagtgactaagtattcttgagtgaatgaatgaataaattttattgtcttgtgcttttcaggaagaagtctttaactacattcacaatatcttatccattcctggatacagtgtggaggagaagcagtctgtatggcagaaggctatggatcatattgaggtactgattcagtagaattttgaaaactttgccgtatttgtatagatatctcccaaattaagtttttgctaactaagtagtgggagatatattattaagttgatttgcttgagggttaacatctttttcagataatttattccacctcacatttgtggaaaacccatgctgtatacagcttattatgtcatgacttctgaaaataactcatgttaaatcagctagttcacaaactggaattttagtgttttttcacaatgttctgaggaattctgagactactattgatcttttcccctattatgtgacaggagccattccctcagttacttgatggaattttagaaacatcactgcaacgagttattctctctgatgtatttcccttacgtaagaggatgtatttctcttatgcaaaaggatgatgattctcattttgtttattaatgctgttttataggaatgcagt

SEQ ID NO: 59582 - DNA, 1375 bp, Bovine  19866880917345
  misc_feature (1)..(1): n is a, c, g, or t
ntgaaaccatcattgctgtcctgggcttgtgttcccagcatggtcagctccttactgtttgagctcagtcagcaacactctgacatgatcagtgtgaggctcagcgttactgagccttgttacttccctagttcggcacgtgtatctgtgtttgtttgtgcatatctgtgtatcctggttgtcatcttggatctgcagtcactcttcccaaagctgcactgacagatgggagcaccagcagtatctgttgaacagtgtgactgccagagtgacatgtgtaagaaacacaaaagagcagcagtgttcttgatttgagccaaagcttttttctgttgaccagtaaccacaggaagtgtttggtgactctgctgtcagtgttggccctgccaagagccacattcaagtgctgaggagccgggagctgtgttggctcagggtgggtatctcgtggaggagtcattctattctgctgccgtgtcaggacctggcagattccatgagcatttcgtattttagaaattcctttggaaagctccggattagaaatacttatcatgtgtaataatttatctatagtgcttaaaatttgtataccatattttttgtatataaaatttcttcttaatgcgctctaactgataagttcaataaaaaaaagtaggaagacgcatatactttcctaggacttctgtatcttgaatgtatcttgatcttggatgactagaaatttgaaaattagatacattttccttagatagaaattgtcatagagttcattgcaataaactccatagcatagatcaagattggaggtactgttggtgtttgaggtggattaaagaagtgtagagagttagtggaaggcagcattaaaaacctcttagctataatgcatcatttcttcactacactagaaacaccaaccagaacttgtgtggcaaagttgacattgctgttcactcactcagttgtgtccaactctttgcaaccccatggactgcagcacaccagacttccctgtccttcactgtctcccagaacttgctcagactcatgtctgttgagtcgatgatgccatccagccacctcattctttgttaccccctcctcctcccatcttctgtctttcccagcatcaggatcttttccagtgagttggctcttcgcatccagtggacaaagtattggagcttcagcatcaatcattccaatgaatatttagaatgaacaatggcattgttacatgcataataatcagagaaagcagttttgtcttattcttgattacaaaagcatggttacactctctgagccatccctgttttagacgagctttctctgctgttgtggaagcatcaggggctgggtactctgg

SEQ ID NO: 59583 - DNA, 1704 bp, Bovine  19866881018716
  misc_feature (1)..(1): n is a, c, g, or t
ntcattagattgaacagtggttattgtctacactcagagcagcataagaaagaacaagttcaaatctcagcatgagcattcgggttggatatacagagctgtctcttcagatccttgaaacagaataaaagtacctgaaatctcattgactccatacaaacagtagcagtactcccaacttttgtgaaatccaggtcagaagaaatcattacagctgaaggaattttcagtccatcctgtgggtatctcttgtctctgctgttcagttgccccaaagatccttttagtagctgcattttcatattccattctatgtctctttgggccccttaatgtggggagtctgatttgctcatccctcacttaagtggttttatacctgggagacttcacccttgaagccacttacccactcctccctgtcctcctcaccccaggaggagatctggaggcctgccttcagaggcatttccagcagactgcccaaatattgctgttacagagtgacccctgcccaaaatcattgaattgtctatctgatcaagaaaacccattgttagctcgctgaagcactaataagaaccaggaatgaagggtttgctttggagatggcatccaccaacactctgaaagagcagcaaagactgtggaggagttgtgcctgcaagactgatttggtgcttgctcttcagaaggccaaggtggtgctagtggtaaagaacccacctgccaatgcaggagacacaagagatgcaggttcgattcctgggttgggaagatcctctacagaagaatgtggcaacccactccagtattcttgcctggagaatcccatggacagacgagcctggcctacaacctacagtccatggggtcgcaaagagttggatacagctgaagcaagttagctcgcacaaacacttcagaagcacagatgatgctggcaagcgagctgtgtgtcactgtctctccttctgcccttgtgttgaggaatgcttatattccttaacgtcctacttcagagtatgcagatcaaattacatatttatacccgttgaggaacttgagagtgatgataaccctcatcaaattcctgtaagccccgagagcttccaatctattattataccagaggctgccagcgccacctctggacaggaggtgctcctggcaccaccatctccaccagctgttgtttacttcagctgaaaaccatcaattaagccctccatttgtccagtttgggattatgggccacatcctgatgccaggtctgaagaaacaattgtctgatcatctctacttcttttttacattcctttttggttccaaagctcacacattagcaatttcacaaactaaggaaggagttgagatgctgggtagccaaaatacacaaaggtccatcctattttcctgtgatattttgattatatcttatacaatatcaacttaataatgctttcccacagtcaatccaactatatttacgtttgaggactcttcataatcagtggcaacacttggtatatgttagtataagaacagatagtactacaactgctcttttcttactacctttattattttttaactgtattattataaagactcaatcctcttatatgttgtatagagatttaaaatttataaagtgcttctaggagatttaaagaataaaaggaaaatgtttattttcactta

SEQ ID NO: 59584 - DNA, 1094 bp, Bovine  19866881080159
  misc_feature (1)..(1): n is a, c, g, or t
ngactaccctctccagaattcttgcctggacaatccaatgaacagaggagcctggcaggctacagtccatggtgtcacagagtcagacatgacttagtgagtaaataacaacatatgccaggcacttgaagtgtttatctcacttaatcccctaaactttattatgttggagaacagtgtgaagaaaaatggttcagggcagtaacctctgctgacacaggttcaagttgtcctgtagctcattaggacaaacttgggacagtctctgaacctccacagcctcagtgtccttatctgtaaaatggggttaagatgatttgtcttatcaggaatgtggtaaatatttattgccaccagcctcattttatagaccaacaaactaaagcccagttgtaaacagttgtaggtatttgtactcaggtctgctggatggtccaggctctttcctccaccactccaccaccaggcagcgtggcgttggtgagaggagtgtgtgccatgggcgggctcctggcagaggctgggggtctccctgggggctgggggtggggaagagcacctgtggccattaggaatggcttttataagcctgttccaccaactggctccctcccccaggtctgcagcacattgaagctcttcctgtttgctcccaagcagatggtgctggaatctctctacaccaactcccattcataaatcacggcctttcccctggtgctggagcaaccattctaattagagtgggggaggtgtgcatgcaggggtgtgtgtgagtgaatgtgtgtgaagagacagagaccgtggccaggagaccccctcgtcttcccactggggctagagccccttccctcagcagctcccccttctttacagagtgaagtctaggggtcccaagtctgaggggggaggccctgtaagagtgtttcctgcttcacatggcactacctgccacccctacccaacaggagagaccttgggtccaggtagccattcctaaccccacatccagtctcactgcatggtggtataggatagaggggtcgggtggggggatgttaacagagcccctagtgtgtcgctggaaccctgat

SEQ ID NO: 59585 - DNA, 660 bp, Bovine  19866881087893
  misc_feature (1)..(1): n is a, c, g, or t
ncaacactgtgaatgtcaaggagagccccacaggtgagcccaccagctagcacgatggagccagagaccggccccggagacccacaaggtccctgcccagatgcaccagaatagcaataggatgcctctcccctgccctcctcacctctcctggtcctctccagcaaagatggcactgccctcagggccttgtgtttgggaacacagggaacgtggagcaggctggcatcaccctcagaagcctcttctgtggcagtccacccgccgagcccgcctcagaggtgagtggtcggagcctctccatctggcactttctctccgtctctctctgacactgagaccgcctctccattagcctgcagtgcctgcctccatcctccctgcccttctgtcctcctagatgtcagcagtccctgcggtgtgcccttcctcccagccccaccactttccctcacctccctcctccctataacatcaagtcctcttctttctggtttggctctaacaaagttggagaagtcggggaaatgtgacaagcgcaagctgaagcgggtccgaatctccttggcggtaagtgctccctttcctcctctggctcctctggagcaggagacagggagggccaggctgtaggtggggcaagcttccctatgctggggg

SEQ ID NO: 59586 - DNA, 4728 bp, Bovine  19866881091014
  misc_feature (1)..(1): n is a, c, g, or t
ncttgatgggcgtaaaccgggctgccctagacacactaacacatatggggaccctgtccatacacaactgctttctagaaggttatcctgagtgtgggatgcccggagttggggctatgccttctctggggtttaatctcccctgactaaggtgatattccatccaagctcttttgagccattgggagagggggcaggggccaggccagcctggttgtcatgggaaccagcatgcatttcctgccagggacctgcagagtgttagcccctcttcaggctgtcaggctcatcacccccaccccctttctccacttaggaggaggaagtctgggggcaggttcccatagtgaagtggagaggcgccgggcaaggcactgttcaccttcccatgacagcacagacatgaagtctcacagccaggttgggccaccagcccccccacaccgagggctgtgctaagagctggctcccaccctttgggcgcttcaggctgcaagccccaggagggcagacaaggcccttagcaccttgacacgcatggaacagcagctgaatgaggctgtggtcccagtgcccacatttcgcaccatgagacctggagagcagaacctctctgagcctccttattggctaaacagaggaggtaactggaatctaccatacaagattgtggtgaggctcagatgagagaacctctcgtgaatggggattatagctggaaagtctagtactctgtgaggtcttattgagtcttggcaagctaccagaggcaggcccctaccctccttgtatgcctgcatctgcatgtgcttagctgctcagtcgtatctgactctgcgactccatggactgtagccctccaggctcctctgtccatgggatttccccaacaagaatactggagtgagttggcatttccaagggatcttcccaacccagggatcgaacccacatcttctgcattggcaggtggatactttactactgtgccacctgggaaacctgctcttgtgtatgaatcaaggacaaaacaatccctgtccccttcatcccaggactcctgcaagtcacagcagacacttacatggtgctctgcttccccatgtgccaggcactgttccaagggcgcccatgcattgactcagttcagccccattacagctccatgaaggaatcaccactaatgcccccattttgcatataataaggaaaccagggttcagagttcagtgacctgcccaaggtctcacaggtggtaagtggcagagtcagaactcaggagttcagagactgggcctctgatctctgtactataaatgtagcgtcttaagatgcagacgagacccccaggttaaagggccaagcatgaggtgcctggagctccaaggcccacctgatatttccaggtgacacatacacttgggcctggacaagcgggcatctctgctggcctcacgaggctctgagcacgttctccaggtgcctctttgtcaaggattccccatggcttccttcctctctctttagtttcattatttctcttacgatcctggtgtctctcctcattttctctcatctcccttcttgtacaacatttttggcacctgatacccctcttccctttcctccctctgccccaaatctggcaggcaagaaagtggtggttagggggcagtgggcagtggtggcccaggcacgtcctccatcccttcccccaggccagtcctcactcacggcggcactgggactccttggcggctggctcgtggccggtggcacaggtacaggcgccaacaggcaccatccactccccgtcaccgttgcagtagagcttgaggggcacagacacctccacggcattggcaatgcaggtgccaggggcgatgaccagtgaggtgggctcagccccagtgagggtctcagggaagagtgcaaagcctgcggtggtggacgcacacttcttgtagaatgcgcgcacggagatgagcgacatgcaggcgccctggtcctggaaggccaagtagaagccagccttggagagcggcccaaagctgcgcaccttggtgttgacacggccagcatcgagccgggagaagctctcatccggtgcgatggtgtccaccttcacataggggttctccatccagaagggggaggaggctgaggccacgtcactgtcagcctcatagtagaagaggttgaaggtctccttgcaggagccagggatgttgggaatgctattgcagtcccgcacagtgaacttgagctccacgtagacccgctgcacatctcgccgccagatgaaccctgtgcgaagccagttgttctggctggactcccgcacgttacacacctggtacgtacggatggggttcatggcttcatcatagccgctcacctcttcccactgtgcaagtgagaaagacggacagtgagaccagcatttgccgggtgttgatcacaagcccagatctgacctgttatatttacttcacagagatgcttctgtggtgccgtggttgagcatatagactagtgggctccagtctcagttctctgctgtgtgactacaggtaagtcatttaacctccctggcctccctttccccatctggaacatggtaagaataaagatatttaaggaataaatgactttaactgaataaagcacttagaatggggcacctgataagtactttgtaattatcagatatattacttattatcattatgcctcagtttcattgtctataaaatgggactgattgaaagtaaatgaggctgtgaggaattaaataggtccaataaacactgattactactattaccatcacatttaaccttcacagttccttggaagatacatctgttgttcccactccagagaagaggaagccaagactcacaaaggcagggacttgcccaaggtcacagaatcaggtctggtgacttgagggtctgtaacgtcacccaaacccagtgttccagaacttagtacagttgtgaaggccatcgagggaggtcagttagaacactttagagatgtcaaggactataggaatgtaacattcaagaaacagaggcccagaaaggtaaactgtcttgctcaaagtcacagcaagtcagagatctggaaccaaagcttccttgttcccaagccagtgctcttcccaaggacccaggaaggagggagatgacagacatgcaaagggctgccaggtagaaagggatgggaacaggttgaagacaggctgaggggcgggcagagggagaatgggacaaagatggtgtgtatgtgggaggaaggacagaggcaggctgaagggtcagagaggaaagcattttcagagatggaccagcaggtaaggaggaaggtgacaggtgcagacgatgtggatgccacaggtggggaaactgacaagtagggcacagaggcggccttgctgaggcaagggggctaactggcaagcagcactcaggagaaatggagaggaggtcttaccccactttccggatgagaggtccatgccaactcagatgtcacccattttgtatccatgagggtctctgtggaagcaacaagagaaaaaaggccaggggccaagcttaggatacggagaaagaggaggctgcccaggaaagtccaggatgccagacatcagttcccaccaggtactcccaggttcccaaagctctcagctccccaggcccagaggagaccctgcagccactcccagagatgtcacagcctcaaagatgtcttgtcaggccagctgggagtgggtgttagttgctgaccccaggtctgggttaatgaggcaggatccagggccggttcacacacctacaggctctgctaatctccacacaaaggggctggcaggtcctttatcctggaacaaagggccgtgtgcttcagaccctgttgcccaggcctcccctgactccattcccaacacaaaggcgcagccccacacacgcccaggggaatgggagaacagtcacaggccagagcccacacccacccagcctcctacacaaccagctctggtggacaggacaggaatgctctttgagaatggggtaaggaccaccaaggcccagccagctcctctagagctagttcagttgttcctgaaatccttggataaaagtactgttggtgtatcccttttacagatgagaaaactgatgcctggatacagtatgtgaaaaaagtgaaagtattagtcgctcagttgtgcccgactctgccatcccacggactgtagcccacccagctcctctgtccatgggactctccaagcaagaatactggagtgggtagctattcccttttccaggtgttcttcccaacccagggatcgaattcaggtctcctgcatagcaggcagattctatatagtctaagccaccagggaagcccaagtacaatatatataggacctaagaaagctgagtgccgaagaattgatgctcttgaactgtggtgttggagaagactcttgagagtcccttggactacaaggagatccaaccagtccattctaaagatcagccctgggtgttctttgaaaggaatgatgctaaagctgaaactccagtactttggccacttcatgcgaagagttgactcattggaaaagactctgatgctgggagggattgggggcaggaggagaaggggacgacagaggatgagatggctggatggcatcaccaactcgat

SEQ ID NO: 59587 - DNA, 1688 bp, Bovine  19866881118587
  misc_feature (1)..(1): n is a, c, g, or t
ngatccttcagagcagcctttatggcaggttggggataacaagaaaaataaccagagaaagaataacatgacttcatataatctcatttgcaagatatgacttgatcatgagggctcagggcccacttatcctagcgtggggctgcctctgtgtagtcaaaaccatcacagcagtcccagaaagcctgtccagctgccctcttgagagttcaggtgaatccaccaaaataatgaagccaagaaagagatgagttactcttctctctggtgtcagcctctaaattccagcttcctatcccacgagctgcctttttctgggatgattgaaatgattgttcctttttatggggagtagaactcagattcacgtaaggttttgatggtcattcattgaggctgcatacagcaaggaaaggggtgggcgcacatcagcttacctcaatgacttgactagttttgccagaggtacggtttatacccacaaagatgatgatttttctttagatatgtccagttgagagacagcattgtgaaatcctctggtgttgattcacaatggagccatagatgggcagactgagggttatttatagaccactgatgatgtgcttttcaaagaggtcccaatagttgttccaggagaaaagtacaaggatcaatccgtctgctgaggattcttctctacctggaagtctatgtgatgtagctcttgcctaatatggtgatttccttctgcatactcttcaagagagacttcattccttgtgcatgggggaatgaccttaccctaggcgcttcagttgtgtctgactcttagcaactccatggactgtagcctgccaggcccttctgtccatgggattctccaggcaagagtacttgagtgggttgcattgccctcctccaggggatctccccaacccagggatcgaacccgaatctcttatgtctacttgcattggcaggtgggttctttgccactagcaccacctaggaagcccgaaacaagaatgtagacagacagaacaaatcactggagtctgagtgtgaaatgctgatagattttcctaatgctttctgtctggtctgtgttcctggaggttgaatggccatcatcctgcattccttctgggttcggtaaccccataaactctggcccactgatcctcaatggagacagtgctgccccctagaggcattttagaaatacctagtgtatttatattaccctggttggtggggcactacttaaaggagacagagagggccaaacttcttgccttacatgaggcagttttatccaatgatttgtcctgcacttcatgtgacatttgacatttgaatgtcccacccgacagtcatacaggtagaaaatctctttatattggtctgagcctagaacctaattccattttgaatataaacacaaagtactttttgcatagttttaatatacactgaatttttcatgaatgctactatcatataaatcaagagaatactgtattttatctttcccaggagttgttcaccatttcagaaccacaatatgaacagcaaaatcctcactgtatttgagtgccaaaataacacacctctgttcagctgcattcatatgtatctgtatgaatatgtagtatttgtttaatcttgttttagcacatcaaatctaaagaagtacccataat

SEQ ID NO: 59588 - DNA, 1234 bp, Bovine  19866881126413
  misc_feature (1)..(1): n is a, c, g, or t
ntatgagtctgtgtctgctcctccaactccaaaaccctatatttcttctaaatatgtccagtaatgtgcataagaaaagttattttgactagactattaacttcaagataacaaggagcacacatcttttgcacactatcgtccactgcctagaacatattagaccagaggctgcacactttgacccgtgggccaagtcctgtccacagcctgtttttgaatggctcccagctacgaatggtttttacatttctaaagcgttgtttaaaaacaagtaaaaaaaaaaaaaaatcacatggatgaacgtgtgacagggaccatatgtaccccacaaagcttaaattttaccatctggccctttttagaaaatgtttgctgactgctataccagaccctcaaatatttgttgagagaggagacagggggaggggagcaagacctcagagtgaaaaagaagaaacagattcccaacaaatatactttgagatgattgcaaatggtaaatactctcataataaacactgtgcagatctttaaatcattccttgacttctattttcagagtttcaagagaaactgaaggttttttattagtatatttaagagatcataattttttggcaatgtacctattcttgaatcacaggtgctcctaagagaactaaatttaaaccttggtagtccacttgtccaacaagtcaacagaagtgttagtcatcagcaaggtgtatggcgtcaattcacaggtatgcaccctcatacacacatctgttccttccatgaagcaccaagtacctaagcactgacaccccacaacattttactcatctgttcccatgtgtctgtacacctgttacttcaaattttaataactgagatgttccacaaaccctgtaataaatctctgaatactgaaaaatgtttaagcaaaagatgaaagttccattctcaaataatatcaaagaccagtactagacctgttcatagtaatgtctattagaagcacttgtgtacctgaaaatgttgctccatcacttggatttttccctggtctgggcacttttttagagctcggtctgcataatgcaataggatttctaccatctggaaggaaaacagtaattaaaatatgtctctaaagctttgtaatacttaatatatgtcatcttaatatatatgatcttaaataatacagaatcaggcttggctattttatgaaaaaatacaatttaaa

SEQ ID NO: 59589 - DNA, 1618 bp, Bovine  19866881162482
  misc_feature (1)..(1): n is a, c, g, or t
nagccatccaggaattcaggtcatcagctgcccatttgccatgcatggcaccttgcaataaatagtgtgcttgccttcaccaccaaccccaatgtcagtaggttggcttcgctttgtgttggtaaagcccacccaagttcagttttgtaacaccctgagcaatcccgaacagcaattcctgtagtctttttgaagcagtggaagtggtagatatttgtggatcatcttaatataattttcaaaattcaccattccatcccttagctgccctttaaagggatacaccaagttttgtcccaatttatcttatcaactagagaaatatctttatctatgaaaaatttgttatggaaaaataacctccagagtggattttgaacataagaggagggcaaaaggcctatgattaatgtgccaagccatcacccccctgtgggcatctgtacacaccctcaatgttcaagcccaataaccaccggacttttcctgagtaatatgatgtgacactaatggaagtaggatctaggtcaattttgtgctccacacagtataacctttctttacactccagtggtccacactcacttctggaagcagcagacccatcataatttcgaaacaagaacattctggcttcttttaatggtaggataacacacacagtttgccatttccattcaaaaaaaaaaccttttttcttgatgattagcaattaaaataattcagctttaattagctcatttcagtaagcagctaaaggctaaaatgacagtgaagagcaatctggaatacaatgactgtctcatggattataaatgagacagccaaggtgccacatgcaacccttgaagatgccgggctgcggtcagcactccgtccacacccagggccccaagcattgaggcagcgtcaagcatccagtgccgggcttgtttattcactccacaaacagcggctgagcatcttgtgcgtgccaggctctgggttagatgctggagaaaatttagaagggaaacataaaccaaccataagaatacaaaagataattgctttatctaagggggttaaacaaagcacagtaaaagaatgaggaggaaacaaaaatctgcctggagcaaaaaatatttcatggaaaggatgagttagccctggcaatgcagtcagcctgggctggggtatgatggaatagagcacagcatgcatgcaggcaagaaaggcaaagggcaactctgtaagtctgtcttgcttgaaagtcatgctggcctgataggccagtcagatgaggcgtggaataggcaggagggacagatcatgaacagccctacaaagtttagacagagtcccctaaaccagtggtttttaaatacttttcagctggaagcactttgttcaataaaaatacaccataaaacatgaatgaaacaaattcatgaagtccacctgctgccactgaagctgatacatattggttgggaatactagaacctcatttctttgcaagcccataagagcagagccaaactacagcttcaggagagtgcaggttgtggtaagaagcttctaacatggcccccagggatcaccacctcctggtattcacactcggaatattccctcc

SEQ ID NO: 59590 - DNA, 3337 bp, Bovine  19866881190234
  misc_feature (1)..(1): n is a, c, g, or t
ntgccagtgttcagcaggctgaaggccaataaaaataatatgtggcatcacaccaaatgtcaagacttttttcagtacaagcaggacttcactttctgtccacattttatatgatcctaaaggtcatggtactcttgcctggaaaatcccatggacagaggagcctggtaggctgcagtccatggggtcgctaagagttggacatgactgagtgacttcactttcacttttcactttcatgcactggaggaggaaatggcaacccactccagtgttcttgcctggagaatcccagggacagtggggcctggtgggctgccatctatggggttgtacagagtcggacacgactgaagcgacttagcagcagcagcagcagcaaagatcatggtttatggcaaaaatcctgggagccttaacataacatggactcaaaacaattacataaagtaaatgggggtatttcgtttcaataatactcacagtaaagttgatgaggtcatagtataggtgaagatgcttttgcttagtaacatgtatcgctccagattcgtctctcttaacctgatgatgaaataaaaacaacctgaatatcagctactgtttgagacactttaaaagtttctcacctagtcaatccacctagaacatgatttccattcagaatatgggtaaaacaaatactgataactaaagtaactattaaacaaatgaaataaatcactcacaagtgtatgtagtatatctggtataatccatggtatacctggtcagtggtcaagctgtctgtttaggcataccattgttttaaatgcacttcactttattgtgcttccagatattgtgtgttttacaaactgtggcagccttgcatcaatctattgacaccatttttccaacaacatttgctcacttgcttcctgtctctgtgtcacattttggtaatttttgcagtagttcaaactttttcagtattatttgttatagtaatccatgattagtgatctttgatgttactattgtaattgttttggctttttctaagcaatgaagtattttttaattaaggtatgtacactgctttttttcagagataataacacacttaaaagactacaatatagtgcaaacataacttttctatgccctgggaaaccaatcaacttatgtaactcactgcactgcagtatttgctttattgcagtggtctgaaacagaaaccaataatatccccagggtatgcatgtactggcaaatgtaatattcactctgttatactcagaacaaactaacttcatcacatcaataactgtatttagccagagttaaagcataaaataggattagtggcatggtgtaaaaaaaagtaaaacaaaagtacattaaaaggaaaataaggtgctgcagttaccaaaactaggcttttctgaaatatgataccgttgctgctgctaagtcgcttcagtcgtgtgcgactctgtgcgaccccatagacggcagcccagcaggctcccccgtccctgggattctccaggcaagaacactggagtgggctgccatttccttctccaatgcatgaactagtatagctcaaacagcccgaaatttcccagaacttcaagtgttactattttatttatatatgcatatgtatacactctataatcttcatctgtccttatcatttgttctatttctgctccaaggcgacagagcactgaagaagacagacacaatatagtgacctgcctgaaatagaacaggacatcatcaattccagtgtaataccaataccaaagagagatcaaagcagactgaaggcaaggccaccagatacgtaagaagtgatgtcctaaagcctctcctcctccgtcttttgtgtgatgccatactgttctatttccccacctacctccacatgcctttacaggatcctcctttctattgcctttgttgtccttttccttacacgagtgtccactaacattatggatgctcttgcttttgatttacacagcttcaactaccttctcgatcctggaattttcatttgcaccccagacctggattgccagtctgcccaaagaacattccctaatataccactcaagtctcaccttcactttcaacccaacactatccttcccgaaccctaactctttgaatacgtcatgctcctaaaatacaaagccagaaatgcaatgttttatgtccttcagtccccatgaaaaaccttgtctttccttcaaaatgccatccctaactctcactgcacccatccttgtctaaagacctcagttgctttattacaagagcaaaacccttcatttccggccaacctcctataatctgttctttttgctatatctacagtgctattcctaaaatgtcactttaatcgtatcactttaattacctaagaacctgtgatggtttccccttaccaatctagggcaattattatacaatctagatcagaggttagcaaactttttctgtaaaaggccatacagtaaatattttgggatctgcagagcatacaatctctgtcataactactcaactctgccactgttgagttttgcactattgtgcaaaagcagccataaataagacataaccaaatgggcatgaaataaaacttcacaaaatcaagtagccagccaggtctggcccacaggccacagtttgccaatttctaatctagatccatccatatattcaactttattttcaacaataagcttctccctgttattaattgtaacacttgttactggccttctatatatttaagtactatcctagtacttggaatacagcagtagggttggttttagacttatggagctttcagtctagtgatgaagaaaaatgttaaataaggaattttagaagtgctgaatgttataaaagaaggtattatggatgtttgtagtgggaaatgctaactgagatcagtaggtcagggaaggcaatgctaatcatgagctaggatactgttgaagagagcacagagctttcctggcagagacgttggcatatgcaaagacaccaaggccaaaaacatggaagcatcctaaatgtccatcaatagatgaatggataaagatgtggtacataaatacaatgcagtgttactcagacacaaggagaatgaaacaatgcctttgcagcaccgtggatggacctggagactgtcatactaagcaaatcagacagagaaagacaaatacatgatatcgctcatatgtggaatctaaaaaaatggtacaagtgaacttatttacaaaaccgaaacaggctcacagacaggaaacagacttaggttaccacg

SEQ ID NO: 59591 - DNA, 1065 bp, Bovine  19866881205041
  misc_feature (1)..(1): n is a, c, g, or t
naaatacccccatgaggaggcatggagctgagggttttccatgttaatcactaaagcctcaaaaattaaataggtcactctctttccaaagaattacaatagtatatttctttgaaacaatattaaattactggtgaatcagaatgataacctatgacaaaggacatcagcacagatgtagcatcatattaggacttaccaggagaaaatgaacaacatctcctctgcagaaggctagcatgggattcacgtaattatgcactgccacgaagtgccaggccagcaatggaacgctggaaggatccatctgggtaagaaggaaaaaaaaaaaatcattgttaacacaagaagaataaagagaaaactctggtttaatacagcaatggactggtgttccttgataaaaactcctcctaatttctcattaaaattccagaggagtagagactgattaggaaccgtcaagagggaaccttctttgtggacagaaatgttccacatcttgacagaagtttgggttacctaagtatctatatttggcaaagtttagcaaatgtacactcaagatctgtgtgttttgttgtatataaatttttctaccaaaggaaagactttgactactgaactgtacttaatcatatacatgttgaatatttagggggaaaaaaaagagtactaatttctgcaatttacttggaagcacattaaaaaaaaaacaatttgatgagtgaatgacaataaacaggtatataatgaagtatacaataaaatactaatggtacagttttacaatggtaggtatatagatgtttaatgtaaaatcctttcaacttctctatttatttgaaaatgttcataataaaatattggggggaaaatcgacaaaaacaaagatgcaaacacataccatgataagtctcaattagccagtgaaggtcacctaagtacaattaacggtaacctgagcaggctctaccatctgaaagggcagggctgcttcccctggggcccagagatacagtgaataagaaagctgaagactgagctccctctttacagggccta

SEQ ID NO: 59592 - DNA, 841 bp, Bovine  19866881268217
  misc_feature (1)..(1): n is a, c, g, or t
ntgataaaaagtaaattcagaataatgattcccaccactgttatcttactgcctatgaggctaagtgattaataaatcaaaattttattagatattcttttagcagaattaaacttctgacaaatatctaggtggttaaagaaaacattactaccatgatttgtttctcagtaaattttaaaatctgttttagaaaccatcatctacagtccctgtcatgctgattccttaatatttctctgtcagaatatcacttttcattccttttttcttttatagctctctaccaggttcttccccaacaaagtggtttccaccttatgtgtatattcacacgcatgccatgtgtacacacgcacacacacacacatcctcctcattaacccctctaagcatgccctattggatgttccttttcaccaaagtacaccttccaacaaccagagttcttacatgaataccatcctaccacttcttgataacagatattctcttgttaaaatgctgagtttgcttttctctatatactgtagtgatatacaaaatcatttatataccaggtactattcctaaatagttctgtccccaaatgctttctctctgccatatgttttcctcctagcttatctatttctataaccttatataagctcctttctcttcttcactacaaattcaatgagccacaaggtaataaatgttactttgctagaagcccactactatggcattcaatagtacagttcaggaaaccaaatcctgctctgataccctccaactgttcactgccgtatctactcttgtcttccagagttaagagcatcaaatgcaaacataaaaa

SEQ ID NO: 59593 - DNA, 1240 bp, Bovine  19866881305144
  misc_feature (1)..(1): n is a, c, g, or t
nggggcaggaaatcagggggagctgtggatgcaagcctgtcttacatctccagaccctcagaacccagaaaggccaccagccaaagtttcccccccttccacggacactcaaaagggaattcttgaaggacctcagtatttgggccactcagggaggtatggagtgccaatcaagactaaagtcacaggaagggacttttcccagcctgtgtcccattcccctgtgtccctagaaatgttgagctcataacaccctctctagccctcaatccccactccttagccccaatattctgggagtgtggaaggggaagtttttaggaagatctgggttcaaaaccagctctggcaagttctagatgggagacctcgagcacccttagcttccccatctccagaagggaggtgataatctccactataagtgttgctgaagatcgtgtgtacagacctattccagtgtgcgacaccaaggaggcactccgtgaagggcaatttccagactctcattcttgctctgccaccaacgagccatgtgatcttggggaggacacaccacctctcgtgctcagctgcatctgtcaaacgggagggttggatcagatcatctggaaggccccttccagctctaacttgcttggttctattctgagcagggagccccacctctggggcaggggcaacaggaacattctttcagctcagattcaacccaggcacatgcctgcccagccccatcccgcacatttagcctggagctgttgccacgttggccgcgcccttggcaccaggctgttccccgaccccgccctccttgccaaggccacaggtgggtggctccattgctggcggatggtaggagcccaggaggacagaggaagaggacgggagagaagagggaagggtaacctggctggaggaatgtagtgagggctagggcagggccttgaaccctgtggagttcattccagcgccgccactttctagtcgtgtgggtccttgggcaattggctgtaacttctcagaagcctgtttcctcatttatgaaccaataataataacaatttctacaaccccattggattgctgtgagattaaataagaatacatgtcaagtgactggtattctggagttttgttctcgggggtgggggtgtggaaggctcacacatcctttcctcagcccctggggagggggaagtttcttgaaggcatatgcgggcgctggggcgactttcca

SEQ ID NO: 59594 - DNA, 695 bp, Bovine  19866881402918
  misc_feature (1)..(1): n is a, c, g, or t
nggtgagactgtatgctatgctctgtccgcctccaatgtggggaatcagtgaatgctgtgatcatcatcattgcctccctaaattattattgttgttattataataactggtgggtagagttgagtgggtggtagatacaagataattactaagaccccagaattaaagtgttgagtctctacttttccacggccgctcagagatgaaaatgaaagctgtcctccagggaactctgagaagagccctaatcttgagatagcgtgaatccgagaggggaagacaacggagaaaggccaggagagacttggaagccagccttggagatgctgggattcttgactgtggatggcacaggaggctgcgaaggcacaatccagcagcttcaaatcctggttctgccactcctttgctgtgtgaccatggaaaagttacctaacctctctgaagttcagtttcctcagctgtgaaatggggataataatcatccctagccctaagtctgttgtaagtaaagattagaggaaagactgtgagagctagaaaacaaaaacctgagcctagagcttgccagtgaggagggccagaaactgtggggctgtgtgactctcccgacctcaggacgacactggcacttttctcaggactatccaggttcagcagagaataactttggccttagtttcccccctattta

SEQ ID NO: 59595 - DNA, 848 bp, Bovine  19866881471302
  misc_feature (1)..(1): n is a, c, g, or t
ngttggcagcctcgtggccacgctgcacaactctgcgcctttcctcctcagtttattccttccagatactcagttgctgctttttctttggatcacttttctgtgttatggtatttcagttgtttttccactccctttcccccaccctcctaccttccccccatggcaggattcctgagaagacttgcttttggagaaagctgcacgcacatctgctctctagctgcagggagggccctgtcaggggctcgggtctcagggagccacgccacactgggcagtggaggccggggggcagggtccatggggcatggcagcagaggcccgtggtgggcatgcttcctacagcaggcagagctgagcctcagggcctgggggtgctgccaaagacctggggctgcagctcaccagctccctggctctgctggctgtggctgctggctcgctcggctcagatctgcgtatgccagacttgaggtgagagagaaaccaggagccttggaaaatgccctggctctccatcttttttcgttggaacttttttgtcagtggttctgaggggttaggggtcttgtgtgtggtcgatgtgggtgcagttgtgtgtgctagagagtatatgctggttgcatgcaggcttggaagtcacagagcctaggtttgattcctgacttcccatcaaaggcagtgtgaacttgggcaagtcaccatgaagtgggtgtgataccatgcctccttttcagccttgttataagggtgaactgagttaatacatgagaatacttcccggcacatcgtaagtgctcaataaatattttagctatcattattatatatgcatgaggatatgt

SEQ ID NO: 59596 - DNA, 1280 bp, Bovine  19866881565080
  misc_feature (1)..(1): n is a, c, g, or t
naagatactaaaaccatatataaaagtgaaaatccaaatgatttcattttagggtaatcatagtaataatatttgaatgatcttgggcccttttattcctcatcttattcatcctcagtagtattcaacacagttaacaactcccagaaacagtctgtccctttggcttttctggtttctgagttctctgttaacagtgttctccaactctaaagctgccaagtgaactgtggaagcattttcatgtatttttggttattttatcttgctacatttatctttgtttgttcatgttacagagtagaggttaaataaataaacccaaagcatttaaaaaatatgaatcaaccttaaaaagatttgaaaagttatataatttaaaaatatctttaaagtgaaaccttacgttaatcattaccaggctcccttcccagtttcattttacatttccatgtcaataagaacattcagagcctttgttattgcagccgttggcatttatttttgtattaagagttcatgccaaagagtggacagggactaaaagctaaatgtaggatgaagcagtagagctttccttgtctaattcatgcttccctgaaatgattcgaagaaggaaaaacagtactggtgtccagcacactgctttgtttctgaggcttgtttaaaaatgttggttctagggagtcagatttttttccttatgaggttattttgttataattatatctgaaaagaaaaaagaaggaaaaatacatatacacacttacgcatacagagagctatttatatatagctgttcacggtgtttgtgtactaatactggaataccagctgtttaattctgagcgcctgcagagatggattcatctgttgatctttctatctgagatgtgtgtgtgtgtttaggtatgtgtatctgctttggtgtacatatatattctagactttaattaagattttgaattattatcaaactgcattttttattgcctgattgatttttagaatataaattacgagaattacattgctctagttatattgcaaaggaatctgcatctactatctcatttcttttcacatcatccccatgaaatagggaaagccagagattatatcttcagttggcagatggtaagacagtcacaatgcaataaaatgatctattcagtcactcagacgattgacatgcttaaatttaggtcttctgtgagctcagcatgtaagtcacatattcatattggcttttaaaattaatcttaaatatacacagatat

SEQ ID NO: 59597 - DNA, 596 bp, Bovine  19866881865450
  misc_feature (1)..(1): n is a, c, g, or t
ntatcttgtctccgtaaaggtaatgcttactgtattaggttatcatgagattaaattgccagttgaaatgaaaattgtatgtaaacacttaatacagtacctaataggaataaatgacagatctattaatttatctcataaactaattttctcataaataaatttccaacctcattctgtggttgggaatattaattgaaataatggtaacttcgacttcttagtttatgatgactgaggaaatacaaaataatgcttgacacaggagaaaacttgagataattgtattcatttatcttgcttgatgtcaagctgacaagaaatgggaggagggtagttgtgaggtagttctctgtccccttctgcattacataggtccgtttagacagttaagaatagctggaggctctgctctggctcctttgaacctcccctcttctgagacacagaagattgcagttccaaggtctagacttacttaacttcagcttccttaattttcccaaggtgcatggtaaaggtatctgttgtggttatggtttttgctttttattgtctcttccttgtcaggtgttccatcttttcttttcctgatt

SEQ ID NO: 59598 - DNA, 836 bp, Bovine  19866881867964
  misc_feature (1)..(1): n is a, c, g, or t
ntaaaacaaaaacaataaaagcatggctgcatggaagctcaaagacactgagctgtttcttcctaattctgaaagaaaattattttatatctagacctctctaggcagtcaaactgttaataaacatgaacaaaattactcgcagacatgccaagtttcaaaaagtgtgtctctgatgtgcccattcttataaagctactaacggatagaatgaggaataaaccaagaaagaagatatgggatccaagaaaggaagagaatctaatacatgagaaagactaaagaattttccaaaaagatgatcaaggaagctctgggatgacagttgtgcggcaacccaggggagccactgatccagcctggggcaggaaaacctcaggctccaggagtgaagttttcaagaagatagtagaacatatgtatagataatccaatttatttgagtattagaaagagttctagcctataagagagtttggagaaggattggtgataagtgcatagaaaactaatcgcaggggagaaaagaagcaattattaactttagtggggaaacgctattaaaaaaaaaaagaaatgtagtcatacatagtttattattgtcagtcaactgtgagcagtatttacatagtcatagtcatgtaaatgctgaatgttaatttaacaaaaaaccgtgcttcaataatattgaaagaatgtgtgtgtggagggggggtgggtagggaaagagcctgtaagaaagatgcatccttgaatttccccagaggtagaacctgggactaggacaggtagtttatttggatctgaaggacactcagagagaagcaggaaagcaa

SEQ ID NO: 59599 - DNA, 945 bp, Bovine  19866881973831
  misc_feature (1)..(1): n is a, c, g, or t
ncagtgttgcttataataggcaaaaatgtatcctttgtccctggtccaccctagtgccccatccctgttcttccagattcttgaaataaggctgagcatctggagagggtgaaaaagaaacatgatttgtcttttattacctacaaagatgtaagtggcagtgtttataataggcaaaaatgacagcagcttaaatgtccaatatagaggacaggaagaacaaattgtgactagggtggattataaggcagcattaaattgatgattgttaagtgaaaaaaaaggttttttatatatatatatatatgttgcacaacataattctatattatatatgaatatcccatcagggaaagacattagaaataggtaatcaaaatgttagagttatctctgagtgataggattgttttgtttttttttttggccgtgccgtgtcacgcaggacgaccagggatcaaaaccttgccctctgcattgggagtccagagtcttaaccacttaggctgccagagaagtccctgagggatagggtttttaaatgatctattttcttcgactcctttcagttttccagttttctgctattaatgcctgccttttataatcagataaaaatcaaagcactatattaaattataatgttaattcagttaacttattagtttttttgattcatttggaaaaaaaccatgacagtcccagtgctttcacgaatcacgtgtctttctcatcctctccggatgctcaaccttatttcaagagtctggaaggacaggaatggggcaccagggtggacagggacaaggatgcattaatgtgtgtgggaggctgacttgtgcaccctccctcccaggcagaggggatgatcagcgagatccgagccgcctttgaggaggctctgggacactggtttggaggacgagaagacccgccaggcagcca

SEQ ID NO: 59600 - DNA, 1337 bp, Bovine  19866880368041
  misc_feature (1)..(1): n is a, c, g, or t
nttgaacattcagcatccttcggctggtatgttaattatgcattctgctgctgctgctgctaagtcacttcagtcgtgtccgactctgtgcgaccccatagacggcagcccaccaggctcctccgtccctgggattctccaggcaagaacactagagtgggttgccatttccttctccagtgcatgaaagtgaaaagggaaagtgaagtcgctcagtcatgtccgactcttcgagacctcatggactgtagcctaccaggctcctctatccatgggattttccaggcaagagtactggagtggcgtgccattgccttctccgtaattatgcattactcatagtgaaaggttcaaatttgttatgctgcaactgttcagtccttgacagatgactctgataggtcacacccatttttaagtaaataaagaacagcaagagcagaatttcttctttaaaaaaaatgtgtagtactgggagtttctttggcaagttaccatttgcccttttactttaagtctagaaaactcatgtgctttccagcagagttaataatatttttaggacagggtcctcttggagcttccttagtggcttccacatctattacccctttggcttactctactctctgcatttaacaaacattatggtagcttctactttatccttttaaaatatactgggactacttttagggttggaaactcttatgtgttctcatttattttcttaacaattttttattgagcgtttttacgtactaggcaatgtccctggtgctagctgtgcaaagaggaacgtattcacttggagcacgcgtgaagaattactaagttggttctgctgagatgctgaatacctggagggaacagaggaagatgagattggaaaagtggtctgaatgctagactaaagtttttgcattctatcccttggtggcattttgtgcagtggaagtatatagtcagagatgtccgtaaggaagattaagggcaatatgtttattatgttggagagggggagctaggatttcatttagaattttataattgtctgggtagatggaattgaagacctaaattgaggccaaataagtggaatcagaagaaataattggtgtaagatatattgcagaatgggcaagaaagacagcgagtagtcaaagtttgtaaggttagaacctgaaggaaagtataacacttaagagaaatgaaacccaaggggtacatctgagggcaagataagttatgttttgaaaattttgtatttgagaaatctgaaagttctctgtgtagacatataagactcttcggagtgcaggcttgtatcttgtatg

SEQ ID NO: 59601 - DNA, 2149 bp, Bovine  19866880424784
  misc_feature (1)..(1): n is a, c, g, or t
ntatgtctcctgcattggcaaacagttcctttaccattagtgccacctgaatgtaatgtaaataatttgtttttatagggtttgttttaaggatagggcttgtacataaataggtgttcaaataaatgtttcctgagactgaagcatcttcagcatctgaaagcacctgggatttcaacattaaaaaattctgatttcttgagcccttgctttaaaaagatgacattaagtttagatttccatttttattttttgaaaaccatggaaaatgaataaaattagttcaaattttctatttaataagactgatacacacggtacttgaatttcaaatcagtacagttcaaatcaatgtgagttttctatgagtgtgtgacagtatgtgtatttttagttacaatgtataagatgagatgagctaaaggtattcagtggcatagtccagagcccccactgaacaacaaatggatttcatttgccgtgtctgttagatcaattatcccaatctccttccttccatgactattcacgctttaaaaaccttaaagcttctcttttaagtacagctgggactcattagcttctttctgccaatctaactatcattctgtcacttttccttctttctctttatgtcctcaatcaaataagtgtcattttcctgctttcattttggctggaaattcaactgaatctgctttccaaccaatctggtgtataaaattccaatcttccctattacttttggctcacaaatcaaaacaatgaagccaacttctagtggtgctctgactctgctgtttatttgggttctgcattcagagttggaacaggtgccattttttcctggggcctaaacatcaaaatatttgtgaaatgggctttgcactctgctgatctgtatcaagtcggttacagtgaagcatatttccaatgaaaagatttcctggagctgtgagaacacaagtcttattaaggttctgattgttgcactacgccattgcttttgtctttggacattaatgccaaataacgcattcattaatataaaacaaatatgtaaattacagtctgtggctagtggcttttttcaagaattctgaattcctttattttttattgctgagtgatattagacatctttagtgaattcgatatatcggacagttttcatgctagttaggactggaaatctgcgagaagaaatttgtttacaggcagtggaaaagaatcatgtaaataacatgccactgaaattggaaagtgaattttaatcaaatttctagaaaatggatatgctcaatgaagtctttgttaggaatttttttaacaagtatggttttcttcaatttcatgaaatggaaggaaaatggaaactttgtgctttagacaaaagtttgtaagagggaacaaaaaccctataggaatgtctataacatcttaagtagatttaaataatccttgaaattgaaccagaagtccattttataaaactcatctttctctctcaagagtcccattcaagacaacatgtgtgcaaatcctaggcaatatatggctgcaaagtgaggcaagagacacatcaggagttgagccaagttcttcctgagttatgccccataactcctctatattttctatcactaattccacctacggtagcacaaagtaaagccttttgcccacagcttattcaatggatgaagaacaagtttgagaacattcaagaaaaacaaatattcattgtttcagggactgctcttgaaatgtatcatcataacgtttttagcattttaagaaaagggtcagtataattacacttgtaacagtgattaaaatgatgagattttgtcttgtcttctactttctgagactagcttcccctcttttctctctccctccaagcttccctctccctttcttttgagacatacttaatgtgcattagcttagggccagacaccccattgacaacatggatatataggctcttatggtctagtagaaaaagaccaccactgataaacttatcaacaattttggatagatagaggtggaaggttgatggattcctgatttctagaactagagaaacaatttagtaaagactgttcatcttgccctccattcatatactaatatatcctta

SEQ ID NO: 59602 - DNA, 1680 bp, Bovine  19866880686277
  misc_feature (1)..(1): n is a, c, g, or t
ntgccctgagctgacctttccttctcctcctctggcttctcattcagcccagacataaaccagacatttcttaacagtttcctacttcctgctcttaccactgccctaagaaaataagtagcgtataattttaactgaatgaaagttactttattattatattattgatcatattcagtgaatatgtcttccatttttatgatcaaaaatgttaaatatggtattttttggcaaatcttccttctccagatatctgtggtgaaagcaagacgacttcttaacatttcaagtaaatttaacagcctcagtgagagttctatgcaagaaagaaaggccagaaaacaatgggtgtaacttgctccacacatactgggaataagctagtatctatttctgtttccaaaagcaggtgaagttaagcacataataatactgaatggtaaagactttattttgattataccaaacagctgataggagattaaatgagagatcctgatttgatggatgacccagtgaactccttcagagataaaatctcatcctaatcaataagaatattttactcaataaaaataaaggcagcattaaaatgtaggaaaaatcagagacaactaactgataagctctttctttccagatatgtagcggtatattttcatatctggaaagaaagagcttatcagttaatcttttctgtgttattttacatttaatgctgcctttacttttaatgagtaaaagactcttatttatttgaatgagattttaaaattttgagtttcccaggtggtgacagtggtaaagaaccagcctgccaatgaaggagacataagagactcaggttcagattccctggaggagggtatggcaacccactccagtactgttgcctgggaaatcccaaggacagaagagcctggtgggctatagtccatagggtcgcgaagagtcgaacatgactgaaatgaatgagcgtgcagcaataaattttaatgtctttggggaaaacaataattcatttacaaatccaaaaaatacaacagaaaaggtcatcagtaatgacattaataaatttcctttgctttctttcaacaatgtttggttagtaaaacacaatcattatctttgcattaaatatgagcatttctatataattatctgtctcactaaaaagattatatgatgttgctatgtgggaaatagatggggaaacagtggaaacaatgtcagactttattttttggggctccaaaatcactgcagatggtgattgcagccatgaaattaaaaggcacttactccttggaaggaaagttatgactaacctagatagcatattgaaaagcagagacattactttgctaacaaaggtccgtctagtcaaggctatggtttttcctgtggtcatgtatggatgtgagagttggactgtgaagaaggctgaacgccaaagaattgatgcttttgaactgtggtgttggagaagactcttgagagtcccttggactgcaaggagatccaaccagtccagatcagccctgggatttttttggaaggaatgatgctaaagctgaaactccagtactttggccacctcatgcgaagagttgactcattggaaaagactctgatgctgggagggattgggggcaggaggagaaggggacgacagaagat

SEQ ID NO: 59603 - DNA, 2698 bp, Bovine  19866880774522
  misc_feature (1)..(1): n is a, c, g, or t
ntagacagtaagtacaaatagctgtaggttggcgagaatagagaaggggaaaaatggagtgggtgctcactcgaatctctgagtgctcctggaacagcgtttgcagccgccttgtcctttgtggtgggtgtcctgagcattctcagcagcgctcgctcaccactgaatgacaggaccaggaatttccttaaatttgtaccttaaaacagccatccacaacaactttttgtacaagggactggtttcatggaagacagttctgtggatgggggaggggcaagggggatagtttggggatgattcaagagcattacatttattgtgcactttatttctattattgttacattgtgatatataatgaaataattatacagctcaccataatacagaatcagtgggagcccggaacttgttttcctgagctcaggtggtaatgtgagggatggggagcgactgtaaatacaaatgaagctttgcttgcttaccactcaccttctgctgtgcggcccagttcctaacaggccacagacggggagaggtctgtggcccgggggctggggacccctgccttaagggagacaatgtggtgtggcctgaagggcaagaaacacagaagatgtgagtagatggtgatcttggacacttccggtgatccatggctactactttcttctaccctgagtgatgaggagttaatgcagaactttaaaagaaaagctcttcccagcgattatttgttctttgactctatagcacacactcagtctctctgaatcttctcatgttattcaaggtgtatctacatcagaaataaaattatttgaatttttaaatactctatttatacatttggcttccttggtagcttagctggtaaagaatatgcctgccatgcaggagaccctgattcgattcctaggtcgggaagatcccctggagaagggataggctccccactctggtattcttgggcttccctggtggctcagctggtaaagaatccacctgcaatgcgggagacctgggtttgggaagatccctggagaagggaacagctacccactccagtattctggcctggagaattccatggtctgtgtagtccatggggttgcaaagagttggatgtgactgagtgactttcactttcacatgcatatattttaatgtttctataatgtatgcatatgtatatattttgtgtttcagagtctgcacagaaataaatataaactaaacacaatattttatttctatgtccaaggaaaaaagtaggcatttttttaacctaaacggtaaaattttcaaaaacgtttcctaccaaatgctctaaacaattagctgtattttcacacaagatatagatttcatgtaacttggacatgtacataaataggtttataaagtatgttgaacatttatgctgatactttttagatttgtattttaaaaacaaaaggatgggaagagttgatcacatggaattcaaagttaaaggaatttaaagaaaaaatgttgttatacatcgatccctttctctactcaaaggtacgctgtgtacccatgagacacagacaatgagagaaagaacaaagagtttggatttattttaaagtatgtctttgttttgagaagtcattagtagtcatactggtgacctggttttgggtaaagcccatccgtttctgatacttgttactgtgactttagagatgtcagcattattctctgtataggggatggtattgctctctgttcattttaggtgaagttgcatgatgaaaggggagggataactgactttaatctcctctgttttcctctccccaccccagacatttccatgtttctcttgtcaacagtaaaaagtgttatcttgctatatgacaattcgttagttttcttctcgtgatggaaataggtgaaaaattttatattagctcaaggggaactgtaatacatattacccacttctgaactgttatgttgaggtctaaacattaaaatgtctggtcatctttgaggatgaaaggtgggtgaaatctgtaaataacagactttgtggaaaatacctcttggagatctcatgaaggtaagaaacccagaaaaaaatgtttccttgggaatttcatggaggtgggggcaagtgtttttagtaacagcctcattttctttaatatcactttttgtctaaattgtttcattgggacttatggtaagtactgtatctatcattaggttttacattaagttaagaaaccttttactggagcacttattacattctgaaagaatattgagaattatacatgcatggaattatacatgcaacatgaaatattgctccatttggatgagacctttaatttctattctttaatatattttgtccattgttgataagacatagagacaaatgcttttatttgtattcttcctatgtagcaattttatttatttattttctatggcttctgaaatagctgaatgcttcttcaaggtattcatgtgttatgaataatactataaagtagctgtgatgaaaaagcatgtcagtctttatggccagcctctcataaaatatatagtttcagaatttcgtagatctcccttttggggagggcaaattttaaggtaaagaaaacacccttgcactcacaaaataaatataaatgtcaatgtttgttttaagtag

SEQ ID NO: 59604 - DNA, 3577 bp, Bovine  19866881089253
  misc_feature (1)..(1): n is a, c, g, or t
ntgtattgcctttgttcctctttcaggatcagttgcctctatttgtgtgaatctagttctaggatgtctcttctgtttcatttgtctatttgtatgtatatattgccaataccacactgtcttgattactgaagctttgtaataagtcttgaagttggtagtgtcagtcctccaactttgttcttcttcaacattgtgttggctattctgagtctattgcctttccatttaaattttaaaaccagtctgtcagtatccacaaaagaacttgctgcaatcttgattggtattgcattgagtctatggatcaagttaggaagaactgacattctaacaatattgagtcttcttatccatgattgtggtatatctcttcattaattttgtcctttgatttctttcatttgagttttatagtttttctcacatgaatctttacatattttattagatttatacctattttattttttattttggtaaattaaatggtatttgtttcaaattccaatttttattgttggtacacgggaaagcaattgtatctgtttattaactttgtatcctgcagtcttgctataattgcttattagttctaggaggtttctttttctttttccagttctttgggattttctacattaagaacttgctgtctatggaaaaaatagttttatttatttcttctcaatctgtatacttttaatatccttttcttgtcttgttgcattagctggaactttcagtatgatgtttaatgggagtagtaagagtgggcatccttgtgttgacctcgtattagagacaaagcttctagtttctcagcattaggtctgatgtaagtttggttttagtagatgttctttgtcaagttgaggaagtcctcttctgttagttttctgggaaattttataatgaatgggcattggattttgccaggtatttttttctgcatctgttgatatgatcatagggattttcttcctttagcctgttgatatggtggattacattaattgatttttgaatattgaaccagtcttgcacagctggaataaatcttacttgcttgtggcatatagttatttttaaacataataggattcaatttctctataaggtttatttactgtgttctttatgataaattactgaaccaagtaatcaccaacagaaaatgtagcctttttttcatagtagtcttgtgataaatgtttcttaataaaataggatttagaaactgattgtgtttggtgagtaagaggacatgactgaagatcattctaaacagttgagatttgttgagaaggaaaagacaagagatggaaaagaaaagaggagaaatagatattcaaaaataaagtatttcaaaagatattaaagaatacttatttttcgtggttctagtattatggctggagaaagcaatggcaccccactccagtactcttgtctggaaaatcccatggacggaggatcctggaaggttgcagtccatggggtccctaagagtcggactggactgggcgacttcactttgacttttcactttcatgcatcggggaaggaaatggcaacccactccagtgttcttgcctggagaatcccagggacgggggagcctggtgggctgcagtctatggggttgcacagagttggacacgactgaagcgacttagcagcatcagtattatggccagaaagaggtatatatctaagtaaccgaataagcaggaaataagttgaagacagagaattttggaaattgtctatgtattagtgacagttgaagctgtataagtgtaagtgtatgatattgttaagtgggggaatggaaaaaagatgaaaggtttgaaatggacactcaggaatacttatacatagatagataaaagagaatcaacaagagatagagaagatgcatatcaatggagaaccaaaatgttataatatcacagaagtaaaaggaggaattgcaaggaccaaggattgtaatcaacaatgaatgtgaaagaaaaattggaaaaacgggagccaaacaaagagccatgtatttgataaatataagttcattgataaaacttttccccttaaagtataaggagtggacgttagaatgcataaggtaaaacaggaagtggaggcagtgattgtagactatgctttcagaaatgttgacagtgaaaagaagagagaagttaattcaaaggcatagcaagattgaaggaggtatctcatcagcagtaaggttttagcatgtctgattgctgcgtcaaaggagaccactggagagatagtgtgaagattcaagatggaaaggaaatattagacagaatgaggttgccatttaatatattgctgcctcaaaataagccaacatgtaagtgatcggttactgaatgatttagatgtcttttagaaagctttaatatataaaggtgtatatcagttagtttagctgaggctgttcttcagtaatccacaatccccaagtctcagcggcttaaaagaactaagttgtatttcttgcggacactctgtgtatatcatgtaacaggtcagctggggattttgctgcagttcattcttactctaggatccagggtaatagaacagctctttttctgaagattgctagtcactctgatacaggaaaaaagagacatgataaattaaacactgacttcttaagctttcagttgtaagtgacttttggtcacttgcactcacagttcattcaccaaatcaagtcacatggctgtgctgtctccccagggatgggaagtacaatcttaatttaatacttgtcaggaaggagagcagaatatttgcaaaccagagtatttgcaaacagtcctaatgagcaccataaggaatatatttacctggagtaatatattgagttacagttatcaaaaatctaacatttatgatcatttctgtaaatagttgagcagtacatttttcttcaggaaaataatcctatactacaactttgctcctaaggggaaaatatgattggaattagagctcatttacagttacaatgtcattttcagtactctgtctcagaagtatacaatatgatgatagaaacataaaaggaatacattgggttttaccaattatcacttttaaatgtgaaataatgaactttggtaaaaaaagtaacattttttcttagaacttgttgacttaaagacccttttcattctttaaaattctagataattcctttaaatagtgtcaagttctataaaggaggaaaatagaagatgaaacaaagatctgacccagttctcaggctaatagtttagtcccctctaactgtacagttgcagtttaaaacattccgtattatcccaacaggaaacatttcctttgtacaagtgatggtgcacgtttggttcagtgtagattcagttcccagttgcaacttatacatgctgcacagggaagtgtttagtgttcaaacaagaattatacttcattatcctagtttcaagtttctgcatcatctcatgaatctgacagcttcttcacaaatgtacttatttagaagtcttcagagaagcgt

SEQ ID NO: 59605 - DNA, 846 bp, Bovine  19866881267349
  misc_feature (1)..(1): n is a, c, g, or t
ngaaaaaaactttggcctgcagggatctgcaaggtctgctgggccaagtgaggtagaggctgcagctatgtttagggtgtggagcagtgtctgcgacaaagagagaggccttggtagatgtttgctgaatgaatgcaggtagtccacaagaacatgccgtgctaagtgattattatttttggtttactgggttgcctgtgttcagaagcataaacatcagcctaaaagctccagtcaaagcagtttttcctagactgactgcatggtacatggaagggttcgcttcagagttgttattcaatgcttatattttagctcttctagtcatatgattttccattattgcatgttaaactctaattggctgaggacatatggcaagagtacacatgtgtgtctctataattcttttttaagccacaaggcacctagtttatgatccctgggaaaagaggtgattacaatgtgtctgctttagaaagactaggaaaggccttccagtgattgtggaagaagctttagaatgtcttagcaacaggtgttgtgatgtcttgttggaaaacttaaaaaaaattatttatgtatttttggcttcgtcagatcttagttgcggcccattgcatcatgcaggatcttttttgtagcatgtggactctctagttgtagtgttcagggttagttgccccacagcatgtgggatcttagttccctgacgagggattgaacccacatctctcgctttgcaaggtggattcttaactgctggaccatcagggaagtcccaggaaagctattctttaatggcgtgtgcctactactgttcttggaagctctgtgtagattaga

SEQ ID NO: 59606 - DNA, 852 bp, Bovine  19866881640449
  misc_feature (1)..(1): n is a, c, g, or t
ntataataagatctcaattctcattgtgaactgattattctcttctatctgccgggatcataattcagtgagagctgttcctaaccaaggaaatgagggcagaaattatataattgagagtaatggcttgaaatccatgaatatctagaaacatgtacaagtctgacacatactagcttggtggtcttcataggcaactcactgaagaaaaagagtttttttctccactttaaaaatgagatcgtcataaagactaaacacttattgaatgacaataatgagctagccctttagaaaaatgagaccaatagttactccctaaatgctttccaattaaaagcattctgattttaagtcagtgtgttattagagaaattccaatataaaaaaattcacatttaataataaataaaataataataatgtttaataaaatagaaatatttgtaaaattatttacattactagtatatacatttaactaactgccaactaaatattttcaaaagaagtttgatgaatgtgactgaagagaagctgtaatcatttttacttagtgctttcaattattaatatactgaaatcttcagaaaagaaattttcctaagagacatgaaatctcaacaccaattttcttataaaccctttcttactgatgatatctaggcaagatgaacaaaaattctgaatctttagtgtttctagtaacacatcattggttagagatctaggacagcttttataattaaatgcagctaaatagttacgctgggataccagagacaaagttagcctttacaaatcactggtccttttcatgttagtcaaaacagtgctaaaatatatagaaat

SEQ ID NO: 59607 - DNA, 754 bp, Bovine  19866882216163
  misc_feature (1)..(1): n is a, c, g, or t
natcaaatataaaattatttatatttctccaatttctttgtcatttagtttgaataaaatgaccagagttttttaatataattttttgtcatagataattacaaacaaatgcaaaagcatagagactagcttaatgaaattagtttttcctcaaccagcctgaacaatgatccatatacggcctgtattcctaccttctttctcccaatgctaagattattttgaaaagtttcaaaataaaatattcttttatatgcagatatttcattatttatctctaagagtttaggactctgttgtaatcacaaccctgttatcatatataatacttagcaataattgctgaatatcaccaaagattcacaagtattttcatttccttgattttatatagacttagtgtttctcttgtttgaatcagaatccaagcttttcaaaattggttgatatgtctcatacatatttttcatttgtaggttgcctctctcattcattactgttggtgaagaagttaggtaattgtcctatagtttcctacagtctggactttattattgcattcccaaaggtgtcttttaatgtgtccctctgttcccagtatttccttcaaattggtagttagagtagtgatttttctaatttagtattcctttttcacttattagttgaaatatttttgaaagaggaacttcttatcatcatctattcgagttactctgagctacaatttctatagaaaaggaaggagccatac

SEQ ID NO: 59608 - DNA, 2634 bp, Bovine  19866880344560
  misc_feature (1)..(1): n is a, c, g, or t
nggggcaggaccactaccatcatgctgagctctgtgggccgggcagggacagaaaatccaaacaattctagatccaatgggggcgcatccctgccaggttttaagcacagaaggtgaatttaagttttgagaaaacaacgccgtatgagaaggagttaggagagaaggggctggtccagctcagccggagactgcttcttcggccccagagttccagtctgaaagacaggcagggccctctcggccctgccgagcccacaccccaggttcggaggaacccttctggggtctgccaaagcccctttaaaagcactggtgcaagggactccccaccgctgagcgtgtgagtagcttaccagagctcttcaagttcactgctgcctcctagtccagcacagcccagccccacagccaggaggggaccaagcacctctttcctaacccatccttgctggactgcctgtgttcccaggactgagtaggtggtgatttcccccacgacagagttcaaagagcaaggtgtacatataaccccgtgtgtggcagggaccctttatggcctgtggcgaggagagtgggcaggtcggggctggctcctcccagggtggctgaggccacacggggtggtgccgctccttctggcccagcatctctggcctcagcctggctggcggacgcactttaacttgggttcagaactcttcccaagagagtcagcaatcacaaggcagaagccaaaggtgggagctcggaaataaaaaggaagtcggacaacccagggagcagagcagggttcctctctctttcccactttagagcagcggtccctaacatttttagccctggggaccagtttcatggaagccaatttcttggcggttgggaggggtgggaggatgttaacgccgagtgacggggggcaggcgtgcgcttgtaaaatacagatgaagctttgcacgcccactgctcgcctctggctgtgtggcctgaggaacctcagctttggaagtcactgtcctgtgcgggaggggccggcccacctgaatccctgtgtaatacacgggccctggcaccagaccagccaccaacagggtgttctttgttactttttttttctgacgaggataaataagaactactttttgttcaccctaatatgccctcttgggtttgaggacataaaaacaacagtgaaaaagttgaaaaccatttgttgttgctcaggatctctaatcagtgtattcatatcctcgtaaaacatatgcaaatctcaggtcacctagatttttaacattttcaaatcctttccttacctaagatttccctatttaaaaagttcagacctatttgcatttttgtcgagttgcgtgtaatttggtttttttttttttttttacttaaaatctacttatttatttggctgcattgggtcttagctgtgatatgcaagatctttagttgtagcatgtgggatctagctccctcaccagggattgaaccagactccctgcatctacagcatggagtctcggccactggaccaccagggaagtcccctaacttggttcttcttatttctgtcgagttactcaaaggactctcaatacaatgcactgacattacaacacagggttttgacaattaaggaaataaaaggcaggatctctgttaaccttactaagtgttagttactcagttgtgtctgacttttgggatgggctgtagcctgccaagctcctctgtccatggaattctccaggtaagaatactggagtgggttgctttttctttctccaggggatcttcctgacctaggaattatcccaggtctcctgcactgcaggcagattctttaccttctgagccaccagggaagcccaactatacagtccatggaattttccaggccagaatactggagtgggtagcctgtcccttctccaggggatcttcccagggatggaacccaggtctcccgcattgcaggcagattctttactgagctgagccaccagggaagcccaacaatactggaatgggtggccctatcccttctccaggggatcttcctgacccaggaatcaaaatggggtctcctgcattgcaggcagattctttgccagctgagtgaccagggaagccccgtttcagttttctaactgaaactcattctttaaattcaatgaagcatttttgtacaagagcatgtatacaatccataccatctgattttcttcattgagtaagacgaaacatatttcatgacttgttttgcaacgatgtcggaattaaaataattatgagagaccacgtccttcgggggagccacccacaactacctgctcgtgtaatccttccacttgtctgggtctcccaccagcttcacgtaggtgcggtcaatagcagctctgagctccttgagggtcacgtgacaggtctcaggtgtgttccggactgcatcccggactggaagtttcagacacagttcttcaatgagctgtaaccttttctcacagagatggtgagggcccttgtcactgaagaagatctagtgagcaataaacatttatatgatctctgtgagaatccacacaatactgccatattttcatggctgattcccatctagtctag

SEQ ID NO: 59609 - DNA, 1301 bp, Bovine  19866880414725
  misc_feature (1)..(1): n is a, c, g, or t
nacagaggagcctggaaggaagcagtccgtagggttgcacagtagtcagacatgactgaagcaacttatcatgcacgcacaaaaaagattgaggagaagttgtccaaaggcttgattagagtgaatctaagtgtcacaggcttagtcagcatcccagtttacaaaatttgactctctctactttcaggtactttctgatcactgtgtttgttcagggctcatcattcttgtgttccaggtgacagaccacagctcccaaagacccttcactgggtcccacagcacttactaacagaaagtaggatcctggtggtctgccttgaccttccagagttcagaattaagatgcaaattaactctcaatcaccagcatcaccctgcctctcaggcattagtatgaaaacacacacaaactgaatgtacagaattattattttgtttaagggatctaatggcgaaaactcaaaattgcacattaatgctaagcattataaattagaaactatcctgtgacttttcttgtcattaaggccaaccacatgattttcatccctttctaaattgagagtggtgatgctaacaattatagcactgaggagatgtaattctaattcagtgcttacccatcatttgaacttaacaagtatattaatgctctaaggagagggaaggaaatataaataatgtataatttcttgtatcaccacaaatctaacattttccatctgacctacttttgctaacttttgctgtctgtacctaaattctgcaaattctgggacagtgctgcctacatggaaagctaatggtatcctaatacctaaattggtttttggcttctggaatgatactttaaaaatcctaagatatgatagaattactctaggttttttttttttttttttttttttgatgctgcaaaaacactttatcgtttccatttggtccaaggcttgagagagggctcctgagtgttaaaaagctgcctagtggctgcagagaggggtttcaggcagccctgacgttacggggacttctcaatggccactggtctccagaagttcctagtcgtgcttgagagtgagcctttcgaagacgtatttgcccaacccagcctggggaccagccagcctgcagaagtggtcaggtggtcacccgtgttcttgatgagtttcacctcctcatctagaaagtggttctccagcaagtcacagatgtgggggtctgcacgggcagaacccaggccatgcagatcccaaagggcctggctcaggttcttctctgtgagaagggcagcttcc

SEQ ID NO: 59610 - DNA, 991 bp, Bovine  19866880452364
  misc_feature (1)..(1): n is a, c, g, or t
natataaatagaaaaaggcacatcataatgtgaaattacaggtatatgctttacttatccatgaaacttaaataaaattaaaagaacttaaaaacaacactcaatgttattgtcatattatatcaaagtgtgatttaaatttttaaatatatcaaaattcagtttgaagacacagtgcacattgccacttctaagagaagtggctacagggaaaaaaattgccttctttatcaatattaaaagcgtgtagagaataactcactgtcttatatatttacattagaagatagatatttggtgagtctataccatatatctatgaaggatatttttgtaggagggtaaatagatctcttaaatctggaagggcttctaactcaatatacactctgtgcggtttgtagaagtaaaaacaaaaggtctgtatgtgacatttgcagatactaaaaatgatacttaaatacaaacatgattttcccactggagaaggagggcttgctggtaaaataagagcattgctttcagaatcctcttctgattctgatcctctaggccagcctccatgattagtctgcttttgccaaagtcagatatattactggaacttaaggtaatccaagattgaaaatcactgggccccaagatattagagatgatgggaaaacttagcatttaggaaaaatgagaacatctacagatattgaagaagactttaaattatggtatttactcattttgttcatgatctttattttttttaaatcaatctttctttccctccacctttctcaagcatcttccattcccaaaaggttgtcctactctctgtagtccaaacaaaccaccacatccagcatccacatctttgttcacagtgtcttttccattttccatctcccatgtctccaaccatcaaaatgtcagtaactctacgaagcccacgttaagccacagtcatcagggtgggatgccagtcacccttctgctctca

SEQ ID NO: 59611 - DNA, 2373 bp, Bovine  19866880480844
  misc_feature (1)..(1): n is a, c, g, or t
natgaattaaggatttaattgagagataacatttaaagttttctaggaaaatgtaggaaaatatctatttcagatttgagagtgaacttgagaactcaagaaggacagtcctaagtgttctgtctaagcagggcacaaaaactactattgctggaagaaatattgcaatgttgatctctctaaaatgagcaactttaaaaagaaaataaaaataaggtgggttgctggagaaatgggtatttattttttcaatatgttttaccaaacatatatgatcaaaattctgttgtctgaatcaaatattaggctgaaaatgaagtcaggaaacagagaataacctaacagcccagaatgagcacccctttacatccatcaccagctcagtcaggaacctgcgccactcttcagttttctgaaatgtgaaatggaaatccttgtgaaggaccctcacagatgcatttagaaatgtatgttcagaaaatggaattgaaatgttttagtaagagtcatgggctcaatccttgaaatagatgatggttgaatttcctatagtatgtaattacaacacaataagactcaaaagcagcttctataaagggtgggtggaagagaagcagcctgcttctagggcttcattagcttctgcccactggagctctccaggctatggggaggaaccctgtttaccttggttcagaatcaattttaaccatcactgaggccctgggggtcagagtgcagcacggagtccttgggaatacaccaggccaggaaagaaaagatgaaaatggtttttgaaaagccccgagacgggctgcagttttgtggaccagttattcccagaacaatgtgttgtagtgccagtcactgatgaaatgatacttagacccctactttagtttcttcaagaagtttctggtaaattagagcaatgccattggcctgatttaggctattctgtctaaatataatttctacatattctgcagccctgggaatatttaataaggggagagaggcagcaaaaaagaaaggatcataaaaacaaatgaacaacagaataagaaacaaaaccttgccctttatggtaaggatgctgagaaagacgcacttatccgtaaaggacatgtagataatttctcatttctctcctgagaatgctagcacacattgctctggttggagtagaataggttcatctggcctttgaggtcacactgatgatgttgtgccttgctgttaatgaaactttgtgaattattcttaatttttatttcagtttctaataagcattcatgagctataacctttccatctcctagattgcatgcttcaaaaaaaatccttagaaccatgcttctagaaaataaggttatgttttaagtaataattataattctacagtgtgtcatacttgtggtttctaatgtgctaacctccacattctctcattatccctgaaatagctctttgaggatattaagataggcattataatgttcacctttcctctgggaaaatgaggtttatagctgttagtgtatctacttaccgttgtaaggctctctagtggcaggaatcaaaactccttactccagcgtcagtgttttttggttgttgttcagtcgctcagtcgtgtctgattctttgtgaccccacgaactgcagcatgccaggcttccctgtccttcgccatttcccggagtttgctcaaacttatgtccattgagttgatgatgccatccaaccatctcatcttctgtcacccccttctcctcttgccctcaatctttcttagcatcagggtcttttccagtgagtcaactcttcatatcaggtggccaaagtattggagcttcagcttcagcattaggctttccgatgtattttcagggttgatttcctttaggattgactggtttgatctccttgctgtccaagggattctcaagagtcttctgtagcatcatatggtgccagaatgttttttcactctaccattaatgatctagattaataagatcaacatttacctgggaattagaaatataagatacaaccctgtcctctgatagcatataatctattagaggtgtggggtgtagtaggacagttacatgaatatatatggcttaacatgagtcagtaacaagtagctaagtgccaaatgaggcttccctggtggctcagccggtaaagaatctgcctgcaatgcaggcaacccagggagtcccttctggtatgtaaactggcctataggtgggaaagtgtgagaaacctccccgaagcctgagttaggagaatcccctggatcccctggagaagggaacagctacccactcatagaggaggtaagtgctgcctatgggtata

SEQ ID NO: 59612 - DNA, 2931 bp, Bovine  19866880488440
  misc_feature (1)..(1): n is a, c, g, or t
nacagagtgatggaggtggccacttttttcttctgagagtactgcattgtcatttgatctgcccaaggtttgagatgtggtgtttgtaatctgaacttccaggagccagcaaatacaattaagtaattctggtgaaaccaatcacagagatctgggctatgacatttacttcatcatttaattacatacagaaagaaacattaatagaagaagttaagattttaatcaaacaaatatgcaaatatggaaaacattcctcacattccccagcatgctccatctttatttttgcctctgtctttgcttttgtcatttctctactgatagcctggaaatattttcccatatctgttccattatacaaattacaaaatcttattttctaacataatttaaaaaaattttctgaagtcagtaacctgagacacttgacttttaaaaaaatttttaatttatcttaattggaagataattagtttacaatattgttatgttttttgccatacatcaacatgaatccgcataggtagacatgtgtcttcccaatcctgaattgcccctcccacttctgtctccaccctatccctctgggttgttccagagcattggctttgggtgccccacttcatacaacttgcattggtcatctgttttacatatggtaatgtacatgtttcagtgctattctcccaaatcacttgacttttgactgtatcttttttttctctagtagtttcattcacatgtcttctatctctaaatagttgctaagcatctgaagggtaagaatcatgaaggaataatccacaatcctttctctttattatacatacaaagaaactggagcccagaaaacttaaattcattcagtttacttattcagtaaatgtttgagcattcgtgctgtgcctgacactttgctaagtgctagatatacaatgcagagtgataactaacaacagtcctgttgccatggcttcagtcaagtggagggattcagccactcatcaaatgatgacttaaaaggtgaaatctatgggggagaatggatacatgtatatgaatggctgggttgctttgctatatacctgaaactatcataacattgttaattggctatatttcaatataaaataaaaagtttacataaaaaactgaaatgtatagatacaataagcctcctgaggagaggtgtgtgaaagtgtgactgttgctcagtcatgtccaactctttgtaacccccatggactatatactctgtggaattctccagcccagaatactggagtgggtagcctttcccttctccaaaggatcttccccaacccaaggatcaaacccaggtctcccacattgcaggtggattctttaccagctgagccacaagggaagcccaagaatactagagtgggtagcctatctcttctcctgtggatcttcccaatctgaatcaaactggggtctcctgcactgcaggcagagtctttaccaactgagctatcagggaagcctgaggagaggtgtaagtttatataaaaagatataaccagggcaatgatcatttcataggctctatcatcagttagagcatcaatcatagcacaaatctacttcatagaaccattccctagattgtccactatattgtatgtgctagagaaatttctcctaaccagttgattgatctgctgtccaggtgatctagtgttgaaaatatcagctgtatataaatctgaagactgaggccagttgtcactctagccatggtttcatatgactgcttttctgcactcttgaaaccagttccaagcaaacctgtagaagctgtcatttacactgaattttgccagcatggcacaggttagttaatcagacccctagctgctgtgttctgtgactaagcttttaacactgggacttcagagtcagccaaaacatgcttaaccgtcacctggtgcttgaaattgcaattgaacatcatagctacgtggaatttttagggtatacaggaatatttcaagtgctgagaagatccctcttaaggcagcatgtccccatgtttagtgagttctttagaatggtaaagattttttactagggtggggagaatactggtttaaggtatacctacatcctgagaattaaaactcggtaccatttgctaattggtattgaatacccactccagtattcttgcctggagaatcccatggtcagagaagcctggggggctgtagtgcatgggttcgcagagagtcgaacatgactgagtgactaacacctattctactacactgagatacatgaccacaatggaaatgtgatgcaaaatacatgcatacacatgtatatgatagtccaggtttccatcttgtcagtgatggtgtacttgacaatgtcaattcgcaggaaaaaaatatccaaagtttgctctgtgtattaaaatatccatttaaaaatagttagaaacagccaccaaacacctgtaagcatatgtgcttatgcaagcagttctctttggtctggaaaatattcaagctactgctctgtttcataagtaacagcaatttgggacaatcatggatcgctgggcatcatcaacttgcattgttatctgtagcacaatttaatgagcaagccttagtttgattatgggccagtgcctgctaccttaactgctctcttccagtttgaggactaaattttatctcatcatgttaatatatttgagaaaatacctaaacattctcaagtgttttgcttgccatattataccttcccatcaagaaaatcatattacagtgcttgacgtcagcttaaaaatgttctcaaatgagttaaataacaatttctggacataataataccttcattttggatagattttctaatctacagtgttgtttatatcaagtgaatatgagactgtat

SEQ ID NO: 59613 - DNA, 1068 bp, Bovine  19866880522126
  misc_feature (1)..(1): n is a, c, g, or t
ngtaggagtctagtggatcttcccaactctaggattgaacctgtgtctcctgtgtttcctgcattgcaggcagattctttcctgctgagccactgggaagatttaatttagttccagaccaaataaaaaacaaatgacatcagtgtatcagctcagtgctgggcctgaagacttccattaaatttccgcagattttatgtaagcattcattatcactcatgaagacatagctctaactcctagggatgaattaagagattatatttaaaaatatgatagtgtttcagatcatgggattttaagtagagttcaaaattatccctattacattctgccctttgacccagaagagaaagattgcccctactagggcaactctacgaagaacctaacattcaattgcttcacaatttaaattgtggtttcagcttggcttgtgctacccactgaaaatcaaaaccatcccaagagcattctattttcttatcttcttggactctgtaccatatctcaattgtacatgaattacatgaagccttcctacagtaagtcaactaaaatcacataagttcctaacattaaatttttatgttggaaacattataattgtttgctggcatggagggtgtattggaaattttagtgagtgcattgctaggcatgaatgtgataaaccaattccatgagcatttgagagtataattacttatgatctgcaatatttattctcctcgtagggatcattatgttttcctttgtgagcaactttataaattgtgtatctgtaaaggaccaaagatattcaagtaagtttatacttaattccattcaaaatatctatattatattcattctcaactttacaaagatacagatgagggattatgtgaaactaatcaccagcacaaaaaaaacattaagtataaacatttaaaaataagtttgacttcaaatgatacatgatagttttccaagcataaactataaaatatatatgttacataaaatgtgaaaatactaacttttctataggtaattattactgctattcactcactaatttgctat

SEQ ID NO: 59614 - DNA, 1143 bp, Bovine  19866880553334
  misc_feature (1)..(1): n is a, c, g, or t
naggttattttgtgagtgcatgctaagtcgcttcagttgagtcttactctttgtgaccttatggactgtccttgggattctccaggcaagaatactggagtgggttgccatgccctcctccagggatcttcctgaccagggtttgaacccacatcatctatgtctcctgcattgcaggcggattcttaaccactagtgctacctgggaagcccagaggtagtaccctattataattcccttaaagtgtttgtggtccattgttcattatcatgtcataaagacactattcccttatatgttgggttacatttctctagtgcactctgcttttatattaacataaaaaaccacattattcaaaagtcttattttattttttttcccccagaactgctagtagcttatattgatcagttggtgttctatttaatgtttctgtatctgatggcatatcttacatggcttttaagaactgggcttgagtttattcagagagaagtcaactagtttctataagaattattcccactgtaccctattatgactaatctggtttggggaaatataattagaaatgaaatctcctgacattccaatgaatcttctctatgtagaaaagaaggaaaaagttttattattgaataaacattaaatcaggctgagatgcacatcacaggcaatctgctaaggagactgcaaatggagaaacaaacctcaccctgttatacagctaggcagatacagtctactgcatacatgttaattgtctttgtcaaaaataaaacccaaaacttcttgtatctttatgacaagcaggaagtagtgttgcagggaaaagttaattgtgactccctgttggaattatttctttgacaagctttccgtggcttttgttattataatcatacataatggcctgcctcagagaatcttgtccctctgtgtgactgttaaacttaagtgcctttcttcagaatcctgcccaccttctgaaggcaggaaggacgaaattaacatatcccctaccagagttttggcattctaggagatatttgcaagattactgtcctttttgctttgtttcctcacctcccccctctccccgcaatctctgttctataaaagaacccggtgtgcagact

SEQ ID NO: 59615 - DNA, 1318 bp, Bovine  19866880566671
  misc_feature (1)..(1): n is a, c, g, or t
nataaaaaagttaagaaatcctacttaggattcagggaaaacctttaatgattgatttaggctggtgagggtggtgttgaaaggccaatccgaagactattattgtaccgttggaaatcaggatggcccagactgtggaaagtgttgatggtgaaggagatattggaagaagggagagtcaccagatgactcagtttccatgggaagtggtggactttgcaggaaaggatggaaagttgagttcctgaaggttgattttcttggaaaggtattggcttgttccaaggaagcttgttgctgaaaagggaggctcgccaggctgaggttgctttgatgttcacaggcactgtgatggtaaaatccagttctcttgaggccatgggtataagaagccctagatctctggcctgaactctactgtgagatgagggtgctggctctttgtgacaaagctcaaataaatcctccagttacaagtacagttgccacggataccatgaaggatattatagcatcctctgctagtgttggagggtctcctgtggaggcatgggtcaacagtggctcacagaccggatagggtcgctggcaacagcactcctctttgctctgatatttgtcgtctccttccttctgccagctttggactttgtttttcttttctaattcttcagtgtgtaaatttaggtggtttcttttttttcttttcctaacgtaggcatggattgctgtgaacttcctgcttagaattacttttgctgcatcccatatgttttatttctattttcacttgattcaagatatttttgatttttttttttctttgatgatccgattgtccaggagtgtgttatttaacttccacatgttggtcaaattttcagttttcttccttttgatttctattttcatagcattgtggtcagaaaagatacttggtatgatttattctttaaagtttgctagtatgtgttctgtgatctaatatgatttatcttggagagtgttctatgtgcacttaagaagaatgttctgctgctgttggatcaactattctctctatatgtattagattcatttgatctaaatatttcaagtctaatgtttccttgttgactttctgtcagtatgatttatccattgtttatgtggtatgttgaagtttgctactattatactgttgtagctttcttccttcaaacctgatatactcattgttttaaaaattttagacattctggtagatactagaggcagacatcctggagtgtgaagtcaagtgcatcttaggaagcattactacgaacaaagctagagg

SEQ ID NO: 59616 - DNA, 1719 bp, Bovine  19866880574311
  misc_feature (1)..(1): n is a, c, g, or t
ntggatgtgagagttggactgtgaagaaagctgagtgccaaagaattgatgcttttgaactgtggtgttggagaagactcttgagagtcccttggactgcaaggagatccaaccagtccatactaaaggagattggtcctgggtgttcattggaaggactgatgctgaagctgaaactccaatacttttagccacctcatgagaagaattgactcattggaaaagaccctgatgctgggagggattgggggcaggcaaagaaggggatgacagaggatgagatggctggatggcatcactgactcgatggaagtgagtctgagtgaactccgggagttggtgatggacagggaggcctggcgcgctccgattcatggggtcgcaaagagttggacacaactgagcgactgaactgaactgaagctttatcatttctatgtgacgggaatggactgacatgaagtgggtgatggaatctgccttagagctgcaggatattcaggctggagagacagcacattggtcatccaacagccaccctttttagcatcagagaaactgtactgtttctggcacctgctgttactgggagtagatatttctttcgcctacagtgtgtttgtgtgttcatgacaggatttcacaagtgaatgtctgaagtcttacctgcaaaagcatttcttaaaaccaacaatattactacgatgcagtagatttaccaataaataaagagataaacaaacaagtaaatagataaataaaagctagtagagaacacttcttatgacttaactgtcatctatgtcgggagaattcacgccttctaaggtctgaatacgaaactcatgtgtgccagtggcttgtgacctcctgtagctgtgttactgaaagcacatgcattcttaaataaactgggtaaaataaaatgccacaattgtggtgctaacagggtcagcagtaatggttacaagaggattttcggatgtaacagaatcaaaagtagtgtcctgttaacgaaagttttcgagtcgcttttttattttgagccagatttgtaagagcagtgattgaaagaaaagacactctattctgacaagtactccattcagagtctttctgaaatggataaagatggtgcttgtttggtctcctgcaggaaattcgacacaatgatgtctgttgagagcttacctgctgactgcttgacatgtctaataacttctccagctccttgatatgacgactgacctccttcaagagaagtttgagtcgatttccaatcacgtggactttttctttggcttctaaacagtctgtgccttcagcattcaccaacagttggcaagacatgtcttgcagtgaggccactttgagttgagattccaacagctcatgtcttatttgctaagaatataataaaaaatatttttctgagaatttctgatacttggagaaagtgcctatgtgcaggatgacatcactttaactcagtggacaattatacctaagcatcacacgaggaaggatatagcagcaatgacctttgggaatcagggacatatgttctaatcctacctctcccaaaaagcatcctataaaatccttgaacctttctgatctgttttctcatttggtgggggggtttttttttcagtcactaagttcaactctttgtgaccctcacggactgcaacatgccccccctgtccttcactatct

SEQ ID NO: 59617 - DNA, 1660 bp, Bovine  19866880601896
  misc_feature (1)..(1): n is a, c, g, or t
nttatgtctaatttttccctagagtaataaattagatgttttttggtaagaacttgaactcagataattacaataacttcagtgccttgcttagaaaggagttgtgtataagatctgaaaaccaatggtaggaattgtaatgcatgggtatttaagctgtgagagaaagaaaaatgtctcattcaagacgattttatgctccatattttattttttccataggattttcatgaaatgagtcacggtttgctgcttatgctggagaacatcgacagaaggaaaaatgaaattgtccccattgattctaaccttgatgcagaaatacttcaggaccatcacaaacagcttaaggtgagatatgtgggcttggacagcctctgcttatgttatagttggttgtgcttgtttaccttttatgttgtagtctcttagtcttttttacccctcatgatttctcatctctgtgaagcaagcatgtgcatagaagatggcatatgctggctttagaatcttgttctaaagccattgctcatctaaaaatctgtcttcatctttgttttttttaagctaattttttaatagacttttgtaaaaagtttttttcctgagacatttttttaaagtcttaattgaatttgttacaatcttgcttttgtttaatgttcttggttttttggccactaggcatgtggaatcttagctccctgaccaggaatcaaacccacatcccctgcattggaaggcaaagtcttaactgttgtaccaccagggaagtcctcagatggtcttcatcttaattagcctcattttatcaaggcagttctattcttatttacaatttatttctaatttaaactttatatattgaatctatgtcacaatactatttcggataactgataataaaaggacattaaatctattaaaatagagaatctattaaaatagagaccattaaggattcttaagaagaattaagtatgtagattcaacttcagtatcaagttttctgaaatctaagacaagggaaacatggtaagttaaacgattttcattacctgacaaaaaggaaatatactagttttcaaggaataggaaactttttctagtactaaattcaaaaggatatttgcaagatttttgtgtagattcttatgcaaagaacttcggacaatataatgtgccatatacttaagtgattttatggaagataaggaagcatatttgagttccattaggagaaaataatttgcactttgtcactttctgtatttttaaaatgctatttcttaacatttaacactcacagtgacctaaccaacagaattggcagcttttagttcagtactataaaggtcttagaaacccagaggaaatagctatgcagctacattttcaccagacttttgacctcagacattaagttgtgagtgatgaatcacccgtataccttttttaaaaatctcaaatagatatcagagtatacctcaaccaagctgagtttttctgcatttatgttagttttacttttctttttaaatgattattttatggatcatttgcataatactttatattttaaataatttgacatgcattcaccaatatgcagtggtgaatattggtgacttgaataatatgcagtattattccaataata

SEQ ID NO: 59618 - DNA, 1080 bp, Bovine  19866880759617
  misc_feature (1)..(1): n is a, c, g, or t
ngaagaggtgcataccaagaaaagcagggatctgagcacaggattttgtgtgcagtatgagtcagacaaggaggcagggtggagacaattaaccaattgaaagatgtcacattaaccgtttgaagaagtggaggctggaccaggttgagatggtgagaatggagagggactgactgagagcagaccttgatgagagcatccttctttccagctcgatgttgcttgcagttggtcctcagcggttccagtgactggctggcaccatcctccattctcagtcttgactgtatccaattatatacatcattctcactgaagcttattaaaagccttcttccttcgagctgtttttcttctcttgctttactttctcaggtcagagttgtaattaatcctcctatgcagtaggatctttgaataatagcaaatgctttgtattacctttgtttcccgaaacagaacattctggactcggtcagtgatggacagagcaagcttgatgcggtgacccgagaaggacaaactttgtatgcacatttatctaaacaaattgtcagtagcattcaggaacaagttacaaaagctaatgaagagtttcaggcatttctgaaacagtgccttaaagacagacaggcgctacaagactgtgctttggaacttgggaggtaagttttttcaacaggtacagatttcattatgcacggactatttcttcagtgatttaaagtaaagaggcattgggaataaacaaaaatatttttaaattgtgagtttaaattataatgttttgactttaagtacatgttcatactaggacaataactgattgctcaaactctgatggtatcatttggctttattttctatacagaaaaagaaaagaattatattcactaataattatgaatgacataaatgtatgtactttttgtctatttggttaactctagatattagaattttgacacccgaatttttgattatccaagtcctttcctcactgtgtctacttcagtgaggttggaattatggcagaaaacacttattatatttctctgaatcaagattccaatcaggaag

SEQ ID NO: 59619 - DNA, 1132 bp, Bovine  19866880760454
  misc_feature (1)..(1): n is a, c, g, or t
naatttataaagtcttttggaatcaagatcatccagactctaagaatagctgaaattgtgatagatagtagattgcaggcttcactctaataatagaaacagttcctgcatgacagcatgagattcagactacaagctctatcttgattcatagagatgtattttagaaagatctttgagtataaagcatcactaaacatctctcctctaagagcaaaaggaccatattgacaaaagtgggactgttaaaaacgttacgtgctctgtaatcaaggcgggcagtttactaacataagccttggcaactgcttgtcacatgcagtgtttaactagattatacctggattcaaaccgtttgaacccagcagtattttcttcaaagcacagttccgttcgtaatacagagtagtgctacctcattctcagaggagacaggaagacttgaggactgactaattcacatcaaaggtgcattttttcccctgttctaatagtttcagcttcgatgtggtcacagatgtcttcactatcctttcacttggtgatttgaagggagatgtatttttctctattaaaatactgcattttatttacttaatttggttaattttagtattaaaaccatggaaatggtgaaaaacaagtgggatcattttggcactaactttgagaccctgtccgtctggataactgagaaagaaaaagaactcaatgccttggagacgtcatcatctgccatggatacacaaatcaaccaaattaaggtgacctgctcacaagttacatttataatccatctctagcttttaagagcacctttcttatgtttcgtcaaatgctatctgaccccaggacaaatctttcattgctatgtgactctattaaaattaaatttacacaaaatgctgagctaagaggtcttgactgatactgggcaatgcttaatagatggaattatgtattaatactgactgacttatgcattcaaagtcattcttgtgtgcaatatcattaaaatgtttttatggttacattattcttttccttgattttgaattagcgccattagagtcccctgttgatggggtttatatgccatgaaatatattcatcatctacaaccttactatgt

SEQ ID NO: 59620 - DNA, 1612 bp, Bovine  19866880847170
  misc_feature (1)..(1): n is a, c, g, or t
naaatgtctatggtttgcagtaaacatgtgtctgctatatgaaatgtcttatgtactggaacactggaggctcataatagaatctattcttcaaagaagaaaataattcaagaaagtgaccagtagatcttaaagagctaacaaaagttaaatgctcagtcacttcagtcgtgtccaattctttgcaacaccatggatcatagaccaccaagctcctctgtccatgagattttccgagcaagaatactagagtaggttgccatgccctcctctgggggatcttcccaatcctgggattgaacccaagtctccagtgtctcctgcactgcaggtggatactttaccacgtgagccctcagagaagcccaacaaaagttaagtctacttaactactgttactactagtagtacaactatatacgaaatttgcgttttaacacttttttctctttgacatgcatgtattcatgaagcagcttgaatacatgtttctagttttttcacacaccatgcaagtgttattttcattttacttgcttagacagaatagcagttgaaagaaggaacaggtaggccataaacactggttacaaactggtgccaaaagcttttcaaaagatttacattaataatggggacagcattttcctttcggtttttcctttgagctcagtggaagccctcaacttatttatcagtttagcacatatttgtgttttctcaagggtttaaacgcattgcactgccaacagctgacaaacaccagctaaaacctccagagcgggaggcagctgaacaggaaacacatcctcttctgcttcagatatttttaccatgacaatctgaaagaacaccaagcaatgacaatgatgatatatttaaatctcagctggaattacacacagctctacaaaccaaggcaggaatgaaagcaaacagaagccatgactatccacaggcacaagagtcctttccggggctctacttgaaggcaggacacttttccgttacctcaactctgcagtggtcacgcacagggcggccctctcctcctcgtctggagccccagtcagatcgtacttctcaccagttgctttcattggaatgtgaacacactacttggtctttaacaaggggattatgccttgcttcacttaagtttttaactttttaaaatgagacataggcacaagctcatttccttttgtggttgcatgcttgacagaagttctccggaaatactaactcaagaagtagtaactggtctacacttctccttccggctatatcctggcaactttggtatgaatacacatgactaaacttttgctgatttaattgtttgtgtgctgtgctcagccactcagtcggtgtctgattcttgcaaacccatagactctaggctgccagactcctctgtccatgggattctccaggcaagaatactggagtgggtagccacttccttctccaggggatcttcccaacccaagaatcaaacctgggtctcctgcattgcaagtagacactttattgactgagctacaagggaatctttagactgaagcaatgtgagaagggcatgcttcagcttcaggccttaagatgttca

SEQ ID NO: 59621 - DNA, 2866 bp, Bovine  19866880851895
  misc_feature (1)..(1): n is a, c, g, or t
ntaaactcccccaacagagttcgcctgtgtggacggccctagcctatagatgggcatgttttgtatgcgtgtagttgctcagtcgtgtctgactctttgcgaccccatggacggtagcctcccaggcacctctgtcaatggggattctccaggcaagaatactggagtgggttgccatttccctctccagaatgtttctgtatagccgtggcaattccgaagcacaggcagaggacgaatggaatgtggaacccagccccaccttggccttcccgagagctgctgttttctcccgcagttccgcgtgctgcctctcggacgcgttcaggctggcctccacgccgtccatccaactgcaaaactgtcgaacatcatcctggtaacttgtccacttagaaagagctccttcaagttgactgaaaggtaattgaaaggtcagtaatctacagtgagaagccgtctgcatgcagtctgtctgatctctgtcacgtgtctgctctgtccacttccccggcaggaagcccatagatcaggtcagggcaggcttgagggggactgaatggtcacggcttatcaaatccaagcctgggtctctggaaagcacaactttgaaaagcaaaggatggtgaagcccaggctgacaggtggagaagtgggacagggcatacaacttggagtcagtaaccaagtcatgtgagacacaggaagaggtctgaaggcaaaaggagagatgccccaagcaaggcttttcttgagccaagactcaagaaaataagagtatcaatattttattccatcagaggagagaaacaaaaaaggaataaaagacaggaaactgactcatggtttctcccaagggtaattttcagagacactctgtctacactggctcccgcagcgccttttgggggagtaaatttcagctccctttacggactgccctcttttcctcatggctctttcccgccacccactggtgtgttctggggctacttcccaaggaaacagtttagttttaactaatacatcttcacatgattaaacatttatttatcctgtggttttctaagcagtgaacaccaacatgaagaaacatatagttatagttacgtaaaaacacagacacagtactgtcagtcaacgtaaatgcaaggttgcacctgccactttcttttcttccaagaagaaaaaagaaaagaagggaaggagggaatgaaggaaggaaggaggcaaaaaataagggagcagggcaatagagagagtgaaagagacgcaaagagaggatagggggaaccctgtacagtgtgttactgagctattctatagatattttagcaatgacttgcagtagccctttggcttcactaaccttttacaacgaattgctgcagacaaaagtgacgcccacatatccttcacactcgccagctgctgctgaatggcagggatgccttccggggaggtgttctgaaggacagattctcctctggtcactatcatcttcatctggatctctttttcctgtttcactgataacagagcctgtaaaagcccatacagaagtcctttgtcatctgtatgtttaacatcgctagctttaaatatttcagagtccctgtggatagcagatgacctgccgtcgtgttgagccctggatctcttgggctgatcaggaggccaggagagtcactggctggtggtatcaggaaccagtaaccagttaccagtcacccactggtctccaagtggccttggcctttcagatctttattattctctgaatgaataatccctgatttccactgaagtttaagttcactgttttttaataagcaaaaaatagacaacaaataggattcctaaattctcaaaggtcacaggatgaagagctctatgcatgttaaggtctctcatacaacaaactgaaagaaatagataaattcatagtctatattaaatttatacatttcaagttcttcacaagcactcttctttttctatataataaagatgcttgaattcaaagttataaaactggtgtttatcacctaaaaggtaaaacttcatctctctccctcatctggagcttgcccatctctgcagattcagtttcagccactcctggccatcagcttctgccgcagcagaaaggaagtgctagcagcgactcacacaccacaccattggctttcttcagcttttgctcattgggttccatcctcaagtctcaggttttctgagaaatctgctccaactctcaacaccatctgtccttgcccagctctggtcctctatgtgcccacagctccatcagcatgccccatctgctattactgtctcctgtgcctcagcctctagcctcagactataaaatcctgaggacatactttattcatttttcaacccttggtatcaagacagagcaccagtctcctagaagacactcagcatataaatggcaggtgaatgaatgaagaatgattgccttactacaaactgtaaactcatattgaacgaatttcttatgacgggagaagaatggactaactgatacaagcaggcaagttaattgaacaagatgggaaatgtttctgataaacatttctgataaaatgtttcattgaagtatcttcttagaatagatatgtctgaaatcatttgaaactagcctattcactggctatatcaagcacgtaaccacctttgggttgttatttctttttttgtaaagtattgctgggcaagtctatctgggctcaaatgattcaggaatgcttaggcaaggcctccctgtgtcaacaggatcataacagcagagtattcttggacttctttttttctttttaatattttattatatattcat

SEQ ID NO: 59622 - DNA, 750 bp, Bovine  19866880856979
  misc_feature (1)..(1): n is a, c, g, or t
ngacgaagagggtccggaagataaagatttctacctcaggggagctgttggcttatcaggtaggaaagagctcctcctatgcgtatgctagcttgaaagaaaatacaaaggaatggatactgtcctgaaaacccatagctaagcagaatcatcttccttctcccatcaagggaacttggactcaatggtgtaattggatatttacatggttcacaaatgcaaaattgatatgaccactgatttatcccacatatgcttacattcttactacatgactggcgctttataagtactggaaatacacagttccttttcttttcaaagagcttacattctagggtggtagtgtggtagtatggaggtggttcagtcgctaagtcgtgtccgactctttttgatcccatggactggagcccaccagactcctctgttccgtgggattctccaggcaagaatactggagtgggttgccatttcctgctccaggggatttcccaatccaggggtcgaatctgcatcccctgtattgcaggcaaattctttacttctgagctaccaaggaagccctaacactctagggtggaacacagacaaataagaaacacctgtgtgaaatgtttggcactggagtagcagggtacacaaggtgatgtgaaaacagcccaggggtggctgagccggagctttggagaaaggctttagagaagagacctgtgctgagacctgcaggatgaatagaagtcagccagg

SEQ ID NO: 59623 - DNA, 1462 bp, Bovine  19866880892834
  misc_feature (1)..(1): n is a, c, g, or t
ngttgtatgaaaactagggggaataaagacaagcctagaggcatgttgttttgatgaaagtcttaatgaagcagtgggtttctctgtgagacgcggtctttgcagaggcgcccaggctgtgtcagtttcaacttcatttctgttgtcctagaatatgctggtggaaatagagcagaaggtggtggccttatcagagctctcggtccacaatgaaaacctgctgctggagggcaaggctcacacaaaggacgaggccgagcagctggcggtgaagctgagaaccctcaaggggagcctcctggagctgcagagggcgctgcaggacaggcaactccacatccaggtgaggctccagccacgccatgagtgtggcgctacagagaggctcatctttgcacaagactggtctgccctctgagcacgggacacatgaaggggatggctgggaaacagcacatacttatgtacgtacctgcttcacacacattctggcgtagttgtttgtttgtttgtttttaatatttactcatttggccgctctgggtcttaactgtagcagtcaggatcttcagtcttcgttgggatgtgtagggtctttagttgtggcatgtgggacctagttccctgaccaggcatcgaacccaggtcccctgaatcaggtgctctgagtctcagccactggaccaccaagggaagtccctggcataggtttccaaataggctttgtaagagttgtttgaatccagagacctggaaattgcagcataggaaaggaaaatgaaaataattaccaaatgctagcagctgtatcattgaaaagtaaatgtttaaatatagattaaacatagattaaatcatagattaagataccctgtggcagtgttatatttctcctttatatctcctatgttctacttttcagatagactattttatttagtgcccacaagtttagacttggcatgtattccaggcgaattgaacatttttactatcatgcagtgtccttcatgtttccttatagtgatttagagcttttttttgtataatatttgcatggtatatctttcacttttctgttgatttaaccctttctgagtccttattttttagatttgtttcatataaagaacatttaggtgtattttgttggttctaagcacatctaatcagaaaacctctgacttttaaagagcaggtttaatctatttaaattctttgtgattattgatatgtttgaaattttattcttgcttttttttttctattttgtcctgctctttctattcttctttctccattttaacttttgcttctaggtggttgaatgctttcctttgttttttgtctctactttttatcatgcctacctaataaattctaagttattatttcattcttgttccagatcaacataagaaactcataacacattcactcagatttctccccatgcgccttg

SEQ ID NO: 59624 - DNA, 2571 bp, Bovine  19866880937949
  misc_feature (1)..(1): n is a, c, g, or t
ntaaaaagtgctctaattagaggtaaatataaagtgcatggttttatgtgaagtaaaccacaccactaaatatcagctttgcttttcaactcagaacaaaggctaaagagacaatgcttattaatgggtcatatgattttatcatgagaagaaaattcataaaatttcataattctggagacagtcagataatctaaggttcaagtcctattttgtcttaactaaatgcatgattttgtacaaatcacttaatctttaggaatctcagttacttatctttaaaaattagaggtagacaagatcttttaagatttttccctcaaaaattttataaccctttcaggatatttagctttcaatcttgagtgtcacctagaaaatctttaaaaaatgaagatttttttataggcaatgttaaataaacaaagtgatatttttaatataactggtcatcttccaaatatttatagatacttatgtggtcattgctatcatcatgttaaactcagaaagtatcaccaagactgaatgctgtcatgaaactattctttctaaaattataaagtttcaaaagaagaaaatatacaagatttaaaatttatcagaaataccgttctttttttgtctgtctgattattgttgaggtggtgagctattattttgaaaaggagccattttatcacaaagatgagacacgtgtatttcatagaaaatagacattataaaaccaaatagaaaatcttaacaagtgctatatgtaaatgggcaaaagatctaaatagacatttctccaaagaagacatacagatggccacctggcacatgaaaagatgtccatcgttaactattattagagaattacaaatcaaaactacagtgaggtaccaattcacactggtcagcagagccatcattaaaaagtctacaaataacaaatgctgaggagggtgtagagataaaggaaccctcctacactgttggtgggaatgtaaattggtgtagccactatggaaatggagcttcctcaaaaaactaaaaacagagctctcgtatgatccagcagtcccattcctgggcatgtatctagataaaactacaatttgaaaaaaaattacatgcgcacctatattcatagcagcactatttacaacagccaaaacacgggagcaacctaaatgtccctcaacagatgaatggagaaataatgggtgtaagggttaaatacactggggacctgggagccttcccatcacttacaatctttatttttctgggttcaaaacagcttatcaaaaaatgattcatggccacttagtgaattaaagcttgctgacacatttcctcaaaaggaaacatcatttggattattaatacacagtggaataaactcagccataaaaaaagaatgaaataatgccatttgcagcaacgtggatggacctagagatcatcattctaagtgaactaagtcccaaagagaaagataagcaccatatgatatcacttatgtgtggaatctaaactatgatacaaatgaatgtatctaatgacacaaaaacagactcacagatataaagaatagacttatggtttcccaggggagtcggggagggatggattgggagtttgggattagcagatgcaaactattgtatacagaatgaataaatgacaaggccctactgtatagcacaaggaactatattcagtatcctgcaataaaccataatggaaaagaatatggaaaataattttttaaaaaagagtgttatttgtttacaatgtgtctccagtctgatttagatatgttttacactaattcattaaattcactagttatacataggtattttcccaccacaattatgaaaataaagaagtatcacaacatcagaacatgaaattatctcagaatatcttactctcactgcatgagatctatgaatttggcaatgctttcaaacaacatgttttcacgccttttgacttgtgaacacaagagccatgcactcgttagggaattttcacaactttactgaataagatgaagtcaagagacaagaaattttcaccaaatctttctatacactctatatcccatttcttacaaatctcactgtagtgctactaactgtagaacagagaaattaaagggatataattagcacgaaaatatctagaaacaagaaatttattgctagtttctcatcgttattcagtacaacccaaatgtttctggtagaaaactggatattaaaataattaataaccaaaacgatctttccttttgaggaaatatatcagcaagcatcaattcactaagtggtcatgaatcatctttttgataagttattttgaacccagaaagataagattgtaagtgatgggaagtatgtttaactcacagatgtttaactgtgagttatgtttaaccccggtatgtttaactcacagatcagttgactgactgtctctcgtgctcaaggaccagcttggtgttctggtcaagggagagttgagatgaggatgagagaaagagtcctccttttataggctgttccaaatacaatt

SEQ ID NO: 59625 - DNA, 886 bp, Bovine  19866880990266
  misc_feature (1)..(1): n is a, c, g, or t
ntatagttattttaagacattttcacaacttttgatagtatcaaactgtttgaatcaaataaggcaatgaagaattctggcatttggtggttttgctttaatttttaatagtcatatgtgactatatatatattatacatatgtcttaaaatggtaaatattttgaagggagaacaatgtaaagaaaaggtatatggattcacatttttctctgtattgtcatgatatacgtctgtgtattcctacacaactaagactgagctgtgattctgaaaacagtcagtgacatttgttgaaattggggaaggaatgagtgaataaataattgaaagtttgagaaatgagagcgataaaccagtgggtctattgcatttattaataatttagcactaattatccaaggaatacttttaaggaaaaagttctttatcaattttactgactgaagtaagaaaaacatggcactatttccaatcagaaaatcagatttaaaatagtatctataaaataactaatttaaatacattcataaaggggatataagaatcaaaaagaagggaaaatgaaagcctgatagatatgttgatgccaatattttttaaaatgaattttaaaaacgatttactaaaacttgagtacaaaagtaatgtggacttcaaggggtgacaccaaccctaatgtgtatagtctataaaatcttcaaggttcattagacagaatgagagggccactaagttgcattaaacaaaagtaagtcatacatcataaaaaataatgattttctatttaaaatattcatatttagatgttcatactctacattacccctcattttaaaaagggtaacacttataacacgctttcctcaaaatattttttaaactct

SEQ ID NO: 59626 - DNA, 1101 bp, Bovine  19866881033431
  misc_feature (1)..(1): n is a, c, g, or t
nttctacttctgatctttccatacctttgctgcactgcagagatcctggtaatcgctttgaagctgatcgattttgtcctttaaagtaacatcttgcaccagctccaagagggcttcacctttctctctcaccgattttactgatggttcgtgggacagcactgtttgttgaagtgacttgaattacaagggaaaaaacaagagccagctcattcatgtgatcaaggagaatatgagacacatgcattgccatatataagatgattatctcaaacaaagatctaatatatattttataaatcaataaatgtaaaataataaagagaaaatgactcttatggctaatacagtttttttcagagtaaaagtaacacatcaaatagtcctcacacatgcagagaaaagtatagaaaagaattgtatttgggtgaatttagcataatgcatattgctggcttccacctcattcctttcagcagagaaataaatcttaatgttatatgaagggagagaagtgttatcttttgattttgaatcgtaaactcaattgtagcttgagttggatgtgaggtttgggagacaaattccagttgcaacgttgctgtgacagccttaaagtgctatttaaatatatcaagaactcagggagaagaaaaaaaggagaagcagttgtgcttcttacattacactttcaaagacacactgtcaggcttggcagaaaaaccaagggcagaaatagacatattggctggaggaggaaaaagcttccaccaggaaaagctttgaggtaaggcatcacactgtaattcttaaagaccattgctaaacaatttgggtcaaattttaaaagcagactatcccatgtataagctttaataattgtttcacaaatttgagcaggtgaaatgtttatatctacagcatgtatagcaatatctatatcaccatttattttttcaaaaattaatttctaaaatgttttacctacagttggttaattagaatttattttcttaggagtattaagtctcatttggaatttaccatagatgtgcttataggcttttggtaccaaaagataaggagagactctagataaaa

SEQ ID NO: 59627 - DNA, 1908 bp, Bovine  19866881071815
  misc_feature (1)..(1): n is a, c, g, or t
nacaagctttgccaatgcctggactgatgggagggaaaccccaaagctgatgaatggatctccccagggactaaggagcttgctgtagagacattcccttgttactattttcataatatttctatcatcggtaaggctgttcatgtttctgaaacttctaaagtttgccattttggcagaaaatggaactaacaaatttgttactaaagcttctgagaaaaattttcttagttggaaatacctccaacatgtcatcagtaacctgaggttacttatctaagtacaaaaaaagattagcctcaaaagactggtagcccatcttcctccaggattggcaagctaaattgcaaaggaagcagagcattaaggtcttactagaaggagctgagtgcctggctttcactgagtgtgaaggttatattctcccacttaaagagtaacatctgctctaccaaaataagtaagagcagatgcttcgccatctagatgaagatgaattttgcattctggattgaatttatcagtactgttgctgccaattttaaagactaaacaaattgttgctgccagtgccccctcctgcagtcatgcttagctccttggtccaacagcccattatctgactgcttccagttgtaagaactggagactagattacacttagtccttgggatccatgagatcagacagggcattcctggaaccagcagtttcttgatcactagagaagggcacagctagaggggctttcctggtggcctagatggtaaagaaactgcctgcaatgcgggagacctgggtttgatccctgggttgggaagatcccctggaggagggcatggcaaccccctctgtattcttacttggagaatctccatagacagaggagcctggcaggctacagtccatggagttgcaaagagtcggacacaactgagcaactaagcacagagcagccgcggggtcacatggtaaactgttcgtccgagctggttattgacaaggaaaagtcatgtcaatcacacaaacccagaacccagagcacatgaaagctttgggagaccaggttctccttccagagatgagattttaaagggaggttaaacttacagccattcaacctcttggctctctgtttgtaaatatccctcaataaaaacagtggcaaagggatcaaagacagaaggtaagaaactaaatgccagccctctgtgcatcctgactgcctggaataagagcagttcaccagcacagtgtctgtgcaagtcataaaattgaaaaatgatgtaacaaacaactacatacataatagattgtaaaatatgaccacattctctgatacgataaattgcttcaaaaggagtgagcttggggtgtttgcaatatgacgtttataatatgctctgtgtagaaactcctgcctgggggttttcacagctgagggcagtagcttgaggggagcaagctgtctactgtctttgctgttccaggagataccccacttctgtcttctgcatacatgataaggttacatttatataaatgtgtaatttaataaagctttctgggcagtaggcaatatgtatgaaaagatttaatgaaccttatactcttctactaatgccaaagaagctgaatggttctatgaagatctacaagaccttccagaactaatatcaaaaaagatgtccttttcatcatagaggactggaatgcaaaagtaggaggtcaagaggtacctggtataacagggaagtttggccttggagtacaaaatgaagaagggaaggctaacagagttttgccaagagaacacattggtcatagtgaacaccctcttccaacaacacaagagaagactctacacatggccatcaccagaggtcaataccggaatcagacggtcat

SEQ ID NO: 59628 - DNA, 941 bp, Bovine  19866881094396
  misc_feature (1)..(1): n is a, c, g, or t
ncaagacctatcccaaatgagcaaatacatccctaatagatgtattttcataagaaagctccgtagcatttacttgtcctcagtggtacaatggtagtgcttttttttacatcaaaatttaacaatacacaggaaatatcattaaagagtatctctggagatctgtaagcacaaaacgacctcataatgaagaaaacattcctgagagctatgaatagtgccctgagcttatggtctttcatggccttcgatgcaatttgtggctttgtttttttaaaggtcaaagactgttactccccactcctttctgagtctcagcagctgttggtaccgttggaggaattagaaaagcagatgacggccttttatgactcacttgggaaaatcgatgaaattatgacagttcttgaacatgaggcacagtctagtcctctttttaaacagaaacatcaggtaaggaaatttttctttcaggagacctagttaattgaatgcataggtagtaacactgaggtgcatataatgatagaaattcagtgataagagaagaaaacttttaatagaatagtactggcaactcaaaacaaaatcacatggccaaagatgaaaagcctatgcactatagatagaataaaaaatgttatatctctctatatatttatatataggtatatttacataggggcttccctggtggctcagtggtaaagaatccatctgccaatgcagaagccaaggagatgtgggttcgatccctgggctagaaagatcccctggaggagggcatggcaacccactccagtattcttgcctggagaattccatggacagaggagcctggcagactacaatccatgggtcacagagggtcagacatgactgaagcgacttaggcatacctgcatatttatgtagataaaaattggatagataaattttaa

SEQ ID NO: 59629 - DNA, 1174 bp, Bovine  19866881103225
  misc_feature (1)..(1): n is a, c, g, or t
natggaagtttctcacttgcacaaagtgactcagcttaatggtcacagaagtggggctaaatcccagatactggggtccagagcaccattctattccatttcattccaggggctaggactgtgagacttttccaatagcaagataaatgaatttaaggatgtaaatcatgttaagcatttccaacatatatttctttccttgtagcttgttgaaaaaagtcccacattgccatttccttatctcttatataatcaaattttgtattttttaagttacactcacctctcatggaatgagaagagaatttttaaaatttaaaggtaggaagaagtatcgttctggcgaccctctcctgagaacaataagctttttggattagtaaaaggtttttttggatatgagactagcatggctcaatttcagtgcaccccagagttccataatagaataatttaaaatgattatttcttcatctttcaggatctggaagacttgattaaagcaaaagagaaagaggtagagaaaattgagcagaatggacttgctttggttcagaacaagaaagaagaagtctctggcattgtcaggagcacgcttcaggagctcaaccaaacttgggcaaatttagaccacatggtaatgttgcttgtggagagttggccccaagaccgcacttaccatcttgtgtccaaatgtgaatgtgacatgggctttgattttcataaagtaactgaaaaaataatcgctgaatctaaacagcatgtatttatactgttaagtccactttgttaacctttcaaaaagagtctagcttcagctgtttcctataattaacagtattatggacattcctttctcaataatcttatctattcggggtctatcgataccatttaggcacaggtgattctcaaatgtgtatactcaggttgaacttctcccctaaactcagtcagagacagacacagagggaagtcctctatcaacatctccactcacatggccagtagacatctcaaacttcctgcgcgaatcaactcccatcagtccccctcaaacgcacacttttgccgtctcggttcatgacagctctacccttccagcagcatgggctggaacccttggagtcgttcattcctctctttctctcagacccactttccagtccagcag

SEQ ID NO: 59630 - DNA, 1118 bp, Bovine  19866881128273
  misc_feature (1)..(1): n is a, c, g, or t
ncttgaagagaaataactcctgttaataattctaattctctgattacatgtaaatggaaactacagtagggcctacttccctcattaatgcagggctactcgtctatgtacatacaggattatctatactgatagcccaaagtagaaaatactcttcaaaaattaagttcttacaggctcacagacaaaattttacttttcctaggcacacacaggaagtaatgaaactcacagcatggccataaacaaggcatgcttgaactaatctaaaaaaaaaaaaaaaattagttcccactgaacaattgagaattgtcctaaactactcatgattggattttagaaagcttaaaatgtttaagtattctaagtcagcttcagtagtgagctcacaatcagttgtatgcaatacaaaaactttctttttttaagcaagaaagctcatcaaaattggttcaacatgattaaagctgcaaaacattttatactccaaagaatacaggtgtatatttcagattgctgtgaaaagctcacagatttacactaaacccattttacacactggtaacttaaggtttaaattcaagataaaagtaacaatgtccaataaactggaaggtattagatactaaacccaggggacctctgacctctgtcagagcggcagggagacttacgatgtagttttgcagaagtagctccactgaatctctccccccatacttgatgatccaagacttcagctttgactctgcaagaaccagcagtgagagcagacggtactttaattctagaaattccattttcattaagtgtagctctgatgtggaggaaacaaaatgaaacctagaaacaaaacaccagagaatttacagaatgtaactaatagtaacagaatggggcttacttaacctgttacacgtcagtattaaataaaatgcaggcacaaggtcttctaaactctggctgatcaattactctcaggaaagctggtttggtttctagctctgggtttaaaggcaaatcacgattgattgaagtctttgatttagttctttctcctgccaagatcgctctcatctgtttcttttaaaagctgtttttgcaatattacataatgt

SEQ ID NO: 59631 - DNA, 979 bp, Bovine  19866881190670
  misc_feature (1)..(1): n is a, c, g, or t
ngggattttcccgacccagggattgaacccaggtctcccacgttgcaggcagatcctttaccgtttgagccgccatttaacatgtcagaataggtcatgtgctatgacctgtttggaactgatggatttgccccatcagtttcttgagttttcttgcaatcttagatcttgcttgttatatcttcaggtgactattttaaaatgaacacaatttgcaaatttattggtgataaaaaataaaatttattagttctcattcccatgttaagtgaaatatacttttgtgtataaagactgtaggttcaaactagcaagcaaactgtttaaatatgaaagttgtgcaagggaaaaaataatggattcaattaagatttgctaagccctttattctattttgagttaatgttccaggtgaataactgtacttcatgtttagttaggaaaaccacactggattgtcacactggccctttgctgtccccctgacatcccttagggttgggaacatgattcttgtttgactcaaagctgtcaaaaattaatagcaatctgaattggtggataaaatgttgactgcagacttctcctgcaaaaagtcccccttcagttctatctttgtacctttcaaattataatttatatcatgcacctctgtctgtttagatccatttgatacccaaattcatttctgtgattgattttctagtaagaggatgaaaagttttcatattaatgggtttttatttaaagcccgtaaaagctaagaatttgaaatcagctagatttatattaaatttcctgataggaaatggttttctgagattactagttgcctttttttagaatactaaagctattaataaaccatctctttattacatcttccttcaataacaccacagaatggctataaaatattccaaatatctcttaaaaaggactgaaattgaaacatttaaaaactctgggctttcccagt

SEQ ID NO: 59632 - DNA, 1174 bp, Bovine  19866881194481
  misc_feature (1)..(1): n is a, c, g, or t
ntggtgttgtgtttgctgcacacgtgaagatgacattatagtctgtggtctgtaggtcatgcaatcctccttgcaaaattaaattatttagactctagaaactcgataagcatgcactgtgatctctctcaaaaacactgtgtgcagaacatagaaaagggctcctaagactatggctgcgggttaatgactcacaaataaataaacaaagctgttagcactgttctggatatatcactgcagctcaacccaagcttccaccttaggatggcttcttggaggaccgctgacattaaccctatgatggtagatctacttaagagtcaactttgtgaggacttccctggttttctagtggctaaaactctgtgtgcaggggggcctggcttcgatccctggtcagggaactagatcccacatgttacaactaaaggttccacatgctgcaactaagacccagcacaagtaaatacatattttttttttaaaaaagagtcaattctgtgaggagatggaatgtatttgccccaaacacctgtctagccagtgcctcccctttctcaccaatcctgcccagcttcttccagatttcccatcccaattcaccatctcacactcatgtctctattctgcccagaaggaccaattttcaagaacctattgattctttccttctattgttttacactttacctgctgctcgttaagctttttctgtatttcttctgagtcacaggaatcgtagacgatgggtttggccagctctgactcgatgtgggctaaccacgtcctcagactgctcatgttcttatccagctgttgtactgcaaccagagtctccttcagcttctttaccctgtgggcagaaaaggagagatgtcaacttcagggagaggcctcactcatgcttccctcaggaacagaagccagagctgggtctaaacccagagtccagcctggttcagccacctactgtctgtgtgattgtgggcggtggcatagcccttctgtgtctctgtttgcttgtctataaaatagagaagaagtcacagtatttatgaaattcaaattaggtgaataacgatggtgccagtacatgggaaacattaaaaagaatattagccatggttatcctcaacacaactataatgatacaacagttacagaaacctca

SEQ ID NO: 59633 - DNA, 2029 bp, Bovine  19866881350388
  misc_feature (1)..(1): n is a, c, g, or t
ntagctatagcgtttgtattttacttcctgctcaagctaagcattggaagattttgtctttaaatggttaataactgaattttatatggcattacttaaattggcatctcttcatgaagaagaattcattcatgtctttaagaagtgtttacttttaaagaactctttcttccaatggaagaacacaatttcaattagtccctcatttttttttataaattatttgctcagttaggacagaacgtctaaaggcaccctagtgaaggtcaaagtacattggattattccattctcccccatccttaggcttagaggcttttttctttcagttttttggtgatagaaaatgagctgggtgttggaattcctttttatctgactccaagaaattattgtttgacttccttatcctcatgtttcgtagcaatagcatctcagaagaccagggaccaatcaaacgccactcagatgctgtcttcactgacaactacacacgccttcgaaaacaaatggctgtgaagaaatacctgaactcaattctaaatggaaagcgaaggtaaagaaatgagaacttgctaacatgggaaattacaacggactttccaaatagtagttgcatatggagacatatctccctctctacctttgaagcagtaattctcaaccttagctaacattagattaccctggagaatataaaaaatactgatgtctgaccctaacccaaaaccaattgccaggaaattagtgtccctaggcatgtggctgtggacactggtattttttgagttccccagttgatgctaatgtgcctccagggttaaaaatgatgactgtagagacatctagtctgggtctaagaaaaggttttatcaaaagtgctgctttttaaaacatgtgaaggacagttaactggcaatttgttaccacatggaattccctttttacctgaaaattcaattatctgtattttaccaaattaaaccatgaattattttgtcttctcggattcagtaaaacctgtctttccatggtatgtaaatattggaacacaatttataggaaatacgatcctttctctcttttattccagtaatttttatttagatggggagtatgcaagacaattctgtttgggtgagatcaagcaagatggatctctttgcccaccagattataattctttaggaaagcttttagacaatttaagactgaagagccagtcaaaggtaatgactcacctgaaacagaagtgtttagcccccagagcacttaactgagtaccttgtacagtctaggccattcctcaccttttctttagaagctttctcatccaagagccttcacaagcacaattctctctttctggtctgcagcagtgaaggagagtctcctgactttcttgaagagttagaaaaatgatgagaaagctctttggagcaaagctgctgacaacttcccagtggtgagtatatctgtgtgttcttatatgctagtaggaatcatctcagtatttaagtaggtaggactcacttggtaaaaaacatcataatgttcttccagtgagaccttatctaagaaggacgcttctacctaagtggatcacagcttagtagagcttgaaaccattcatacagtgttctgatagcgtgaaagagacagttcacaatgagtaaacagttcagtacctcctacttgctcagactcattcctgtcattttgaagaaatattgaaaaaagagactgaatcatactactgagaaaaactggctttatctttgatagtaaagccatgttgctgttattaaagtccagtctcacaattgactgttagcatctcatttaagtataaggaaatactaccaaattaaagtgtggcttgttactgtgaaaataacaagacaccctgggtctcattatatttcttttttttaaaactttttattttacattggggtatagccaattaacaaagttgtgatagcttcagggaacagcagatattgtagttcttaaacataataaactt

SEQ ID NO: 59634 - DNA, 885 bp, Bovine  19866881371437
  misc_feature (1)..(1): n is a, c, g, or t
ntgagcttttaactcaatttactcaaagtattccattattacaaaggaggccaactggtgcaatgttttgcttgtcctattcattcaggtcctcaaggtattttccttttctcttatacagttcttgaatttgcctaattttttttctcttgataattcctcaacttattcaggtaactgggatttatattcttgtatgtagattcttcttcctgcttttctccttaacaccagatcccaatgtcttcttcacaaactgtagcttactgttgaatgcaataacagtgccattgattaactttggaaatttcataaactagacacaagaaaataaattcagtcaaatatttctatttcactaaactgttctttcaaatctcttgcacaaccgctttcagttatataggatttatcacaggaattgctggccctaaaacataaaatattacagaattgaactttatcatcctatttcatatcttccttctgtcctacatttaaatttggtcattgaggaagctgctgataatgatgtcatacatggtagaaaaccaaggtcccttaaaccatggtaccttttaatgatggtggaattaactgtttaaaacagtttgcagatccttggagatcaaagtgagtgccggctcttaacaggagcacacgtactcctttgattgatctatggattggaatggaagtgatatatctgtgaagtaaaaactggggcaagattcgttgttcagccactaaagaagctcattttactctgcacagttgatgtggtcttacttgttcagttgatattttggcatggctcacataggccaaatatttcgagactcattttctcatacttttgagcttgcagtatttcataaaggaagt

SEQ ID NO: 59635 - DNA, 1926 bp, Bovine  19866881463623
  misc_feature (1)..(1): n is a, c, g, or t
ncacaggcagtagctgctcttacgacattaacacctaagagaaggcttggaatccctgtctcctagcacagtgcacgcacacttctcaaggagagcaggctggagggaggacgagtacaggagggggaaccagcagtgggaggtgggctgcacttccaaggagcctgcgtgccgaggctctggcctccgctggcgaggggagggtgccacgcggggtctcaacacgtccgcagctctgtaccagccgctctcaccccgggtgcccaagcaggacgagcaggtgcagaggcgtggaagctcctccgttctgtggtttccttgaacaagaatgggatgattggtgagtgaggccagcatcctgggtggtaacaacaaaaaaaaaggaaattggtagaaaatgcatcatccaagttggattcagtcagctctgtggcctgggcaggttcccaggatattccagccagacggcagggcttctgagagacaccaggctagaatgtgtgtgtgatgacataagggcagggagaggcagggccgtggggctcagcaggggctgtcccgggccccccaacccactggtgcacacctccctggccacccgttacctccgggtccaccccaaggcactggacatgtgcccttttttctaatgagcacaacctttctctatcagaagcccacagggaacataagtaatccagcaatttctttctcgtcccactgcctgtccactgcttacttatgctgggctctgtttcctttggacaagaacgcctccgggtaccaaaagctacattattctacagcctgtaagccaggagcctggccgttctggttttgttgttgctgtatttgttttgaatattagctgtttcccattctgggcagttacaactgtgtttactatgagttcctctgtgtgggcgttttccccattttcatcctacaggctgcggcgtgagcagtaactcatcactgcgccaccagcacagagtcggggattcataaactggggggcctttaacttgaaaatacccagtgaggatggggggaggggagaaggagaaatatatttatgggagggccagtggactaataagaccgaaaataatgttgttaaatagatgtatgctaagtcacttcagttgtgtccgactctgtgcgaccccatagacggcagcccaccaggctcccccgtccctgggattctccaggcaagaacactggagtgggttgccatttccttctccagtgcatgaaagtgaaaagtgaaagtgtagtcactcagtcgtgtccgactcttatcgaccccatggactgcagcccaccaggctcctctgtccacgggattttccaggcaagaatattggagtggggtgccattgccttcgtcatctgctcccttcaaggggctgtgctttgagcaggacaagttggcttctgcagtgctcacttgatagagcatccatcgctgcagtctcgagacaagactgctccatcctgccttccgtttgctttcaatacttctcacctcttatcactcaccttccttgtctcctgaactcccaacttgaagcgtctggattctttcagttgcaagtcacagaaatccaactcacactgtcttaagcaaacaggaaatttatggatctgtgtgtttaaaaggatatgatggaagctttaaggtcagatggaagaagtagggacgaggaccttatgaggggaaccgcgatttctcccctccctccccgccccctcccccatccacggaactatcacctctggaactatcacctctgccggttgttttttggctccactcagcagggggagcctctcctactgggaaggtggcacttacaagccccatatcctcatcctccaagcacctcccccctagaggaaggaatttgcatccacagcttc

SEQ ID NO: 59636 - DNA, 2323 bp, Bovine  19866881866268
  misc_feature (1)..(1): n is a, c, g, or t
nacttgcacctaacgtaacaaatataagtggcagcaaaagcaaaagaactcgaaactgacaactgagtctcagagagtcttacaaagaaaagaaatgggttgattaacattctgagtggagaaggatgaagaacaaataaacaataatcccaaaattgcatagagagaaaaactcacagtcatccattggtgagaaatgaccctttatgtaatatacctgttcactaaagatatagtttcattttttatttctatttttaaattttttaattggaggataatggctttacaatgttatgttggtttctgctatacaacaaagtgaataagctgtatatatatgtgtgtatatatacatatatacacataacgtgtacatatatacataatgcatatattatatatatatatcccctccttcttcagcctcccttgcaacctccacaccaattcccctaaaatttaacctacagtgtattctttacctgaaccttgacgtttttcctttgctataaagcactaaccttggaaacggtcagtatgtcattaaactgtgttttcagttcctcttgagccgtatccgtgagagcctcatcctcagtcttctggtagagctccctggcctttgctgtgagtcgctgcagggctccggcatggtcttccgcctctgatacaacggactgaaagtgatccaggagggaaaacttctctttcagaccaggctgtggttgcaagggatgttctactttttgatccaccgattccatccactgctccaactggtttttccactctagatagtcattccactggctaatcacagattctaaagtgctagaaccaatgtcacatattacaaaagtaagttatcatcacatctctactaaaaaccaaccatgagggcattgcacccatgtaagctcttttaccgaatggtattgtaagtgatgaaaacagtgttttcaagtgaaggggaaaacattactcttctgacctacaacacagcttcttccaaataaaaataaatttatccccaaatttgaagatgtcttagtcgcatatgcatctggagatttgtcttccagatgctaattgccctaaatgaatagacacatatacatgttacattgtcaaaacatcagccagggggcaccagttaaattttatttaatatacattaattctgtattttcttggatttggtttatcctattaaagataatggaattcaaaatgtgaagtattcttttgggtaaatgacataattagattgattttttcacttgcagatataatatataatgtttagcgcttctgtgttgaatgtgtgaagggatgaaggctcagtgtgctaatagtattagaaatatagtcgccgaagttaatagtcaagtcaatagctctcccaatagtcaactaaaaggctctctagactggcatttttaaaatacctccaacatttagctttacaaactattctaactcatcttcagtgacccctcccactctcccttgcatataattctatgaccctgaagttatatctgtggtgaatgtacttccaaattgtttcttttgctcaaaatttcccctttgcaccaatgtacaccttatcatatataccttaaagccctattctttctgcaaataattttctggaaagtccaaatccatctcacttctccaaaagccatccaagccctactcttttccacaatccacagcatcttaggaacacaatctgagtcagaggcttggttgttttatttttattttttttgaatatatcctaccctagcttttgagccccgagagagcaaaaactactttgtttcattattttagcacaataatttgagcactgctacggctcaaaatgcagtttccaaagtgaattccttgctgaaagagaagaatcaaggatttaaatccgcttcctgtatttaacatcttattctaacatccggaaaatattcacccgtattgctattcacttttatgaagctggcctgttaccaagcattggggagttgagttcatgccccagcagtctgatctatagaataacagaactatggaatctgattttttttttctttgctgaccattatgagttgtgatgaagattcaaaatcctgctgactctgtggagttaccacctaccctccatatgcaaagtaaacaaagcacatttttagctgtcaccgtggttcactgtttacactgcagtgagtaactggagtgttattttgttttgtgatgagctctaatcttctgttcatctatttatgaagatcattttgagcacacacttcttccgcga

SEQ ID NO: 59637 - DNA, 1470 bp, Bovine  19866880108811
  misc_feature (1)..(1): n is a, c, g, or t
nctctgccttttctaaaaccagcttgaacatcaaagaagttcacagctcacatattgctgaagcctggcttggagaattttgagcattactttactggcatgtgagatgagtgcaattgtgtggtagtttgagcgttctttggcattgcctttctttgggattggaatgaaaatggaccttttctagtcttgtggccactgctgagttttccaaatttgctggcatattgagtgcagcactttcacagcatcatctttcaggatttgaaatagctcaactggaattccatcacctccactagctttgttcgtagtgatgctttctaaggcccacttgacttcacattccaggatgtctggctctaggtcagtgatcacaccatcgtgattatttgggtcatgaagatcttttttgtacagttcttctgtgtattcttgccatctcttcttaatatcttctgcttctgttaggtccataccatttctgtcctttattgagctcatctttgcatgaaatattcctttggtatctctgatttgtgctcaaaaacttgtattagcctacatttgggcaaaatcatctaacacaaagcttattttgtaataaagtactgcatatctcatgtacttattgaatagtgtattgaaaatgaaagcagagtaattatacgggtacagatgattgtaagtgcgttggttgtctactcctgtgatcgtgtgtctgtgtgactgggagatttgtcacactgcaactgtccagcatcatgagatgtctagcctggcaaaagttcaaaatttaaagtactgtttctactgaaagtgtatcatttttcactgttgtaaagtcaaaaaattacaaatcaaaccattataagttagatatatttggtataaacaatgctcatatgaatatcattgaacatacatcattttgttcatgtctgagagtatctgaagaatgtattctttgcagtagttttgtggggaagaggaatgtgtgcatttgtagttttgatttttgatgcaataaaagttgacttccatagaggttgcattaatttatatttgtactatcactgccatagaacattttcttcttattccccagttaaaatactttttatatttctgccatttgcatagttgaaaaacataacttcattttttaaaatgaaaaataatatatgttcagaaaaatgtacaaaatctgaactggattaattaatttttaccaggtgaacaagtccatgtaagagaaaggaactaatgattaaaaaataaaaataaaaagatgaaacataattggacttaacaaagtagagatatgtgttcattacacccttagtttctctttttgaaaaatatagtttctgtattgtctcattttaaactactcacattcccctttataagcatattacttaatttatttaatattagacccactgtcaaatatttaatgctcactaa

SEQ ID NO: 59638 - DNA, 2508 bp, Bovine  19866880344904
  misc_feature (1)..(1): n is a, c, g, or t
ncatgtccagttctaattgttgcttcctgacctgcctataggtttcttaagagacaggtcaggtggtctggtattcccatgtctttcagaattttccacagtttattgtgatccacacagtcaaaggctttggcatagtcaataaaacagaagtagatatttttctggaactctcttgctttttcaatgatccagcagatgttggcaatttgatctctggttcctctgccttttctataaaggtgacatatattgtgaatttttgtttttgagttttattttcatatttctgtagaattaagtttgtttttgttacagtcacttaggatcagtttacttttttccaaggttttcctttaaacttgcaggctagttaatctgtagctgcctttgtcctactactgtgggagtttccttataatcatcagtccaaggcccagtgggttattttcatgaaatagtcccagtgctgtgtgatatttgagaattgttttatctgctccttttggatagtttggagaaggcaatggcaaaccactccagtatccttgcttggaaaatctcatggaccgaagagcctggtggtctgcagtcaatgggatcacagagtcaggcatgactgagagaccaacacttttgggtagctattttccagacctcgagcagtttcctaacatacatggttgataattgcttagcatcagcatcaagcgaaacctttagcaagtatcaaaagcccctactctttcttaatgttccctcttcttcattaatctgacctatgggctctcaatactttgatcttttgggactcccagatctgtcttctcgatttagggagtctgccagatttcaacagttttcacgtagaagaaaggaagtagagactaatccagacatggtgaaatcaaagcaggatagatgtgggaatacgaatagtaataagtatgtgaataacaaaactaaagttgtagtagagcaaccatattaggtcagagcagcagatgaagcttgacatgatttgcttcattttatgtggatgtgggctaaaaagcagaaaaccaaaaaccatgaaatcagattattcagattccaactccttaaggatctgaaactagattaattagtacattttaaagcaataataagtatttatcccaaatgggagacaaagcttaatgatgttattatatgcttctttttagcaagttggatttcaaatacttcaaaatgtctctgaatctaagacggttgttttttattttttaataaaaagtcagagtaattataaaataattgggcaaagttaagtcttccataaaacatataatttgatgaaataatttattaaaaaagaaaagactagaaataaaattaattagagcttaacaagagcaaataaaacctgtaattgtgacacatttcacattctaccctaggtaaacattggcttgatgtttgatttacaggaagttgaacataattatttgcactctatcataaacagacttgaaattcttttacagttaatattttataagcacaagtacacatggacacaaatacaaacatgcaacacatacaagtaattaaatgtgattataaaaaaactacattcttcagtttattcttttcccatcttaataattttcacatttgtttcctaaatctgatgtgctgtgaaaaaaataagctttttaattcaaattagcacaaggcagattgattcaagtagtaatttagtatctctagtaatttaatccttccaatagtaacctaccatttctctaataaaagagaaatatctaaacttcaccttcaatatattctgaccatattttacccatctaacaaaatctcccccaatacccaaactaaatatttctctattaagtcaatctatacctatttgttgttgttgtttagtcactaatttgtgtccacctctttgccacaccatggactgtagcctgactagctcctctatctgtgggatttcccaggcaagaatacctgcatgggtcatgatttccttctctaggggatcttccccactcagaaatccaaccttcatctcctgtgttgcctggcagattcttgaccaccgagccaccaatctatacctatattttgaaattattttttcctcattgcttgtctcccactctgctggacatgaaaataatatctatccttaaaagttcagtttaatctaatactctttcatgaaagactcaaatcctccacacatttccctcccttctcaacccctactacaatgttagtggtaaagaacccacttgccaatgcagaagacataggagacacgagttcgacccttgggttggttagagatcccctggaggagggcagggcaaccattccagtattcttgcctggagaatctactggacagaggaacctggccatctatagtctatggggtttcaaagagttggacacaactgagtgacttagtacacaagcactgcaatattagaccacaca

SEQ ID NO: 59639 - DNA, 1220 bp, Bovine  19866880451641
  misc_feature (1)..(1): n is a, c, g, or t
ntaactgctggggaatacactacttaccctagaaatgccacagtttcttcattagcaaaatggagaaaattatatatgactttctggggttttgtgatgattaaacaaaattaaaccatgggtcttctaatcctgagagagacgcagagagacagaaaaatattttagtgttttcttttctttttcctcttaagactcaggaattttttgaaaaagacacaaatattgtcttcccaaaaggtatgttttaggcctatggacctgaatacattagcaatagttatcttgaaggagaaattatgcataggggatacaccactgactctaggtatatatgaatagcttctcaagaaagggaaaatgtacttatttaaccccaatatcaatgagaaaagaatataagatagtagtctttttatctcaaggttatggaaaaatgctttttagaattcaaattgtatgcctcttataatatataattatatttctcttttcataatatattcagatcattctccagtaatcagggatgctcaacactgccttaagacacagtaaaatcgccatcactggaggtcaggtgtaaagtgtgcatgatccttaaaaagacagtatttcttgaatgtcttaggaggtagacttaatggtcttgaagacctgctctagtcataacatcctgattctatgggttttttggtaagaacttttaatggcttatacaaatagagttacagatggtggaatctcaggatggcagggaatatatcttggagcatgaatgcctccaaccaactacatctttttaaattttacttggataaactatcaaaatatgacacctgcagccccagagatatgtttattttacagttaacaaaagagaaggcaactgtttctgaaagtgactgttttgcttcaagaatctcaatctaaatgtatgtgtctcatgggaaatggagaaagaatatatgctatggacatctgttttatttttattgcatttttgccttttttcaaaataaaacacatcattggaggagtttaccattcccatttccatgtagcttctgataggctgtatttaagtattttgactacagaaggatgcatgtgacccaataatgcctaatcattgtaccccatccccttgctccttctttcatcatgatcagttaaacgatgggtccattatccattgatttccatgagagtcctttcct

SEQ ID NO: 59640 - DNA, 1016 bp, Bovine  19866880456600
  misc_feature (1)..(1): n is a, c, g, or t
nctgcttacttcacctgatttgtaacaaagtcatactctatcatctttaacatcacctttaatattagattaaaagtgcttatactccctgtaatgtatcacctttaaatgcctacaagtattggcataaactctagtaaatatgaggtcaaaatgtaataaagaggatcatttaaaacattctgtttagtgatatgactaatagtagagaagaaatatatagcagatatttattgttgagagaaatcaggataatgaataaaaacaataagtgaatgaaatgaatagaaagacagtttctctaaaggatgagaaaagttctagggaggaaactttcagtgtcttagttacaatagtacatgtcatgcctcagtcttggagaaccagtaagttaacactgtaagcctctacttgctcaatgggctgtactctcaatagttatcatctacaaatcttgttaaagcaatttaagagtggaaaaaaaaaaaaagttgaatcctaggggagctgctattcagaaagagaaggagctaaaatattgcagaagtctgcaaagctaatgagtactctgaggagtggatctccacaggggagtttgtcaggtcaagtcatttactgtgcatcattttaacatttacaccagaataagagtaattatatgctctttctatgtaagatccagcatagggagatgtcattgcacctgagaactgcatgtttccacaactattcttgtaaaagcattatattagtgagcatgacagagaaaaacaacttatagatgtatagaataacttgcaaagtgaacaccagaccctaaattaaaaagtaaagctgcttagagagtatgcaggctttaagttcagaaaaacaacacaaataaaccacttcccatgtctctctctgtccttgaccgtttcactcatgtgctctctttgtggtagtgtcacccatgcctctaataatctgatgttctaaatggtgttgggggaggtttaaactatttattaccagta

SEQ ID NO: 59641 - DNA, 1144 bp, Bovine  19866880910978
  misc_feature (1)..(1): n is a, c, g, or t
natttcaatcctagctgtgcaattgaaataaatatgttatttggagcatagttcttaagctctctatataatggtaattgttgtgaggcaaactctgaatagcagttgcctctgtggtaagtactcagttagcacagtcataacaattgaaaatgtgtactgaaagaggaaaacacattttcccactgaggcagtctggggaggacaactttagaaaccagtcttcacagccacatggaagttctaccacaaagacagatattatctatgcataattggcacctagtttcttttttacaattagtagagcatggactagttaattggttaacagtttttcctgctgtgttcattttcatccacacatgcctattttagagaatttctcagggtatttttttatcattgaaatcatataatttctgatatttagaatttaggcagcagcttaatgaatttctgtaagattcatttccaaaacatggaatttgtgaaatgttaaagtatgtctcattcatttcagaaaatgaaccaccctggtgttgaaattgaatagttgtatccaaaatgtcacaaaaggggccgttttcctgtaatacatcacttttctgtttagattgaaagtgataaagagggcaaggcaaataatagatgatatgcttcattctgagtgcttttttactcaaaagaaaaaagaaaaactcacagccatctgttatctgtgtgtcagtttgttgcaagtgaatgacatttttcttttttatttgagaagaaatttatggaaaagctgagcaaagttaactttaaaatatatggtaatattaataaagtacctatgtagatattaaagcctcattatgttttgcatatctggacttggattaggtctttagctgtactgtgtaagctgcagaacaatcattcctactcaaagtaacgtgaagacttagatggaaatggcaacccactccagtattcttgcctggaaaatcccatggacagagaagactgtcctacaggcttccaaggctacaatccatggggtcgcaaagagtcggacacgactgagcaactttacttttctatgagggtaagagggcttccctggggctcagggtaaagaatccacctaaatcaggagacg

SEQ ID NO: 59642 - DNA, 1551 bp, Bovine  19866881019013
  misc_feature (1)..(1): n is a, c, g, or t
nactttgtccccagagcacagaaatgcctcactcttgatctcccccccgaactcgtttcagagagtgttgaagatcagcagtgacagtaacttgtgatgtaatccttgtagaggcagatggaaagtgccaatttttagtttgcaatagtatataaacataattattaataaacattaatataaattaatgaaatataactaatacataataaatagatataaatattataatataaaatagaaaatgaaaattagttatcatatggtttattgttattattcccaaactcctctgtccatggtagtcttcaggcaagagtactagagtgggttgccatttctttctccaggatattttccttatccagggatcaaacttgaatctcctgtgtctcctgcattgaaggctgattctttacttgctaagccatttgggatgcctggtatgatctgattttgtcaaataagaagttggaaaaaagtgaaagtcttagtcactcagttgtgtcccactctttgtgaccacatgggttgtagccctctaggctcctctgtccataggatttcccaggcaagaatattggagcaggaagctatttctttttccaggggatcttcctgacccagagatcaaacccaggtctcctgtattgcaggcgggttctttgtcttctgagccaccagagaagcccaagtattaggaaggaaagagcaaatttaggcctccataatctcttttctcactttacatttaccaagagtttccttggttaaaaacaaacgcagttagaattttcaatagatgcaacattttaaaaaacctaaaagacagcctaaaataaaataataaatgtcaagaagatgatagattcatgagagcccttaatccaaatggtaccaaattccgtttatctgaaatgattcacagtcaggatcaccaggctgtaacaggtggctacttttaagtacagatgctaaatgtcatacctgcagatggttcatcagtagaacatgtaaaaaaacatcttaattatatattatgaagccttttcataaaaaattaaaagataggcattcattatgcttgtttgagttatatcagtgagtacagatgctgttatgagttagctggtgctttaatcaaaacaagtatccgtggatcaatttaatgatatgaaagttctgacttcaggttggaaagtttctggcaatgcaaatttcttgcaatttcctgatttatgaatcaaagcagaggacgctcctccaccaaaatcccacatcaatttgtgttaaagaaaaagatactcagcctatatccttaaatagaagcattccagattgacttggaatgcgcccacaggcatatcacacctgaagcctaaagctggaaacatttaattcctcacacggactttaaaatcattatggcaggtttatcaatgatcacaggtcattcattaacacgtgtttaatagtcaaatatatatatatatattttaccatcattagccaatccatacaacagacattgctggaatgacttaactacag

SEQ ID NO: 59643 - DNA, 944 bp, Bovine  19866881053782
  misc_feature (1)..(1): n is a, c, g, or t
ntaaattgagatagtgcaatgattcttgcaaatattcatggtgctatattaatttttctgatggagtggatatatggaattttgaaatatctgagtgtaaaagtaactgctgttatcgaacttcttgcattcctttatggcctgacaatgtggaatctctggataagaacagacatcaattgcttgcacttccatcttcaggctatagaatcagttggatgttatctttacttctaggatagaaaaactctaacgattctctgccatactatgtagttaagaacagaatgaaagaaaaagaaaaaaagggagagaggaaggaaagaaggaagtgaggcaggaaggaaagaaagaaagaaggtagggaggaaagaaaaaagcagagagacaaaagatttttaacttatatatgagacttttatcaagctaattgttctcaggcacactgactctcaggcaagagtcaccttctatgtgtggcagaagaattactaatcatcatgccttttgaaatataaatcaagaagcccctgagaaatcctaaatcattacctgactacacacatagctgtaattaatgactgtttgtaaaagactctagagatgaaaagcaccttaactggagtaactctcaatcatgcagatggataaaatctaaagcaaatggaaatattaggatggatgcattattttactagagtaacaggacattaaatgcaatttttttcccctcttggtatttcacttggtgtttcaagctaaaaacaatgtgttatgcattctaaatagagctatgttcatgtcccatgggacataataagaaaaaatctgtaattgctcgtttggctcttacttcccttaaaatacctccagtctaagcaagaaacagaaaattacattgaaaggaatttttttttcttttgaaaggaatttgtaggagcaaa

SEQ ID NO: 59644 - DNA, 931 bp, Bovine  19866881191175
  misc_feature (1)..(1): n is a, c, g, or t
nttcttctttagggtatattctgacccggaatattcctgagatcaacccaggtctcctgcattccaatcagatgctttaccatctaagccactaaggaagcccctacaagctcgtggtttctgtaaatttagttttgtgtgagaaaaatcaagtacaaacatataatggcatagtttggagatgataaaataattcacagaatgttctcttatgcagcatctgtatgttctgttgtctgatattcttttgaagaagaatttctaaaaccagtagtattctgttatactcatttgtcatatggatgcatatgaggaggaaaattagatttattattttagattgttttaaccactgactcagaacagcttggaggtaggacccctgagtttttgtattagcttcattaatagtgttctgggctttcatattttatcatagaacagagtttggatctgttacagaatttcatttaccaaatggaacacaaagtactgggggcaggattccagaaattgggaaggatctggcaagatcaattcagggatgcaggtgttgctggggtattagacaggttgttggatgaggaatttagaaagcagaccaaaatgaaatagaaacccagttacatgagctagaagcagatggagagagattcaggttcaacaattggattaggaaatgccaatggaggagtcttgaattctaacaagaacattattttggggatgttgtgaatcgaatagatgagtcaatattgaaaaaaaactgaaaagggggaaaaatggtgaagaaagccacaatgacttcatccttctaggttatataactaacttatacagacagcttgggtgttaggaactttgctaagaactttacatctctcaccatgttgatttgtctaatctaccggggtaggtatgtgtgcccctt

SEQ ID NO: 59645 - DNA, 864 bp, Bovine  19866881342736
  misc_feature (1)..(1): n is a, c, g, or t
ncagacaaaaatagaaaaatgcatatgcattttagtggagaaggaaatggaaacttagtccattcttgccttgaaaatctcatgaagagagaagcctggagaactgcgttcatggtgtcacaagggtcagacaagataacaactgaacaacaaatgcattttaaaatagcagttcaaatacatagtagatacatattgctaatattctgataatgtctaatgcatgcatgattgatgaactccttccagtttgtggcctctcctcaggagactatggactttagagtagaaaccatgacttaaggaatacaatttccaatttggaatttcaatgggatttattatctaaattaattgacaatccctaggttatggaaatgcaattgaaaattagtactttaaatgattcatagaatgaattaccttttcagcagcaaaatgttatcctagggctgtaaaaatatataccatagtttcacaaattattttttccataaatggctttgtattaattttattattcaataagtatttatatttgtgtttatgaatcttgttttgctgctgtattttagaggtataacaggaagaaaagttgttactattaaattgttcttatagagtttataatcaattctgagaagatggatctgattttcatcctctctgatggctcaatggtaaagaatttgcccgcagtgcaggagtcacaggtttgatccctggtttgggaagatcctttggagaaggggatggcaattcactccagtattcttacctgggaaagccatggacgaaggagccttgcaggctacagtccataggatcacaagtgactaaatcactacccaccacctgggataa

SEQ ID NO: 59646 - DNA, 656 bp, Bovine  19866881805115
  misc_feature (1)..(1): n is a, c, g, or t
ntttggagtctagaaatcgctgatggctgtgacatttccgtttattaatatggcaggagatatttttattttacacaggattcttgctaaaagtgagtaatgcaaagaaaccttggcttaatcaagaagggggttcagaggagcttgactaaaatttggtcaaggtaagtgtctttgtcagtaagaatgtacgaagtccagagagatggcagcagtgacaggaacaaataccaagtaggatgatactctaaaattctttttatatattaaaaattactaccactgacttctttctgcttttctgtttcttttcttccattccttcaaaaaaaaaatttttctatgttaagcttgaatctcatccattggttcacatttactttataggtaattatgtttactggcagagatgttatgccttcaggcatcaaataattttaaattcaaagagtttgggagagttagaaaccaatgggactaactactctgatgaggtcagagcccttagtggagaacaatattgatcattaaggaaaagctttgctatagttgctcttgaatggactgaattgctcagtgagagattctattgaaaagaagttgtcagagttgctcaaattcctctttcttaattaggcctttgaatttgagctata

SEQ ID NO: 59647 - DNA, 1760 bp, Bovine  19866880171556
  misc_feature (1)..(1): n is a, c, g, or t
nctattgctattgctaagtcacttcagtcgtgtccgactctgtgtgaccccatagacgggcagcccaccaggctccccctgtccctgggattctccaggcaagaacactgggagtggggttgccatttcctttcttccagtgcatgaaagtgataagtgaaagggaagtcactcagtcgtgtccgaccctcagtgacccccatggactgcagccttccaggctcctccatccatgggattttccaggcaagagtactggagtggggtgccattgccttctccacagggagagtgtacattacagaaaatatacaaagtatcaaagactggacaaggctattgcattataatggaaaaggaacttatactaacagtcagaagtactggattctaattctttctgagttcttcataggttgagtttccattatgtagttataaatgataaggtcaatctcagcatgggcttaggctttattctgcactacattatttttgtttgatttctctcataaatgtggttgccatcaccactgaaacacagaaagctcagcagctaattctctggcctggagctcattgagttccaggctcctgtagccaacagtctatatgacatcttctctggtgtatctccaaggtacctcaaatactgctgttcagaacaaactcatgcaaagcacacgtacaatctctactcctcttgtttcacctcctcccaacatcccctacaggcagagggtgaaaccatcccatcttttcccagaccttcatgtttcactggatgtcagcaccagtcatttgcctgtgagagatgtcgtccatctcctttccctttctcaccttcacaacccaattgatcccacatttggtccacctgacttcccatgtggcctgtgcaagtggccatcttctctttcctggatggctacaattacctcattcctggtcctttcacacctgcccttgaccctttgcggtgcactgatggtttaaaagacattaaaaagctaacacaatattataaagcaattatcctccaattaaaaatacataaatttaaaaaatatgtataaaaagcaaaaaatcctatgataaaccattatggaaaagaatagtttaaaaatgtgtatgtaagtataatcaaatcactttgctgtacagcaggaattaacaacattgtaaatcaactacatttcaaaaaaaataaataagaaaaaagacactaaattaaaaaaaaaaaccctgtatttcagaaattgccccatgtgacattaagttgtgttggataatggtgcagagcagtttgagagaaataacaaccagtcgtgtggaattccgttatttgtgttggatgtttttaatgagaaaatataatatggttcagtcacgccttttcctaaacaatcccctattccagtttattccaccttctatattaactatacatcttatacatccctcagttacatgtgtgacttcattttatggctgtgtatatttgtctacttctatcaagaggctgtgagctccttgagggccatgattgtgtctctgaatatttgtgctggcatgcccagcttgtagctgactgttggcacctgttcaggaactagttcctgaatggagttctacctgaataactgttaatctcttatcccatagcgtggtgtatttcattatatcttttgcccccatgaaacaagacaagaaataccaaatgttgatacatctttagaaacagaaataatgaaacaaaa

SEQ ID NO: 59648 - DNA, 4002 bp, Bovine  19866880523502
  misc_feature (1)..(1): n is a, c, g, or t
ntatgatcgtgggcagaaagctttgtaggttctttaatgtatgaacatgccaggcaactgttgacttggcagttactttttagaagagacaagttgtattgtgaatatccagatcatcttaaaaggagagaaagaatgggcttgctgaaggggatggcatctgagttgaattctgaagcatgagaaagagctagcaggctaagattacacggggacaggtattctaaacataggacacagtgtgtgcaaatacaaggaaatgagagaccaaggtgtcccgctgagaaaaatagttctgaaacagaaaactcaaagcagttcagcagaactagagaggatagggtgagggggtggggagatgaacctggagaggtgggcagaggccagataaggagggaccttgtgtaagtccctgaagactgcaatttatttcctggtgaaggaggagccagttgaagatttcaagcaggaaagtcacaaggttaagtcttacagaaagataactttggaagtagagtgagccacacatctaaatgaagcagcacttgagaagacctgggaatgaatgctatacttccaaggtgtatagagccgagaaagtgcctcatgtgtgagtaagaggcactggctgagattcattacagccttctttgtaggagcaaagaatcagaaacaatccactcatttttaagaaattgaatatgtcaaatgaggtagagttatttgaatacatgtactaacgtaacatactaacataattaaatggtgtgaatttgatttttctgtagcagcataaactgaccttaaaataatgtcaccctcccaaaaatgaaaattttagcatgtgatcatctatctaaatttaaaaaacatagaaccaaataacatatgacatgtgtgtaagtaaaaatttttaatgaactggaaggctgtacactgatttcatgataatggcggagaaggagggcagagaaggaaatatgattgaataagggtgatgggttaaagaagcttttgctttacctgaaatgcagtagtttatttttgtttttaaaggataatataggattattattacttatttacttttcttaaggtataattagggggaaaaatgaatctgatagcaaatatcacacagtgttaatagatattgattctgagttgtgagtttgttaaattatactttacattgttctatacttgaaaagacaattctctccttttaagtagaaaagaatactgcacgtgtgtgtgtgtgtttaagcagtggcctgagaagtgtgagcgccaatagtatgatgactataaagccaaggaatgtgaaagttcaagaactgtcaacagggtcaagatgagaactgaaaagagttgaattaatttgtgatttagcaggtcgatggtggccttgatgtgaatgatttcagcacagtgatgttgagtcgaagtctagggcagttgacagagtaagtggaagataaagacatgacaacaaattccatttgttttcagaactttgaccataagaatgaagaaatagatggatttgtacctagagagggatgtcagtttaagaagaatggttgttattttagaaaaacttgatattgttcatctgagacaggaaaaatatgagaaggaggtggctgaaggtacatctaagagaggagataactgatggggcaggagaaagaaggaaggaatagaatctaccgtgagaaggtggaaccctccccggggagtggaagttgatgggtgtaagcagaaactcagggctctggggagagagggctggaatgattttgaggaagttcagatcaacagcttcaatttttttaaaatcaaaatgcaaattatagttctgcctttactgaatattgccacttatatagaataaatattttaagatatgtactttcatgtacataggtaactgtgcaactatttttcttatcattattagaaatgatcaaaagtagtaaaaatattatcctttgggcaatgagatcacttttggtttctgcaggtataatgaatattagaaagaaaaacaaattaccaagtaatgtagatagagatatggttttaaatgaagcatatgcccatagagcatggaggttaggtttacttttcactgatagatcatggaggaaattacatcaaagtaatatgttctgtcctgtcctaagcacatgaaatacttcatagaacttgatcatggcaaaacccttaagggatctgttgccctcctcttccttccctgccctgctgaattaatcttgtatttcacctaataaactaggttggtggatattttagcttttttttcatgacattttctttttaaataatgcaaacatacttgtaaatactgtctgttgattttattcattcaagaatactattgggatttccctggtggtacaatggatgagaatctgcctgccaacgcaggggacacggattccatccctggtctgggaagattccatatgcctctgagcaactaggcccatgcacacaaatactgagctcacacacctagagcctgtggtctgccacgagagaagccactacagtgagaagcctgagcactgcaactagagagtagccgctgctcactgcaactggaagaagcttgtgtacagcaatatcaaatatataaatatttcatatatttatcaaatatataaatcaaatataaaatatataaatcagtaagatcaatgccatattataaatacaatgctaatgagctcctgatatcagtatctcattattgtaaaaaattaattttcataggattccatgattggaagaaatgttatatggcttctgctcatctatttcagcttccatccatcggattagaatgaaaacctggagggatatcaggaccccagtgagagaatagaaaaaaaaaaaaaaaacagcaacgttttcctctttctctagctgaggcaatcatgtgtgaccgattgctcactgatgaatgtgctaagagcagcagtgaggttttttttgttttgtttttttggtgttcatttggcgaggagtgactgagcatatgtttatcaaataaatgcaaagttatatagaaaagggttacctcctttgtcaaccaggagcttccagtcaaataagatacaaaaccccccagaaatccagtaagatgcccaaataccccatacccaaggtaaagcagaactggttttgtagtcatacagcaacagttacttgtttgtggacatatatattgctataaagacgtatacttgacagagagtcaggtattccattggggaatcaggaagtcttttctccttattttccccttcttagctggattacaagtaggtacatggccactggttttactctatgttgagagaggagggagtgtaaattatggttatgtcagagcaaggtgagtgataaagctttactcatggggagctgatgtctgcagataagtgtggtgtcagaccctccctgtcctctccatactctgactcatcagctgtgcttattatatctgttcatagcagcttatttgtgctaaatctgattggttgtatcatattaccgatattttgtggtgctggagaagacccttgagagtcccttggagagcaaggtgatgaaaccagtcaatcctaaagaaaatcaaccctgaatattcactggaaggactgatgctgaagctgaagctccaatactttgactgcctgatgagaagagccgactcattggaaaagaccctgatgctgggaaagactgatggcaggagaagaagtgggtgacagaggatgagatggttagatagtatcactgactcaatggacatgaatttgagcaaactcctggagacagtggaggacagaggagtctgacgtgctgcagtccatgaggcggcaaagagtgggacacgactgagcgactgcacaacaacattaccaattatacttttgactttccctcacaaaaccctgcactcttcag

SEQ ID NO: 59649 - DNA, 1190 bp, Bovine  19866880566914
  misc_feature (1)..(1): n is a, c, g, or t
nactcaagtttttccataccatcttatgggaaaccccgaaggaattctgtggttaactcaatactttggtcttttctactcatgcctcaactgactttagttctacagagcctgaaggcaaacacaacttactattgtgataattatcttctaatgagcacataaatccttctatttaactgatagatatgactttagaacacatcttcatcttattatcctattactgttatgaatatgacaaaaatttccccagaaataaaaataaaattaagctttcttgactgactattcattcattcaacagatatttattgaatgcctattacacaggccaacacatggatacagaggatgaatttctctggctgatgggccaacccgaggtcctgaagacattgtctctcccagaatgtggacacggtaaataatatcatcagtaatgtgaaagagtttgcttaagagcagaaggagggtagaatctgaagttcatgcttgagagactagacttccaataggagaagataaaaagattaagaaaaaaagaagagctgtttggtgattgtagatcataatcctgtatcatatatttgaatgctgctaaagactagattgtgtatgtgtgtgtgtgtgtgtgtattgttgggcagttttattttaaatttaattttaatttttgaacagctaatacattcacatgtttcaaaaaccaaaagacctaaaaatgtacctagtgaaaagttctccctctgtctctttccctcatctgtcaatctaagtaagagagtagatcttaaatgttctcaacacaaaaaacatggtaactatgggacaggatggaggtggtggctaatactgtggtgataatcatgtggcattttataaatgtatcaaatcaaccgaaatgggaaggaaatacaaaaaagaggggatatatgtatacgcatggctgattcattctgctgtacagcagaaactaacacagctttgtaaagcaactgtgtgtgctccgttgttcagtcatggccaactctttgtgacctcacggactgtagagcccaccaggatcctctgtccatggaattttccaggcaagaatgtttggagtgggttgccatttccttctccagcaaagtaattatactctgattaaaaaaaatcaattaaaaataaataaaaacattatatac

SEQ ID NO: 59650 - DNA, 1477 bp, Bovine  19866880708907
  misc_feature (1)..(1): n is a, c, g, or t
ntttggggtgagaatgggggcgcagaagagaactcttgttttggtgaaatggatccgcccactcggtataccaacattctccatctgctggctcctctacttttccactccatttgactcccccacctgcaaggtcagctgctccaaggagcaatttataaacttgcagctcatattgtggttgctgttccagaactgacatgaaattaaatcagtcttgagtgccgcaggatacaaaagctaccttccgagtttacggagccctccacgactcctcataaatcttggaaaggtagcattccaccagtaactgcccagtttctctgctcacaaaaggaccttgaaatggaaacaacgggagttttctttgaggccatatttcataccacggagagaaagatgtatgtggaagccacattcttaaatgcccttttccaactctaggcgagcactggggaagtcagtgtgaaataaacccttaacttatgcctccatgttcaaaattatgggggccacaggatatgaaaacacccacaaaaaatctgtctgtactcacaaagtttctttattgtttttcaagagcagaaggtaagtttttaaaaacgcaatgagtctagaaacatgcctttgctacaaatgtgtcacccctcaatgtccagagactccaaaacttattactgggaggctcatcagtagactgagaaggaagcagatgctgtcacgtggtcctattgaatctacccaatggtaactcattcatgtcctttttaatgttttaaaacttggtcttaaacgatgaatcgaatctgccttaacattgtgggacacagtctgttactaagtcctatgcaaagtgtcttttaggcattaacatttattttccccaaagctctctgagcagagattattatgatcccctgtgatggttaattttatgtgtcagctagctcagccatggtacccagtttttggccaagcaccagttgagatgtcactgtgaaggtatgttttagttgagattaacacttaaatccatcgactttgagtaacgcagtttaccttctgtaatgtgagtgagctcttctaatcagttgaaggccttaaaaaatgactaaattccacccaagaaagagggaattctgcctccagactgcttttagactcaggctgcagaatcagtcttccctgagccccaggcctgccttgcaaatttcccactcaccaacccccacaatccatgcaccagttccttaaaataaatctctgtataaataaatggatagatattatatctatagatatattgcattatatatatggaaagaaaaagagagagttctctggagaaccctgactaataatctctattgtacaaatgatgaaacaaagtctcagacacatccaataatttgccctcagccacacagctaggtagtggcgggcagagtatgggggccatctcttttgccgggccatt

SEQ ID NO: 59651 - DNA, 848 bp, Bovine  19866881016558
  misc_feature (1)..(1): n is a, c, g, or t
naggatgaagattaccacagttcttttcaagacaggtttaagaaacagcagttagaacaaaggaatagcaaatggaattgtgtattgagggcggtaaaggcaaaaacacacagcccttaagtattagttgtccaactgcgcaatggattcctgatggtcagatggggggttatgtgacttactgggtctacattccaatttgacaagagtgaagaaaaagcagaaatatgattctgatttcactatatgtgaaatcatggttcctgtattctatataaaaggtagactctctgtttctcttcatattttctgccagtcactatgtacagggattatccttgctaataagttcaggttggactttacctcgaattatctgagtgggtagaaagctcatttactagaacacacattgtaatgataaggagtaatatgtgtaataactattaagctagaatacaaatgtcaatactggatccctgcttaataatttacagtagggaaatgcattcgacaatgaagtattgaattagatcctaccacttggtattaaaacactgtgttgaaaaactctgtgcatggaaccctgtgtgctgtgttcccaccagaataaattccccaccttcaggctgttcctaacacacctgatgtcatgttgagatgaggccccaattaatagaccttctgttatacatgaattttactatatgtagcgtctgttatttctgtatattttgtttgctgctgatgacaataaatgtaaaatctatatagtcaccccagggattattgtgtaagccttctattattaatacatttatttttagattgcaaaaacacctccatca

SEQ ID NO: 59652 - DNA, 949 bp, Bovine  19866881084816
  misc_feature (1)..(1): n is a, c, g, or t
nataaaataaacttacatggtagtcttgggaggacttgtcttctgtggagggcatcacgcaaaaatctaaaagtacctttgagagaaaaagactggcaaagctattgggcaggagactagatccaagacggaatttggtcccatttctaaaataatacccacgatattaccttccccttcctttgcttcttgtacctcaacgtcttgtacactatgatctaagtcattcaggaaaaaagtctaaaacatgaagaattaacacgtaccactgcatgcctcagcaacaccaagtgatatagaaaaatacgcacctgagaatgaaattgcatttactaaattttaggtaagaaatattccatttgctttgcctaaaacttgatgtctttctgggttcctagaaaatatgtggatgattgaggattcctttgcttagcattttctagtgataacttaattgtctctaaccgagaccttccagctgagtcctgagttcttcccacagtctaggttgcttcttctgtatctgatcctgtacctgatcctggaatattatgtttgcttctgtacctggcttactgagcaacactgacaaagttcacatccaaagtggtgtggacaggatgttaggccacggatattataatgacaaacagttggacgccctcgagatgctcagttaagggagaaatcacttaagagttaagcgttagatcctcccctgggaagtgtagggacagatattttttgtgggggttcctgtctactacataaacaatttgagtaaccccaaatctgtgtgcttggacctttctggtggccccaaatcatgatcctgagaaagaaattctgcccagtcagtctgccctcctgaaaccagatgtggacacaaagccccaggtaaccccattaatgggtcccttaaagttcctgggacatctggtcgacccca

SEQ ID NO: 59653 - DNA, 900 bp, Bovine  19866881105649
  misc_feature (1)..(1): n is a, c, g, or t
nttctcccccatctgtaaaaaaataataaacacaattcttaaactttctgttgtgtgcaacaacagaactaccagttgaaattcgagattattatgtttaggagaaactgattggttccaatggaatcaatatgtgaactgaaatcaatccaatagagtccttgttcattcatggaaattagaaatgtgtgcaaattcaaggatggctgttataatcactgttctgactctttatctaaatgctttttcaagaaggtaggttttgaccttgatttccccctgaagtcatgaaggggcattactttcaaagctggtcatgctgtatggagatacccacattcacaaacatacaacagcaacatagtactgggagcatgacactttacctttaacccaggcacacatcatgtattgaattaaactacaaagtaacatgtgtcagggcttcccaggggctcagtggtaaagaatctgcctgccaagcgggagacagtgggttcggtccctgtgttgggaagatcccctggagaagggaatggcaatccattccagtattgttgcctgggaaatcacgtggacagaggagcctggtgggctacagttcattgggttgcaaaagagcaggacatgactgcacaactaaataagaacaacatgtattaagtacattaataagcacgggctctgtgagaacatcacagatttgcatctttctttactgccatctggttggacaggataaggagatgtttatgataccaagaatgaaagaaatctataacaggaagtaaaaaagagcccatttatctccaagatcctatctttgtaataggaggctagttctaaaagctacccagacatattttctgttaaccctatcagtaaagtccatctaggata

SEQ ID NO: 59654 - DNA, 903 bp, Bovine  19866881481060
  misc_feature (1)..(1): n is a, c, g, or t
ngcctggagaattcctggactatatgtagtcctggggtctcaaagagtcagacacggctgagcgactttcacttcacccctgtcttgtccaaaagtaaaatattttcattttaagttacgatgaagtgcaggttaatctgtgtgccctcacttttcatgagaacacgtatgactactggacccactgatgtgaccaccactgttgcaaaggtctacaggcttttgcaggcttttgtacagcatgtaagcacagtgtcttaaggccctgctagtaaatttcaagcccactctgactgtagtcaaagggacaacacacagacttttagatgagtcattaaaccaatagtgattcgctgccctgttgtccttcagattggtttggcagttggtgacattgctgaggtccagaaacatgcactgttgaagagaattgccatgcaggtaagtgttctattccatcatgacttactgaactcactaatgacttcccaattattcatggataaacactgctgatttctgagaacacagttatttaatacaggcattgtctgagccctgagaggcaccccaccctgccggttctttgtgtcagtggagcattcctgctctggtctgagagtcagtaatcatgaaaaagatttcccccaacaacctcagcagagaaactgggtaattgcctgagcctctttctgtgttggcatttggccagccaggtagttagaggctggaccaagaacgtcagtgattcttgtcaataaatcccaaatgtactttaggtggaacttcacaccagcttggagaagaagctgccgctctggttcctacacaaagttgatcagaaatccatcatcgtgtatcccaacagacccagatacagcagagggatattagtaagtacat

SEQ ID NO: 59655 - DNA, 625 bp, Bovine  19866880525280
  misc_feature (1)..(1): n is a, c, g, or t
nctgctgtgtgtgagcaacctgctttctttctttcttttttaaacttgtcattttacattgcagaatagccaagtaacaatgtggtgatcgtttcaggtgagcagcaaagggactcagccatatatatacatgtatccattctccccaaaactcccctcccatccaggctgtcacataacgttgagcagagctccctgtgctgtatacagtaggtccttgttggttatctgttttagatgtagcagtgtgtacatgttcatcccaaactcaactacccctcctcctaatttcttaaactctgaccttttgttccacacaggcaggtaccttctctggcagtttttgggggatggaggagaattttgcctagagagaacccccgaactgcagatgttccccagttgttacagtcctagaaaggaagagccagctgccagctgccccgtgttcaacctgggctgtggctgtgattgggttctgttgatgtttctggagcactgtcagagtttgccagtgtctgactgtgcccacagctcccgatggggagagaggaggttgagaacccccagtcatcccccatctgggtgttctttctgcctggggcagggactgctttgacacgtt

SEQ ID NO: 59656 - DNA, 1678 bp, Bovine  19866880957792
  misc_feature (1)..(1): n is a, c, g, or t
ntaaatatatatattttaaattctcccttgggtcttggctttgaaaagaacaagacaggagacctcatatggtcactgtgcagacatcctcaaaatgtgccttttgcattttgttgctaggggtttctgctcacctttacccttaacaaccctcctggtcaggctggttgtctcttttgttctcttttgtcacactgctcaactcttaggaaatccctttacctcgggggttgctaaataatgaaggaatacgtccccgagtttttactcagcttttacataaaggaaaaggtctgactgtgtcagcaaaattgctcagtctgtgagttagaaatggtatcttgcatatttcccgttattcaagaaccaaaatagtatctgggaagcccccattaaatgctgcctcctccatacccctagtacttcagctcctcacttcccctgctgcaccaatggaggggctgtgggcagtgtctgttgactttttttttacacatgattacttgctcttgatgtttgatctctcacacattcgaaggcacttggcacgtacctctttagtttttgttctgtcttattgtctctctctctgtcccctctccttccctctctgggccttctaagttatttttttacctgcctccaacccaacttgcactccttaagggcacagcttgctgctgctgctgccgctaagtcgcttcagtcgtgtccaactctgtgcgaccccatagatggcagcccatcaggctccctcgtccctgggattctccaggcaagaacactggagtgggttgccatttccttctccagtgcatgaaagtaaaaagtgaaagtgaagtcgctcagtcgtgttagactcttagcgaccccattgactgtagcccaccaggctcctccgtccatgtgattttccaggcaagagtactggagtgggtgccattgccttctcttaggtttctgcttatgtttatgtatgatcttaatatttataagtagatacagtaagtaggtattgaaatagtgcattaaatttagaattcaaacagcctaactcacataccctgcaaaggagaaacctatgcccagaggattaaatgacctgtccaagctatataggttcagatggaagtaggatccatttctctcctcaaggtttgggagctttgtgaaagattaatgtcaaggcaactgagcctgaatggattgtgttccccaaagttacaactcatcaaagttcttgaaagtgtagtcatatcttctaggactagggactttcagcctgtcatttcagctgtctctctgtttggggttggactgatgtggaggacttctcttgttctttaattagctgctgagattagggaacgtgcacctgggcacaggaagtctctgttctacttgtaaaactggtaggttggctttttccttgacctgtgacttcagaatgtccttccgtctcttgggtgctaatggagacatggagccatgtgctggggacaaggtgaagggtactggataagctctggcctggcaggcagaaagcagcctagccagggcccttgtgagtggtttgggggaattggaagtagaagaaaggacatataatcaggtgccagaagttcatagataggtcatttgggcggtagggtggcaggaaacagtagtcatccgtcag

SEQ ID NO: 59657 - DNA, 734 bp, Bovine  19866881100018
  misc_feature (1)..(1): n is a, c, g, or t
ntgggtgtgccccggaaggaccctgagtcaaagagattggccaaagacaacccggaaactaaccccatcggcatcagacccgagactaagagccacatgacacagcagttctcctggttcccttgccctcttgctctccacccaggcatccctttccaatagaggctcttgctttgtcagcatgtgtgtctcattggacaattcatttccaagtgttagacaagagccccctttcaggtcctggaaggggtcccccttcctgcaacagagggagaaagtaggcacaaaatcttgaaggcagtatagcctcaaagtgctaatatccattattcctgagtgattcaaaatcacatagaataaaaaagttttgctttgggtgtacacacggaacatatgatttatctatgtaaaaaactttgttcctcaaaagagactaaaaatgttgcaacacttacttcaactttactaagaatataatgtacaaaggtgcagaactagatgtgttccctagaacaaggttcctcaaagacggagtcccagagaaaagactcaagaacaatgacactccagaaaacctcgtctaaccacttcagtcctcactgctccctttccctcagccacccaaaatttagagactacaccacacactccagcattttcagtagctattgtcttgggggggtgcactcgtttcccgtgtggttggtcacgtcaactgggagggcaggatctga

SEQ ID NO: 59658 - DNA, 1570 bp, Bovine  19866881426636
  misc_feature (1)..(1): n is a, c, g, or t
natctgctcatgattttggagggcaggagtctggaactagggtgttagccgggccacactccgtccagcggctgtcaggagaatccttccttccttcttgcagcccctgatggcaccttgacttgtgattacatcactccaatctctacccctgtcttcacgtgacagtctcctcctctttttgtgtctctcctgtgagtgtcttggtctgaggacacctgtcattggatgtcaggtgtaccagtataatgcagggtgacctcattttgagatccttaacttaattacatctgcaaagtccttttttccaaataaggtcacatttacaggtttctggggttaggacctgggctgtcactcaggtcactgcaagggtggaggagacaagaagctggagttacacgaaaaccttttttttacctggcagggaaaggaaacgaggtgctatggagagtagcttggctgaaccccttacatgggcacctgcggtattgctgtcactctccctggaagctcttggattgaattgctagctccacagggagaggactgaggtggcctgaccaggcctggtttcaccagagatagttgatgagacgttatctcatctctgtctaacttgttcccgtataatgccctgttggtcttccttccataagcccctttacttccttctctccttccttctagatgctttctcttcagtgatttgctttcctgtggtactgttttatccccatcatggacagtaaatgaagcagaagtgtgtattttagtaatcttaatatttatcaagtaactctctgttgcttgtcatctgagctgactcagctgatgatggtgctagagcccagcagtgaccttttccctttgacctttctccttgctaggctcttgatatttggccacatgctttgggatgtgattctcagaggcattgggactgcacaaagcatataccttcaaatgcttgtgtctgcttttccttgccaagagcacctattattattggacttggggagaagataggcctcctgagaccttgaatcacctactttcattggacttttcttgatttcctgccagatctagagcttaagccatcatagtagtagtgtagtgttaattgatcagttgtgtctgactctttgtgagcccacggactgtagcctccaggactcctctgtccatgggattctctaggcaagaatactggagtgggttgccatgccctcctctaagccattatcagtggttaaattactttgttaaaatggagatccccccagtggataagaatacttctgaaggacttaaaagcccaatcagcacttctcaaataatactgtgtgttagttgctcagtcgtgtctgaatctttgcaaccccatggactgtagcctgccaggctcctctgtccgtggaattctccaggcacaaatactggagtgggttgccatgtctttctccaggggatcttcctgacccagggattgaacctgggtctcttgcattgcaggcagattctttactgtcgagccagcagggaagcctagagaaacacggcagat

SEQ ID NO: 59659 - DNA, 3361 bp, Bovine  19866880347102
  misc_feature (1)..(1): n is a, c, g, or t
nctcgcctattattattctcttcctctgacctagggcgtcaatatgatcaggcctgtgactctgcctgtcctgttttcctatttttgcatttaatgctgggacccagctgcccccagattaccatcaaaactcgcagcaaagaccagaggggtgagatggtctcattgctccaacctaaggctccttttttctgagtcttctaccagacaatgccagcctctgcattcccaggacccacattctggaaaccagtctttttaaaaaatagtcatctctagcttcactaagccccaaagtgcctagaatgacagttttgaaactcagagatctagaagaagatcccagtccacagctattatcgctgtggtcaactgtacaaaagaaaaacttcgctcagtgcaccaggacactaacaataggacttagtgcattcttacactttagcggggatttgtatccatactctgtccaaccagaataagaaaaatgaagtccgacttcaactaaatggagccttgtttcccccagtgatggaaacccagccctaaatcttggacacatcaccataaagtagctgaggatactcttcccctgcacctgtgcacaggtgtgtgggggtgctcttggcccctccttctgcttctcagactgtgccccagaagataagaaagagaaaggactgtggcaagaacttaatctcagtactatctctaaaagctttggagtgaaggaggtttctgtttaaattacttttatctattaaaaagttgtcatttcctcctgctttagggcaagggataagggtgggaaacaccttcaggcttcattgttaggaagtcattgaatgttagtcctttgaaaaggaaatttcagaaaggtaactaagagccaccaatcccctcaagttgtgtccctgctatttcagtataaacaagctgtattaatgccaaatagaatttgccttgtacactgatggaatgtgtcctttatgctgtctcccctgtaaggcctcatactcaccactcaaaatttagcagactttctttgataaattactcaatgtaatccttgaaatagctagactgcctgcgtgatatggttttagaagtcttcaagccatgcctgtctataaaatattcacttgtggactacaaaagagggggtcacttttaatgatgagattgagaacatgagaaaaggagaaacagaatatccacaaattcaaataatttcattttacaatactgaacttagaacattacatcttactggtttacacagtagtaaaggtaaaatagaatcatccgtatgtgagacatggacaaacacagatttggcaagaatatgaagaatgggcgtttcaactttcagaaaacttttccttcttcaaaaccgtttatgacatggagacggacgcacatttagaaacttgtaaaatgtatatatagacaataacatataaatctatgtggaaattttttaattgggaagacattgtgctgcataattaaagatattaatttctgttctttttaaaagtaaatgtttattgtgtctcacaagaactggcagcttggaaatgcattttccttgcttcttacaaatgcatctctaagcctgtaagtcttcaagctctaaggaggttttcattaaaggagccagctgcctctttgtgtggattggttgtttaaagctgaagctctaaagtggaaacctcagttttgacattctgtaggcccttagcaaagaagttccatttaaatgtggggaagctctcaaacaactcctggatactagcagaagagcagaaagtacaggaatacaatgactggaataagggagaaaggagaataagagaagggacttggaatcctcctccaaggtggatatattaaaaagaaaatcccagtaggtaattttacccaagtttaaaccagctgccaccttggaagaaaattccctttgtttcctgatttccattatcataaaactattaaaacatcaataagaaataaattaagatctatcaaatgaataaataccatctcacctctatcttaataagtgcatcctttcagctcaatgtttaggagtgattatggcggtttttctgccaagacttggtatggagcaatacaataaatgatattttacacatggtgtgtttactagatgaagttaaaatctagttcaaattagagtgtacaggttgatatcattagtgttactcatgtgaagactttgggagattctggtcaaggtgctgggcactactaagacccaggtctggctcacgcttttgagaagtgtgacaatgtggggataaatatccttttggtttagctcggattctgagttattttctctccaagcagtgcagtaggaagtccgcaccaattcctcagaccagtccaggtcaggataccgactcagctgagcccttgctgagacctagaggaaggggatgggctggtgaggttgctcaggacgcccggagcttgttctcgtgaaaggggcccgggggacccagcagtcagccaaggaggctgcgaggccggcgtgaaccgcttgctcagccattgtcctagccagtgatctcggggaactgtactggagtgagggagatatcaagacaccttgtcagttcaaagcattttaggtttgtttgaaatcctctccacgtcaacgtaagcagcctctgtattcgaacagtgctttgaacagtgaaagggaatgagctgaatcaaaacctggaggtgtctccccgagacactttcaacgtgcttttatgagggtggagaaatgcagggagacgcgtggactctgctccggtggtgtcagccgcaaagaaaggcgcccacgacggtgggaggaaaggaagggaggaccaaaaacccctcatcgggggtctaaaacctctgaggttcctggagccccaggaaggggcttcgccgggaggcagactggaagccgaggtacccaggacccggcgttcgcgccaaccgggcctccggcgacaggcggagaggcgggggtggcgcggggggaggtggtacccagagacactgtgcgcgcccagcccagcccgcccggtgattggccaggctgcgggggtgggggtggggtgcagaggctgaggctcaggggtagggcagtgctttgtgtactcccggggatttattgggtgcattaatcgagtagaaccacccggcttaccctgttgggaatgtttcggctccgttgcctgccagcgaaatgaagcgaaggtggggggaaggggtggagtggagacctgggacgtcagcatgggctgaatctccgagcagtcatcgtcagtgaagtcccgctgcagacaggaag

SEQ ID NO: 59660 - DNA, 1476 bp, Bovine  19866880391606
  misc_feature (1)..(1): n is a, c, g, or t
nttttggactctgtgggagagggagagggtgggatgatttgggagaatggcattgaaacatgtataatatcatatatgaaatgagtcaccagtccaggttcgatgcacgatactggatgcttggggctcgtgcactgggacaacccagaaggatggtacggggagggaggagggaggagggttcaggatggggaacacgtgtatacctgtggcagattcatgttggcaaaaccaatacaatattgtaaagttaaaaaataaaataaataaataaaattttaaaaaaagaaaaaaagttatctgaagctcaggatgagactttctacagggacaatttacctttgcttctgtcagacagagaaactggccatctgagattcccttaactgaagttcagggatcaagatgatttaaagttgggcagcaatccctgaggggcttccccgatggctcagcaggtaaagaatctacccgcaatgcaggagacacgggagacacaagttctatccctgtttggggagatcccctggaggaagaaatggcaacccagtgcagtgttcttgcctggaaaatcccatacggaggagactggcaggctacaatccaaagagtctcaaacagttgaactgagtggttaaacaaatacatcagtccctgagagagctacttgtattgatagttcactcttactcctaagacaaaagctgctcactccttgaactctgagccaaattttcagaaatagcagatgtccttaggaaaaaagtgatcctaatcgccaagcttacctgtctaagtctcagcttcttctccaatcttggccttcaatcctttgttagttttttagtacattcaaatagtatttagctactttttctgatctttactcagcttttctagagtttttagcaggagtgttaggagttatttaatccactattaccagaaatagatgtctgaagtttatactttgtaaataaccaaataaccaaacttcaaagatgtaaattgctataacacagtcacataaaataagtaagaccataatactaaagttgtcctagaatgttgtacctttgctagaactacactaatatatagctgaatggggagccacttttcctgagagtgaagcaagattttcagtcttacctaatggtcagagtttctttctattgggttgtcagtttctatataagatattactaaaataaaagaaaaagaacacatattcaagagaggatacacactctcattcatagaatgtcaagcttttttatcagttccatatgatgagctatcatcatatatggaataatctgtgttgattttcttgattaaaaagataaatatttagacagtatttcaatcactcttctccaatgcctactggtaggaattcagggcttttcaacaaagttcgaagtacagttgccgtagaaaagaaggaaagagggcaataatgatggttagtgt

SEQ ID NO: 59661 - DNA, 943 bp, Bovine  19866880472792
  misc_feature (1)..(1): n is a, c, g, or t
ntgatttgacatctggtacactttgactccagttctatgctcttatccatgtctctacctaaagtatccttcccactccagtgacaccagccccaccttaccctttcctttaagactcaattcagatgacctattcttaatcctctacatgaaatgatcttttccttctctaagtatccaaggcaaggatgtccatacttttttatggcaggcttcacagttagcatagttattcttttttaggtatttgcccaagagctcaattgcaagattctcagggagagtccacatttatatactcccatacacttggtaaagccagcacagagccttatacatactcaattgtagtatgtatatgtaggtactcaacatacatcaatttaaataagtagtcaaaattacaaatagcaatttccttaacttccttcaagttgcattgcaatgtgtgttttcttaagactatttctatttttaactacagcatatacttggtaaaggattttacaactctctaaattagcccatggtgattacccctactgtgcaatttaccactattttattaaagcaagattaaagataatacttcattggaagaagtaacagcggcattaacctctatttaccttgacataataaagctttaataaaacatgggcaaattgcattgagggggataattattctaacataaaatttaaaaggaacttaatttcttattctgcatgttcagtgctttaagattagtgtcattaatgtcctttttctcatttatagaagatacataaaaatgttcaaccctctccaatttgttttcttattaaataattctgaatttatactcaaattcataaccataagaacataactttaaatgcaagttttcagaagtaaatatcctcatagaatgtcagagcagggagaattctagggaaaggtt

SEQ ID NO: 59662 - DNA, 870 bp, Bovine  19866880627278
  misc_feature (1)..(1): n is a, c, g, or t
nattatatctacaatttaagtatatttcatatttttcaaagaatgtatggttttagatttttacatgctagtcacacacattgttgaaaatttgatgatgatatgtcacaagaagataaaaacggtaagatgaattcactttttaaaattacagaacatgacatagttagctaacagggacaatcttaaagcttcccataattgaagaatattagaaagaaaatataatgccattatatacattatggtgttctttcacctttcaattagggtcatttttcttggagagacaggcatacaaattttttaagagtataccaaaagagacattgaaaatgctttaaagacatggaacacttacatgcatgaaaggtttaagaaaaactaggacttttgtctggtgaaactactttcattacatggataaaactcagatctattcacctctagcttctgtttctctgcttgtgtctaagaaatttctcagatgtcttgctgctatctcaattggatgaaagtcttgtcagtcaataacattccttaagcatcactgggtggctaataaatatttctgcgcattatgacaggtaccctagggagatgcaatggaacagaggatacagtctctggcatcaaggaactttcaatagtactaattattcacactgtataaacagactaaaatagggtttccaaggaaatacataatttaattattgcaaattaaaacaatacaattattatatgtatgctgaagtgattcagtgtgtgatctgagtgggggaagcgaacagaatattttatatcatgtattataagggtcaaaaagatacagattaatgagctaaggaaggagagtttttggagggt

SEQ ID NO: 59663 - DNA, 1131 bp, Bovine  19866880629549
  misc_feature (1)..(1): n is a, c, g, or t
ntataatatgataattttttgtctcctctgactttcctgatactcagattgtttaaaagtattaacatttgtttgtccagttaaaatgtgagtcctgttgctaaatgctatgaattgtaatctgtttaataattaatttgattaatatttaaatgaaacattttctgatggaaggagccaatgtcataaagaaaaggaaattctttatatataacaaattgatgaatgactccttttgatagggagaaaaagggactgttccttggccataaatgcttttcttaggtttttgacgtgtatcaggtttttgatgtgtatctgagagtagatttgagatctgtgaggtgaacgacattactggaacccttagacagggaggtaccacctcatttcctttgaggcctgtttcttaaactgggagaagatagatcactaacccaacaaaggggaaattaacctcaggctaaagagtccagggtaaaatacagtgtgttcagtttgggagtctgtagggttagactgaactgctaattgtatagctaatatttagtcaggcaagatatcaattaagtatcatgggaaacatttaaagcatttttaatatttatttaaataataattacattccatttgaaaagattttcaaaaaggaaattagttctgattataatactaacaatctatactttaaaatacatgagccagtggattcaaagaaccagcagtccagcacagaacctggcaaagagattcatagattcattgaacaaatgaatgacggcttagatactaggaaatggagttccggctgctgagactacaacactgagcactacccccacctagtggcagtctaccgggagtgcatgggtaattacaaagtgaaaacaggcccctctggacgggattatacctgctttgacttttcgctgagtgaccccttacctacattaaattattctttcaacattattgaacttcctgagggaaacagccctataaaatccaaatctcaattttctttggaaatgttgaagattttgttcctgacattcatcagtcaatgtagtttaatggaagctatagtctttttttttttgtaatttatttttacttatttttaaaaattaa

SEQ ID NO: 59664 - DNA, 833 bp, Bovine  19866880745599
  misc_feature (1)..(1): n is a, c, g, or t
ncgtagcttgggttcaagtttgccgtgtactaggaacattttctctatgcctctatgttagcaatgggagcacaacatacaaagtatttaaaactttgcagagctagcttcagagaggctttgctgaatgattgacctttgaattcacaagtcagtgaataaatgtgtctttttttcaagtcaaaggaataatagcttacacaaagacagattaaaatgagaaagatggcttcaatactgagacatcctttttgacaaaagtgcttgttcaacacccacaagggaggagtagaagataaaattataaacgtaggtagtcttagttttaggactttatgtgttatatccaggagtttacacttaattctacagacagaattaccagaggttaagatggaaagcaaggtgatcagatgtgtgttttgtaaagataatcttggcattgaggcatatgaatttttttggctgcactgtggggcatgtgggatcttatttcccatactggggatcaaatccattccccctgcagtggaagtgcagagtcttaaccactgtgcctccagggaaatcccaaggtgtatgaatttaatggggcaaaacagaaggcaaagagacaggttatgcacttgtggtaatagagtgtaagtgatggggagagatgtttttctcaggccacaagcttgagccctgaacagaacctcctctgtctcagacactgatgatgcttctttatcatacttatattttatagtaataacctacatgttagaccttcaaatggcacggccttgaaaattcagggaactcaatgcttttatgagccatcactggtt

SEQ ID NO: 59665 - DNA, 890 bp, Bovine  19866880757431
  misc_feature (1)..(1): n is a, c, g, or t
ntactgggttaaattggacttaaagttctcttttgagtttagtatgcactgaaatatttctttgtctaaaagcgagttagtggactgggcaatgcacttaaaaatgaggaaaagtgcttataagaatcactgatcatggatataaagttgaaaaaagttagaaagtatgtctaatgatacattattataaaaaataagttaaaagcccaatctcctaaccgatatttagtattgatttttctttgttacctagtttagggaacataattatgaaataaatcaaaagaaacagtagttttagggagcattagaaatgacatttaggtactgtgcatgacattgaagctcctgaaccctgaggcactcctttatttaatttaaagacaatgtggctaaagctgactagattattttctggtatgtaagaagctgtttgttgttagaaaatttgactaatttgcttcccatttttactaagaacaggataaattacacataatatacattttattcacttagaattctctttggaatggtgcctgtaagaggcaggggactccaagaggcttatgattctgtttttaaaagaccaacaaaaaagaataaaaagatatgagcttttctcaactaaatgattatataaagaggaaaactttactcaactctagattaatgatgttactcattttcttctctttggcaatgctgctgataggggagcagtgacctcagactttctccttcctatttatctgcagatatatcacttttctgtttctgaaagaagtgcttaacatattatatgaaactatgacaaaggttttaccactgctattttaaaaaatactgtgtacatatccctgtggtttggagaactctttcatttcagt

SEQ ID NO: 59666 - DNA, 1578 bp, Bovine  19866880774397
  misc_feature (1)..(1): n is a, c, g, or t
nttctagaagacagaagtcaagtttggaggtatggctttatttaatttaaaaattttcaaattatggtagaatgtaatttttaaaaagttgactaattcattcacaaaatgctacatttgcctatagatttctcaactttctttaaaaaaatattctaagtgattaagtgaagtttttttaaagtgttattatgcattcccattttagatatcaatatttattaaggatcctaatacttgggttttggaaatgagcacaaatcttaaactgacaaataataaagcaataagatcttattaataaagattaatatcagtcttcaaacgtatcccaagcagaatcagcatgttcttcaaaaagaaacaaaatcactgtaaagatctcaacttagtcattaaactttagaactaatactgcaaaatgacttcccaaagttagcatacattttcaaagtattgttaagagttctggatagtctattataagattttatcatttatgacagaacacttatggcaggatcactaaagaaaacctgacaactctaaactgacaaagtgtaagaaattccaaagttgcaccgacaattcagatctacttcctttcatgcccagattcacttaatttctcatttggttttcaaacctcccctcagaagcaattggaacaaaaccatgagcaagctcaatctccatttgggcatgtaacccttttacaaacacaattacagccaaacactattgtaacctgatttgcatttgcactaagttacaaagcacattggaaatgcctgctacgcatactacagacttattaggaggatatattgcagggcttctgtgaacactaattaaaaaggttttatctttcccctctggtccactgaaattgttcaaatgccttgtctgctacaactttgttcaaaaacagttttcaaacatgtgatcagagctaggcaactatttcaggtggcttgattctgtttccagggtgtacaaggccggagagacaaagtttcagtctaaactttgagcttcctttcctttgttattttgtattgcaaccttagcattatccaactgtggacttttatctgtgaatatctaaatcctgtcttgtggaaaactaattactgaaccactgagagcttcataatgtcctgcatttaagtcctgagcatcatacataatgcataggcagcagtctctgcactctgattacagaacactgtcattaagtgagcaaattaaagatgtgaataattcactggctgagcttattgtcagtgctgcattgtgaaattagaatttctaataagtactgcaatttttttaacccaattaacacagagaacatcttgagactgattagtacaataaaaattattaccttattcttttgcttcacaacagccaaattaaatactgtacttaattatgcagcattcattccttctctgctaaagaaaagcctatcattttaataagagttctaatatttgtatgtgagctaaaaatacagcacatgcatctgtagctctctgtctttttgcaaagttttttttaagagtctgaaca

SEQ ID NO: 59667 - DNA, 1515 bp, Bovine  19866880867986
  misc_feature (1)..(1): n is a, c, g, or t
nttaaatgatgaccattcaaaaaattatcacaaaagcatgcattacccagttgccagtcagaggtctgaaatagcatttttaagggtgttaatattgagttcacagatcatcacagaatgattatttatcatatttctatgggaagaaggtagttgaaaaaatacacctcacttaattatacaaatatcatattgcttatttcctagctcacattctatacaaaacacaacacttaagaaaagttaggtttaattgcccttaaaccaatggcacctacaactcaagtatttccttcatcacacattggaatttaatgtcaataactactaatttaaatcaataattgaatgaaactttgtaaaaagtttgaaatacaatttcactgttccacagaacattttaatatctcaaactgggtcaaccatagtttatccttcaagggggattcaacaatttcaaacaatcatataggtccagaatatgaggtcactcatgatttacagacgcaagggtctgacctcagacaggcaagagtgagctgtttgaatggcaagtaaacctagatctcagtgtccaatttttttgctcttgacttactcatacaagtagagtaacacttaagagtgagtaagtgagtgattttaactttgcttctttgtgtatattggccatcaggaaatctttaactgctagaaaatagaatgaaaattcaaattcttagaatatgactgttgtctgaaaataaaagtttagaataaattaaagggtagagtgtagaacgcaacaggccaacagggagcctgaactttggcactggtagatccaccataagtaagtgttccagtaatgaaaaactcattcaccaagtgatgggtagaacttcagtaaacaatggaaatatagttaacctgtttgtgactattcatgggaatcaagacactcagaagaaagcctgaacggcccctggagtgaagaatagttactgaagcttctttcatcacaagcaaagtttggtcaaagaattttaagaagtgtttttattctttttgccagatagaaggcaacgaggggaaacagattaggtgccaagctgaagcattttcttctgagttgaagaagatcctagaggaaaaagacaataggtactcagtgatatccaaccctatctgaactgttttactgttttacctctgagaacatgcacatctcagaggaaactgtgaacagtatagcagctgaaaaatatcagttcttctgattggtggccctgctgcagacctggtgattaagtcagattttttctgtccttctttaagccccaggatattaaagggcaaacataaggacctcccacacatgaactggcagttcagtgaaaagtcttgggtcatagccaatacttttgcagactgattttaccggtgtggtgaatgacaagtggaacagaatcttgctttactgaacatcagttaatgattctgctcatcaaagatactgcaaagggccatccgcag

SEQ ID NO: 59668 - DNA, 1266 bp, Bovine  19866880878329
  misc_feature (1)..(1): n is a, c, g, or t
ngtagtaaatatttccaggtttgtggactatataaatcttggtggcatatttttgatattgtcattctagtcctttaaaattgtaaaaatctttctcagttttagtcatagaacaggctgtaagttagatttcacttggaggccatagtttattgacatctgtagaaagtaaagggaaaaaagagttaaagagtaaatagctgttcagatttagctatattgctctttttttccattgacgtatagttgattttcaatgttgtgttattttctgctgtgcagcaaagtgactcatatatatatatatatatatatatatatatatatatatatacacaccacacatatacacatatatacattctttttcatattcttttacattttggtttatcacaggatattgaatatagttccgtaggaccttcttgtttatccattctctgttacaattgtttgcagatttagttatctcttttaacatccaagttgctgtggtgtctatgtatacattacagtagcaaaactcagcaatgaaaagtcaagcaggttatactgatgtcagtagccttctagattatcattacattctggtagcaatgacaacccactccagtattcttgtttggaaagtcccatggacagaggaacctgatgggctacagcctatgaggtcacaaagagttggactcgactgagtgaacaacaacaagcaccattctagaggcatgtcttctagtattggagaagatgcttcataatgtcaaggtgagtcataatacaaaattgaaaggaaagaattgcagtttccagttgcagtcctgatgttattcataacagcagagctaagttctgttacaaaatccatccactgatgagaacaccaaacttatttcgctgaaagattgaatggtgtaggtatgccttcttcacaaccaagcatcctaaaatagaaatctactctttattgttgtgcccatctactcctcagccaacaatttgtagcaatctggttttgtgatgccctcccacttgcccttgtgatgccctcccacttgctcttgtgatcttagccaccttcaggcactccacttaacttcctggtgtaataaagacttttcagttcttatcttacttgagtcatcaactataagctgataactatctagataaaatgcaaacagccagaattcctctcccaaatgctctttacttgtgcctcctcaacaattcctccgagtattctttctcacattccaaaattca

SEQ ID NO: 59669 - DNA, 1702 bp, Bovine  19866880992461
  misc_feature (1)..(1): n is a, c, g, or t
naagctaggctgaaaggttacacaatgtatgattccaactacatgacattctttaaaagccaaaactgaaaacggtaaaaagatcattggcttctaggggtgggcagaacataggggacttttaggacagtgaaaatattctatataattttaataataaattttaataacattggagacagaagagattaaaagcattctgacagaaaaatgctgctttgaaaagagtggcaattagactggcagctgatttctcaacagccatagaggccagtgggaatggtatcatcattttactaaaacaaactaattttcaacatacaattcttcgtccagcacagtctttcaagacttggatgaaacagttttcaatgaagcaaaattaaagggaatcctgaaagataagtttagtagaataataataatgccaaagtgaaaaggaaggttatttgagctataggaagggagtaatgaaagtggtaaatgttgtgtataaattataatcgagtggggttaagaaataaagtacacagtaatactagcgtataaattgggtggggcataaatgagaattttaaagtctttgtttagtccaagagaaaagcaagatatatgtgaacttaccgagatatttgaatgtatgctgttgtttctagggtatcactaaaagaaaaagtagattatttaacttgcagcctgataaaggggaaaatagtgaaattgtcaacccaaaagaaggcaggaaggaggtgtagatgggaaaagtaggtgtataaatagaaatatagaataaggtggtagatttaaaactaaatttgagtcattacagtaactgcaaatggactactaattgctcatttaaaacatatactgtcaaagactgtaagctgtttataagagaatctaaaacaaagtttagaggaatttggaactgatagtaaaagatatgacaagatatatatcaagttattaaacaatggaaacaagctacatgagaatacaaacacacaaaaaaagatgaagccagacaacatgtaattaaggcttgtatatttaagtggcaaaatttacaaaactagggaatgataaagaagtcagaataatggttacccctggatggaagaagatgtgggagttgcaagagctagtcattttctagtttttaacctgggtatttttattattctctaagttttacatatgtgttttatattcttttgtatttccttataaatatgaaggaaaaaacccaaatcaagatttctggatcagtgtctgaatttaactaaatcataatacctctgtttccatagtcattttggaactggttgaataaactactcaaaacacttcttgaaaaatcaaatgaccagagaagatctgtgcttatagtccagcccagggacccattgggttttagttggtggattattactcatgtagcatcattttatcagttcgatcgccatggaacaccagatgaaatggtaagattttatgtttttaaactttcttaaattattgttaatacatttttttggtaaacaaattagaaagtgagcagaaacaataatttaacaagcttttgaaattagacatgctggatctttctaaatctttaaaaagtgataactaaaatctcttaagattgccaaaaggaaagcctacatctccagaaatagttagagaagttctgggggaa

SEQ ID NO: 59670 - DNA, 4369 bp, Bovine  19866881040001
  misc_feature (1)..(1): n is a, c, g, or t
naaatacaaagctttggcctatctcatgatgacaacaggtgaataagcccctactatttggcagttctttcattaaaccacctagaaatctgtcaaagatcttatacacaagcaaataccagagtaggagaagaaaaaatacaattacttgctttcattatttttggcctggattctgaataattccttaaaactatttaaaggaatttatgactttaaatttatgaatttaaagaaattatttaaattatttatgacagcttttcaggaagaagtcaatataaaatttaaaaaattgatgtctcaaagttctttcttcagtatctcaaggaagtaatttttaccaaattacgtaaaagcaaaggttagtaatcaacttttaatatattcaatattagaaaaacaatatgtcaaatcccaaattccaagccctatgctctgtcttatttaagtagaatgatgacagtatattacagtattaatttacgtatcagaaaatcattcaaagcactaaatctaatataactagcaaaataagatattatcaaaatggcagaatttcaaaagaatatcagtataaatatacttttaggatcaaatatcttcatttgcatatagatttacattaaccaaataagagctttaatttgccacaaatattgatacatcaatagagcaataatcttaggaactaactaataactctaaagttttcttgatacttaagtaactaaaaccctttgattagggtttattacatattgtttgttcatcctttcttctatcggttcaacacttacttctctctgggtgcttgaccctgggatacaaagaataatgagatactcctaactgtccattaggagttcacagtctgagacaacaacacacacaaacaaataactgtggtatttaaagtggcaaatattatgacagaaacaagaacaaaggatagatctggagcacagtggagggaaagattttatctggagagtttaaagaaagttcaaaaaagaaaataaacatttgatctggaactagaaccatgataagcctttcacactgaatttactctatcaaaaggagattcctggggtgcttaggaatttttatttcaaaggtagatatttgtaatagaaaaccctctttttttaaaagttcctaaaagtaactttaggaagttacatcctaaacaaagcagaattttgaaatttaacaacatgacttcatattagcttaattacaggacaaaaaacataattacaacctcaagtcaacaaaggcaaaaatcatttagcctgagtttgaaatgggaaaaataagaattaggttcttctttcaccaaacagtgagaactagctctaagatcctgcaaaagaagtctcaaaaataaataccacttgccaatgaagagcaaagacttagcacattttcaaaatgtaggctccacctcctgctgtggtaggaagaatgaaggaaggacctatcttttagatgtaggaactctacaagattctgcactgtggttgctaaatgtcagatgccctttggcaattccttatgactcctggctctgaggtaagaatcagaataaggaacccatacactgaaggataaaccccaatgtttccaagacccatagcccggcagacatttgtgtacccaataacgtttgttgtatgtgaactgattcttgtatgatcttagtaggccaggaagtacattctctcttgacttaagatttctgaaatagctctctgcatttcaattaatccattgctaaagctcttttttatagcatgtcagctgctgaaacagtgataatgatagcttctaattaacccagaaagttcagaggagagaggaagaaaaatgtgccttgttggctccagggcataagtcaactttatagacgagtaatgttaaaacttcacacatgccagaagcatctcctggctgcattcagaatcaggacaccaacatttataagacatctgacaaatcttttttttgaagtctccccagggaatgaggtttcccattgtcctgtgagtagccatttccatggaaagagtgttgtatatctcacataatcgcctgcttctaaattcttcttgacattctcttcctttaaataataaagttaaaataaatccatgcatctaaatgttaagaaaaaagataactcaatcttcatagttaaaaattcccccttcttctcattgtttccacaagaggaaaaacactcttagtctgagaggctaggaaatgttatcaaatactgcctacacttaatgttttatgttagccagttattatttttaatttttcaggaacaacagatcatatgctgcacaattggccttgcctcaggaaatatgcagagaaggcaatggcactccactccagtactctttcctggaaaatcccatggacggagaggcctggtaggctgcagtccacagggtcgctatgagtcagatacgactgagcgacttcactttcacttttcactttcatgcattggagaaggaaatggcaacctactccagtgttcttgcctggagaatcccagggacggggcagcctggtgggctgctgtctatggggtcgcacagagtcggacatgactaaagcgacttagcagcagcagcagcagcaggaaatatgggaaggaatttccagaaaacttggtaactcccacttgctcaaatgccacagaaagagatgtttttggctcaattttagtcctattgggaggctgaaaatgatgggcaaggagtatactcaggtccaagtacactgtacactgtacattttgtactctatgattctgagattaatgatgtgccaagcccgggtgtgaaaacactgagcacgtatcccagcaaagttgtattctgaaatgttttaacccctcataattaaagctgggcagtaatgggaacatttaagcttccagaagttttgatctgatcattattagcccagatctaacatctgcaattgtgtgaaataacttggggagacctagaaacacctcggtctgtcactgaagattgctgctgatattcgtcctgtactactatcctctataggacttatatcagagtttaccaaagggtgaattgtagtgcattaccacacatccagtggtgtagaggaatatgcagaaatgctggtccattcagacttttgacttcaataagcattttccgtgtcttccgcgtctcagacggtaaagtgtctgtctacgatgcgggagaccagggcttcgatccctgggttgggaagatcccttggagaaggaaacgcaatccactccagtactattgcctggaaaatcccatggacagaggagcctggtaggctacagtccattgggtctcagagtcggacacgactgagcgacttcacgttcacgttcacgttcaagcattttccaggactcctcagagaagggtgagaggttaggatcatgctcaccttgtggtgcccacagatggggagcaaaagatgtgaccgtgtgcatttaccactcctttatggcatcaagagcttccccagagaggtggtctattacctggatatctgcattaacatcctggggcagacactttcactcttcatctttctcaagagtcctatggaactgatagaagagttcacacccaagaagtaaaggaccacagcgcaaaaacgtgctcgaattacagagatttgggggaactccagtctctgtcttcccatagattcaatacctctgtctgcttgtgcccgtgtaggggcattcaaactgactaaaagtaaaaaaatatgcatatacattctgcaattagaacttgattgttgttttgaaatctttgctataaaaatgtaaaattgtaattgaaattcatttgaattcatcacagtaaattttaccattatatttgccattgaaagaaaaataatagctatgtgattctttaaatatttgttttaatttttgaaaaattggggttgctgtaaaaataagaggtttaaaatgaagtttcttatctgcaatatatgactaccaaatatggaagagattagcattaaaatgtcttaatcagaaattatatgttcactaaagcaagtcaagtttatttaaatgttgataagatttgaaagttttacatatatttaattttcatttttcaaaacacttaatgtttatctcttctatcataaatatataacataaagaaaacaatttttctttaccaaacctcatgttagatgcctttccaaaaatcctccattttacccctgaataccaaatacatcatctgttagatgcctttccaataatcctccattttacccctagtaccaaatacatcat

SEQ ID NO: 59671 - DNA, 1812 bp, Bovine  19866881074141
  misc_feature (1)..(1): n is a, c, g, or t
nttgaagcagctccatcgtagtttttattggaaaatatgtgaatacccttaaaagtgtactttaacacaatttagattttttaaaaaatatcccagtgtaagaggttcctgtttgtatacatctgtttatggaattgattggctttttgtccttggaattcttgttcttccgtatgtgtatttgaacatctgggctgaactgaaaaggaagaaatctaccttactcattttcttggaagtgatttaaaggaaatattatcaaagtgaaatgcattagaaatgtgctgcaaactgctaaagacctgaacattcattgccatatgacttaagtaacagtaagcatgatactgcaggtgaagaatttacttggtaactggtttgtcttacaagtaataaccacagattttgttagtaaaacttactgcctagactctaggcacttagactggaatctgtaccatcaccattttgaaattgctcaaataccattaaatggattcagattttagataaatgatcatcatataagactcataagataatataaatgatcctctttcatagacaccattaataatgattaatctgtcttgaaaacctacgtgcaaaacaaggaaccctaaaaatatagatatggtcagatattataatttttaaatgcacagttttgttcaattttatttggttataaaaagtaatttctcttaaggctttttaaacaatgatttcctaaaagtcttaatacatcttaaacaaagtactgccaagcctaaattagtccctaaaatgagaaggaattagagagaccaaaatcactcttttccttggttaagaagctaaattaatgcttcatgtacttagttgccagtcacttcagttaatttgtggcaccattaatgagtgaaggatgaattcatatcatgacaagtaagtatcaatatgatagatatgttaagggataaaataattgtggatttcatagctttcattttgtaaagcatatttgactttccatgtagatatgccaaacagaattctatagcaaaggcatctaaagatggtaatgacagattagcataaattaagttggcaccattctgtaatacttccactgtagttctcaaacactctaggcagcttctatgccaggaccttccctgtgtgtgacagacaccatttttctttatatttccactgagtttggtcactcatttcttttgggctttgatcaaatgccaccttcttagtgagttctttttgaataccttatttttatattgcatttctcaccctcaaatcatacatcctaattgctagctgccttatttttcttcacaagtacatattattatttgatagcccaagtattacccacttatttatttgcaaattatactttttagaatttaaagtttgtgacagcaggtggtctgtatattttgtctattgctggattcaagagcctgaaatacaacaggcattcaagtgatatatgctgagtaaatgaattggggttctaaatctcccatatctcacacactagctctttgagcttacacagcttacttagcctactgatttctgtttccttatttacacaatgtgagaaataatgatgcctcttaacattttgctgattgaaccgaacactgtagatgaaagattttgctgagggcaaatgatgttttgctgttgaaacatcaaatggttttcatgaaactctgtgaaagtaatagattttggcttgcttggattatgggcttacaggagacctaaactggtttaggaagtggtctggaacacaagttaaag

SEQ ID NO: 59672 - DNA, 983 bp, Bovine  19866881313379
  misc_feature (1)..(1): n is a, c, g, or t
ngaagaaggaaagtgagtcttgaaaccgagacagaaacttctaattcaacagacttaaaatttcatagcaactgcaaatagcagatctagaagttgtaggaaaaagaaaaggaacaataacaacaaccacaaaaaaaggacattttttcctattttgtttaataaacaagaaaacctcctcagctccaaaaataaataaatcaacaaagaaattgggttaagactgtaaagcattcgaaaagaaggggggaaaaaaaaacacctctcatggtctgtgtaaaatttttccttaaataatagaagaatcatatgggacaaaggaattgtcaaaagtagataattggcattacatgcgaaaaccacaagtgacatattctgcattttaatatcagaagtatagtattgtggcttagatgataaagagtccatctgcaatgcagggttcaatccctgggttggaaagataccctgaaggagggcatggtaatccactccagtattctcgcctggagaatcccatggacagagaagcctggtgggctatagtccatggggtcacctagagtcagacacgactgagtgactaacaactatagtatggtttttaccttccggagagacaccttttgcagctgtaacctatggcaaagtgctactggctataatcagtttaaggttgtcattcacatagccaactactccttttgaagttctaggagtaaaacaatgaggaggcagagtgaccaagactacaggaagttggctggtattctgggcaacgagccttccaccagaggtgctggttggataacagtttgaccagaaggaagcaaaagttaattctataatctgtaagtggggaatttcaaggaatggactaatgtttatagtccccctacaacatggcaagcattgtaaatgaacattgcatggtctctgccttcaggaagccagaattcagtgggaaaaataaacttaaaatg

SEQ ID NO: 59673 - DNA, 973 bp, Bovine  19866881539061
  misc_feature (1)..(1): n is a, c, g, or t
ntatagtgaaataatttaatattctcaaattcatacctcctgatattttaaagccccaaactttctcttattatttcacagaccaacaaattgggcttaataatttccaagatgatctagctcaggaagatagtgttcccatcaaattttctctaggatgtttacacgaaagtatgatatgataatagtaattctaatgatggtgcagtctgcctgaaaaatatttggtttgcatcagttacaaagaaatataaaatagacttttcctagacgcacgtaaagtgtatagattttagctaaccaataataatcgatgcagaatcatagactgctaaataggctgtgacaattccactgctctgccctgccgtgttgtaaagcccctcgaggtcaagcaggagaagagtctttctccttcatttcttggcctccaggctgagaatgctacctcaagtgccaatttgtgattattgtgatggtggtgttctgagacatagactaataccttgggaattggacagagatcaaacaattcactgctccctgggtagcaagctgacactggatgatgataacttttagccactaccaacatgttctaagttataccaatagccagacgtaaaacaccgattcatctattcatgcctgaaatgttatattgatagtaccttctgggataggataggaaagattgtgatttttatttaccactataaatggatgaaatgcattagaaatttagtgctttctaactttttcactcaatggtaagagatgctaaccaaaaatgcaaatattcatatataaaattgtctatgtttaaccagtagtatgtaagaggcatgtataaaaacatctgcttgtaaggttccattttctatgatggtgatagtgatgatttcttaatttgataaaattgaaatatatcattagtgtgctataaaactatacatatatatataattttaaa

SEQ ID NO: 59674 - DNA, 716 bp, Bovine  19866881554653
  misc_feature (1)..(1): n is a, c, g, or t
ntgcttaaaccctcttgaaaaaaagaaaaatatttttgtttacatctcactaatatgccaacctttggctagttaatgtttactcctatttgtcacaggtagattgcatgggacatgagacattcattatagagacaagtacgctctgttcacaaagttagatgacagaacaagtcatggtgtgtattgtaatttctgtgctactgtacatcttcaggctgtctggggtaagatacttactaagcattgcattatggctgtcagaatgcttcatggatggtaattaaataaaggaagtgttattggtttgtagagttaaaccagtatcagacatattctagaaatctcttctagaaagcttttactttgaacattaagttttgggaaaagtatattttgcatttgttgactaatcttttattaaaagctcattttctaggatgttcactgaaattatccacttctattttcttgtgataagtcagtggccatttcgcctatcagagaactgaattgtaagcagtgctgccctgtgaaatgttagttttccctctttctgtctgaacagttactatattcaaaacacaacaaaaaactttgaagggcaaatagaaagaccaaaagcagaaggattaaaaagaagtatgtttgtttaatttttgtcatttttcagaaaattttctcggaatttaatgctaaatttaatatctaatgca

SEQ ID NO: 59675 - DNA, 1088 bp, Bovine  19866881661105
  misc_feature (1)..(1): n is a, c, g, or t
ntaatatttaatctattttaactcctgatattcagacttgcactaagatcatgaaaagatcttggtcttactgagcaggtaactccaggtgggagcacacagcatctgctttgaacctattcttaagacttaaatcccaaccctgaaagctgaaaatgaacaatagggatgaatattttatttcatcactttgtaaattgtgtgtttcttttcaactgttatgccaagtataaactttcagaatttgttagtagaaggaagccatgttagacctaattttgctactgattcaaccaagtttaatattgctaatgttatattataattgtgtggaataaggtatttttaaaagcctaagaagtaaatttggtttaaactctaagaaggcaatttcacttcaaggttgtcacttaatagtttgcagatattgcaaaatgcagatattgcaaattgtcatttacttttcatttcttttttttaattttatgagagaaaaagtatagtttctaggattttttttttattttacaaatttcctttttttcctttcttgcaaatcctgtaaaaagaataacaaaatattctaagtttagcttcttagtattttatctaatttattttagaaaattcattcaaataccatatttaggtaatttctgcttaagcaaagattcctgaactatcagaggaaatatgatgttgaagagaaagagtttgtttcagtcttgaaacatgattgttcatgtatttaaaagaaatctctaatcattcatctttgtaataattgcttataaaatgaatttacaactccgtaagttttatttgctctagggtattttaagacttcttttcctagaacagtgacatcaaatcatcaacaagcattcagagagatcatgtgggttgcagcacttccctggagtcagggacagaaaaaggaacagacatgtttgaatatattcaattgactaaagaagagagggggtgtatattttattttagatccagccagaaagatgacagtgactgtcatgggaattttgtcactgctttgagaggtaaaatactgaggtaatgatgtccaaaga

SEQ ID NO: 59676 - DNA, 1606 bp, Bovine  19866880488587
  misc_feature (1)..(1): n is a, c, g, or t
naactgcaacctctagcaaaagggtaatgtaatttatataagagtgggaaaagcgctaatgaatagataacattaagaaaaagagaccagaaagagatgattgttcagaactaggtttttctattttaaagggtgaaactttctattcagcaataccctctccttgtggcgtttaagtttgaaagggtcactccttcagttgaagttgctgtgggtaagtttttaacatacctgcccagattaccgcagtggaaaaattgtatccttggtctttgactgttcataaagtccctgctgctgctgctgctaagtcccttcagtcgtgtctgactctgtgcaaccccatagacggcagcccaccaggctcccctatccctgggattctccaggcaagaacactggagtgggttgccatttccttctccaatgcatgaaagtgaaaagtgaaagtgaagtcgctcagtcgtgtccgactcttagcaaccccatggactgcagcccaccagtctcctccgtccatgggattttccaggcaagagtactggagtggggtgctatcgccttctctgtcgtaaagtccctaaacaactacaataattatgggtactgttcctttctgacaccgtctccaagaacttggtctgtcctgaaactgaagataaggttttgcttttcccttgggaagaataaaggagctgggtgttattaaaaaaacaaaaacagtagtggatgttatgacaaagaaagggcattttctaagctacataaggatggaaccatttgagaacctgcagaattttgagagaatgctgaatggtctgagtttctaaagacgggtgcttaacaccagtaactacacttcctgggctttgagtcattttgtgatcatgttttaatttttttttttccttcttacatagttactgatgagcctgagggctcagacaatgaaaatcaaagcaggaatcgtgagaaaaacagtttgctcttcttttgtattttgctgagcattaaaattacatttttgtttttaagtagaaattgcagtgtaaaagataccataatccatattttggttcatttggggtggctgaattcgggtgtaatgggatttgcttatattctactgtctgataaatgcgacaccataaacctgcctggagctttcttgtgtaaacaaaagaccagagaaattagcatttggatgaactgcatttataaaacgctattagcttttaagaaagatttagattcttttctctagtttgtaaaaatcctctacttctgtccttgttctagtctgttatctactgaattcaatgttataaacacaaaagtgtccaataaatataactcaatgatgacaggcctggatatgaaaacaaaacagcactcaaaattgctaaaggaagttggttattgttagagtttttaaagggccatgatagtacaatttggtggaattcccagcttcccttaaataatgacaaaaggtggccagtgctgtctctgtgaggcccaggggtatctagaataaagacgaattaggagggaagtgtccagaagacttagccaagagctttgtcctaataggatggaggggtgg

SEQ ID NO: 59677 - DNA, 3680 bp, Bovine  19866880516058
  misc_feature (1)..(1): n is a, c, g, or t
nctttttggcttctgactaataaaaaaaatgttctttttactgatgtgtactaccactgggtgccctgctttatcattccattattgagctgaaccttttaaatgtcatttagaagaacattatattgagctgctcacaaagaaatgcctttcatgttgggattcaatatgggaatttaattcagccttgccctgagatactggaaagattaacagattatacgatgagaatggaaatttaaatgatagatcaaagagagttgagtaggctgtggtcttgatttccccaactaagagacctacgagtaaaataaaagtatgcatattggggaaaaaagcaggtataaaagcaagttatacacatttatttgaaatctctacattagaacttgggtgttggaatctgtagatgcatggaaatttgaggagcatagggttgctaagacgaagacttccttcccatccatcatgtgtttttatcttcactctgtcccgtgctaagttgattcagtcgtgtccgactctctgcgaccctatggactgtagcctgccaggatcctctgtccatggattctccaggcaaggatactggagtgggttgccatttcctactccgggggatcttcctgcatctcttatgtctcctgcattggcaggcaggttatcactggcaccacctgagaagccctgtcccaaccgttcctgctccatctcctgcttcagcttctttagatcttgtgcagaattttctcgtagctcctcctaggcattgagtaggttgaccagtggttccagtttgatgggaccatcacatttggagcattgagattcccacgatgctccacagtcccagtcaaactgggcaggtggtcaccccagcactgagtgttctttgcatattctttcctgctttccacgtcctgtttcctatcactgctctgtgtgcaaccactgtattacttgtcaatggtccgtacaagtgcagtataatatgtcaaccactagctccctgtgattatttaaatttaaaattattaaagtaaaatgaaaaattcagctcctcagtctctagccaagtacctgaaaggcaggtggccaccctctggacagtgcagtatagaacatttctaggctctcagatgttctattggatagtgctgatctatctaacagagctcctgagaatggggcaggggcacgcatgcaaattttctctgcaatttatggcttagatataatgttccttgggcacattaaatgctagaagaaccaagtaatcctcaggtttcattttctttgaatttctccttataccaactgtggaacatataataaggctatctgtcatccttattggctcatttgtcaagcaggtattgagcacctgtgctaggataccatgatgaattatggtgtctgccttccagtaacttatggtctaaaatgagaagaagagttgtgatagttatcatataataagtctcttcatgaggcgtataagaggggttgatgagcagttggggttctcagagaaaattttgcagaagagatgatacagaacgaggattgaagaagcagaggcagtgcagtgtgtggataaggagcgggaacatctgagtttgaatcctgcttccttgcttctcccagcagtttacttaatgtgtgactttggacaagtttcctaactgatctgtgctgaagtgtcctcctctctaaaatgaggacaataatagtatctttctcacagggatgtaatgattgagttaatactcataaggctcattgaataagatgtggcccatggtaagagctctgcaactgttaataaacaagaagggaaggtaattgagatgcagcatatggtagtgcagaacatgcattacagaagcacgatgtgttagagaaccagactttttagaaccgtaggacttgaaatggtggtggtgggcggtggccatgctagggacatggggatacagaacagggaggggcagggaggattaaggacaaagtagatgaacatatcagtggaccatccccatgactggtgacacgattctgtaagtgacaggaagttgattttttttaagcagggaagggatgaaattagatattcagttcacacaggtcccaatctgatgactgggaggatgtatttgagaagattgacagcatctgaagtatgagaaggcctgaaaggagacaacagatttgagagacatttagaaggtttaaaaaaaagaactgtggggaatgagcaaaagggagaagtactatgtaacaatatattagttaacctagtgcacttaaaagtaagaacatagggttaaatttgggggctaattccaaagacagtcttccctgcttctagaagatgttgtcacaaagaatatgctattattcttactgctttatcgtaaacttgtaaatggagtcttaatttttttaaagaaaatttccctattatatatagagaaatttccctattatatatagagaaagaaagagggaaaatgtgagggtagaaagtggtagagagtttaacatcattctgttattctaagttattgctttgtctttggaaaagtaataaaagcttatttcctttataacttcatctgtgttctcggggctgtcacattaaccccacattagtattagattttaataaaggacaacactgcaggaagaaagatgtttgctaaatctaggagcaggccatataattttgtttttggaaggtttctaatattgtttttattttttcattgtcttgaaaatgatatttaactttgtcagataactgcaacagaaaacaaaggctcttttgaatagaacttgggaggtgtggacttctgtttctttaccagtttacctcttggtagcattttggagccaaaagggtgttggacgccatgattgggaagagtccccagagttcatttctgggttgaggtatgttgcctttcttcccatattttatactcagtgagtctgaggatgatgttacagtatatgacctcgtgtcatctgtgagcctctgatggctaatgagctttgctgctcaatccaaggctggttcctactgcacaggcacctcaagatgtccttggagtgtttcttctggaacctctaccctcacagctccttttgagggcctcagatttcctacagtatcttaggtgattcaaacctaagtgtttccatggatggaagatctttccatctaataccccacctctaagatttagttccccgaccaaagattgaacctggacccttgacagtaagagtgcagagccctaaccattggacagcagggaattcccccttcagacttaatttcaagtgagatcaatcattctataactccttctcatggcagcatcattaatatcaaaatataattatattaatgggtaacattttgcatgctgaatgtgctgaatacattcactatttcttttattctttaatagaacctactgaagtttgtgcagttattatccacactttacaggggaaggaatggaaagttggagaggatggtgaatctgtaacaagtcacacaacagaaggagatggagctgggtgatctagctctagaatccagtctcttaaccaatatcctgtaaggatcacttcccctgcagccaccagcctttctcacaggcacctcg

SEQ ID NO: 59678 - DNA, 1869 bp, Bovine  19866880538417
  misc_feature (1)..(1): n is a, c, g, or t
ngactgtagcctgccgactcttctgtccttgggattctctgagcaagaatactggagtgggttgccattcctttctccaagagatcatcccaacccagtcatcgatcccagatctcccaccttgcaggcagattctttaccatctgagccacacaggatttaggaaggccagtgaatatatcagaaactagaattagtatttaaacatatttaaagctgagcatagaagaattgatgcttttgaactgtgatgttggagaagacttttgagagtcccttggactgcaaggagatccaaccagtccattctgaaggagatcagccctgggtgttctttggaaggaatgatgctaaagctgaaactccagtactttggccacctcatgcaaagagttgactcattggaaaagactctgatgctgaggtggattggggacaggaggagaaggggatgacagagaatgagatggctggatggcatcaccgactcgatggatgtcagttccggtgaactccaggagttggtgatggacagggaggcctggcgtgctgtgattcatggggtcgcaaagagtcggacacaactgagtgactgaactgaactgaactgaactgaatggcctgggacaatggaaaagatctcagaggatgaactgtttgaacataatgactcatatctgactactacattaaattatacaaagagcctccataaaccttatttggtgtagtcctcacaatagagctggagtgggttgaatggtggctccccaaaagatctgcccacccagaacacatggatgcgacttcattaggaaaagaggggctttacaggtgcaattaagatcaagtcgcgataagatcatcttggactaggatgaaggctaaagccaacgacaatggttttttgaaaagaaggggataagacacagagatgttgatggagacaaagatggagggatgcctctataagccaagggacactgagggctgtcagcagccaccagaagccaggagagagataggtaaaggattctccctcaaagactcccctgttggtccagtggttaagaatccccctgccaatgcaggggacatgggttgattcctggtccaagaagatcccacatgccaaggagcaactaagccctgtgtgctacaaatactgaggccatgaactgaaactacctgaagtctgcaggccctagaacctgtgctctgcaacaagaaaagccactgcaatgagaagcctacatattggaactaaacaggagcccctgcatgccacgccgcaattagagaaagcctgcgcacagcagtgatgacttcagtgtgaccaaaaataaatacacaaaatttaaaacaaccacaaaaaaaggattctccctcagagcctgaaagcaaacagaaccaaccttcctgataccttagattttggattttcagcctccagaactatgagagaataaaggtctactgttttaagccaagtgggtgatacttcattataacacctctatgaaattaacacaaacactattcattttttattctattttatgttcttttacaaagaaatcaaagtcagaaatgtaacaatattctgaaaaactcatttgacgtatatgtgttgtatgcctactatgtaccaggcattattctaggtgttgggattcagcaataaataaaacagtcttgaccttcaggaattatcattatagttgaggaacacagccagtaatgcaaccaagtgaatatgttgttaaattaactaaacatggaggccagtagactgacgtggctctaatgtttggtgggcagtgtaaagaaactaaaacctgtaaatgcctcaagagtataaatcaaact

SEQ ID NO: 59679 - DNA, 1446 bp, Bovine  19866880618192
  misc_feature (1)..(1): n is a, c, g, or t
nggtaatctcaaatcctagagttctcctgattatgtgtggagtcaaggtatggatgacttcttaataaatgaccaggtggtagttttgtagtctgtgtcattttgatgattatgttatcactgggcaaagatggggattttttacatatgttttttaagagaataatatgttgattacttatgtattcttagccagctgactgccaacctcttccttattttaccaattttctatttttttaaatcagtggagtttcagtaaacactgtctttctgaaaactttttttttttttgcagtatgtgtgtggtggaaaggaggtggtgagggtctcagaggatgcataatatctgtagtcattttgtacactgaccacagagtacagaatttaggcaaaactgcttcctcctctaactcttttgcatttattaaaatttggtcatctagtgtacctgttaatagtgacctctgctgtccagaatcagtactacacccatacaaatcagcatgggaatcagtgtttgataaggtaatagatttactgaagttgtatagaaaggaaaagggctatagcttactgcagaattgttcagctcctcctgaataaaaacactttgcatttgtcttgaaaataaaaataatattgtttctctttcattgccagttaccaaatgtcacctttgatggcattcctcagtagggtaggaaattactagaaataaagacaaggaagtcaacatgctctcctaaccaccaagacagttttcagttttagcaagtgagtgccatcgttacttaatactaggttaccttacctctgatcatctgaaacgaaatcttacatttctcaaaacatttatttttatatgccttaaaataacttgaattgtggaactggtgggaccagggttcccacaatatccagtaggtgatcagaaatatttgttgaatgattatctaaggacaagtggtatgaagttaaagtgctacacctgcaacatctaagacgatcttgcttacagtagaggcaatcaagatggcgcttgcctttctgaagtgtaggatccaactcagaatttaaggaccgtcatccaaatgcccttttactgtgtgtaaaagaattgccactgagtaatttaagcaccctgtgacaggaattaactatccaactagtattttataaactaagcttttggatgctactcttgtatcaatcagtttagaaacatttactgaatacctaacactgtgttttggttaagaaggaaatggcaacccactccagtgttcttgcctggagaatcccagggacgggggagcctggtgggctgccgtctctggggtcgcacagagtctgacacgactgaagcgacttagcagcaacactgtgtttatgtgtctaactgtatagcatagtagaagaaagcgggcttggaatcagataaac

SEQ ID NO: 59680 - DNA, 1471 bp, Bovine  19866880687983
  misc_feature (1)..(1): n is a, c, g, or t
ntcatgttcctattaaatattgtgatagtaataccttgtacttgttcaactttaaaaaacccagccatctgttttcacatttaatgctgtctcttttaataagtattgcacacagggacccacaaaagtaggatatttgagcacagtgcatggtgccaccctcccaggaactgtaaacagtggtacattcgtggaggcctttgggcactgggtttcacttcagggctgacgtttctgaatctgttcaaatgaatgctcctagttcagcccagttgcttaaagaaggaatggttcctgtgcctgtgacagtcttggtgatggcagctggctgctgcattttgttcttaggctcagggaagctgtggacaggctggagtgagccactttttgttctctagctacgcatggtcttaccactcctgcctttctttcttttttttgtgcattttacctttattttacttgatcattgcaatttctctctattgccttgctatcctctctcctaaaaatatctcatatcttatcagctggagtggatgcctccctggcttttctgtgaagacctgtgagatggttgatggggagtcagaggtgaggggggcaccgctgccagaagcacagggaaaccttgccctggagaagccaggacagagaagcaggatgtagaacccagtctttttgtttttgttttcttttcattgaattgtggctgcttgctacttggggttgtcacatgaaaccacaagacatcttgttgttacactgggtctcctgacagttgcaaccaggagatctgggagagtcgctggcacgtaggaagcccttggccaatgtgtgccgtttctgagacagctggatagttacaaagaatgtcatggttgtctccttagtgtcattctgtatcacatcatttattggttatttgatgaagacattttaatgaaaccacaaccattgtttacaaagagaggggaattacttgcatctgaactcaattgtctttaccatgcctaaatcaactcatgctttctttgagactaacctagaatttgtttcccattttaattgcaattaaatataaacttgaaaactgtgtcaataaaatgctgtgaaaacatttttttttctgtttggaaattccctttggggttaaaactctctctggagtttttttttggagtttgttttttcattatccataaatgtatatgatgctcaagtttgatggccatatctatatttctatttaccttccttcttaggcatattattttctatcctaaaattctttgaaatttgtttactcatttattgtcctttggttcactaggttctttttcacaatagccatgattttattaatctcttggtccagaatgaaatagttggctggagacagaggagggagagaaaaacaggttcaatttgggagcaaccctgagatcaaagaagagatgagatctgtgaa

SEQ ID NO: 59681 - DNA, 3156 bp, Bovine  19866880767554
  misc_feature (1)..(1): n is a, c, g, or t
nttggttggttgctttccacattaagattttggatgaatactttgttcaaaactttttccctcataattgttttttggggctttaaaaaacttatttatctattttggcagtgctgggtcttcattgccacacacgggctttctctagctgtggtgcgtgggcttctcattgtggtgacttctcttgttgaggagcttggactctagaactcagattcagtagctgcagcatacaggtttagttgccccttggcacgtgggatcttaattccctgaccaaggatcgaacacattccctgcattggcaggcagattcttaaccactggaccacgagggacgtccccctcataatgttattatctactgctttatattatagaggttactctatcactggtatttaatatggtagagatgaagtctgaattctgcttgatttctgttcctctgcaaaaactttgtgaattcgagatttcatagcaatgtttttgtctataaagttgaattatttttgctgggacatgcctgaaagcaagtcttaccctgtttattttctgtgggaattactgagtgctatcaaatgctgactcagtctttcttccatttgggaaggttttcttctttatatcttttagtattactttgataccatttgtgctgactttatcttcagaaactccctacactcatggtttcattatctcatctctgcattccatatggataaacttcattattaccatgttcatctcattacttttgcattctaaaggagcctctcaacttcctcttcatggtaactgacatcgtgttttctgtctcgataatgtcctttcttccttccaaagaagatttcagaaatatgttttagttccatttaacaggtcatttctcaaagtatgcattccatatgtcttctcaagacaacagtcccttttttagaagttgcagaaactatccaaaggttccatgttgattttatttgtttgtttggtcaccctttacagaagagttttatccagttcctctcttcagatggataagttgcaaatattgctgttaatcccctttcttctcacccccaaataaatacaccctagattgcaagcattccctgttgtctagatgccagtagaattcccctctcagactccaaagcagggggaaacaaaggtgactattttacatgcaatagtcatatccttatgacagaagattgtatttcattgtccacaaaagccatgagaatatctgctcttctatatgctcttctataatgtacccttacctctcctccatcaagaggtggtatctaacaccatcccctgaatgtgggctggcctcagtgattcacatactatcagagcacaacaacactgactgcttcatgatttctgaaagtagatcatattataataggccatgtattttccatctgcttgatctccaaattctcccacttagaacccagctgctgtgctgagagaagtccaagccacacaggccatatgtaggtgctgcgactgacatttccagttgatcgcagccttcaagttatcctcacccaggtgccagacatatgagtgaaaatacttctagatgattccagccccaagccatctggagggcccatacactgtggagatgagaccaaccatccaagttactgactcactgaatccatgagcatcattcaatggttgttgctttcagcacttatgttacagagtggtttgttacacaacagtaactaaagcttccaactaaatttcttatatgactcagccacttacccactataattttgacaggctaagaaggaaagaattctggttcctgctgtttggggtactatgactaagtttatttatttatggatacatttcatttgaatttgggaaagagttgaaagaaggctaacagttcttgttttgatgtcacttcttatctccatttctttctatggctgacttcacatcccagatatagtgttcccttgtctgtctgctccaaatgtcagtcttttgcacgactgaggagaaggcagaaaggtcttgcctgcctcaagaaggaatttccatgtgtgactctgaggagtattcacatggctttctcactagtagagaccccagggggtacacagtggcatcaggggtgtctcttcctgcctttgccctctttggccctgctcacatgtttaggagttccacaatgcagcctcctctacagtcgtctcattcccacccaagcttccctgtgtcactgaaaacagccccccaaaactgacaaactatggctttaaagatgggatagagagttttcttaaggcaagaaatctctacatagtgagaaaattatttccattatttaaaagttttaagatccctgactgaatagggtgtttcccccatgagcacataaattttgtcattttagatcacctgcagagtaaacacagcttagcattctgtctcagacatgggagcagtccaaacacaagatgccaaaggggtgtaattcacactcaagaaccattgtgtctctacaattcataaatatattatgccttctgtgaacctttattattttcaatccagaccctatcttgggaataacttgtttcaaaagtttatgactcactgtgtaaactaatgtgtttttttcttctatttgtcctaaatttctcttctttcaggcttcaaagagttctccctgcccattcttgtgctttggaatttggtgaactcaaacattttgatgcccttcatggctttgtcgactttgatcatctccccatgcagccttcatctctgtgggctgaaagtcttaatcttcttagtttgacctcatgtttcagcccacatattcccttaattctttcatctgcccttcactggcccttctaagaatcatatttctttgttaaggggtactaaccacagacactatttcaagagcaggtgttcccagccttatctttaactctctctagtggactatttagtcaagcagacttgtatgtttccaggaggtgggggcaaacaggaaggtagaaatatttcaaagtcaatatcagagcacagtttggaaatattttgtcgccagaatgatgcaaagggaaattactccctgggctcctttggtatctattcaaa

SEQ ID NO: 59682 - DNA, 809 bp, Bovine  19866880809771
  misc_feature (1)..(1): n is a, c, g, or t
ntaaaagcaattatacctctagagaatctcgttgcctctgatttctaagtgctggttgtttatagaattactgctcagatccctttagttcaaaatgaacatgccaatgaaactgaaatgagaatctgcacttctaaattggattatcggcttccctagtgtaccagtttgcaccattcctccttcagcaaagttgcccgtgattctcagcagtttagttttatagcttatgctggatggttggagctaggtgcctctagttaacttattagttatgctgcgtcttggggatgactgttgccacagtaacagaccaacagaccttctcaaccttttcaaatagattccagaccttttttattccttaaattatattgagagaagggtaagatccaactaccagttctaaattagcatgttccaatggaataataataataataaaaacctaggacatattctcttgcatctttctcttttgctttctgcttggaaaacactttactgcttttctttgtacaatgggaatcaagttgaaatcaatatggctattttgatacaatcgcaattcatacagcatgtttccattgcttactatttctgtttgacactggaatacttgactgatgtcaacgaagctggattcatgtttatcagttaactgcaacagagctgtgcagaggaggtaacacaatgcagtgtttgcatgaacttgataaaaagagtgggtggtttaatttctccctgaatggagtattagaagaattagcagactttctggaacatggtatgctttcaggtaaatcagg

SEQ ID NO: 59683 - DNA, 1276 bp, Bovine  19866880884781
  misc_feature (1)..(1): n is a, c, g, or t
nagctgagttagttggaaatgactggaaagattcctggtgtgaaagtaccgaatggaaagaagggagaggaaggctggagtataaaatcgcccattaaaaatgaaacggaactaagagagagcagggccattcaaaatattttccattacagatgcccttcagctctgccttcttctgtgatagcaaagtcaggaatgtgccaccgttgggctttctctgggattctgaggttcagaatcatcaaagtgatctggccatgctaagtttagaccaaaggaggaagaaaacacaggagatggatggtaaaatgtcactaaatcaaaataactctggcagtacaaaaacgtggaggaattcatcaaaggggtaacttggaagaggttcacagtgatgaagaagagagcatctcatcatcattgggcctcccagatggctgctgctgctgctgctaagtcgcttcagtcatgtccgactctgtgcgaccccatagacggcggcccaccaggctcccccatccctgggattctccaggcaagaacactggagtgggttgccatttccttctccaatgcatgaaagtgaaaagtgaaagtgaagtcgctcagtcgtgtccgactcttagcgaccccatggactgcagcctactaggctcctccatccatgggattttccaggcaagagtactggagtgagatgccattgccttctcctcccagatggcagggagccacatttaacatgctcacaccttctgacgcacctgtcaaaagcatccaagttacccacagtggactattcctggtgttccttttgagtacgtttggtctagtcttgacctctcttatttgttccttttagatatgtggatttcattacatagctccaaagctatagtgaagccccaactttctcgtctctgttagaagatactttatgttcacattaaccataattaactacagcacacaatttcctgtcttatttttgctttttattggtaacagtaatttctacagactttaggctggaacagtactaacaatattcatttttcctaacttcttttgaaagcatttagcatgcttactttttatcatttgtatagtttctcaggaatgtttcctttccttttctttcttcctttaaaaacaaacaacaaaaaaaaacatttccttcatttttatagatgaggtactgagtcaaggaaggaaagttccaggaagttgcccagaactggaaattaaacatgtaagggcctcctcctgccctgcctga

SEQ ID NO: 59684 - DNA, 1776 bp, Bovine  19866880927905
  misc_feature (1)..(1): n is a, c, g, or t
nttctgtgttctgtgtgtgtgtgcgtgctcagttgtgtcccactctgtgaccccatggactgtagccctccaggctcctctgtccacaggatttcccaggcaagaatactggagtgggttgccatttcctcctctagtggatcttcccaatccagggatcaaactcacatctcttgcatctcctgcattggcaggagaattctttaccaccgcccacacgggaagttctcctaacattgtcttccatcttgtgggtaggatagtgtttattcaatcatttctaataaacatctgtgttgctccatttctcacttttataaataatgcttcagtggttgtatatatacggctagatctttgagtgtcatattaattacctaggatatgttgctagaagtgaggttgttttggataaatcacacacacatattgaaatcttttgaaatgtgttggtaatgccttctaattgtaaaatgtgcattaactaatatggcatcctgtaaagagcactgtgtttgtggtactaagttgggctggtgctttatttcactgattgctcactgtataattttgatcaaatcggtatttctaacattccggtgtcttcacctgtaaaataaaaatagtctaactcactgtatctacctcagatagaaggatttatatgcacaagggcagtggccttcaggaaatagtccatcatatccactgaattgcatctcttctgagaacttttgattgtgctaaaatttcccaagagtgtcctgtggatctaatgacagtcctttgagtataccacttgctgtagtcctgatctgaaggtatgcttccatatttgtgtgtctgttgcttttcttgcccattgaagtctgtgaagtaggaactctgctctctgtggttactgtatttatttatgtttttgttaccttgctttttcaagctggctattcactcattcccctgctgatctattatgttctctatgaggttgtctttattggtattcataggtggcatttagcactcaatggcacttttcatcttgaaagcactttacagacattagctaattaattttcacatcacagtgcgataggtggggaactaatctaagcatttgagctatggcgatgaaaggtgtgttcaagtacaacaaattattattgtattattctttggaagaagatgagctggttgtgtaattcgtcccaaacttcagaaagtatgtacattatgattgaaattcaagccggatctgataggtagttgtatcatgggccttcttactaatgctgatccggcttgctcccaaaagcagtgtcacgggaatgaaacccaccagctggtttccctttctgctctgcaggtggagcagcattattggcatttgagtcactttctttccttctttcccttctgaatgatggcacttacgtgaaatgaacctgattgaaagtttgaaaatatttcagagaagcctccaagtttatgagagaggcaataccccatgtagagcaattgtggttggaccgttgtttgcttttgaaatcttaagtttatctcattggtaaaacgatgataccgctcttgcttgggcaggtggggaagtagtaagggtgaaaacctcttggcttggctctcctgagctgtaccagcagggatcctagagtagagaaagaaggcaggaaaaggaggacccaggagcagaggatctggcttttgctcttcagccccctgggcttctctgggaccaagatttccggattgccctctgat

SEQ ID NO: 59685 - DNA, 1819 bp, Bovine  19866881006251
  misc_feature (1)..(1): n is a, c, g, or t
ncagatgaaaagcttggaacctcattcccacagtagaaatgatgcaaattcaaaaaggcataaagtcaattttatcccacttatgcaagggcatgtctcacaagggcttcaggatgtttaaatctcttactgactagaaccttaggagtaagcaaaagtggaaaagagcctagaaatcacatttaggcttcgttgcatttggcctgagaaaagctgttacgaggtggcgttgaactagcagtaacatgatgactcgcagcctaacctggctgcagtgggcatttcagatgactaagctcgaaattaaggctctggaagtttataagaacaacttaagagctgggaatagggagaaactgatttcttcctgatgaatttttcactcttagtttggtttcttctacatgtaatccccactgtgagacaattaaaataaaaccaaaagtgattggatatgagaaaatgataactttgatgtggaaaaaaatgtacacagaatgaaatgaatgctgctctcaaataaaacctttcaggtattgtgaaacaagacagacctaatctctcaaataacaaagattaagcaaaaatgatagaatgtgaaagtcaaagagactcaccggtataactggaaaattgatagacacccgggagtttccaaaatgctttttaaaaacctgaacacattctttgatacaatacaaaatctgtggcattccatgggaaaataaatgtttatttccaatcttagctttcaaatatttaaatgaaagcagacaggctcttttccctaatactgaaggcactggcatgctaataagcatttcaatgagaaaaaaaatacatgtatctctctgaattaaagtgaagtctatctcactcttcctcgtctacctacctttttttctccttctgtcagctctattttgtctgtcttccctatctctccttctattactaatataatagtaacaactgtccttccattttccatctcactgtaactctattttcaatcaaatgacctattcattgtgatcctaccctctgggagtaaatctgctagccctcgggacaaacatgaatacattgtggggttctcatcagactggaaagtacaaacaagctgaaagataagacaggaaccagatttccaccataccaagcagcatctgaccgtaaatgctggcatgtttcaagaactgggccctggacgatgaccctaagtaggaagaaagaacgttcacccagggaattttgcaagcagagatataggggtaagagaaggcattatttgctaagaagttcagtccagtagactactttgccttaaatgaagagtttacataggcaggtggtgagagagggttgcaaaagcagaggggatgcaactgtgaatgagtaagtgagtgagtgagtgagtgaaagtctctcagtcttgtctgactcgtttcaaccccatggactatagactccatggaattctccaggccagaacactggagtgggtagtctttcccttctctaggggatcttctcaacccagggatcaaacccaagtctcctgcattgaagatggattctttacctgctaagccaccaggtaggctgccttgaaagccaggtaagggatttagactccactgcccaccaaagaaagccaatggtgttttttggtggggttttaaagatttgtctttgagatcctcccctccctctcctttcattttagccaaccatcatttttctgttatttgttacacttacagaataaaatgcactccttatgctattctctattataaaatcaggtagctaaagg

SEQ ID NO: 59686 - DNA, 791 bp, Bovine  19866881066461
  misc_feature (1)..(1): n is a, c, g, or t
ntcttttaagtctgtgaacctccaatattgagaaatccctgtagcctcattgactttgaccagctccatattcttggatggcactctaaatgccatcctgtccaagcctttaaaaagtgatcagtaaaccttagaaagtcgcagtgaaaatgtagacagctcaggcaaccgatccatcttctcacagagtagagccactgttaggtaccaatggagtcaagagcttaacgataaaagccagcggaggtggtttcagaaagcaaacagcagattcaagtctacgagagaaatgtacccctgaaataaatgtgagcttttatgtccttccacctaacctcttgtatatatcctttaaacactactgcaggcatcattttagggcccaaaatggggaggtcttctactcagttccgtgggctgacaaacagtaaatgggctactactgatgcttttccaacctttgggatttttgctgtatgcttagtattctcccttagtgagaagtagcctgctaacagtcaaggtttgctttgatcccacaggctttgtctttgttcttagggaccaaagtcagactatctcagtcttagactcctttacagccacactagaaactctattaactctgggcagaaagcaattccaaaaattcccttcttgatttttttcttcatgtcaattgaagctataaaagctgacggagctctttgttaatccaaacacacaaaatgatactagatatataatgctttctatattggcatatatttgctacatcatgcactacaaaa

SEQ ID NO: 59687 - DNA, 1578 bp, Bovine  19866881081020
  misc_feature (1)..(1): n is a, c, g, or t
ncttgcataggtgtatctgtttggctaaacccaggtccatatagatgagaaaacaatggaaacagtggcagactttattttggggggctccaaaatcactgcagatagtgactgcagccatgaaattaaaagatgcttactccttggaaggaaagttatgaccagcctagacagcatattaaaaagcagagacattactttgccaacaaaggtccgtctagtcaaggctatggttattccagtagtcatgtatggatgtgagagttggactataaagaaagctgaagaccaaagaattgatgcttttgaactgtggtgttggagaagactcttgagagtcccttggattgcaaggagatccaaccagtccatcctaaaggagataagtcctgagtgttcattggaaggactgatgttgaagctgaaactccaatactttggccacctgatgcgaagagctgactcatttaaaaggaacctgatgctgggaaagattgaatgcaggagaagaaggggatgacagaggatgagatggttggatggcatcactgactcaatggacatgagtctgggtaaactccaggagttggtgatggacaggaaagcctggcgtgttgcagtccatggggtctcaaagagtcggacacaactgaacaactgaactgaggtcatatatgggaccagagctgcaagggagtctgaacactagcctgcatggtacaggaaattagagtggaagagaataaagtgggttaatagtggtaccagacacaatcatttactggccacaaccttgggtatatttgaattttcctgtagaaaaaaaatagggctaaaatacattttatagtgttaataagcttttttgcaaaacacctgacacataataataagtgctcaataaatgaacattttaaactacagttgaccctaacaacatgggagttagggacactaacctgcataattgaaaatccatatataactttacagtcagctctccatatccatggttctgcatccctggattcaactaccatggatcatgtagtactctggtgcatatatattgaaaaaatttgtttataagtggatccatgcagttcaaaattgtgttttcaagggtcagctatatatgaggatacaatgagctcattaaggaaagttttctcatagaaaaataatgaaaatggaacaagcttctcacctcagtaattttagtgttctgaaactctgtcattctgtcttttgatcagttcaaacaattatcaaaatgctctttgatgtgtgttcattgaatcaaatgctttcagtctgactccaacctctaaaattcacccacatctttttactcataaaacatataaatttgatacatgatcactgtaggaaaactggaaaatacagaaaagtataaagaagaaagtaaagatcacaggcaattcacactcattcctcacttatgcatggtaaagtaaaacggcgtgcatggcagccaattcaggtgttcattgtttgaggctaatggaactgaggtcggggttcagcaaaaactggagcacaggccactgggttttg

SEQ ID NO: 59688 - DNA, 1365 bp, Bovine  19866881096036
  misc_feature (1)..(1): n is a, c, g, or t
ncaggtctgtgtgacagttctatcgcagcttatctgaaaggtcatctatatcccggaggttggggacagtgagagaaagacacaggtttgcccttgtggtttcctaattggcctcagctatgccccacctttcttccttccctattgctagccctgtcgactgcaggtccaacaccagaagcagccctataataaatccctcttgtatgtcattcacagtggttgtgtgtttctgatcaactcctaactaatgcaattctttacgaatgcaatcccaaagaaatttcatagaaattaacaggctgatctgaaaattaatttggatgatgaagaagtcaagaataagctaagagaattttgaaaaaataaagaaggtggatgggggagatttgctctagcagatatcaagagttatttattatacagctatttaatgaaaacagtatgatactggtggagtaataaagcagagattaatagaaaagaatggagagcccataaagacaaacatacaagaaaacgtaagataaaggcacattacaaatcaataagggaaatgataaactattcaatggtgttgtggtatttggatatcttatatgagaaatatgaaaatatatctctactgctgatgctaagttgctgcagtcatgtccaactttttgcagccctgtggattgtagccctccaggctcctctgtccatagggattctccaggcaagaatactggagtggtttgccatttcctcctccaggggatctttctgacccagggatcgaacccaggtctcctgcattgcaggcaaattcttaacccactgaaccactggggaagcgtgtgtgaacatatacatacatctatatgtttgttgacctatatttacatctataacaaatctatactgtccttgtatttatatctctacctattgagagaatgagaatgataaaaagagactggaaggaactacatactaaaaagtcataatggtagtactttgatcgatgttgacttctttatatttttttatattttcttagtattccccttatttatattcttacccagtttcttcactaatatgctgtgtctaatttaaaatttgggccccaagagtagaaaccgcatctaatcatctgattctgcatccagcatcccaccccacatggcctcagtgtgaaatgacccggtggttagcattgccacagccgtagcagatctatctggcacccttgagggggtcttttttggaaaagagtcaatttttaacaatttaagtgtggatcatctagtcttaaagtatctatatccttatattctacaacatttccctcttgcgaccacattgacagtttcatggctc

SEQ ID NO: 59689 - DNA, 1266 bp, Bovine  19866881281372
  misc_feature (1)..(1): n is a, c, g, or t
ngataatgcgattcctgccagtagcctctcgaacatgctgggctgctgaccttctgtattaaccactgccatacactgtttgtctctcagtttatgatgtgttgtgacttactgcctgtctactctctgagctcttgatgggctattctgtattttttgtctgactgtagcaaaggaaacagaacagtttggttttatttttggttttatatttgtgggaagggcaactttctgattgctgaaaactgacttttttcttccttaacctatttatgttccaatgccactggtcttgaatacacccatctcccctctggcttcccctgtgggggactgtatgtttctcatcatgccatgcccagtacagaatagactccaacccctctgaggatggctttgctttttttcaaatcctacaaattactgaaactttgcttatgggtagaagtagagatcaaggctctaagaaaaaaaaggaaattctacaaaacccagaagtgagtttaataggaaagaatccctctctctgtgatccttgcccttttctgataagaatgaaatgaagatctcttgcctctttcttccttaaatactccttttctccccccttcaaccctatttcctagacacaataaagcttgaagattaagaccaccaagcatctgtggctcaagaggtacaataagtagagactcaagttaaaggcttgtgaataaatgccattgcctaaaaaggatatggtaaattcagagggaagagatgtgagtgctaatggatgcctccagaggaatgagggcaaagagcaagagtccaggagaaaaacccaagacttcacaagaaagtaattatgttgcagatagaataggaccagaatctatttttaaaaaatgaaaaatccaagggccaagaaaaatgggtctaaaaccagggacaatcaacagctaactgaatgtattgagagaaaaaaggtgagaatggggaggttggacaagtgaatggaaaatcacccaaatacgaacctgaaatatggtgcttctccctaatgatccttgtatccagccagaggaagaaaggacattcagaagaaattgacagaccactctcttccagatgacaaaagggaggctaaacatagaaacagctccactttggactgaagagtagaagcaaggtgagtgaaccaagattcaaaattgaaggggacagaagcaagggaagaggctgtggcaggaagtggagataaatctctgccattaccaacacaat

SEQ ID NO: 59690 - DNA, 1142 bp, Bovine  19866881343799
  misc_feature (1)..(1): n is a, c, g, or t
nattctaaagtgtattttaactagtattaacaagttagggatgagatgcacaagcaaaccttaaactggagaatattaatgggcaactagctgccacttagctcaataacattcatgaggaattaggaaagagcagaaaaaatggatgaaataccttagtgcttctgaggacggatagataattaaagaacttctatcatgacaggacagagaagggcagactggaccttaggtcatgggggcagctggatgtcttgaaagtcagcattttaaagatgaggaaaaatctaggatgtgtgtttctgagacaacagcatttctgtgctgctctcagacctaaaccattgtgttgtatttggttctagtatatttgttcccagctgtgctgctacccccatatacgtagcaggtgctcaataaataataataataagagccatcactttttttactgagttcagctttttatgtgtcaggactgctctctctctcttgatattaacaaatctgaatgaagaatcacatggataacttatattcccataacttacattcaacatgcaagtacaacactctccatgggcaacttcattccatgtcatgggtttaactacaatgtagttaaaataaaagatttatacaagacccatgtgatgaaaataaaattaactgcaatgatgataacaacacacagtaggtgggctttgcatggaggagtctgtaggcttttttaaaaatatagcatcgagttttcatttaagatgtaaaattataaccattttagtagtctagaatctctctctctctcaacatgtttgaaaagttaaataacctacatcatgttagaaaccttgcaaagcataaacattacatggcatgggcatataaaagattttctactatgacactgaccttacaaagcaaaatagcacctttggaatgacaatagcaggtgaaaatgtgtgtaatgaagtaggtcagttgaatgtttcagaccaacatcaatttaccaaccactacctcttacaactgctttctagcatcctagaactgatcatctagaagcccaatttaataaaatagcttagtgggagggtttttttttaaacttacctacatctcaaattagagtttaaagagat

SEQ ID NO: 59691 - DNA, 779 bp, Bovine  19866881374393
  misc_feature (1)..(1): n is a, c, g, or t
ncccccagctggtgctctgcctagagacctgctccagtactgaagccaggctaaatctgattcttagactcaagatcttcccaaaaccacactcaggaatgtgcctcattctgactgtcccaggcccaggaagactagaacttagtatttatcatggacatttgttttgtcacagcacaacttagcactgaaggcaaagctttacagggttttgataaacagctgccttcatgacctcctggttgaaaggcacagtggcaccttccccagcagggttgctttcaatgcatgattcacccaggtattgctttattggcattctttccctgccacttacaaataagcagcttttccaaaaataggtaaataaatacaaagttgaaaagagcaatcatttctattaatctctagcaaagggcaggaacaggaaataggaaagatcttcatgtttgctctatctgccttgggatttggtttcctaaaattaaggccaaaacaaagtttgcagtctcctctgacaatatgtgtggatattcaggtaaggtcattcgcctgccagacagcattttggtgttatcaagacagccacttaaagaaccacagtggattaaggaaatccttcagaaaagaaaggcatctgacagggcaaggacaatgaaggaattaactctgggggagagtcatctccagcctgggaaatgcaagcccaggaaatagaatcagggaagatgataagaatgaagcagtccaatctctcctcttggttattattgcctctt

SEQ ID NO: 59692 - DNA, 1572 bp, Bovine  19866881635604
  misc_feature (1)..(1): n is a, c, g, or t
ntttttttttcttatatttaaactgaaggagttgaaatgatgatctttcaagttctttccaggtctaagtatactttcatttcattcactagtttttttttttttttccccctctattcttatgtgactctcataaagtgcttcttctacttcataaaggagataaaagagataaaattcaaaccagcatttcagctgtcttttgactgccaacaagatgacagttttaggagtgtcttggtttagtgatgtgtaacagtaatgatagtgagcagtgttgtatataatttaattcgtaagcatgcctccaccatttaatgttattttctatacacttaaaatgataaaatagtgagcagaatttttttaaacgttattttgttattgtatatgtcctattcccgcaggagaaagtgtagtgatttttttcttcttttcaagctcatgcaaagtgacaggtttagaatatatttctaaatcaaagaatgaccattataggactcgatcatacaagttacttccctaactaccatttatttgtgataaaattggctacattcctgatgataattctgcaagacagcagtaggatatgacttgccttcccactgtttgatataaatctcccctgatacgaattgagttcagctgcagtgaacttaaatgctaatgttgaaaacataaggcagcctgctgcttcatttataccagaaagttttaacttctccagtctcctgtataccccctcccatcttaagttagatcaaattagaaccactccatttctgtctgaagggtgaaattcacaatcttgatttacataactcaacatgaaaatggaagaaggaattaatcctaaggatgggtgcactcctcttgtctttgaataatataccataacaattaggggaaaacggtcagtgcaatagcatttatcaggtagccaaccagtgtttgtgaagtactggcagagccagtactgtataaagcattctaagatcaagaaaataatgatagtcaaaatgaataatggaatttgttgggtgctctgtgtgtgccaggcagtgtggtaagcactttacacctgtgatatcaagaaatcctcaaaataaccccatgaagtacgcacctataaggagaaactgaatccctgagagacttaaaacaaaatggcccagggactttcttggtggtccaatgtttaagaatctgcctgccaatgcaggggacacaggttcaatgtctagtctgagaagataccacatgccttggggcaactaagcccatgtgccacaactgctgaagcccacgctccttaaagcccatgttcagtgacaggataagccaccacaatgagaagcctgcccaccacaactagagagcagcctctgcttgccgcaactagagaaagcctgcacacagtaacccagtgcagctaaataatgaaaatacatttaaaaaagcggcccaaggactccaaaaccaggattcaaacatgggtatccatattcttggcttcttgatgttccctaactttaaacagcttacaatctgagttaggaacacaaggaa

SEQ ID NO: 59693 - DNA, 782 bp, Bovine  19866881761599
  misc_feature (1)..(1): n is a, c, g, or t
naccaactgcaaggcaggttcatgaggggcaagtagttcctgtgactggagtcctggaagcacaggagaaatggcagactagatcagagcagagcttcttcaactcagcactacatacattttgttcctctctttgttgtggaagctgtctggtgcattgtagactgtttaatagtatctctggcttctacccactaaatgacagtacacacacacaaacacacacacactcatggtgaccatcaaaaatgtctataggcattgtcaaatgtcctctgtgaggtaaaactgacaaattttgatcctggttgaaaacaactaaattacagaggtagaaatgggtcaatttatgaatggttttacatgggatttggatattttcttctaagcagtggaaatcgtggaaggaattgacatgatcatatatgatcctgagacctatcacttttgtttggaggatctgcagagggacaaagctggagtaagaagcccagtcgggggaagtctacaggaagagtccaagcaagggcaggggatgcaagcctgaccagagtcagtagcattagagcagagagaggagagcagaagataggaaagagctgataaaatgatgtcatgttcccctccctgccttctcagtcaaaataataaccaaaaagccaacaaagtaagtcttaaaatgattagaactggtaaatagatttacaatgtgatgatagaaaaatgaatacttcatgaagctttcctgagaacgtattactgctttttcgaaaatcatttca

SEQ ID NO: 59694 - DNA, 3594 bp, Bovine  19866880347827
  misc_feature (1)..(1): n is a, c, g, or t
natttttatatccaaaacagcaatcttgtggtctgatacagatacatggtgtgtgtttgtgtgcatgtcacttaactgtgtccaactctttgtgaccccatggactgtagcccgccaggctcctgtgtccatggcttctccaggcaagaatacttgagtgggttgttattttctcctccaggggatctttctgacccagggatggaactctcatctcttccattttctgcattggtaggcagattctttatcactgagccacctgggaagcccagatacaccgtagagatagaaaaacagatgaatagctattaatatgagatagcagatattgtcatctattcttctgtgtacctttaagttttaaattcatggtgatatgtcatgaaaatactttagattttgataaacagatatttagcaatcttttacttatgagttttggtttttgtatatggatttaaaatgctaccttttattctaaaatgataaagatattaaccattttctttcaaatagcttcaaagctctgtttttcatctttagattttaatctgttaccatctatgctatggagatagagatctaattaattttttttcctttttcctagatagaaagccaaatatctctacattgtttactgaattcaaatatatgaaagggcatatatttgggggtcagtttctgtacccacacatccaggattttattacagcactttgcaaaaatcttgatttttcagttacaaaagaaccctttattatgttcttgtttttcagaatttccattattattctggttattttgcaaagactgctattattcataaacctaaccatgtttgccaaacatcaacaaaacaaaataaatttatttattaggatttttattaaatgttctctaaactttttcacctctttctagagaatcaatattattatcataaagtctatccatcaaacaggacttcaggtggctcactggtaaagaattcatttgccaagcaagagacatgggttcaatccctaggtagggaagatcccctggaggaggaaatggcaacccactccagtactcttgcctggagaagcccatggacagaggaacctggtgggctatagtctacagggtcacaaaagagttgcatatgacttagcaactaaataacaagaacatccatcaatcaactcatgttattccatttattgggtctacctatattgctgagcattatttcataatttttctgtgtgcacatacatcttttgcttggtatattcctggaaaatgtcctgatggccagactggttattcaactctctaacatattcacttgaaagtcccaaaatggaaatagttactctctttttccctatgtccataaatgtcactattatccattccccgccttgctcaagcggctcaccagccttccttggtttagtctctctcctcatattcaatccttctgggagtcctacacgttccaccctctcatgaaaaattttagtttccactggagattgctggcttcaggtctcctcacacacagacctacacacagaaacacacggcacttattagacgcagtgtttctgatgtgatagatactgggcatgtatatgtgttgaagtgaaatagctcagtggtgtccaactcttttcgaccccacagactgtagcccaccaggctcctctgtccaggggcttctccaggcaagaatactgcagtgggttgccatttccttccccaggggatctttccgacccgaggatcgaacctgagtctccagcactgcaggcaggctcttgaccgtctgagccaccagggaagccagtttgtatgtattagtcatccactgttagatgacaagtacgactaaatgaagggctcggctttcaaacatttgttagcagcaagcacttattacctcacagattctaggcgaggtggagccacagattctgcaggcgctgtgatcacgttaaggctcagctgagcatagacgagctcgtgacctcactcagctatttgtgtgccacgcttacgcctcaccggccgttgagccaaatacaccattttttctttatttacatggacttctgcacagggcagctcccaacactgcaactgggttcctcagagcaagccagcacaatcaaaagaaagaccgtgcactcaagacagaagtcacagtccttgacattttcgtctcgaagtggcatccatccctttcgctctattctatttgtaagcggcaagttactagacctggatgacacttgagaagaatggattatagaaagacacgatacggatcccaaaagaccgttaatgttccccgcaactcatccaaactttagacagattgcttcttgactacctttacttaaggaattcgcttcagaaaattggaattgcaaattctttctgtggctctttgagatcagccagctggctttccttttggctcagctggtaaagaatctgcctgcaatgcctgggatcagtccccgagttgggaagatcccctggagaagggaaaggctacccactcctgtattctggcctggaaaattctatggactatacagttgccaagagttgggcaggactgagtgactttcacttgagatcagcaccttctttccaagatcctgccagtctcaacacccaggagagtctttttcaggcatcctggagccctcctttggaaacttaatgatcagggaagacaggacccccagctcccagtctctgcacaagggcaggagtctaactgttaccaaccagcaaacatagataatcttaccaccccgagcaacctcccccaacatcctccaacagtttacaactagtgttccacaggacttaaaatctctatcaattttttgtttcaggaaaattgaactcagtttctctcccttactgcaagagtcttgaataaaatctttcttgccactttaaagaaacatccagaggcatttttcttttacaataggaagagacagggaatctagagaccctttcagaagctgtctaccactgcgtgttactagactgcatgtatataatcaaaaatgtcatttcagctccttttaactgatactttttttttttttttggcatatctacatagtaaagagacacatttggtgttgtgaagttgagctggcagattataatggatacaaaaaaaagctttaatatcctttataggatcaatgctatttagatgacctgctactgacaacctacagaatcaccaagaaaaaaacccacttggtacaaccagaattaccacatctcagcagtacccccttcaaaggggaaaaagattaatttctcaccggtaaccggtaatctgtgccccattagaccgagggctgcccctggccctcatcacgaatattcaccaaatgaaaacaaacacaatttggtagaaataaacaaacctccactgccttcattgggaatttactatactacagccaggcttgacattaacatcttaatagctctgacagaatcacttaagaacccagcttcatgtaaacaggaaaaaaaaaaaaaaagttaatgaggagaaaa

SEQ ID NO: 59695 - DNA, 1707 bp, Bovine  19866880386512
  misc_feature (1)..(1): n is a, c, g, or t
ntccccccttccctacatgggcttagctggtatagaatctgcctgcaatgaaggagacctcggtttgattcttggttgggaagatccccttgagaagggatagggtgtccactccagtattcttgggcttcgcttgcggctcagctaggaaataatctgcctgaaatgccagagacctgggttcgatccctgggttgggaagatcccctagagaagggaaagcctacccacttcagtagtcagccctggagaattccatggactgtataatccatgtggtcgtcaagagtcagacacaactgagcggctttcactttcctcttccccatcaaatgcagtaaaactctccaatcaataagcctgtaaaagactcctctataaaaatccagaagtatcctggggcaacccaccaggtgcaatgacagttcactgcactgccatgtaatgtgttaaatgtttcagtttggtgtaaaagtggcttccctgggagtcagacacaaagaatctgactgcaatgaaggagatggtttggggagaaaggtaatccctagttcaggaagatcccctggaggagggcatggcaacccactccagtattcttgcctggagaatcccatggacagaggagcctggtgggctacagtccatggggtcgcaaaaagttgaatacgactgaactcctcttgggtggaacaaactcttcagtggcctcataatgtataaaggttaaatgtcagggacctggtggttatttatttccaaagtgttaaacacactgggctctgataaacatgctcaatgtgtcacagtcaattagaaagccttccagagtgaacgagcttctgactctgaggaatgccactggcatgagataaacagagagctggacaatgtccgggaccaccaccttccgtcagataccaaatgcaatcccaaccgaccgcaaaggcaagcgtgcaaaggagctgctcgctctttgggactaaaaatatattgtttttcttcaggcagtggggtttcttgtgactccagcacaactttgtgtagctcaaagataaagaatgggcatcatacatcacaagtttcaactgggctctttctgtaaggatgggacagtaggtatatatgcatcaggatggacagatggaactagaaatgtcttctttacagtgtgaccaaaccttagtctgagtcatgcctaggcaaaggaccccttagggagagcaccctggtcataaagagtccgacttgctttgttgttgttctcccgctaagttgtgtccaactcttagctgcccatgggctgcagcacactagtcccctgtccttcactatctcctggagttgctcaaacgcacgtccattgagctaccgtgacggaaaactggtatgtgtaaagggttgatgccaaattacatgctgcaaagttatacaaaggtcaacagaggtcctttttgccaacatagatctgtctagtcaaggctatggtttttccagtaatcatgtacagacgtgtaagttggactataaagaaagctgagcaccaaagaattgatgcttttgaactgtggtgttggagagtccctcggactgcaaggagattcaaccagtccttcctaaaggagatcagtcctgagtgttcattgaaaggactgatgctaaagctgaaactccaatccttggccacctgatgcaaagaacagactc

SEQ ID NO: 59696 - DNA, 920 bp, Bovine  19866880511080
  misc_feature (1)..(1): n is a, c, g, or t
naggaaggaaaggaaaaaagaaagaagagaaagagagaggcagagtagtagagtaaaaaaaagtaaagaaacaggagaacggaaggaggcaaggaaggaggggagagagaaggcaggccatccttacaaagtgcactcttgaagccagtgcatccctcgcaccaatggaaaatgaactcacccacactggtcgctccgctctgaaaggacgcagttgagagaagtcctttctttattgtgtggttttaaagactattctttgacctctgctatttatgacttgaaagctgtgaagacagggccaggcccctttggctccaaaaggcgctgacacacaaaagcttttcacctttgttccacgtacctcattccaccccccacccccttgactcaggacacatccctaccgcagccccctggtttcacagactgaattctcccctttctctggcccagttacagccattgccgagctgacaagtggccaccttcactcctttgcagggaatgaagccctggtcgtcaccacccggctgagagggggtctggtaggaatatagatgtcttgtcatctcacgtcagttaaccatgaaattgtaggcagaatggttcaggaaaccaagcaacgcacgggggcaagtttcagccacaatgtgggatttctcgagttattcttttacgatttacagatttatctgttccctttctcactcttaatagcattcgagacagttttcaaagttccatcggatatagccagaaaaacagataaaaactggacaataaaaactggatcagtgataaagctagttcccaaaatacatgagataaatttcagtaaccttgctaaagtaagtgattttatttaccgctgagccttccaacagccaactctaaggggaaaatacagtgtccaaggg

SEQ ID NO: 59697 - DNA, 1943 bp, Bovine  19866880638956
  misc_feature (1)..(1): n is a, c, g, or t
nattatttttattagtttttcatttcatcttcatcatacaagggtttctttcagtaaaacggcttccagtttgatgggggcaaaatggatctttgcgtttccctcctgagtcgcaggggtgcagatggcaaaataaccccttataacaacgcttcgggtggaaacggtcctttcctttttttttgagatgaacttggtagactcctccaaccagctgaggctgatggtgaaaatgtaaagtgaaaattcagcgctgcgtgtgtgttttcaactagctggggaacacacattatgtccctgaggaccacttggccagtgtaactttggagagaggtctgtgggggagaccataggtttcatttcaagaggagccgaaggaagcctgtctcctgcttttttcgagatggcgaggattatccctacccgaaaaaataggttccctagcaacaagagataagagaacgtactcataaatttcccctacctactcatttaaaaaaaaaaaaaaatgctgtgaagcagatggtttggatcaggcaggtattccagggtcttaatttactcagtgtcggtacatggagcataaatattgaagtgtttgcacgctgccgtttgcaaaactgcagcctgacaactctttcaaagaggagaggtttccaaagacccagcttccccccatcaataatccaaacaggatgctggcagagagaaagccacgggggacccagatccctgggcatgtgtgaaggaaataggcagggcagagaattcaggatgctcggtatagcacaggataaaaaagaaagcaaagctgtcagaaggataactgggaagaaacggaggtctggagttcaaaactggaaacggttgcacattggcaagaaatctttacaaaatctatttattttatgtagctatgcaatgtagcatcggacagtgccgcttccaaatgaagctctatctttgcatttacccgactccattgctttttttaaaaaattgccttacctggctacatcttggtggaggtggttcctgggctttatgactaaaggtacctcatgtgtgtatagaagtgcgtcaggaggcagttttgccctgggtctcgggtgggaaagagctaagagatgagaattttcactcacaggtcagaaatcgaaaagctctttgtcccttccactgtaaattattgaaaataatttccgtcttgtgtctgtgcgcaatgaaaacttcagtccctttaatgtttctctggtgctcataacctagattcttactctgctaagaccaggatgtgatccacggacaagctatttttttatttatatttttcttataatttttgtcaagtacagctgatgtatagtattacatgtttcaggggtacagtatagtgactcacaattttttatgtgtctgtgattcataatttttaaaggttatactccatttatggttataaaatattgggtatattccctatgctatacactataaattttgaaaatgaaatttgaaacattcataaatataagtatatatatatatacatatatatatatatacagtccatgaaattctctgggccagaatactggagtgggttgcctttcctttcttctccagtggatcttcccaatccagggatcaaacccaggtctcctgcattgcaggcggattctttaccagctgagccaccagggaagcccaagaatactggagtgggtagcctatcccttctccagcggatcttcccaacccaggaatagaaacagtttctcctgcattgcaggtggattctttaccaacttagctatcagggaagcacatacagttacatataaacatctctgtctctgtctttctcttctctcactggtatatccacctgagtcgtgtgtctctttttaagacatgcagatatattttcccttcatatacat

SEQ ID NO: 59698 - DNA, 2208 bp, Bovine  19866880641766
  misc_feature (1)..(1): n is a, c, g, or t
nccatctcccgggttcactcaaactcacgtccactgagttggtgatgccatccagccatctcatcctctgtcgtccccttctcctcctgcccccaatccctcccagcatcacagtcttttccaatgaatcaactcttcgcgtgaggtggccgaaatactggagtttcagcttcagcatcattccttccaaagaacacccagggctgatctccttcagaatggactggttggatgtccttgcagtccaagggactctcaagagtcttctccaacaccacagttccaaagcatcaattcttctgtgctcagccttcttcacagtccaactctcacatccatacatgaccacaggaaaaaacatagccttgactagacggacctttgtaggcaaagtaatgtctctgcttttgaatatgctatctaggttggtcataactttccttccaaggagtgtcttttaatttcatggctgcagtcaccatctgcagtgattttggagccccccaaaataaagtctgacactgtttccactgtttccccatctatttcccagggtataactttagttaaagcagtcatcaggaagaaactgtttatggcgtcagatgcagatgacttatttttagaacaaacaccttacattttcaataggaaaaaaataaatgagtctgtgcattggaggtgtgagataaaattaacatgaggcggacaggaacaatgcagattgtgtgggtaggaatttatttcccttttggcttccaagaatcagtgctatcagagtaaaaattggccctcttcaagagataacgaggtttcgtgccagctttgttttgttattattcttcatgctattatttttggcttgcacacaagctgcctttctgcagcaaggattggaaaatggtttctccacgtttgacataaatgtaaagtctgtccattcctgagcctgcatgttttgcaaaaatatcatgcaccagcatcttcgttctagtttggaacggattcaggaaaaatgtccttggctccagagtggctttaaacccggtctggacgctctggaaggctggactgggtttcagcacatttccctgtgccccttgcagtaaggttggagacccgggggcgacactgagacctgagcctagaaatagacacagctctgtttctccatgctacctggcccctggcacattttgcacagagatgcaccgtctgaaaggaacataagacagtcacacgtgaaaggccacaaaaacagcgagaaagaaacgtctatctcaccgagaacgcctcgctcacctcgccaaggtttacagcctgtgggcgcctgattcaggctgccctgggtttcaggaaccggtgaacgccagagataaaaacaggaggctggcttcccgtggggttttgcaagttcctctgcaatcctgaaggcctttagccgagtcttccagtggcgataggcgtgtggaccccaagggtctgtggcatcagctggcctatttgacccggagccccgggggtgccgactccctctcttaaactgtcgtctccttgtgttttgatgtgcgagtagcggactgttctctgggttcctccagcctgcctcgttctgtcccgtgctggggcatttgcacgtgcagaattgttgatttgcagccctttcccccagcagggggcgctagcggcaaagaacgcgcctggctacgccggagacaagagacgtgggtccgatccctgagtgcggaagatcccctggaggagggcactgcatcctactccggtattcttgcctggacaatccccatggacagaggagcctggggagatatggtccatggcgtcgcaaagggtcagaaacgactgacgtgattgagcacgtgcgtgcacgcacacacacacagataggcacataactcttcatttccccaagaggccttttctgaccattcatgctcaggtaccaccccaaacccccgaaatctttcgcggcttactatgccagagtatataaatgatgatatgatgagtaaataaattcgtacatgaatgtgttcctaacataggagatttgatttgggtgatgtatcgtacattcagttcagttcagtcactcagtcgtgtccgactctttgcgaccccatgaatcgcagcacaccaggcctccctgtccatcaccaactcctggagttcacccagactcacgtc

SEQ ID NO: 59699 - DNA, 1847 bp, Bovine  19866880708456
  misc_feature (1)..(1): n is a, c, g, or t
natgtgaataatagagaggatggcaaattagctcgacatgaatctcaagagctttgcagaaagatgggtaaaaagttaaaggagagagtggccctaaagaggattttgagtttttaggctgaatgattgaatgaatattcatgtttttcattaacatggagattccagggagaggacttggtttggggaaggcaaataagcaactggggccaggtcacagagtttacaaatcacagcctcaggcccatggcccaaagaccagacttgccacatgccattcacagcctctcatgcacagggcagaagaaacgtgtctcactcagggcacagtgacttaaagggcttttaaagaaccataaatcagaacggattgatttgagtcgagtccacacctcaggatagaaatactgtttcagggaagaacctgtttacgttaacctttgcttcccagtgcttttactaaaagggtacctctgtacataaaggcctgcctcggggaaccctgccctctgcctgaaagttaacacattccccttcccaactgtccccaaggctggccattccaggagatatttgcaagatcaatggccttttaaactttacttcctaatctcctgtctctgcgtgttctataaaagaacctggcatccagactccagtaagacagttattttgagacatcagtctgccatcttctcagtctgctggctctcccaataaagtcattattccttgctgcatcacctcgtctcccaacttacttgcctgtcatgcactcagcagagcaaatttggactcggtaagaatatggtggtggtttatgcacatatggacagagcaatatcagaaagaatgaggcaggtaaagaaaggacatttcattgaccaaaaatgacattctcattcttccttccaaatatcagagggcaagtaccactgtcccatttccattagacactagggattcagaaagagccttcaactccatacattaaggatcttaaggcttgatttatactactataaaggcattcttgatgcactcttacaagtgaaaggagaatgcaggccgcctagccttgacttcctcctgagcaaaacacaacctctcaacagatggcagctaatgtaataacgtacaagctttctgcacagtggctcacagagggctggagatgggactcacccaacctaggttattttttttcctcccaaactctgtcccaggagtgagcagaaaatgatttagaagtcaaagagaagagcctccgagtgtgcataattcaacattccaccagagttcacgtctcctaataatattctccattaccagttggaaaacaaaagttgtaaggcgtttcattgtctttttgtctccaagtgacaaagagatgaaataaacatacgtgggatgccaagcataaaagcagagaatgggtgcaggacggagctgcatcccagacccttaaaatacagcaaaccgatgtgttggtggcaaacctgccctggggtcttgaaattagtgtctgtctttaaagcaacaggctttcctggggaacaggacacttttcgatgtagctcctcgcagtaggttggggatggccgagatttacagttgattaacctgcatagctgagttgctttctcaaaggcttctaggaagggattacttctgtgcccaaagagcccgagagaatggggagggcggctcgcggccgtaatgtgcattccccaggctccgtacactgtgctcattgaagcagataaagcaaagttaaagaagcatttagttcttcagaatggcagccttaataagtatctttttttgtgtggaaggatttaggagga

SEQ ID NO: 59700 - DNA, 1326 bp, Bovine  19866880862611
  misc_feature (1)..(1): n is a, c, g, or t
ncagttgggctccaagtcggataactttctagatctgggtttctgcaaagcagacccccaagacagggtctgagttcaggcaacaggctgatgtgtgagcaaatctgggaggcagcttggcagactgaggaaatgagaaagggaagtgaaggcagacgatgaagggagcctcgcccagcccatgagtgtgagcgccatgggcagaggaagccccacctccctggggccctgagggagctggtatagctctgtacctcagaagctctccttgtacaggaggagggagctggggtatttatactctggctcccagagctgtgtgccaggtgccagtggcatctgctccccgcatcatgatgagtaaaaatgtctccagacagggccccatgtccccagtgggtaaaatcacccaggctgagaactccactgcagaaggaagtgaggatggagtttgacacgcagctcaaaggcaccatcccttgcctgaaaaatgggttccttccctgcatccaggcaaactctcctttgaaataatgatttattattttttggctgagctgggtcttcgttgctgtgtgtgacaaagttgccggaagtgggggctgtctctagctgtggggctcgggcttgtcatcgaggcggcttctcttgttttggagcatcggctccagggcgcgtaggctcagtagctgtggtgcacaggctcagctggcctgcagcgtgtgggatcttcctggaccagggatcaaacccgtgtccgctgcactggcaggcggattcttcaacactgtggagatccagggaagtccaacccttcctttcttattcaaggtccagccatggtgctgttatttccaggtctgacacccctctagtcttgatgggagccgtcgtgtgatgttttgccgctacttctgaccttgtcagctccacgtctggggcaccctcttggagagtctgtgaactacttactattccctaataaattcattttctgtttaaactagccagagtgaagccctgtggttcacaaccaagaacccaggctgatacaatcggcctcattaagattcacccccgatccccttctaaaacctaggtcttttgttcttcaggttcagaagtcaggcagatactccaggaagagctcacaaaggccaattcccatgcctgagacccatgggaacatgccaatttccacatgaacgctgaggttcaatgctgtctctattattttccccccccctccccctttcaggactacttgagaaagtttgtaggaatcaaaattccatctgatctctacacatttatgctttttgtcct

SEQ ID NO: 59701 - DNA, 902 bp, Bovine  19866881040713
  misc_feature (1)..(1): n is a, c, g, or t
nacggagaggtaatgaggtggacatggaaggcacgaacaggataggaccaatggatgatctagggagacaagaaagggtggtctcaagaaagtgggtccaaggaccaccctggaccccctgcagaaccagctgatcacccactcccatgaatcctcatcctcgggcacttcctcagctgctgccaggacctgatcttcttggtccctcccaggccatcagtctgcccttgaatcccccgggcctaagcccagcaccctcccttctagccagcacgtcacccattgtttgtcagatctagtttctttctaactttctttaataaagacacaggactgaaaaaaaaaacaaaggtaatttggagttttaaggggctctccaatcaagttgggaatcagctgaaatagatgtgctaaagtcagagattttaaaaaacatagcagttttattgaagtattaattttggagggcaaggtttaggtctggccagaggacttgctcggagaaggcaatggcaccccactccagtactcttgcctggaaaatcccatggatggaggagcctggtaggttgcagtccatggggtccctaagagtcagacaggactgaacgacttcactttcacttttcactttcatgcattggagaaggaaatggcagaccactccagtgttcttgcctggagaatcccagggacgggggagcctggtggctgccgtctatggggtcacacagagtcggacacaactgaagtgacttagcagcagcagcagcagaggacttgctaacactctcttgagctatgattcatgtcccagaattcaagctttgctcctcagggagagatcctgcttgtctaggtttactgcatggttaagaacagatgagaatgcatggtttcaa

SEQ ID NO: 59702 - DNA, 1884 bp, Bovine  19866881657360
  misc_feature (1)..(1): n is a, c, g, or t
nctctggggtgctgcgtgctctccttctccttctggatgttgtaactctgttggttgacttttgtttcccatttggttgtgaggatttgagttgaaaagcagtaattcagagctcaatcttggtgtggtggcttgttactttgatctcagtgggagttctgttcttataagggccataactccagatgcttagtgattttccaggcgtattctgaagccaaatttggaggtgaggaagattggttttgcttgtatgaacatctggacggcttcatttggcatctgtgaaatttattggataaaggtcaaaccccagaaacataactgaatgtgactgttggaggcttttgttttgtgttaaatgctttccatgatttatgtggtaatgactgtaagtccatagagccccaggaaaatacatcctaaggaggaaaatgaaaactcaggcacccatggaaatgtgctatgtccaaatagccaaaaaaccaaagttgaacagtttatcttttacagtgctgtaatatgcaacagtttgaaattccagttgttccttatactttaaaacacttaaaacctatggtaatacttaccgatattcatgcagttttccctgactttgtataaatatccatttcagggacaaagttgatgtatattgagcatctcttgtccaacgtactgatgtcttttgggagtttacaaagtatttcattaagcttcctggtggctcagaggttaaagtgtctgcctccaatgtgggagacctgggttcgatccctgggtcgggaagatcccctggagaaggaagtggcaacccactccagtattcttgcttggagaatcccatggacggaggagcctggtaggctacagtccatagcgtcgcaaagagttggacacgactgagcgacttcactttctttcataagtacagtctccagtaatgtgtcaagagaagttgtaggtttatgctgctgcaagagtagaaaacttctcgagtgttgtaattaattccctttatttttaatattagtgttattattttcataagtaatgatcatggcattgttcttcacttgctaagtcgtgcctgaccctttgcaaccccacggacatgataggtttccctgtcctttccgatctccctgagtttgcttaaactcatgttcactgagtcaatgatgccatccaaccatcttgtcctctgccacccccttgattataacttcatttttaagtaaatgggatgtgataatttaggaagagagatattctatttctttaaaccagtggtggaattaaaatgtgtatggaacacataggaaaagaaatcgtgaggtgtgttaaagtttggctactgttcttttgaaaaatcggtcagtaatgcaatattgtgccagcatgatgaataaaacctgttgaatgcacatttttcagactctgctataacaccatgacagtaaatggcataatctcgaggacgccaaagaccgctgagtgctcgccaagcgaatgaagtctctcctctgggagacctgagctcttagagttcctggtctccgtgcagttgcaaatcacacagtcagcaagtctgagttagggttccacgtgccaccatagtctccagtcctccatccagtatcgctgtagggaaacatgcaagtcgatatgatctctgacttaaagggcagaagtggagaaaagagaaagaacgaagtgggaagaatgtggagcccatgaaaacaaaaacaagttacagatggtttgtttgttggttcagttgcaaagtcgtatccaactctgcgaccacatggactgcagcacaccaggctttccctgtccttcagtgtgtcctggaatttgctcacacccatgtccgttgag
